United States Patent Application Publication US 2005/0228172 A9 - sequence listing, part 114

SEQ ID NO: 531520 - DNA, 494 bp, Homo sapiens
ccccttctatcttcctcctccaccatcctgagcacgtggcttccatcctcaaggctatgacatggctgctggttcttcaaacatgagagtagaatttctatgcaggaaacagaagcagtcccaaattgaatatgttccaacgatgactaaaaagcatggggtgcttttcaactatcggcaaatacaagggttggcaaaacttttcaaattatgtatgagttctgtcttacccatgggtccacccaggaaagaatcattctgataratcaaattttaccactccacgagtaactagtatctcagtagcactgagatgtgaactctgtgaacagccaatccctgttgtaaaaaagacacaagaatgtacctcttgcactgcttatggaagcattcaactgggtataaagagtgtactcagaatgtgtctgtggagttgagctgacatgtttatatccaggaaggagtgaagcaggcccattttgttgtcagatctc

SEQ ID NO: 531521 - DNA, 638 bp, Homo sapiens
ctgtcctttgattccactgtggaacagacgttgtcctactgacctcctttaagtttccrccatggtatctgttccatgcactagctgattttgttcccatgagcttttccaagtgtactccaggcctgaacaagtgaagcttgagaaccactttattcactgctcccctgagggaatttctcctattgtgggctttacaagtgagatacttctaagaaatgaggatcaggttcccactggaaaagctggtggtagcagattcctggacaagagagaatcattttgttttcctctttttgtggttttggttttgtttctaacaatgaagctctggtcaccaccagtaaacccattggaggacactattttcttccttctctttctcacatcacccaacaagaaggaaaaagaactacagggtgaatggaaggttttccaagacatttagtttttcaaaattttctaaagcagaccacaaatcactctaactgattccagttgtaggacgatgtgagtctaagcttggatatactctgccaagcagactgggcaaagttttagccaagtccacatatggtaggtgttcaataaatagctttttgatggattggctgagtttcgttgtgccagatcaagca

SEQ ID NO: 531522 - DNA, 527 bp, Homo sapiens
ggagttgagtctggctgttttgaagtctgtatcacagtttgatttatctctttccttactcctgattctctacttcctttccacaggcgatgatgatgattctccttaataaacattattgtatgaattctgcctcagagtctgtcccccagaaaatccaacctggggcaaatayttatttaaaaaaatggaacataatgcagcaaggtgaaatgatgttgtagaagggtatttaaaacgttgggaaattcttcatgatatacattgtttagcagaaaaaacgttggaaaatagtaaattgtgcatgacatttcttcttaagaaaacaaaacctcacagatttagaatgaagataaaggcatgacaaagcagttcttggtgcagagtacattggtgactattgccttcttttgtattttttaaattttctataatgagcatatattgcttttgtaatagtataaaaaagtcaatgtttaaaagaccatccagatataagctgctttcagctccttgaatctggcatg

SEQ ID NO: 531523 - DNA, 527 bp, Homo sapiens
ggagttgagtctggctgttttgaagtctgtatcacagtttgatttatctctttccttactcctgattctctacttcctttccacaggcgatgatgatgattctccttaataaacattattgtatgaattctgcctcagagtctgtcccccagaaaatccaacctggggcaaatacttatttaaaaaaatggaacataatgcagcaaggtgaaatgatgttgtagaagggtatttaaaacgttgggaaattcttcatgatatacattgtttagcagaaaaaamgttggaaaatagtaaattgtgcatgacatttcttcttaagaaaacaaaacctcacagatttagaatgaagataaaggcatgacaaagcagttcttggtgcagagtacattggtgactattgccttcttttgtattttttaaattttctataatgagcatatattgcttttgtaatagtataaaaaagtcaatgtttaaaagaccatccagatataagctgctttcagctccttgaatctggcatg

SEQ ID NO: 531524 - DNA, 638 bp, Homo sapiens
gctgctgacacctcctccacctaatacatatttcttaaacttctcctgttgccaaaatccttttttcctactcgkgcccagtagccgtcactatcagggtctttgctgcctcttttgatagttgattgaagccttgtgaagtggaggaaatgcttcacgtgatggtgtaggagtgtgtgttttcattggggattataactgagactgcagttggaaaggatatatgttcctggagttttctgttgtagttctagtgcagatttagattccattaatatgacatagtagtatatgatgatttaaatagacttaggtgagatgatgtagaaattcagccattgtatagagcagtgctactcaaattgtggtctgtggacatagcaccagcagcagcaggagcttgttaaaatgcgatttccttgggttgcactacaaatacactgaatcagggtctctggacttgggtctctgtgtttcaccaagatctccaggagatttctgggcatggtaaagtctgaaaagctctgacctacagcaccattttcatagcaaaatgtgttgcaagtttcagagtagcaatttagaagttaacacatttatagacaacccattattaagtgcaggcatggctgacttta

SEQ ID NO: 531525 - DNA, 541 bp, Homo sapiens
tggcacccaaaccacaagtcaaaatccttcccactctcccttcacccttccataaacagaggagtctctccccatggccaccaccaccccaggcctgtggtgagtattgccaggctaccgccaaactcactcgaggcccagtggctcttcagtcrgcttgtggtgaatgcttccagccctgggactcacctttcaggagagtgggctctcctctggtccaacccagatccagaaatgccatccaagacccaaggcctggaattggggactcaagtgcctgtttggtactctaccccacggtggtcaagttggcacctaagctgatttttgctcctgatgaaggcgcttttttatgtagatagttgtcaaatttggtgttcttgtggggaggatgactggtgggggcttctatttgttcttttgctttgacaatcagtagaggcatctatttgctctggctttccatcttgctctgcctttctagaaccgtggatctgggactacattttgtaatgattaagccaatctcaagtatatttgc

SEQ ID NO: 531526 - DNA, 568 bp, Homo sapiens
cacatgaagtttctggtgtgatcagggcttggcaagaaatacagatcacagactcagaagcaggcagaaaagagtttaatgaggaggygatttgtagaggaaaggtatggtgagagaaaccacaagggaccgtgaagcccctggggtgagcagcagagtggagctgtgattatttcccagaacccaagaaaggctgaggctatcagagagggacaaccacagggactgtcaccttcagaagaagaatgcaaccactgccaaatcacagctcagtggggagggttccgggacacagacttcttagacattctctcctctctgtgtctgacctcctgccagtgcccctcattggctgaatccactggagtccagagtgcaaagaagctccggtgatgctgccatgcagatcagcctccagggcagagcagagcagaagaggatggaatctagaagcacaggtacaagatacacagctcactctccagccagcttccctgtacctccccatccactgttaacagatggctgaggatgaccaggtagatgaaatccttcaacacgaaaggta

SEQ ID NO: 531527 - DNA, 582 bp, Homo sapiens
gctgcagccattttattactatgaggcgaagccttacgaagccatggagaacagagcccagcgctaaagaaaacaagccccttggtcacatcctaagagctcctagattaggccctgactggagctacttacacaagtcagtttgagttggttccctgatgccttaactgaagtatccgatctaattacaacacggtgtgatgagaaaaatgatgtctaaggactgtaactcaaacaggggacttcagggcactattcactgagctgggatgtctgactcctggcttactgcttttttggaaccgacttgtgtatctaagctcagataagccatccctttcctttcatatttcacaatttcatgacatcttcctggagctgttgataaatcayttgattgtttcagcatggtctgaaatataagagtttcctttttcctctgtgcatcttaaaaaatttttcttaaacaatttattggacacgaaaaatgataaagaatgatttacaggttgccagacaggtgttttgttccagttctatattttaaaaaagaacatgataaatagttgatttatgcaacac

SEQ ID NO: 531528 - DNA, 582 bp, Homo sapiens
gctgcagccattttattactatgaggcgaagccttacgaagccatggagaacagagcccagcgctaaagaaaacaagccccttggtcacatcctaagagctcctagattaggccctgactggagctacttacacaagtcagtttgagttggttccctgatgccttaactgaagtatccgatctaattacaacacggtgtgatgagaaaaatgatgtctaaggactgtaactcaaacaggggacttcagggcactattcactgagctgggatgtctgactcctggcttactgcttttttggaaccgacttgtgtatctaagctcagataagccatccctttcctttcatatttcacaatttcatgacatcttcctggagctgttgataaatcacttgattgtttcagcatggtctgaaatataagagtttcctttttcctstgtgcatcttaaaaaatttttcttaaacaatttattggacacgaaaaatgataaagaatgatttacaggttgccagacaggtgttttgttccagttctatattttaaaaaagaacatgataaatagttgatttatgcaacac

SEQ ID NO: 531529 - DNA, 536 bp, Homo sapiens
gtctagagattttcagagttcagagttgaatccaacattgcctttctagagggcattagtgagccatcagaatgtctagggatgaaggccctggaggccactgcccccacccactcgacacctctagtgacatttaagactggrgtggagagcaagtagtcccctgcaagctgtaatgggtccgcagtctttctctcatgctcttgaagttcgtgatgagtactcattagtcagcctcacgtcagtgctgatgtgaggctctggactcaatttcctggtctgaggtattcctcttgcagttgccttctgttcagccagaaaggcagacaaagatggcagcaaggtgtcttcaaaactctagaaattaagttatcaaatgaaacataaacaatttttgaattacagaattgagaaaaaaaaaaaaaaactagtgagccctgtctctgcgagaaggttgtcatctttggaaacttttgaggttgagaaccagaccctgagacatggcaggctatctgaggacagaccagcatgtgaga

SEQ ID NO: 531530 - DNA, 536 bp, Homo sapiens
gtctagagattttcagagttcagagttgaatccaacattgcctttctagagggcattagtgagccatcagaatgtctagggatgaaggccctggaggccactgcccccacccactcgacacctctagtgacatttaagactggagtggagagcaagtagtcccctgcaagctgtaatgggtccgcagtctttctctcatgctcttgamgttcgtgatgagtactcattagtcagcctcacgtcagtgctgatgtgaggctctggactcaatttcctggtctgaggtattcctcttgcagttgccttctgttcagccagaaaggcagacaaagatggcagcaaggtgtcttcaaaactctagaaattaagttatcaaatgaaacataaacaatttttgaattacagaattgagaaaaaaaaaaaaaaactagtgagccctgtctctgcgagaaggttgtcatctttggaaacttttgaggttgagaaccagaccctgagacatggcaggctatctgaggacagaccagcatgtgaga

SEQ ID NO: 531531 - DNA, 544 bp, Homo sapiens
aattatcaaaactgtcttttaatggcagtattatacttaaaggcccaggagttattaacaggatgactgtatacctcctggttgacacctgttttcccagcataattgtcgcatcttctttcactcttaattgctcccgtttgccaataatttatgtggttgcctataaataagggaatattggggatttagtgggagttcatgtagaaggaggccctgactatcatccctacataggctgctgtccacaattataaataagttgaatgtgatgagatacatgttggaaaaaaaatgagtacgtgtttgcctctgtcttggcacrctgatagcatcacctggcttcatacccataaggagctttataaagaacggtggtgctgacagagaagggattctcaagttcctaagagcttcttggtcctcaatcatttgctccaattctctaaagctgctctgcctatacaattttatcagcttgcaggagagtcagactaagataaggtttgctccaactactgaatatttcttctagaaactcacc

SEQ ID NO: 531532 - DNA, 555 bp, Homo sapiens
aggagaagaagccaatgaagaagattctgaaggtgccagaagctaagatgggaatgcaccagtttttggcaataacctgacaatcagacagaagatgaagagtaactgatgataagaccaaactggtcatagtacagaagtaaaaagagaaggtggtggcagtagagtaagctgtggtctttgaaagacagttgcaattcagatatgtgtgaaacgttggagaatgtcaaatttgaaacaaattcttctcttcagtcaaaaaaccttgccccacaaacttaaggagcaaaactctttgagctttctagatacttgcctgaaactactactttgtaattgctacattggyaaaagcttaccctaatagcaattgcttacctagcaattgctagggtaagcttcggcaaattcattcaggaacagaactcttcgggttccatcaagaaagaagtgctgggactccagtgtgttaggcagcattctaatgaagttttcccaagagtcttctccctggttagtcaatcaaacactaatctagatggaattaaggatgct

SEQ ID NO: 531533 - DNA, 248 bp, Homo sapiens
aatgggaggggtggttcagttgactcttattcttcatatcagccagattcatttttgcccttaactattacttataagtaggcatagcaggatgagatcaaaagagaaactggccctgagcctttgctaasaacctttcattaaatctggtcccttttcctagcaggcataaagggccattgccacttagcttagagagtctccatgcctgagcaacagcttggtagtcaccaagaaaagaagagcag

SEQ ID NO: 531534 - DNA, 514 bp, Homo sapiens
cctctgcttggtttgcgtttccctttaggaaccctgggttgaagsctttccttgtggggtttaccattttgaggtgcatttgttcattggtatccatggaggattggttctagaaccccagagaatagcaaaatccatacatgtttaagttccttatataaaatggtctagtatttgcatatggcctacacagaccttcttgtaaacattaaatgatctgtagattacttataatacctaattcaaggtaaatgctatgtaaatagttgatacactgtattgttttaatttgtattatttttattgttgtattgttatttttagttgtttttctttttgactttatttgtgatccatggttggttgaatccagagatgtataacatacagatatggagggccaactgcacttacactctcactgatgggaagagctgctatcttaataaacagtccatttctaagggtggggtgggccagccctttactgattcacatgaagtacgtttttggc

SEQ ID NO: 531535 - DNA, 621 bp, Homo sapiens
ctgattttttttgttaacttttttgtagagatgggggggtggtctcaccatgttgctcaggctgrtctcaaacccctgagctcaagcaatcctcttgccttggcctcctaacatgctgggattacaggcatgaagcaccagtcctgtcctatttactaatttttagaacacacatatttttattaatgacttatcacatttttaataaaaatttattcccacagaacaccttgaggattgtaaccctgtgaccatctatacctgccatccattcctgctagcatctttgaaatatgtagcaacaaattgaccaggaagtttgagaagtgaatccttagtaaaggtaattattaaccatggtatgtacacagtcgaggtgaacacattgcttgagggatcaatctcttcaaggactttaaaagcactgcaccgggcccaagctctagatgttgtatagaggaccaggggcagtcaaagttctccacccattttcctaagccataacggtaggagagaaatgttcttgttaaccacaagctgggttacgtctttgcagtgttgttttgtacacactgtggggaatcagggcaaaggaaaagcctatcctctcagaacctccct

SEQ ID NO: 531536 - DNA, 560 bp, Homo sapiens
ttctctcccttctttcacaaggaaagtcatgtctgtgctttataaactaatatatgctttagattttaaaaaaatcatccatacacataactttatttctgcaattttaaaaaaattaacatctatattatcacattcactatcttttatagtcaaactgtttattactaaattttccctttggagaatcattatggactttaatagattcaaatagtttcaattatctataatcatttccctttttttgctcaaaccttagggtgtagccaatgaaagccaagatatttctattgtagcagtcttgttgcctgaagtattacctgagctccttgtctcacaaccaagaaaattaaggaacgtggacaccaagagtgaggtgggagcaaaagtttaataggcagaagaggaatgttctccacagcagagagggagtccgagtgggttgccgtttttacagttgaatacaaagcttttgtaagacactyctctcttctctgtagctgttgtgtaacttcccttatatgtgaagctgtctgtgtaactccccttatctgtgc

SEQ ID NO: 531537 - DNA, 657 bp, Homo sapiens
ttgacagcctgtccagaattcaaggctaggctctagtccttgcatctcagggctgcagaacacctggcatragagatgcgcccttctggagaatcaggcatgatgggagctgggtggctcacacaccaggcatgccagctctagggaccatttcccaactggccagtgagaaggctcattttaatagagcaggacagtttttctgtttctagacctggacagccaagcaatatcataatcaacacagcaggggcaggagggctggagcaggcgggggcctaaagtatattagcgcagcagtgacgagttttaaagaactttcataccctctagctccttcattcataacctggtgagttggtttgctcaaggattattatcccaagctatcttaaaactaaagtctaaattgccatttataacttggtatggactttcacaactctttcctaagcaattaagatataatggagaaactcagctccccagaatgggagcccctcaaaataataatatttaaggaatcttaagtagttgttcaacatttctaaatgcaaagtgtattaaattacatattattgatacaattatttacttaagattaatttgctcccttacttccactagccaatgtaaagtttaatgatctgaaaaaaa

SEQ ID NO: 531538 - DNA, 523 bp, Homo sapiens
ctggtagcaagttatagagttggttcaagatttatagtgatgctgaaacagtgttcctgcttactgctrggagtaatgacaaggcacctccagcagtgatttccagcaagtccctgagctggtgggatttccagcctgtcaatgaaaagagctggagccaagttcaatgaccacttcagggtccacagctagcatctgtgttaacagacctgtcacccaaggcacaagtggctgtgacttctccccggtccttgggtaataattctggtggcaggaccaaggccaagcagcactatagttgagtagacaagacaaggaggtcatttatttatctgtaactgagaccaagttcagcaagcatcttacctaggcattgatctgacctcccacaacagccttcctcagtcttgggctccactcaggtttttcagtctttcacctagtctcaaaactctcaaaaaggcacttttttcatgaatggtttctaaattagtgttgctgtgtaaggatatctgcagaaaac

SEQ ID NO: 531539 - DNA, 523 bp, Homo sapiens
ctggtagcaagttatagagttggttcaagatttatagtgatgctgaaacagtgttcctgcttactgctaggagtaatgacaaggcacctccagcagtgatttccagcaagtccctgagctggtgggatttccagcctgtcaatgaaaagagctggagccaagttcaatgaccacttcagggtccacagctagcatctgtgttaacagacctgtcacccaaggcacaagtggctgtgacttctccccggtccttgggtaataattctggtggcaggaccaaggccaagyagcactatagttgagtagacaagacaaggaggtcatttatttatctgtaactgagaccaagttcagcaagcatcttacctaggcattgatctgacctcccacaacagccttcctcagtcttgggctccactcaggtttttcagtctttcacctagtctcaaaactctcaaaaaggcacttttttcatgaatggtttctaaattagtgttgctgtgtaaggatatctgcagaaaac

SEQ ID NO: 531540 - DNA, 247 bp, Homo sapiens
accttgatagcaaacccaccccagcactgggtagttaaatggcactttcagcygagctcatttctggcaccagaaacagaggatcataaaccagaactctaacctcaagatggattctatttgcgagatacgaatggtggtttctaagccttgagcagtgttaagcacccctgtttccaggagaagttttgttcaaggctgcagtggtcaaggctgcgtggtgcttccctgtttgcatagcaggctt

SEQ ID NO: 531541 - DNA, 480 bp, Homo sapiens
ttctggcaccagaaacagaggatcataaaccagaactctaacctyaagatggattctatttgcgagatacgaatggtggtttctaagccttgagcagtgttaagcacccctgtttccaggagaagttttgttcaaggctgcagtggtcaaggctgcgtggtgcttccctgtttgcatagcaggcttcttcgcataaacactttgacctcctggcagctctgcaaggtagataagcttgtcagagattaccacttgattttctccaagaggaaactgaggctcagtgagggccagggctttgttggagcttgcacagctagatctgaccttctgctataagacccctggactagaatttcttcctctcatgattttgttcacagaatataattccaggaggttttctcacctttaatcagtactcttggacctggtaatctaaaatgggaagttgaggctttagagagattacattccctg

SEQ ID NO: 531542 - DNA, 284 bp, Homo sapiens
ggggggcatatctccctgggccctgataygttacacttcccagaaacctagagtgaagcatgtgaagttgacagtcctgttttatttcaggagggagagggaccatgcactctacatgaataaccagaggagaaatgcttattcatctttttccagaaaatttacattccttctaacccaagacccattgcaaacatctccctacagaaatgatgacccttgtgatttatggtccaaaactgactcccatccaaaaggattatgagacactctgggcctgaaaa

SEQ ID NO: 531543 - DNA, 676 bp, Homo sapiens
tggggggcatatctccctgggccctgatacgttacacttyccagaaacctagagtgaagcatgtgaagttgacagtcctgttttatttcaggagggagagggaccatgcactctacatgaataaccagaggagaaatgcttattcatctttttccagaaaatttacattccttctaacccaagacccattgcaaacatctccctacagaaatgatgacccttgtgatttatggtccaaaactgactcccatccaaaaggattatgagacactctgggcctgaaaagtgagtttgtgggacacacaaacacatccacatatgcgcattttctctctgtccctcaccctctctcttgctctttctctccctctttcaaacctagtaatgagctcctgcattaggctgcagacttgctgtggcccatgatgccagtgtggcattggaattcatctcacttggaaagactattacagtgttttttggtgttttgaacaagcattctgggctgttcccatagaaaggtattacttggtgctgcatattaaaaaaaaatgcatgttacaattctgttctcattctccacttccatgtggtcccttacctcgttctctcctccacctattgccagaatgattattccaggacacaaatcttactgtttgtctccttaacacct

SEQ ID NO: 531544 - DNA, 676 bp, Homo sapiens
tggggggcatatctccctgggccctgatacgttacacttcccagaaacctagagtgaagcatgtgaagttgacagtcctgttttatttcaggagggagagggaccatgcactctacatgaataaccagaggagaaatgcttattcatctttttccagaaaatttacattccttctaacccaagacccattgcaaacatctccctacagaaatgatgacccttgtgatttatggtccaaaactgactcccatccaaaaggattatgagacactctgggcctgaaaagtgagtttgtgggacacacaaacacatccacatatgcgcattttctctctgtccctcaccctctctcttgctctttctctccctctttcaaacctagtaatgagctcctgcattaggctgcagacttgctgtggcccatgatgccagtgtggcattggaattcatctcacttggaaagactrttacagtgttttttggtgttttgaacaagcattctgggctgttcccatagaaaggtattacttggtgctgcatattaaaaaaaaatgcatgttacaattctgttctcattctccacttccatgtggtcccttacctcgttctctcctccacctattgccagaatgattattccaggacacaaatcttactgtttgtctccttaacacct

SEQ ID NO: 531545 - DNA, 523 bp, Homo sapiens
cacagctggtcaaggggcaggatggggtggcccaagggcaaagataaagatgaagaaatgaatacagcatagcactgagagaaacaggggaaaatagaagaaagaataagaaagatggagagtagtgaatgatgtygagagaattttgtttttatttgtttgattcttccaaatccttgaattggttcctttgtaaaaacatacaaacaaactgagaatacaggtccatataaattcttaaggattttagaggtcaaagctgttactgaatacaactccatgtagaaattggtccatgtaagttcatatgtaattttctggttacaagagagttaagaattgactatctagttttgcgtgtgtgtgtgtgtgtgtgtgtgtgtgtgtgtgtgtgtgtgtgcgttttgagaccagactgacagacttactaatgcccattaaataaattattgaaccaccaaacagatttgttaggcatggggaatgaataaagagagtctcagaagacaagtctcaatactaa

SEQ ID NO: 531546 - DNA, 307 bp, Homo sapiens
catagtccaataaatacgaatgttgttagggattctttgagcttaggatagggcagagtggacactttggctctagttaatyattaacccctggttcacaacaggtacctgtagaccacttgcttctcaaagatccatttgaggtacctgcagtgcaggagcctccttatacccttcttaaaggtttcagcctcggagatgaatgtagcagttcttaagaccttccaacccatgtcctcctaagggtaagggaaccttgctaaattaaatatcatcttcagaaaccttctagagctgggatgcatca

SEQ ID NO: 531547 - DNA, 497 bp, Homo sapiens
agaaaagatcatagaacaatgtagcattgagcagattctctccattgattctgtcattgtttctgcacatggagagatgatgtcagtgattcagctgcagctctgaaatgcctcggtcctcttgaggaatgccagttctctgggaaaaaaaatgaaaatcctctgggcagggagacctatgcaagttcttcaaagcaatggtgcttagacccataaggaaagaagtatcccactccaaattctaattatttccatctttgtgtattctcyttttgttttgctctccatgtgcatatatttttcgtgtgagaggtcataacggtttcatgtagtaatctttgttttttcacttaccatcatatcacaaagagctctctgtattactacaagatctttacaatggatgaatggtactgtattaggttcctattgctgctgtaagaattattaccataaatttagtggtttaaagcaacttaaatgtagtgtctcacagt

SEQ ID NO: 531548 - DNA, 497 bp, Homo sapiens
agaaaagatcatagaacaatgtagcattgagcagattctctccattgattctgtcattgtttctgcacatggagagatgatgtcagtgattcagctgcagctctgaaatgcctcggtcctcttgaggaatgccagttctctgggaaaaaaaatgaaaatcctctgggcagggagacctatgcaagttcttcaaagcaatggtgcttagacccataaggaaagaagtatcccactccaaattctaattatttccatctttgtgtattctccttttgttttgctctccatgtgcatatatttttcgtgtgagaggtcataacggtttcatgtagtaatctttgttttttcacttaccatcatatcacaaagagctctctgtattactacaagatctttacaatggatgaatggtactgtattaggttcctattgctgctgtaagaattattaccataaatttagtgrtttaaagcaacttaaatgtagtgtctcacagt

SEQ ID NO: 531549 - DNA, 613 bp, Homo sapiens
accaaaatgctaaagaccaaaattgcctctaaaatgtaaaacgttatatctcggatacgcccttctgcatacaagaggcctgagccaagcgatgaggctaatccctggcaaactccttaaacccgtcacagaagaaggtcaaagagcatcttcttaaaacccacaagccagcattccttgagatggcagtggcagaaaaagtctgatgtaaaatgacaaaagggggtcagatgatagccctgaacttataatcaggactgaaggtgaacagggcaaagaatccagaaagagggtgagtttgctgcctgatcatcaagctcatctgctcttctcccttggcacaaagttaaactgcatttttttcagcctccctggaggttaagtgcaaatcagagagatgcatgaaaaagtgatgtttctcatgcatttcagaagaaaccatcaaaacctcccaggtgtgcttcttccggctcttttcccatttgcaactctgcaactcataggctaggaaatgacctcaggaaggactttgaagtcatcagyggaaggtggatgaatgactttgtggaatccaggcctgagcttgattcctttcctggatgaccagaaatat

SEQ ID NO: 531550 - DNA, 545 bp, Homo sapiens
agtttttgaagttgacctgatctgaagctgagatcctcatcttcacacttttgggtgctgaaggaggaattgtatctggtgggggttttctttcttatacagtgaaggaggttcactgttttttacaagtgactccaataggtttccctctacccacccgactctcttttttttcaggcaaaactacctggtgtgtctggaagtgtctgtttctggaattccactcacaggggaaaattagcctgaaccagatggcttgaaacagtcctcatgggtgaggggtggaaggagacactggaaaaggggactgaaatcagctttaggaactttctgtcctttaatctcaagaatacrgaaagtgaatgtaacatgttatgagaaacctcatattgcctgtagatcttcactttcaatacacacacacgcacacgcacacgcacacaggctactgctattggcaaatgcctcctctccagccatcagaggaaagaagctatccagacggtcccaacgcaccagggatagatggagtctccgcagccctc

SEQ ID NO: 531551 - DNA, 475 bp, Homo sapiens
aatgcacttgaaaataactgccwttattctgtaccaaaaaaaaatatatgttagtactttgaaacatagctgtcatttgaattagaaaattaacttcacaaatttcaatcatcacaagaacttagatttataactagcatgatctgatacttggtgtgacataatttccacatattggaagactatccctataaatcaaggtacccgtctgaaataatagggaagaatgtggcaaatgaactaaacacaagtgaaatgcaatatttgctagaaaatgtcttagtatttctaagaaatacaccaaaacaaattttaaattagttatggcatagtctgtaacaatgtaatgagatttttcatatacaaaaacacaaagccctatatccaaataaacctgagtcaaaaattgggaaaatagagaaagactgaccttccattcagtaagaagccaagcaatagaccctgtggagtgctg

SEQ ID NO: 531552 - DNA, 509 bp, Homo sapiens
ttaaatctcatatccaatgtggttgcacaatgcacttgaaaataactgccattattctgtaccaaaaaaaaatatatgttagtactttgaaacatagctgycatttgaattagaaaattaacttcacaaatttcaatcatcacaagaacttagatttataactagcatgatctgatacttggtgtgacataatttccacatattggaagactatccctataaatcaaggtacccgtctgaaataatagggaagaatgtggcaaatgaactaaacacaagtgaaatgcaatatttgctagaaaatgtcttagtatttctaagaaatacaccaaaacaaattttaaattagttatggcatagtctgtaacaatgtaatgagatttttcatatacaaaaacacaaagccctatatccaaataaacctgagtcaaaaattgggaaaatagagaaagactgaccttccattcagtaagaagccaagcaatagaccctgtggagtgctgtcatca

SEQ ID NO: 531553 - DNA, 509 bp, Homo sapiens
ttaaatctcatatccaatgtggttgcacaatgcacttgaaaataactgccattattctgtaccaaaaaaaaatatatgttagtactttgaaacatagctgtcatttgaattrgaaaattaacttcacaaatttcaatcatcacaagaacttagatttataactagcatgatctgatacttggtgtgacataatttccacatattggaagactatccctataaatcaaggtacccgtctgaaataatagggaagaatgtggcaaatgaactaaacacaagtgaaatgcaatatttgctagaaaatgtcttagtatttctaagaaatacaccaaaacaaattttaaattagttatggcatagtctgtaacaatgtaatgagatttttcatatacaaaaacacaaagccctatatccaaataaacctgagtcaaaaattgggaaaatagagaaagactgaccttccattcagtaagaagccaagcaatagaccctgtggagtgctgtcatca

SEQ ID NO: 531554 - DNA, 475 bp, Homo sapiens
aatgcacttgaaaataactgccattattctgtaccaaaaaaaaatatatgttagtactttgaaacatagctgtcatttgaattagaaaattaacttcacaaatttcaatcatcacaagawcttagatttataactagcatgatctgatacttggtgtgacataatttccacatattggaagactatccctataaatcaaggtacccgtctgaaataatagggaagaatgtggcaaatgaactaaacacaagtgaaatgcaatatttgctagaaaatgtcttagtatttctaagaaatacaccaaaacaaattttaaattagttatggcatagtctgtaacaatgtaatgagatttttcatatacaaaaacacaaagccctatatccaaataaacctgagtcaaaaattgggaaaatagagaaagactgaccttccattcagtaagaagccaagcaatagaccctgtggagtgctg

SEQ ID NO: 531555 - DNA, 437 bp, Homo sapiens
aatagctaagccgacgttcaaatccaagcagcctaattacaattccacacttctaacctctaaccttggtgctctgctgcctccctaagcaccctagccagggtgccaggtacatgatgttgaaggctaaaggtcacaggaagttggagaggactggggtagccagggagggcttcaccagctcgattgtaccttacctgggccttgaagactggggaggcttgggacaggaggggtaggagggcacaactctaagcagggctgggtgtggaaccagcctggatattgcaagactggagtcaatgagcagcacctggtrgcagatgtgttttgtgtgacccagctcaaaattttacaaaaatctgaatgatttgacattttaaaaaatctagagattttaccttcaggttttggatttctggcttctctggataaat

SEQ ID NO: 531556 - DNA, 477 bp, Homo sapiens
cctttctccacagtcctgaaaggaactagcccatgagctcaggcaaatggtgtgaccagagtggacctcatcattagctgacttctaggatatttcctagatggaagaaattagttacccaagaaagtggaccaggaaagaaaatcaaaatctctctctctctctctctctctctctctctstctctgtctctgtctctcacttgatgttcttgggctttctggattagcccacactggtaggcatgtcactagtgtgcctacacacacctctgcatagatatatgtaagaacatgtgtgggcacagatggacccagagtgcctgaggaaaaatgtccatgtaaaatgaaagaacggagcaggtagagggttgagctgaagcctggacaccagaccagtgtgatgggattcagtaggtatggcctctagggcccagaggaaccttgctaccccacccatagtggccactctgcccca

SEQ ID NO: 531557 - DNA, 519 bp, Homo sapiens
gggaggcaggagccctgagggcaagtcccaccactgctctggtctcactgggtgatcctgggacagtcacttctgctgcagagcaagatataaaggccctgccagtgctgattctaccagtctctgtcagaaatgcctctgagtggctggagagactatggccaccatggcccccctccccccgtaggctctgtggcactaatgctgggaatacggaggtgcatggcatccactccaggggatggtatgtgtgtctgctgctcacctttctctacagaggaggcttaatcatattatcctcatgcatgggagcagggtggacccattttatagatggggagaacaaagcccgaagagatttctagctgagtcaaaacaggaacttcggcttccttcaggagccccatcttttctccttcctcactctgggtggatccagatgggggcagtcagccctrccccacgtgggcacctgtgttgttagtgatgtcaccagaaaggcagcttggatcgctccag

SEQ ID NO: 531558 - DNA, 411 bp, Homo sapiens
gccagcccaggacagcagagccgctaatcccaaggtttatggggcagtcctgctcgccaaggctcaagggcccaaaaagcaaaaatggaatttccaaactccactcagtttttcctcratttttgtactgcttcccaatcccggactctctttttcattccttgtttttgtctccctcatcctctcaatctcacagtgcctccctctgctctctgctgggcctccaggctctctaaccgcctctcccctccctgctgaccaactttctctatcttcacagagaacttgtaggtatgacactgtggttgctacaactttgaaaccccttcttcttcttgtgctcttgctctgggctctctctgtccccctaagactaagtcattcattctccccctctcctttcttgtcttt

SEQ ID NO: 531559 - DNA, 411 bp, Homo sapiens
gccagcccaggacagcagagccgctaatcccaaggtttatggggcagtcctgctcgccaaggctcaagggcccaaaaagcaaaaatggaatttccaaactccactcagtttttcctcgatttttgtactgcttcccaatcccggactctctttttcattccttgtttttgtctccctcatcctctcaatctcacagtgcctccctctgctctctgctgggcctccaggctctctaaccgcctctcccctccctgctgaccaactttctctatcttcacagagaacttgtaggtatgacactgtggttgctacaactttgaaaccccttcttcttcttgtgctcttgctctgggctctctctgtccccctaaractaagtcattcattctccccctctcctttcttgtcttt

SEQ ID NO: 531560 - DNA, 608 bp, Homo sapiens
ctgccagcacaagccagtgggactcttttcacgcctggggctctgaagagctgcttgggaaccatcaattactgaatcgaagcaattgagggagcccggcgcggcctcgccgcctgcccgggcggctgctcgagcccctcctcttctgccggctgaggcgtttagtcatttagactttgaagrcagcctattctcaccagcagctttcctgcccgcacatttgcatttggagcctttcatctgatctctcggaattaaaggctttgtctccgattaaaagaattccaggccggaggagcccggagagggaggggagggggctccaggccccaggccttccttcccagagctcctggcctcgaaccggctccgccggctccagcgcgggaggcggggcggcccggaaggcctggtttggccggataaagcgaggaccgtctcagggatcctactctactctttaaccctgccgacttccctggccaccccgggcggagcctcccagcagcctaggatgcagttggtccagtaccaggagctggctcaggcagcctcccaatcccgactctaatgtttattggctgtgtgctattgcgcagccgggctct

SEQ ID NO: 531561 - DNA, 580 bp, Homo sapiens
ctgccagcacaagccagtgggactcttttcacgcctggggctctgaagagctgcttgggaaccatcaattactgaatcgaagcaattgagggagcccggcgcggcctcgccgcctgcccgggcggctgctcgagcccctcctcttctgccggctgaggcgtttagtcatttagactttgaaggcagcctattctcaccagcagctttcctgcccgcacatttgcatttggagcctttcatctgatctctcggaattaaaggctttgtctccgattaaaagaattccaggccggaggagcccggagagggaggggagggggctccaggccccaggccttccttcccagagckcctggcctcgaaccggctccgccggctccagcgcgggaggcggggcggcccggaaggcctggtttggccggataaagcgaggaccgtctcagggatcctactctactctttaaccctgccgacttccctggccaccccgggcggagcctcccagcagcctaggatgcagttggtccagtaccaggagctggctcaggcagcctcccaatcccgactctaatgtttattg

SEQ ID NO: 531562 - DNA, 575 bp, Homo sapiens
gccccaggttctctctcccacccacttgcacttctacacctggtaactacatttgaagaagcacataaccagcccctcagaacttggttttaatagaggagagattggatctcaaacctcggtggggcccttagcagtcagggggatcactaaaaagggagtgccagaggagcaggttgtccctcaggggacttgggggcccaaatcccagaggcctgagctgcaagtccatggggtagaacagtggaaaggttatgcttgctctggaatgagcaaacctgggtttgaagatgggaactgccaccacatgatgctaggcaagtgacttcacccctccaagcctcattttctcatctatagaacaactatgaacaataatagcgcctttatctcatggggttattgtggggagtaaaggagataagtcatggcacattgtaagcactcagtgagtgtgacttattgttaccaatcccctgaagcagttccctcccctcacctactcttacccagggttctctccycctgcactgcaagcttgagatttctttcagggtggagagagggagaccagg

SEQ ID NO: 531563 - DNA, 323 bp, Homo sapiens
ctgtttaataacttttttaaagaacttcttatgtgccaatctgctgtcctagacattctttaagattcaatgagaaatgaaagtttattaggaaaggtaaatgttccttcatttcttccttctttctaaccattcacccttctatttcatatgtagttattcascaatttttatatattatacattgagttaggagataagaattaaaaagaagaacaaggcatagttccatgccttgaggaactcccagtcctagtggtggaagcagactggtaaacagatagatgacatcatggtaactgctataactaagcaattaacag

SEQ ID NO: 531564 - DNA, 623 bp, Homo sapiens
tggtttaaacaaaatattcgggtcactacaaatatcttctaggcatgacagatctatcattagataaagaagttctgcgaaaccttatttgacctctggggctggagcgggtggccatctttctctgtgtccacagacatcttgctccatctatcacagcacttgtcaaactgactgcctttgcctgttacttgagagccccttataagaggctgtaatttgccaaaggaagtgacagagtcttcatcatcctagcaccccagtttctggcacagtgcctaggatataacagacagcatgcagccactcctttacttgttagttttgcagagttgtcacatcacacaacaatgcaatggggaatccagatgagaatctgggccctctgttcatgtattggttctacatcttaccagatgtggaagcttgagaaaacctctgtaatctctttgtgtattcattgtttatcygtaaagtattataataagacctatctcacatggctgttgggtgggagaactcaaggagacaataatgtagcacagtgcttcatgcacagtagagactcaagaagtgtgtataaatattattgtcattatcaaaacgttcatccattgccttca

SEQ ID NO: 531565 - DNA, 233 bp, Homo sapiens
gtccatgtggctttgcagggacatgtaaaatatgtttctgagcttatwagaaacagttctctccttcttcttcaattctgtctcatttctctgatacttcccatgtgcatttggttttactttcctcacatacatccttcatgatgcccatttcttggatgcttattgtacaccatgcactttgaaaagtgttctatgaacagtgtcttattacatccttccaaccagagctg

SEQ ID NO: 531566 - DNA, 347 bp, Homo sapiens
agtaaaaagagttcaaagaagagaataatcactattcacagggaagtcaggatgaacttcttgaaagagttaccttgcatgctagtcattgggaaatctagaataaagaaaatcagacttggacctaatatrtgacacagaaccttacttaacccgctcctttaccagatagagaatcaggacccagaggacaccagaggaggcatttggtgcttcactaaggttgtcctgatggtaagagcaggatgactttgtaaggagactctggccatttcctgaaaaatggctgagcaggaagtaggaggagaggtgtagattggcatagatgctggtccaagactgctggc

SEQ ID NO: 531567 - DNA, 347 bp, Homo sapiens
agtaaaaagagttcaaagaagagaataatcactattcacagggaagtcaggatgaacttcttgaaagagttaccttgcatgctagtcattgggaaatctagaataaagaaaatcagacttggacctaatatgtgacacagaaccttacttaacccgctcctttaccagatagagaatcaggacccagaggacaccagaggaggcatttggtgcttcactaaggttgtcctgatggtaagagcaggatgactttgtaagragactctggccatttcctgaaaaatggctgagcaggaagtaggaggagaggtgtagattggcatagatgctggtccaagactgctggc

SEQ ID NO: 531568 - DNA, 657 bp, Homo sapiens
tatagttgcaaccaacagcaagaatttgtattttagaatatgttgtgtcttctcattgaccaaaaaataaaaataaaaataaaaataaatcctcaggccctgataaactgtagaaatagcttttctatctttgcagttaaagattttcatcttggaagttatggttaaaaaatttttaaacagttaaaatagtgtagctgtgcttaaagcttctggtaaaagccagtatgctttgtagagcccttatccccctcctgctttttatttgtttttagctcactaaatratataaacactgatttttccatatatagcactgaataaactgtcatgcctaagtgtaaatcagtccagcactgtgtcatctttttctaaagcattccaagttaaatgtctgatgtgtaaataacatgaagaatcatgctgttaactgtgtgaaagatgtgggaattttaataatcattttctatatttagagatcaaacaagtctaattcttcaaagcttatgagaatggtttcacttcatattagatggtgaacaatccataatgaacttatattcaccctgtgtccccctcccgacccccttggctcacatagtgagcaaataattttcagataaatcaacttctcagaactatgcaattgtatataca

SEQ ID NO: 531569 - DNA, 300 bp, Homo sapiens
tttattctatgtcctcctcaccccacttgggttacagaattccataccgaccactcatcagcctgatakatggacactcttatctggctggggctctgacactctatgctggaccagaccaccccctccacagacatccttctcaccacttctgggctctgacatcacaggccaggctgcttatcgctatgagcattctactcactctgtgcagactccaaaaccctgagccacactgtactgccgtctacatggagacatcttcctcactccactcagactggcacttgtgccgggcag

SEQ ID NO: 531570 - DNA, 595 bp, Homo sapiens
ttctgaggtataattttggtccaaaaaagtcttgctttatatttgaccatgtgcrgtaaaattagaatattgctttacacatcttagtgatcttggcatttcttggcagattatgtttctcttagtaagtgttcaataaatacttctcaagtagaattaaatttctaaggggtttcaggacactgaaacaacataagttttactttcataacaaaattttccttgagaatgaagcggtaaagccaatatttaacaaacaaagacattttcagagaaagtgcatctgaggttaataaacattagcttgaaaaacatacagtatattttctaagaaaatgattctcctacttcctgatagtctttttttaagtagtcaattaaaattcactatgttttaaaatcaacctaaatgcccatcagtgacagattggataaagaaaatgtggtacatatatgccatggaatactatgcagccataaaaaagaatgaggtcatgtcgtttgtggaacatggatggagctggaagccgttatccttagcaaaccaacagaggaacagaaaaccaaatactgcgtgttctcacttataagtggg

SEQ ID NO: 531571 - DNA, 595 bp, Homo sapiens
ttctgaggtataattttggtccaaaaaagtcttgctttatatttgaccatgtgcggtaaaattagaatattgctttacacatcttagtgatcttggcatttcttggcagattatgtttctcttagtaagtgttcaataaatacttctcaagtagaattaaatttctaaggggtttcaggacactgaaacaacataagttttactttcataacaaaattttccttgagaatgaagcggtaaagccaatatttaacaaacaaagacattttcagagaaastgcatctgaggttaataaacattagcttgaaaaacatacagtatattttctaagaaaatgattctcctacttcctgatagtctttttttaagtagtcaattaaaattcactatgttttaaaatcaacctaaatgcccatcagtgacagattggataaagaaaatgtggtacatatatgccatggaatactatgcagccataaaaaagaatgaggtcatgtcgtttgtggaacatggatggagctggaagccgttatccttagcaaaccaacagaggaacagaaaaccaaatactgcgtgttctcacttataagtggg

SEQ ID NO: 531572 - DNA, 504 bp, Homo sapiens
cccggttcccaaccctctacatatcccccatcatacccatttgccctgctctgttgtacaggggaaattccctttcttcttctgcagaaaccccaataaaaattaataaagtaaaataaaataaaacacacagctaccaacttcagtacacggcgtgtaagaaatcacattcttgtcacctatcaaaagcaaaacaattcctgaatacttcacccatcarcaaatcactgaagtccatttagtgtgagtaaaataatgagccacctttttcatatccttgcctctggcactgcaaattcagtctcagttacttcagcctcagtctctgttacttaccattttttgtatttttatgctttcctatacactaagtttgaaacatgagcaaaaatccatctatgagaagaaagggtggttgctgatactgataaattcattctggtttttggctagcaagatgatgaggattctcaatccaggaaaagtcatacactgacttttcag

SEQ ID NO: 531573 - DNA, 531 bp, Homo sapiens
cgctctgctgtgtgagccccaccaggggtgtgcgtgtctcatggctggcattattagctttcattccctttggctggcaagggagtgatctcaccattgcagctctcaggcaattgcagtctttggattttatttttctttttgcttttttttttttcttcctttcttttttttttttgttgttatttgtttgtttgtttgagacagagtctcgctctgtcacccaggttggaatgcagtggcgcgatctcggctcactgcagcctctgcctcctgggttcaagcgattctcctgcctcagccacctgagtagctggaactacaggtgtgtgccaccacacctggctaatttttgtagttttagtaragacagggtttcaccatgttggccaggatggtctggatctcctgacctcgtaatccgcttgcctcagcctcccaaagtgctgggattacaggtgtgagccaccgtgcctggcctggattttctttaataggagcaggagactctgaaaggcctaaaacaattaa

SEQ ID NO: 531574 - DNA, 551 bp, Homo sapiens
ctcctaaactattagaatggaatcttagctacctctctcctaagttactagatcaattgctagatcacattttctaacatatatactttaccatattatccttttacataaaaactttaatactatccayagtctctgaagaatagagcccagttcctctgtctggcacccaaaacactccactatgacactggcgtttataatttcagcctcatcacccactgccccctgttggaatcctgttctcccctgagacttccctctgaatgcaccctacttatttataaggctgaacaactgctccatccccctgctcccatcattaatatggaaaggaatcaagaccctaatttgggacttactctttccaggtaggctaaggttcttacttggttggaagaagattataaaacaaggatgtaggtgggaccatgatggttttgggggctcttatatcccttttctctttcactcttccccaactctcttgacagtccttctcattgactgcatgtgggtttgctgttttcacatcaatatgccaaagagaa

SEQ ID NO: 531575 - DNA, 625 bp, Homo sapiens
ctgcctcctaaactattagaatggaatcttagctacctctctcctaagttactagatcaattgctagatcacattttctaacatatatactttaccatattatccttttacataaaaactttaatactatccacagtctctgaagaatagagcccagttcctctgtctggcacccaaaacactccactatgacactggcgtttataatttcagcctcatcacccactgccccctgttggaatcctgttctcccctgagacttccctctgaatgcaccctacttatttataaggctgaacaactgctccatccccctgctcccatcattaatatggaaaggaatcaagaccctaatttgggacttactctytccaggtaggctaaggttcttacttggttggaagaagattataaaacaaggatgtaggtgggaccatgatggttttgggggctcttatatcccttttctctttcactcttccccaactctcttgacagtccttctcattgactgcatgtgggtttgctgttttcacatcaatatgccaaagagaaaaggtggttggggtttctctctggaaacttacctgcgatgggtgggctcaccaagtatggcactgcgtga

SEQ ID NO: 531576 - DNA, 605 bp, Homo sapiens
cattcaagaccaggatatgtaaaataatttgtttagtttcagccactttttaaagtcaattttacaccctgaaagaaaggcaatcctgactccattgttctttcgccaataaggagatcgggaattacaataataaatagaagaaagaatgttgtttttcctcactgtaattaattttatggctcttgcgaagatgaatttttgtggtgattaaaatagtcccttgcacatattaggtactcagtaagcatttgtgaaatagggactttctagcctttatttgtgtttaaggaatcagggaataagttcaaaattgcctttcaagaaatttttggaactctcttctcactaagaaactgtaaagtcttataaaagagacattatttattttctccaagtattgcttgcgaggtgaattgaaggttttttttttatcaacagttgttttataagatygtttgaggactaaaagggctgattgtaatcacctgtaacatgttacccagcaagacattcctcaccaggttgaagtaaaaaaaaaaaatgaagtgaaatatcaagcttatgcaagtttgaaattacaaacaagaacaaaagttaaaaca

SEQ ID NO: 531577 - DNA, 605 bp, Homo sapiens
cattcaagaccaggatatgtaaaataatttgtttagtttcagccactttttaaagtcaattttacaccctgaaagaaaggcaatcctgactccattgttctttcgccaataaggagatcgggaattacaataataaatagaagaaagaatgttgtttttcctcactgtaattaattttatggctcttgcgaagatgaatttttgtggtgattaaaatagtcccttgcacatattaggtactcagtaagcatttgtgaaatagggactttctagcctttatttgtgtttaaggaatcagggaataagttcaaaattgcctttcaagaaatttttggaactctcttctcactaagaaactgtaaagtcttataaaagagacattatttattttctccaagtattgcttgcgaggtgaattgaaggttttttttttatcaacagttgttttataagatcgtttgaggactaaaagggctgattgtaatcacctgtaacatgttacccagcaagacattcctcaccaggttgaagtaaaaaaaaraaatgaagtgaaatatcaagcttatgcaagtttgaaattacaaacaagaacaaaagttaaaaca

SEQ ID NO: 531578 - DNA, 497 bp, Homo sapiens
aacccatcataaagtctaaaaatcataagtcaaactatcaaaagttaggaactgtctgtatactagatttctgcatggtatatgcccaatataaaaagtacaattatatacaaattgtgttagacaatattttatcaatctgttgagagtagaaaagagamaaaacatgcatttatactatctttttaaattacacagttaccattaccaataatcattcttttttcatgcagatttgaattactatctgggatcacttactttcagcctgacgaaatttctaagtatttttgtaagatgagtctgctaagaatatattttctcagtgcttctgttatctgagaatatatttatttcatcttcatttttacagatagttttgctggatgtataattcttggttgacagcttttttttgttttttatttcttctttcagtactttgaatatgtcaccccactctttcctggtcgccattattcctgatgagaagatct

SEQ ID NO: 531579 - DNA, 497 bp, Homo sapiens
aacccatcataaagtctaaaaatcataagtcaaactatcaaaagttaggaactgtctgtatactagatttctgcatggtatatgcccaatataaaaagtacaattatatacaaattgtgttagacaatattttatcaatctgttgagagtagaaaagagacaaaacatgcatttatactatctttttaaattacacagttaccattaccaataatcattcttttttcatgcagatttgaattactatctgggatcacttactttcagcctgacgaaatttctaagtatttttgtaagatgagtctgctaagaatatattttctcagtgcttctgttatctgagaatatatttatttcatcttcatttttacagatagttttgctggatgtataattcttggttgacagcttttttttgttttttatttcttctttcagtactttgaatwtgtcaccccactctttcctggtcgccattattcctgatgagaagatct

SEQ ID NO: 531580 - DNA, 427 bp, Homo sapiens
ttcaatgttgtcaggttatggagcttttctgtatttgtgaccaacacattcccacattttctccctctcatacttccagggcagaaggaattctcttttgttgaagccctgatgcaatgaaagaccttcaaaacaagacagtgttctacctcatataagactactatctcttatagatctaaagaccctataagagctttgggatgagagaatgaaaagctactgatrgtgatctcaacttgaggggcactgaataagtcatcgtatctatcaatatttgtccttttgactaaatttccaacctaagaagtccaatttcaagggaaatacaactgcacctgtgaaaggattctcttaatttgataagagcttttagttaattggagcagatatctgaaaacatgaagcttgggacatgagccatgag

SEQ ID NO: 531581 - DNA, 427 bp, Homo sapiens
ttcaatgttgtcaggttatggagcttttctgtatttgtgaccaacacattcccacattttctccctctcatacttccagggcagaaggaattctcttttgttgaagccctgatgcaatgaaagaccttcaaaacaagacagtgttctacctcatataagactactatctcttatagatctaaagaccctataagagctttgggatgagagaatgaaaagctactgatggtgatctcaacttgaggggcactgaataagtcatcgtatctatcaatatttgtccttttgactaaatttccaacctaagawgtccaatttcaagggaaatacaactgcacctgtgaaaggattctcttaatttgataagagcttttagttaattggagcagatatctgaaaacatgaagcttgggacatgagccatgag

SEQ ID NO: 531582 - DNA, 427 bp, Homo sapiens
ttcaatgttgtcaggttatggagcttttctgtatttgtgaccaacacattcccacattttctccctctcatacttccagggcagaaggaattctcttttgttgaagccctgatgcaatgaaagaccttcaaaacaagacagtgttctacctcatataagactactatctcttatagatctaaagaccctataagagctttgggatgagagaatgaaaagctactgatggtgatctcaacttgaggggcactgaataagtcatcgtatctatcaatatttgtccttttgactaaatttccaacctaagaagtccaatttcaagggaaatacaactgcacctgtgaaaggattctcttaatttgataagagcttttagttaattggagcagatawctgaaaacatgaagcttgggacatgagccatgag

SEQ ID NO: 531583 - DNA, 427 bp, Homo sapiens
ttcaatgttgtcaggttatggagcttttctgtatttgtgaccaacacattcccacattttctccctctcatacttccagggcagaaggaattctcttttgttgaagccctgatgcaatgaaagaccttcaaaacaagacagtgttctacctcatataagactactatctcttatagatctaaagaccctataagagctttgggatgagagaatgaaaagctactgatggtgatctcaacttgaggggcactgaataagtcatcgtatctatcaatatttgtccttttgactaaatttccaacctaagaagtccaatttcaagggaaatacaactgcacctgtgaaaggattctcttaatttgataagagcttttagttaattggagcagatatctgaaarcatgaagcttgggacatgagccatgag

SEQ ID NO: 531584 - DNA, 570 bp, Homo sapiens
ttcctttgatcattccaccacatatgttcatgtcctggaccaaatacacatttccacgtttctayctccattagacttattcagcctatattcaaacagatagatgatagatagacagataaatagaaagagacaggtagatgacagacagacagatagatagaacggtccttttgccttctttctgcctttgcacccgctgtttaccactttctgtcatgtcacgtcatctcatctctacacattccatgacctccacctttaaagcccaattaaaatgcttcacagcatatccaacacttcattagatattacctagactgtggtgatagaatcagagatgtctgcctatgtccaaactcaccaaattgtacacatcaaacatgtatagttctttgtatagcaattctacctcaataaatatgttttgaaaatatttcataaaaatttttatgatctatgcagtcagaaacaactcctttcttctccaacttcaatggcacattgaattgtgccaacataatgagtataaatacttattctttttgtaatgattttatttatttattc

SEQ ID NO: 531585 - DNA, 570 bp, Homo sapiens
ttcctttgatcattccaccacatatgttcatgtcctggaccaaatacacatttccacgtttctatctccattagacttattcagcctatattcaaacagatagatgatagatagacagataaatagaaagagacaggtagatgacagacagacagatagatagaacggtccttttgccttctttctgcctttgcacccgctgtttaccactttctgtcatgtcacgtcatctcatctctacacattccatgacctccacctttaaagcccaattaaaatgcttcacagcatatccaacacttcattagatattacctagactgtggtgatagaatcagagatgtctgcctatgtccaaactcaccaaattgtacacatcaaacatgtatagttctttgtatagcaatwctacctcaataaatatgttttgaaaatatttcataaaaatttttatgatctatgcagtcagaaacaactcctttcttctccaacttcaatggcacattgaattgtgccaacataatgagtataaatacttattctttttgtaatgattttatttatttattc

SEQ ID NO: 531586 - DNA, 654 bp, Homo sapiens
ttccaaagtctgagcccttcatcactacacctgcttcctccttctctgctctattttttctttcccttcgtttccccattaaagacctcaaaaacattttccaaaaaccgttactgagcaatggcaaagtcaagcctgattattttcctcagctttgttccctccctctttgctccctatctgcattgaataactcttcaaaatgcaggatgttttctgaatgaactcacagttggtcaacattatactgtgcgggatgggagtctcctgccttcctctagggcccaccaagtaccttgttgccttataagctagtccagacttggtccaaagacccctagaaatcctgtaaagctcataatgtcacaacaaactaaatttaggaataaaccaggacaaggagcttggtggcatcacagcaaactcaccctcatgcctagagaataagcaatattgaataacttcctagttaatatraggatagattttcttggctggaattgagcttaacttcttttatatcctgtttgcttccctgttttgcctaattcacagtacaggaaagcctaggggcactgagatgctgaaataaatgtaacctttttctgttggttcaatttgtcagagttagactgtatctggtttgtggtattg

SEQ ID NO: 531587 - DNA, 325 bp, Homo sapiens
gtttgcaggcatgaggtggccaccaccaamctttagtcagtcaatagccagcaggctctgcatgggcatcagcccttggacacaaaagtgactaaaaggagctgctaaatgccccagtagggcttctgagaagaaagggcagcagagtaccaggaggagaagcctaaagaacaaaatgcatttgctgatcctgggggagcttgcagtttctatgcccttgatactgttaccaagctgagcaagagggagaggaagcagtgctcagcgagtaagtccttgaccaggccttctgtagcctgagatttgccacaagctgtttcagccc

SEQ ID NO: 531588 - DNA, 602 bp, Homo sapiens
cttctagctaattctagttgttacattccctagtacttttccatagatcatctagaaccttgttactcaaaatatggttgctcagaacagcagcatcagcatcattcatgatggtcagttgtcaaggaaaggataagttatactccacctactcggcttaaaaagccaaggagagtttgtgacccattaagacattttcattacaaaggtaatgggtgatattttgtcaagtgttgggggctttaaaaartaagtcctcaactctctccacaatgagtcagttcatggggattccagaaagttgatgttttatggtatgggctgagatatgtgaccagaggtcagccacatgcacacagctctgctgactcaagggtggaggtcctcaccaagcactgccatgtgcatgagtgagggcatctgggctttcaaggcacatctttctcccagggacaacacccttccttctttttttggaccctgctgtctcctgagatcctcctgagcataatttaacccttgctgggtgagaatcagaatggtccagcaagcgctggattttctgtcagagtttccttcggtttaaaaatctgaaacttgtt

SEQ ID NO: 531589 - DNA, 474 bp, Homo sapiens
tggttaagccatttttttcccattgcagatgatactttaactctttgaatctcagagtcctcctgcacacatgcagcatgaaaagacgtttctgcggctgccatcataaagccaagctgtacctcaggttgaattaggaaggtccggggttctgttagtgttctgattctgagactgcagctctttgcctgagatcattctgcctagctctcctctccctgccagcgccttaataacgtaagcccaagacccttgctctcagatcttttgaacgaacaatggtgctgggcaatcacaccataaaggactatttgtgatcattagggagaaaagggagggrggtaaaatgttatgctaatcaaaagcaacaactgttatttcttcttcagtgctcttcacgaaagtcacatggatgatggtaaatcttcgagctgatgccagataaactctgaaattttaaagtatttgtttcat

SEQ ID NO: 531590 - DNA, 474 bp, Homo sapiens
tggttaagccatttttttcccattgcagatgatactttaactctttgaatctcagagtcctcctgcacacatgcagcatgaaaagacgtttctgcggctgccatcataaagccaagctgtacctcaggttgaattaggaaggtccggggttctgttagtgttctgattctgagactgcagctctttgcctgagatcattctgcctagctctcctctccctgccagcgccttaataacgtaagcccaagacccttgctctcagatcttttgaacgaacaatggtgctgggcaatcacaccataaaggactatttgtgatcattagggagaaaagggagggaggtaaaatgttatgctaatcaaaagcaacaactgttatttcttcttcagtgctcttcacraaagtcacatggatgatggtaaatcttcgagctgatgccagataaactctgaaattttaaagtatttgtttcat

SEQ ID NO: 531591 - DNA, 617 bp, Homo sapiens
gggaggaaaaaagctttctcttttaagatggcttccccctccccttttacagattggattgtttcttggatttgctggagagctgctttcgctaattgcttgcagactgcagtccagtccggcctgccaactgtggaggcggtgtggtggggctgagtgataaagagtaaggggtttaaacgcaggcagacctgatttggaactccagttctgccacttcctcctgcgaaacatcaggcaggttgcttaacctctctgggcctccrtttctgcatcagtaaaatgaggatgctcacgggtgagttgagagtaacacaggattggaacatgtacatacttgtcacagtgcctgacccatagtaggtactcctttaatagtaaccattattactactattgtctttggtatgtcacacattacaagtgccacctggaattgagtctacttgagcctgagacttagaaatgcaggcaagagactctagaaggctgtcaagcacttgtagacaggaaaggatggcttggttgaaagatggctccactgctgtcactaggggccctgccccattcagtcttgcagcaggctggcagactggccaccttaaagccaatgatcg

SEQ ID NO: 531592 - DNA, 617 bp, Homo sapiens
ctgtcaacctacagagcaggaagaggtagtagtgaggcccagttcaggaggaaaagtgattttcagcttatctctggactcaccatggaaagcactttcagtcctttgcatcctagactcccaagcaattggatcctttgagaaattgtgacagaacgtttatatttagatgaaaacaaaataattccaaatctgttaaatcagtttacagaaaggagctggttttttaccctcacacttttcatagtgctcagcaactactgggaacaaaacaaatatttgaagaattaatgaatgaatatactacaacttgctgaagggcagaacaattttctattaaattaaaaactctaaaggataatgtaatatgactattgttctgtccattattacttcaatagttctagagaaaaccgtatttcattctttattgtgtgcttcttctgaacaagtcctcgtcaaaagagtttgctccagtgttttcagggttttaaaagatagaatagatctaaatagagtcaatgtagacctcagcaattgaatatacaatttcagcaaagtatgtcctttgcagtttgagcccactraagctgctacatggatcatataattgattt

SEQ ID NO: 531593 - DNA, 576 bp, Homo sapiens
ggggtcagcaggccacacagggtcatcctgaccagcagtcttttttgtggggtgtcgtgaagaaaagcaatgctcaagggtagataacgaattttctaagactgagcagccagcttagtggcagagtgaaaatgagaatagaagtggaagtacactggaatgaagatggctgcttagttttatctgcctcacccactagctagaacgtggctttagccataataccaatatgtatttttggaacattcctttgctcttttcctttgactttggatagcagatgyggtctattgcattgctgtgattttcagatgaaatcaagcacagtggtttacttttaaccaaaccccagtcatacttcctctctctgactcagcttccttgtcgtacgtaagattgatgacacacgccaccagctcacatttacaaaggcgttctaggtcttttgatgaacacctatatggcatttatattaatataattttctctgtgagaggagagatttaaatgagagttgtcttagtagctgaggaaacagatacatgattaggggaatagctaatttcttgcctgatg

SEQ ID NO: 531594 - DNA, 613 bp, Homo sapiens
gggcaacaattcaaaaaaaattagctgggcatggtggcccagcctatattcttagcctctcagggagtgggttgagtggggtgctgaggtgggaagatcacttgagcccaggaggtggaggctgcagggagctatgatcgtaccactgcactagagcctgggcaacggwgtgagaccctgtctttaaaaaaaaaaaaagtattctgtaagagggtagttgaagttcagactttgtaaataccttatctttcatcaaacttttaatttactcactatcttacatttatttatatggtttcttattttattaaattggttgtaagccattgtcattattatttattttgatgttcaaatcatttaagatttggctaatggaatctccttcgtgttagctagcatctgtgtccttttggcatgtccccattactctttgtgcacttctttactttctggcataagaaggtccaggttcatcttggacttcctagacccagcaacacattgaaatggctgagatcaaccatttctccaagaatccctggtttcctttagtggaatatggaatttagaaactgaggcccgtgcattcagtgtgctcattactattaat

SEQ ID NO: 531595 - DNA, 627 bp, Homo sapiens
aaaatcaaaactagacttagtgcaccactacgcaagagaagttctgaaaagcaaaaactcactggtaatattccaggactggctttgtttggtcttcataagcctttagtctcttgataaccgtctctggtttatcatcctcacgctgaatgagaggctccccagtcaggtcatcaatgccctaaacaggattagaagagactagtatcagatatcatatttctgaaagatattttcataagcagttcaattatttttaaacagacatctctgtgcaagtgccaagcacaaaaatgtgctaacttttaaaaaaatggaatccaacctcaaaagagatcatcgcaacagaaacagggtacgccagtttcatttctacagttatcagtcactttagccttagagtaaaaggttttctaagcagcctctaagtaagttcatatatattcaaaaagattcagctataaacttggaatttcaactgcaagtcctaaataaaccaaggtgttatgaatctctatcagcgcaactcctaacacactccttggcagagcaggaaatcaacaamtgtttttgaatgagtaacaaacccctgctgctcctggggcaacctttcgcaccaagctcagt

SEQ ID NO: 531596 - DNA, 618 bp, Homo sapiens
cagactgataaagtacattgcccttcttaatatgggtgggccttatctaatcaattttaaggcctgagtagaacaaaaggctgaccctcacccaaataacaaagaattcctcctgcctgctacctctaactgggacacaggacttttcccgcctttaaactcaaactgaactcatgatcttcacccaaatccagggactggccgggcgcagtggctcacacctgtaatcccagcattttgggaggccgaggagggcggatcacctgagctcaggagttcaagaccagcctagccaacatggtgaaatcccatctctacaaaaatacaaaaattagcctggcatgatggcaggtscctgtaatcccagctagttgggaggcgaggtgggagaatcgcttgaacccaggaggggaggttgtagtgaaccaaaattctacaccagtgcactccagcctggatgacagagcaagactcctcaaaaacaaacaaacaaacactccagaggctatttctgaaatatgacaaaatgaaactaaagtccagctaaaggaaaactattaatgcaaaaggataaaaccctaacagacaaagagatgtgttatatagctaaacaatgtg

SEQ ID NO: 531597 - DNA, 618 bp, Homo sapiens
cagactgataaagtacattgcccttcttaatatgggtgggccttatctaatcaattttaaggcctgagtagaacaaaaggctgaccctcacccaaataacaaagaattcctcctgcctgctacctctaactgggacacaggacttttcccgcctttaaactcaaactgaactcatgatcttcacccaaatccagggactggccgggcgcagtggctcacacctgtaatcccagcattttgggaggccgaggagggcggatcacctgagctcaggagttcaagaccagcctagccaacatggtgaaatcccatctctacaaaaatacaaaaattagcctggcatgatggcaggtccctgtaatcccagctagttgggaggcgaggtgggagaatcgcttgaacccaggaggggaggttgtagtgaaccaaaatyctacaccagtgcactccagcctggatgacagagcaagactcctcaaaaacaaacaaacaaacactccagaggctatttctgaaatatgacaaaatgaaactaaagtccagctaaaggaaaactattaatgcaaaaggataaaaccctaacagacaaagagatgtgttatatagctaaacaatgtg

SEQ ID NO: 531598 - DNA, 618 bp, Homo sapiens
cagactgataaagtacattgcccttcttaatatgggtgggccttatctaatcaattttaaggcctgagtagaacaaaaggctgaccctcacccaaataacaaagaattcctcctgcctgctacctctaactgggacacaggacttttcccgcctttaaactcaaactgaactcatgatcttcacccaaatccagggactggccgggcgcagtggctcacacctgtaatcccagcattttgggaggccgaggagggcggatcacctgagctcaggagttcaagaccagcctagccaacatggtgaaatcccatctctacaaaaatacaaaaattagcctggcatgatggcaggtccctgtaatcccagctagttgggaggcgaggtgggagaatcgcttgaacccaggaggggaggttgtagtgaaccaaaattctacaccagtgcactccagcctggatgacagagcaagactcctcaaaaacaaacaaacaaacactccagaggctatttctgaaatatgacaaaatgaaactaaagtccagctaaaggaaaactattaatgcaaaargataaaaccctaacagacaaagagatgtgttatatagctaaacaatgtg

SEQ ID NO: 531599 - DNA, 559 bp, Homo sapiens
tttgcacagatggttcaagcccacagcacgccttgaccccagctcaccacgcaggaggcacatctccattaagacagggttcatgcaatatacacgttcataagggcaaactacaaaatcttaaaaaccccagagtttggagaatgtttaaaggaaacagtctgggttaaggacccaggacctggggttcaaccaaaaggmatgaccccacaaaggacaaacagtatgattcattgcctctgagtgtgcacatcctgggaaaaggcaactttaggggtggacacaagaacaacagctctggtcatggctgtgacttggttataagttaactttatgggtcactgagtgtctggaaacaaactataaaaagaagaaagggtggcccaggcagctttctgttggaaatggctgtgaccagttgcttctggaagggagatgtattgactgcaataaaacttgataggctcagcacttgtctgttaaggctagaatcggaagtcaactttggacctgagtaattggtataaatttgtgtataagggcaagacagaagggattt

SEQ ID NO: 531600 - DNA, 559 bp, Homo sapiens
tttgcacagatggttcaagcccacagcacgccttgaccccagctcaccacgcaggaggcacatctccattaagacagggttcatgcaatatacacgttcataagggcaaactacaaaatcttaaaaaccccagagtttggagaatgtttaaaggaaacagtctgggttaaggacccaggacctggggttcaaccaaaaggaatgaccccacaaaggacaaacagtatgattcattgcctctgagtgtgcacatcctgggaaaaggcaactttaggggtggacacaagaacaacagctctggtcatggctgtgacttggttataagttaactttatgggtcactgagtgtctggaaacaaactataaaaagaagaaagggtggcccaggcagctttctgttggaaatggctgtgaccagttgcttctggaagggagatgtrttgactgcaataaaacttgataggctcagcacttgtctgttaaggctagaatcggaagtcaactttggacctgagtaattggtataaatttgtgtataagggcaagacagaagggattt

SEQ ID NO: 531601 - DNA, 534 bp, Homo sapiens
agctgcctgttcagaggactcctctggtctctgccagtttcctgcgagatgcttgcacatcctgagaccccactgcttcatcagcaacatgggaataataataccaatatccactgcacaggactggtgtgaaaaatgaatgcatgaacacagaaaaaagcacagtgccagacacatgggaggggatcatatgtttttgtttctgaacactgagtgggtgacagccatgtggcaagaggaggaaagcgtggagytgggggccagacagactctgcatcaagacctagttctcacctttctcactgtttggccttgggcaagcccctgaatctctctggacctcagttccagccttccttccaccatggctccgttatgaaccccaccttcagctccaggactaatccacctgcaaaacccagcccccttgcccagggagatagggagaagccaccagccaggcgggagaacacagatccagaattgaactcatgacctcagctcgtcttgccaatgtgaagcatgtgacttcat

SEQ ID NO: 531602 - DNA, 208 bp, Homo sapiens
cttctgggacagcaggcttctcttgaagctgagcgccccttgctgcaggcctctctagcatgtgctcactacacgcygggcattctgcagtcacgttctttgaagatccttttctttcatctatgctcaaaatagtacctgccattgtgttagcctcagaaacttcagtgaggatccaaaggatgggtaaatttatcacctggtgaac

SEQ ID NO: 531603 - DNA, 514 bp, Homo sapiens
gctgaccttccccccagaaactcctccaagtagctgarcaacacagactgcccgtgaaggctgcatttggcagtaagggcagtcagcagtcatggctggggcaaccagaaggattccaaaaaggagcaaatagagaatttggcaaggatggaaagtggaaggacagcaaacaggtggggataactccttaaaggatgaagctaggtttattttatatgaaagatgaagtgtgaaatcctgggcaggcatcttccatgaaatgacttagggtaagccagagaaaaaatgagggaagaagacagccctgatgataactaaagcctctctctaccttggttgctaatgtttttaccctggggtcaggaacagggtggttatgatggtgtagaatatggtcttttctccagtgtttgggccactctggcccccttgctgtccatcatcactatgcccagagatgggcatgggaaaatgagaagctacatggagggttgctcagtggctttttactaag

SEQ ID NO: 531604 - DNA, 623 bp, Homo sapiens
gcagggccttgtacagagaaaattgaagcttctgtgctggcagagatgagtgtaacccttgctccctcctttgagtgattcacactcaaatctcatgccaagcctgtggtttcacagtaacaatgattttagactccaggatccctttatagaccagccaccaggattccttttctccaagctccactgccttttctttctgggcactagctagctcacccactcatagtaaaaacctccgaagtttttcacccactttcgtcatgacctctgagacacctctactctcccttattgcctcacctctcttacttcccatccttccttgaaattttgctttattctttggatcgagacatgaggttgcttcttcagaagctccagaggcccctttatgaagtcctccccactagtttcttctctgtgtagtctataagcatatatggatcacctagtctttagccaggggccaggccctggtttctcccttgtgtcatgaatctcagttcattcgtatgcagamagtctaatgccaacagcctaaagtggaggtcaagcccctgtaactccaacagaggcaagaaagtcacgaaggtggggttaccagtggtatcagtcggtta

SEQ ID NO: 531605 - DNA, 615 bp, Homo sapiens
gctgccagtgggaacctgggcagctaaatgcaaggggcactttcccctcgctggcaaagcagcatctgggggctgcactggttcctgcccccaccttcctctccctctcctcctccccgtcttttgccccctacctctccctccatctcctcctccccttcttcgaactcacctgcccaccaggggctgggtagtgagtgaaacaggagagggtgcccatcaargtggtttggcgagtggctactgctcagtattgccatatgcaaggggcacttctgatttttctatatttttcaagctatgccagttatctgggtgttgtgtgaagtcaccatattattattatttcttttgagatgtagtcaccgtattcttcagcactgatgactaacttgagtctttgaaaaacaccgtgcaagctaaagcaaatgtctctgtgggcttcccgactgcaacctctgggttaagggaagcccagtaggtgtttctctttcctgtcctaccaccctgaagcctgccacggattcattcaacaagtgtttttggacattgactatgtgccaggcactgttctgtgctggacataaggcagtgaaaactcagataaaatgcctg

SEQ ID NO: 531606 - DNA, 651 bp, Homo sapiens
cacacacacacacacacacacacacacacacacagaaacacaacagtttcccaatacttttttccaaggtagaaatgcttttgtcttctattataaaagtaggacatactgttaaaatatcaaatagtacagaagtatatatactagcaaataaatgtactcttattctcagccatttttttctgtttttcttataaaataaagatatatcataccagaccataccatttttggcatctgttttttctcttaaatgtatattttrgagatatgcctccacttcttcctttttaatgaatatatagcactctcttttatggatgttaagcaatatatttgtctactctcttaaccacagagatttatgatccttcagagttcttttgtgtcagaccttttacatattaactctgcacaattgtcagatttttttcttacaaatgtatttctaaagtaaaattgtatcattaagtactaacatttgaaagctctcaatgaacgttgttaaaatgctacatgaggtttatgttcctttcaactacttcttgagaattccatttcctaattccacactaatactagccatttttattcattttaatcttgtcagtctgataggtaaaaaaaaaatctcattacattttacatttc

SEQ ID NO: 531607 - DNA, 651 bp, Homo sapiens
cacacacacacacacacacacacacacacacacagaaacacaacagtttcccaatacttttttccaaggtagaaatgcttttgtcttctattataaaagtaggacatactgttaaaatatcaaatagtacagaagtatatatactagcaaataaatgtactcttattctcagccatttttttctgtttttcttataaaataaagatatatcataccagaccataccatttttggcatctgttttttctcttaaatgtatattttagagatatgcctccacttcttcctttttaatgaatatatagcactctcttttatggatgttaagcaatatatttgtctamtctcttaaccacagagatttatgatccttcagagttcttttgtgtcagaccttttacatattaactctgcacaattgtcagatttttttcttacaaatgtatttctaaagtaaaattgtatcattaagtactaacatttgaaagctctcaatgaacgttgttaaaatgctacatgaggtttatgttcctttcaactacttcttgagaattccatttcctaattccacactaatactagccatttttattcattttaatcttgtcagtctgataggtaaaaaaaaaatctcattacattttacatttc

SEQ ID NO: 531608 - DNA, 651 bp, Homo sapiens
cacacacacacacacacacacacacacacacacagaaacacaacagtttcccaatacttttttccaaggtagaaatgcttttgtcttctattataaaagtaggacatactgttaaaatatcaaatagtacagaagtatatatactagcaaataaatgtactcttattctcagccatttttttctgtttttcttataaaataaagatatatcataccagaccataccatttttggcatctgttttttctcttaaatgtatattttagagatatgcctccacttcttcctttttaatgaatatatagcactctcttttatggatgttaagcaatatatttgtctactctcttaaycacagagatttatgatccttcagagttcttttgtgtcagaccttttacatattaactctgcacaattgtcagatttttttcttacaaatgtatttctaaagtaaaattgtatcattaagtactaacatttgaaagctctcaatgaacgttgttaaaatgctacatgaggtttatgttcctttcaactacttcttgagaattccatttcctaattccacactaatactagccatttttattcattttaatcttgtcagtctgataggtaaaaaaaaaatctcattacattttacatttc

SEQ ID NO: 531609 - DNA, 582 bp, Homo sapiens
ttggatgtagtccaatgaatgtcatgactcagaagaaagtacaataaaccatgttccccatagatgaccagttgtctccacaaaatgtacatttgttataaaatgcataaraatgaactaggtgtacttaaaatggatctacataggtttaatctacttggcaagaaaaacatttatattattagatagagaaagtggttgcatcaattacagcaaataaatgacagtatttgttttttatttgtcattattcttaaatcctctagaggcaaaatggttaatgaaatacttctcagcctgcatttatatgccagccttttaaataaaatctgtaaatattcaaatacaatctatgcatattctgtagtaatctttaaagattatcaataaagttatagacataaacacatacatgcatgtttgtgtgtgcatgtatacacactacaaaggctagtccttgcaaaagatgagaggtatgttctcattgttcattatctattcaaaaccactagcttactgctacactgtgcagaatcaaacaaaactttctagaacataccaaaaggcgaaattcaatcatcg

SEQ ID NO: 531610 - DNA, 635 bp, Homo sapiens
ttcacacttttattaaaaacattcatattgtaatttaattttactttgaagttgtgattacttacagaagctggttcaaatattttttagtcttaaaacactcacacttcattattgtctagccgaattttgttggcaaattaataactgtttcttactttcgtaattagtttttgggactctaatttacattttagaattgaactgtctgagacaataatgaatagtcactattagacatgtaaaatttgagtagttcaaattcaggtgtgctgtaagtataaaaaatgcagattttcaaaaacagtaaaaagatgaatactgtaaaatatctcaataaggcaattgaaacttttaaaatatattggagtcaatcaaatatataattamaattaattttacctttattttcacttttttaacatggctactagaaattttaaaattgcataaatagcttgcctttgtggctcacattatatttcctttggtctgtgctgttctagctttgctcaatggtccttctgcatattgttgccctcatttttctttcaatctttaactattttgtttttccacctgaaaaatactgttttagggggtcattttcacattattggtaccaacctataata

SEQ ID NO: 531611 - DNA, 471 bp, Homo sapiens
ggctggaacccttctgtgtccgtgggaaaataggaatctattgatggatatggctctttggcttaaagtgaaaaatcatgaactggtggtcaagaaatctaggcatagtccacgcttttaaccctctgggacctgtttttctgtaaactgaggtgacrctctgttctggaacagcccctaaggggccgtttcaggtcctgctacacgctctgagttgtgattagagactctctggccctgtcatcgaggaggacgcctcgagacaggcctcatatggtttgcatcacttcctcaaccagactcgctcaacctgaacctcccattgcttcccatcattgtgtctggctgtcttgagtgtctccctcctgagccaccccttgctgctgcagtgtaaagaggcctcttgatttattaatcaattaatcagtgcgtgctgaggagctgttcggggtagttaaacagggaaaacaa

SEQ ID NO: 531612 - DNA, 554 bp, Homo sapiens
tgaaggtagaaggcctgatactgggcacgaggaacacaaggaggtawaaatgacatccctgctctaaagaggggcacaggggtgttaaaatagaaatcataagagtgatggaaccgactctgtggctaagagatatcaaattacaaacaggacctaaggccatgcgaggcccggggtaagtcacaccccctgcacttaaagaataagctatgttctagctgccacaaggctttctgttttttctagcagctaaacaagccctggcctggagataagcaatgctgaaacaattgccgaccatctactgccagacaccgactaactggcctcctgttccaccagccataactacacctttgatcagacaagagactgatttcagtagctttctcttgataaaagaccagcaaccatggactggttctggccagttgacagaggctgcccactaagtgcctttgtgtcttctgtgtcaccttttgacacataggcaagatttgtggtgcatttaaacgttgtctgcaccccaaagtgaacatgagacgcatgtaaca

SEQ ID NO: 531613 - DNA, 554 bp, Homo sapiens
tgaaggtagaaggcctgatactgggcacgaggaacacaaggaggtaaaaatgacatccctgctctaaagaggggcacaggggtgttaaaatagaaatcataagagtgatggaaccgactctgtggctaagagatatcaaattacaaacaggacctaaggccatgcgaggcccggggtaagtcacaccccctgcacttaaagaataagctatgttctagctgccacaaggctttctgttttttctagcagctaaacaagccctggcctggagataagcaatgctgaaacaattgccgaccatctactgccagacaccgactaactggcctcctgttccaccagccataactacacctttgatcagacaagagactgatttcagtagctttctcttgataaaagaccagcaaccatggactggttctggccagttgacagaggctgcccaytaagtgcctttgtgtcttctgtgtcaccttttgacacataggcaagatttgtggtgcatttaaacgttgtctgcaccccaaagtgaacatgagacgcatgtaaca

SEQ ID NO: 531614 - DNA, 500 bp, Homo sapiens
agctgctctccagcgtcagaaccgtgagaaaagtttctgtggtgaagccactcagtctggcattttgttcgggcactaatgcagtagctttgtataatgcaaacactttgagtctgaatatcaattcccccgcatactaactatgcccccaggttctctgggggcagatttttaaaaataaaccttttaaaattttagaatagtttttttttttttttttttttttgagacggagtcttgctctgtcaccaggctggagtgccgtggcgcgatctcggctcactgcaacctctgcctcccaggttcaagcgattctcctgcctcagcctctcgagtagctgggactacaggtgcrtgccaccacgccaggctaagtttttgtattttagtagagacggggtttcaccatgttcaccaagctggtctactctcctggcctcgtgatctgcccacctcggcctcccaaagtgctgggattacaggtgtgagccactgcaccc

SEQ ID NO: 531615 - DNA, 615 bp, Homo sapiens
ctgttcaatacttacaggctttttcttcttccattcttccatgacaaaactcttctgtcttgtgtggagcagcttgagtagtttgaaatgcctcatccagacacaggaatggatatacgatacacatcagtcagagtgcccaacctggttcaaagactcttctggaattcctacacccagtctgtcatracagtctctctcccttcctttgaaatcatgaactataagaatatgggccatatttccaacaaggtgaagggaacttcaacagaaaagaagcccagagaactgagagattcagagagaaatagttctgtttttctttttttctttttttttgagatggagtcttgctctgtcgccaggctggagtgcagtggcacgatcttggctcactgcaacctctgcctcccgggttcaagtgattctcctgcctcagcctcctgagtagctgggactacaggcatccgccaccacaccagctaatttttgtatttttagtagagacgaggtttcaccatgttggccaggatggtcttgatctcctgacctcgtgatccacccacctcggcctcccaaagtgttgggattacaggtgtgagccaccgcacccag

SEQ ID NO: 531616 - DNA, 624 bp, Homo sapiens
gaggatcccagctccaaggtggttgctttggagctcaaacattagatccccttgagcacgtggggccagccctgagagtccagaggcctgggtccgggaatcctggctctacagcatgacttcatcatgatcttgagtgagtcctttaacttctctacaccagagccagactaatccagtggggttccctaccagggagaggggattcagcaaaaccatcgggggagtatgtttgcaaaccatagggagccagtgtctgcccacagactctgatgttgttcctttgcagggagtacgtagtgtgccatactccactatcrgattggcatagcaatctgatatcacacccctcacacctgttgagaatcagttatgatctccaaggttctgacctctgagagtgacataagtcctagggaagcacagccccactccctgagacacctttttcagaagtcccatgaggtcaaagacattggggtcaggatactttaaagccaaaaatgcttaaaagtaatttgggaggggaagacaggtttcaaagggaaaagaaaggtgatagttaggaggaggtttgggagtgggtattaaaaaggaagggttggagtatggcatgcaaaccca

SEQ ID NO: 531617 - DNA, 296 bp, Homo sapiens
ctcttgcctcagcctcctaaagtgctgggattacaggtgtgagccatggcgaccagccctctttgtcctttgaagcttagcaccctccatcctgtaggcttstgaacttggtttgtgcccccgccccgcccacctccgcttacacgacaggtgccaccaaattctgcctcttctttctcctccacctcctgttgcatgtagtggtgagggacaagggatctggaaccggtcagcccaggttggaattctcttttcacctggccttagctgtgtcattggggcaagtaactcaactt

SEQ ID NO: 531618 - DNA, 296 bp, Homo sapiens
ctcttgcctcagcctcctaaagtgctgggattacaggtgtgagccatggcgaccagccctctttgtcctttgaagcttagcaccctccatcctgtaggcttctgaacttggtttgtgcccccgccccgcccacctccgcttacacgacaggtgccaccaaattctgcctcttytttctcctccacctcctgttgcatgtagtggtgagggacaagggatctggaaccggtcagcccaggttggaattctcttttcacctggccttagctgtgtcattggggcaagtaactcaactt

SEQ ID NO: 531619 - DNA, 587 bp, Homo sapiens
tgaaacaggctggatctgtctccctcctttccaaagcctgcacttctccaaaagcagcgtcatctcaggcaacatttggtagcagcaggggctccagcccactcctgtttttatgaactaatacttgccccagtcctccattttatgtaccacatgttatttaattttttttattttttatggatacataatagttctacatatttatggggtacatgtgaaactttgatacaagcatataatgtgtaatgatatccatcacctcaagcattatcatttctttgtgttaggaacattccaattccatcttttagttatattgaaatatgcaataaggccatgcatggtggctcacgcctgtaatcccagcactttgggaagctgaggcgggcagattgtttgagctcaggggtttgagaccagcctggggaacacggcaaaaccccatctctacaaaaaatacaaaaattagccaggtgtggtggcatgtgcctgttgtcccagctacttgggaagctgaggagggagaattgcatcagtctcccttgccagcttgcttstagctgggtttggccagtgggagacaa

SEQ ID NO: 531620 - DNA, 593 bp, Homo sapiens
tacctttcagtggctcccattgctcttagaatcaagaccaaaatctttaacctttctttcaggcaagtctgatattcagccaaggcataccagaatggctgttccaatggttaagatattgaaagacttttgtattattagcaatcattcataggaaggaggcctcccacaatactatgcctgaaagggggcatgaaggccctttagcacactagtcctgagtgccctaccttgtccagggcaggtgrccacaatggacaagccagtgtctgacccctggtggccctgtgtactggctctgcatctcaaaatgatgagtcctagcatcggcctccaagctgcctggctactgttaatgcacacatcacggcctctgtctcagtgcttgaatgccaggacagcagggatttggattcagcagagcaagttttctgaaggtaagcctcatgaagctgtggttagctaaggagattgtatagttccgcaaagacttttaaaaacaggaagccagcagaaggatttttttcttaccccaaaagttttcccctaataaaaggtctttcttacatgtctttcttatatttggttcttat

SEQ ID NO: 531621 - DNA, 547 bp, Homo sapiens
gatatccatggaaatttgtttactatcaataacctcatcagactacgagcttcataaaggcaggcaccaggtgtatctgctcgccgcttgatcacatatgtttaaaacagcacccaacatgaagtagattctccgtaattatttattgtttagtgaattaaatgaataagtcaatagtctccactggagagacaaaattgactgtcaaggttttgcagctcttttttttgtttgtttgtttgttttgttttgttttgttttgttttgtttttgggacggagtttcgctcttgttgcccaggctggagtgcaatggcacaatcttggttcaccacaacctctgccttctggattcaagcgattctcccgcctcagcctcctgagtagttgggattacaggcatgtgccaccatgcctggctaattttgtatttttagtagagatggggtttctccatgttggtcaggctggtctcaaactcctaacctcgtgatccrcccgccttggcctaccaaagtgctgggattataggcgtgaaccaacgtgcc

SEQ ID NO: 531622 - DNA, 547 bp, Homo sapiens
gatatccatggaaatttgtttactatcaataacctcatcagactacgagcttcataaaggcaggcaccaggtgtatctgctcgccgcttgatcacatatgtttaaaacagcacccaacatgaagtagattctccgtaattatttattgtttagtgaattaaatgaataagtcaatagtctccactggagagacaaaattgactgtcaaggttttgcagctcttttttttgtttgtttgtttgttttgttttgttttgttttgttttgtttttgggacggagtttcgctcttgttgcccaggctggagtgcaatggcacaatcttggttcaccacaacctctgccttctggattcaagcgattctcccgcctcagcctcctgagtagttgggattacaggcatgtgccaccatgcctggctaattttgtatttttagtagagatggggtttctccatgttggtcaggctggtctcaaactcctaacctcgtgatccgcccgccttggcctmccaaagtgctgggattataggcgtgaaccaacgtgcc

SEQ ID NO: 531623 - DNA, 494 bp, Homo sapiens
agggccctgcctaggttggcttaggagtagaggggtgcaccctggtcaaccctgcacctccggggcgccacgcgctcgctggcgggagggcggagggaggcgggaaggagacgctaaggcgctgcgatcccggacgcgcagccctctaggcgtggaggctgctggagccgccaggcagcttctcggcgactccacgcgtsagtgcagagatgctgcagggacgcagcgctcacaaaagcagctccgctcacaaaaatacggccacaccgagcagacgtctgctttgacaccactcgaccctgccaaaaagagcaattaatgggatcagaagggcgggaggtgggagggaaggcggggagtgggcaatgagcagagcctggctttctatcccaggacagcgtggtgttctcaagggaatttagacaaacatttcatcctaacctcaacaacaggtcctcctgagtcctcatacaacctatccttaggcggtaaca

SEQ ID NO: 531624 - DNA, 437 bp, Homo sapiens
attttctactagactgtgggctccttgcggaggggctacattttcttcacagtggtgccctcagaaagagcacattgctgatacaaaataagagctcccaaatgttaaatcaataaagtactttgacctttgaacaacagggttttaactgcatgggtctgcttatatgcagatatttttcaaacaaacagggaagggaaaatacagaatttgcatgatgcaaaactcatgcatacaaaggactgacttttcctatacatggattccacaggatcaactgcaggacttgagtatgtgtggattttgatatacatgggggtcctggaaccaatcccctgcatatatcaagaaatgactgcaattgctcttgtaaaaagaaaattgcaacaaattttatttttaaattggwtataatatattcagagaataattatttt

SEQ ID NO: 531625 - DNA, 604 bp, Homo sapiens
ttttgaattagaaagttgcaccattattgttgcccaaatacgtgcagattgctctggttgattaagcatcaatgggtttataaaataactgaaaacagtacaacakccaagtagcaatttcaccatccacaaactcagctttaagcagctaagttttttgacagtaatagaattggtgcagtaatttttctcatggcctaatggagttcatgtagatcttaagagatgactttcataaggaaagaatgtggctaaaggcacacggtacccattgagttctttgtagtttcttgatacactatcattaccacagccttctctataaaacattccatgggctttttgactgagcctctgccactgagcttagaactttaaaataagtgttgccgtggaagcaacaaataacctactaccagagtgaaaaaggaaaagttaaattgcctacaactgttagtgtttcaggactttctgcaccttttttttaaattcatttttgccaagaatataagaccctttcacatatctctgactacactggttgccatggttttctagcttttgctacttctggaaataaacaacccattagatttgtgtcatg

SEQ ID NO: 531626 - DNA, 507 bp, Homo sapiens
ataaccattctgttgcagccaaacaccagagaaaaaaatggtggattcaccccactctcatcagcaaatactaagtgaagagcytatacttccatccttgggaggctgcaagaagggaccccagcaaccaccaaggttatgtcagagaagaccaactagggagctgagactttcattcccactggccagtaatgaggtgatcactcccatttccacttccacatatggtgtcaaagaagaccatatgggcatcctggccttcgaccttcaccaggaagtaacaaataaacccaaagcaaacataaagaggaaataatgaaaataaaagcaaaaagcaattaaatcgaaacagaagaatagtacagaaaaagcaataaaacaaaaagctagcattttgaaaatgtcaatgcaattagcaaacctctagcaagactgacagagagaaggaaagagaagacacaaatgattatcaggtatccaaaggatacttgaagacatcaaaaggaa

SEQ ID NO: 531627 - DNA, 567 bp, Homo sapiens
ttgcttatttgtttataatcccccacagtgcataaacattttgcaggaagatactgcatcttgtttatctttacatttccagcacaaaataggatctcctgaatgaatggatggatggatgaaaacattattgttactaagaggcagaagacctgcattcaagtcaacacctcgctatttatccttaatccgaagcaaaccataractctctgtggaagagaatgtagaagtagaaatgtgatcttctgtctccttaaaaccaggtggctagactaggcaattccttcatggtccttatcagcagtatgatcaatgtctccatatgcaaaatattgcaagatatgttgagttgctctaaaacacgtgcaagacaagcaccctgggctctctgaagaggaggaaagatgaacagtctctccaaatgcagattcaaaaaaatctctattctaattgttatgtgaaggagagaattaactcaaagaatcagtatagaaacatgagtacgtgacctgattatgcccagttctgctaagatccaagtgttattaaaaactagccttaattag

SEQ ID NO: 531628 - DNA, 493 bp, Homo sapiens
tgggtctttgaggggtccgtctgtaagatctttccaactggagaatacctcatctactgtttcgacagtcatggaggggagctcccggttcgacagggagcagagtagccgggttgaaggtgttcactaagataatgtaagtgttgtcacacagaaacccttggtactgagtcatttttgggtttgacaaccaatgatgccctctttgatctgtcaaggttataactgagtgtggctcccagatggttagctgctgtcccagagtaaatctgttagcttcttgtgttaacaagatggtagyggctaacgccttaaggcaaggaggccatcctagtgccacggagtctagttgtttagataaatatgccactgggcaatgccataatcttataacttgagtcagaacctccaaagccattccttttcgttcatgaacttatagaaagaaaggcttagttatatctggtagtcctaaggctggggcctgagttaa

SEQ ID NO: 531629 - DNA, 509 bp, Homo sapiens
gctgggtctttgaggggtccgtctgtaagatctttccaactggagaatacctcatctactgtttcgacagtcatggaggggagctcccggttcgacagggagcagagtagccgggttgaaggtgttcactaagataatgtaagtgttgtcacacagaaacccttggtactgagtcatttttgggtttgacaaccaatgatgccctctttgatctgtcaaggttataactgagtgtggctcccagatggttagctgctgtcccagagtaaatctgttagcttcttgtgttaacaagatggtagcggctaacgccttaaggcaaggaggccatcctagtgccacrgagtctagttgtttagataaatatgccactgggcaatgccataatcttataacttgagtcagaacctccaaagccattccttttcgttcatgaacttatagaaagaaaggcttagttatatctggtagtcctaaggctggggcctgagttaaagcttccttgatct

SEQ ID NO: 531630 - DNA, 598 bp, Homo sapiens
gttactgaaaacactgtgttcggcatatgttttttccccaacctaagctcaatgttttcctttactatgacaaaacaatatcctgagaaaaaggacagtttattaatctttgaatctcgtatcagaacaaactttgctcattgcactaatcaactcacgtttttcttcaaagctgttttatcctctaaaaatggtaaaacttcggctcattttccccatgagtactattcccctgagtgcaatttcatcggagctaactctattttaccaagtagatttcatctcaagtgctccctttgaatcactgggctgggagctgcctgaaaaagaatgtgggaaggatttcgagggtgagctcagggtcagtggagagtactacaattgattacttatgtctgctttgggtgtagaagtagtgagcatgagacacatgtgccctttatttgctgtctctggcctttacagtttctmtgtccctcaattactgtgctcattaataagcattgtgaaatggctggccttgaggcaaacatacacaaaaaaaatcaacctctctatctgggaaacaagcttgaccctgacatcacaataacgttaa

SEQ ID NO: 531631 - DNA, 558 bp, Homo sapiens
tgaaaaatataattgattatatgttagcaataggtaatcagaaatggaaatttagaaacaaaacaatttgtaaaagcatcaacaaatacaaaatacttggagataaatctaaaaaataatgggcaagttctgtacactgaaactataaaacattgctaaaagatattaaagacctaaataattatttattggttaaatttaatattaagatatcaatcctctacaaattgttttgtaacttaaatgcaattcttgagcaggcagagcaagatggtagaatagaagcctacattgtacacccccttagctccccaactggaacaccaaattttagcaactctctgcacacagcaaagcaccgtctcaagaacaaacaatcasgtgagcaatcacagcacctggttttaacttcatattgtggaaaggggcactgaggagggcaggagaggcagtcttgagtcaccaacaccatcccttccccatcccctggcagtgaccatgctgcaaggagagagaatctgtgcactttggggtggaagagtgcagtgactgggggac

SEQ ID NO: 531632 - DNA, 418 bp, Homo sapiens
cggcatgtgacaggtgttcatccatgcccttttgggggaaaaaggctacatttcaggggcatatatgaacaaacatatawgtggcttcttaataataaaagttagatgtcaaaaattctttactttctctccttctcatttccatccccaccctagtcttccagttctgcccaatccatgctctccaaagtaaattctaattcctcgcacccaggagatagactgaaattctcccaaaaaaggcggctgcaaataaacatcagagttttactctcctcttttttccaccccaaaaaatatcacaaaccagtgcagatgttagctctgatgcaaatatttatggctgtctttttttttctcccctcctgaattacgggtacatgaattggatcttcaaagcaatgtacagggtttaagc

SEQ ID NO: 531633 - DNA, 505 bp, Homo sapiens
cataaaccctaaagaagcatccacaaaaaaatacaagttatttctgctaagaaatggaaagcttcttttctaaataaccttggtgcyagcctaagacagatactctataaaaccaaagtgagatgttttatcaattcactgttttcatcttaccatagttgctttataaatatgaaagagtatatctgctttatttctctcctctctctgtcttactcttgctcttctctcttcctataaatgtaagattatttgaaaaacacataacttcccaagagtgatgagtaagtttctattcaccttttattgtacagaaacattaatagactccagaggcagtgtcatcttcagaatgggtttgatctaagatggtgacaatgacaattttagagtttaccatagtggtcaaagtttcagaaagatttttttttgtctgttaagttgcaacaaatgttactaataatctgcacagtgataccagtatattattctaatattctaaaca

SEQ ID NO: 531634 - DNA, 554 bp, Homo sapiens
tgcactatcccggaatttagcctttgccatgtgaactgcagcagataataaatatttgatgtctgccccttccaggaagacactgtagcccttgacttagagctcagggcagaaatatcttcatctccttggctgtattcacttgaagttgactatctttcatgcagagctaggcaatgggaagtgagttgcagctcaataacaaaagttccaattaacttattttcagtacattttcttgaataaatacttttttgtttggtgtatacactaaggacagttttcagagagttttactgcttggttttacctttgtctttataatattaacagttgtggtcatgtcactggagaccaggttcatagtactcctcattctgccatgcaggaaatctttctagggtttattttagtgtgctaagataatgctcaaaggtaagggctaatgaccagcaaacccacctttcttcattgttcttttactgtattattagatctagttaaaattaarttcataatatttaagtaatctgtataaagcactttatactaca

SEQ ID NO: 531635 - DNA, 599 bp, Homo sapiens
tggtctccagctcctgagcacaagtaatctacccatcttggcctcccaaaattctaggattacagatgtgtgccacagcaccctgccaagctctataattatgaaagttaagttacaaagacaaactccctaaaaggttcctagatttttccccaagttacatgtgagggggatttttttttagctatttgcctttttgtgatgtttaccttctaacaagtgtgtttactgattaggaaaattaaagttgaaacaatgcattccattagaatagatctggctcacacccagaggaatatatatatatatatatatatatatatatatatatatakagagagagagagagagagagagagagagagagagagagagagtcccaatagatgatttgattttagatttcagccaaatcataagcacattgtagctagatattagatttatatcaagaagtaacctggtatgaaacaagcaatattaagtaaaagggcttcaaggcatcatagttaagagctaactagtgttccctgcaagtcagaaacataaattaacaaagagaagaaaaaatagttataaaaataaagaacattaacaca

SEQ ID NO: 531636 - DNA, 618 bp, Homo sapiens
tgcacgatgaacacatgaaggacgtagagtttgatggtgtctttattcttattgttctcaaagaggtcaaaaggagcccgataagggatgaacaacaacgccctgaattccaactgaccttctatagagaagtgcttgactgccaagtggtcttcccagtcattagtgtggctgttacagaattctccatactcctgggtgatgtaatcatggtttcttgtccaaatggtcttgatcttgtttagttcttcctgattaatgtatttctctttgatcttctcggttttctttttcttatccttaccactgtcatcctcctcatttgaacccacattttcaatcttgggtttttcctcmttatatttatcttcctattatttcttgcctttctcttcctctgcctcatcatcactgatttccttctctctttccttcctcagatagagggtgatgggttagcctatgaactgtgagtgctttttcactgcgtctttgacccatctctcttctaagtactctgtctggttttctttaaggtggaggatcattttggtacccctgccatggtcagcacatacagtgaaggaacccccaccggaaaactcccaggctcactgt

SEQ ID NO: 531637 - DNA, 551 bp, Homo sapiens
ggaccactgacaagaggatggctccagagcacccaaggggttcttggagggttctcacctcctcctggtgagtcaggatactgaggactcagtgatgctgggggacactgtgtcgagctcccaggcctggcctagggcggacgctgcgactgagcagccaaggggacacggcaggctggaggaggggccgggggcagcttctgctctcactgatgggaacatgccaccgccaccagctctgggtagtgctcagcgaacatggagctgacccatggctggcagaaggctggggacagcatacccggccctgcctcccagcttgggagccttcttagctcacgcaaggagccctccacctgcttcccagcctcacaggggcctctcctcctggccctgtcctgatgcagtgctgcctgcctgctgccatyctgtgccctgccccttcgtgtctccaaggtccaagggggaagcagggaagagaggcaagttcactccagagaagtggctcgttctcacacctcagaaaaggctctcctggaggggacatggag

SEQ ID NO: 531638 - DNA, 305 bp, Homo sapiens
cacagcacagcctataagatgtgccacgtcagtggccatcctcaagagtaggggaggaaacccaggtgaggtggagcacagggaggaaaatagattcacagagggtgcttctcgggtcatccaggcagtgtcacattttcctgccaccaccctccctgcaactggcacctgaggtgggggatggcattatgaaaatgagctcttaacctgggggatctgccctgactcrggttggtttcagaagtgagtaaaattggagaacaccagctcgtattggagaattggtcaagaaaacccacacatct

SEQ ID NO: 531639 - DNA, 447 bp, Homo sapiens
gtgagagggggaagagaaggagaagcgcatgagtaggtcatctgtgaggctgccccacgatgtgcagagaagctcaaggtgagaagccacagccctacatgcaggacagatctaggagacaccaactggggttaatcagaagaatcaaacagaatcaactgctcactactgatcaaacggattttaatgygagtatcagagcaaccatttcaacagcacatggctgacccagcagcctcgtgtttacccaacaccagtcagcaacagaggcaaaaacagaactgattagctgttagatacctagttgttgttgtttggaaggtgagggagaaagtatgaaagaagggtttcatggcgaacagacaaaaaaaaaaaagccacctgaaagaaagcaattaagttacaagacacctttcactaatggtgattatggcagatttaggaaag

SEQ ID NO: 531640 - DNA, 447 bp, Homo sapiens
gtgagagggggaagagaaggagaagcgcatgagtaggtcatctgtgaggctgccccacgatgtgcagagaagctcaaggtgagaagccacagccctacatgcaggacagatctaggagacaccaactggggttaatcagaagaatcaaacagaatcaactgctcactactgatcaaacggattttaatgcgagtatcagagcaaccatttcaacagcacatggctgacccagcagcctcgtgtttacccaacaccagtcagcaacagaggcaaaaacagarctgattagctgttagatacctagttgttgttgtttggaaggtgagggagaaagtatgaaagaagggtttcatggcgaacagacaaaaaaaaaaaagccacctgaaagaaagcaattaagttacaagacacctttcactaatggtgattatggcagatttaggaaag

SEQ ID NO: 531641 - DNA, 603 bp, Homo sapiens
tgtccatggtcgagggctaactgtgaagagtgttgtgtcttagaaagaactcttaacacgtgatcactcaagtcccagcatcctcctctatttttcacgatttttaaacgcagcttctgaacaccgccatcgagcctgccttcamctcttctttgatgttatgttccagccactattgggttctgttctttgaaaattcgagcaagcagtcttccaaaaccccaatcctcttgttgtcatggactttggacttttttgtcttgttcttggttgaagaatctaccataacttgtagaaaactcatgacttaatgagggagtgtcattatacagtgctcagcctggtacttggccatattaaagcctaagttccatagctaatatctatccacaagacaatagaaatactgtcagttctcccgggaatttctcatgcccaccttctcatctttttgagggggtctcattttggccagaagagggcagtgttgcacatatggtctcccctgtaacagcagcttccccgggagcccagagtttctcattaaatgacaggtattattggaacattccacttggctcctttttcttaactgtaggccta

SEQ ID NO: 531642 - DNA, 603 bp, Homo sapiens
tgtccatggtcgagggctaactgtgaagagtgttgtgtcttagaaagaactcttaacacgtgatcactcaagtcccagcatcctcctctatttttcacgatttttaaacgcagcttctgaacaccgccatcgagcctgccttcaactcttctttgatgttatgttccagccactattgggttctgttctttgaaaattygagcaagcagtcttccaaaaccccaatcctcttgttgtcatggactttggacttttttgtcttgttcttggttgaagaatctaccataacttgtagaaaactcatgacttaatgagggagtgtcattatacagtgctcagcctggtacttggccatattaaagcctaagttccatagctaatatctatccacaagacaatagaaatactgtcagttctcccgggaatttctcatgcccaccttctcatctttttgagggggtctcattttggccagaagagggcagtgttgcacatatggtctcccctgtaacagcagcttccccgggagcccagagtttctcattaaatgacaggtattattggaacattccacttggctcctttttcttaactgtaggccta

SEQ ID NO: 531643 - DNA, 603 bp, Homo sapiens
tgtccatggtcgagggctaactgtgaagagtgttgtgtcttagaaagaactcttaacacgtgatcactcaagtcccagcatcctcctctatttttcacgatttttaaacgcagcttctgaacaccgccatcgagcctgccttcaactcttctttgatgttatgttccagccactattgggttctgttctttgaaaattcgagcaagcagycttccaaaaccccaatcctcttgttgtcatggactttggacttttttgtcttgttcttggttgaagaatctaccataacttgtagaaaactcatgacttaatgagggagtgtcattatacagtgctcagcctggtacttggccatattaaagcctaagttccatagctaatatctatccacaagacaatagaaatactgtcagttctcccgggaatttctcatgcccaccttctcatctttttgagggggtctcattttggccagaagagggcagtgttgcacatatggtctcccctgtaacagcagcttccccgggagcccagagtttctcattaaatgacaggtattattggaacattccacttggctcctttttcttaactgtaggccta

SEQ ID NO: 531644 - DNA, 545 bp, Homo sapiens
tggagctagagttagatctggggttggcatatttattgtgtgtgtttatttaaaagacaagaaggcaaggggattggggctatggaccagaaygcaggtgaggttatggatccttgattcattcacccatgatacaaatgtctattaagcaggcattatataggagacagtgtggctggatagggaaggaggcacaagacaggagtaaatagttacaatagttacttttggagggaaaaagagggtgggaggagttcaaggaaccaaagaagtgaaggcacgagcaatcagaaaggatagtaatggaagccagtgcataaatagctctgtgtgccaagcagtgttctgtattttgcacattaactcaactctctgggataggactactgttattcacatcttataagcatggaatgattgagtaacttgtctatggtctcctagctagtacatggcaaagctgggattcgtacccaggcatcaaagccaaagtttttcacgctatactgcactgcctctagaaggttgtggtccaaaggggaaat

SEQ ID NO: 531645 - DNA, 577 bp, Homo sapiens
ctctcagagataggaggagagaagatagtggagctagagttagatctggggttggcatatttattgtgtgtgtttatttaaaagacaagaaggcaaggggattggggctatggaccagaacgcaggtgagrttatggatccttgattcattcacccatgatacaaatgtctattaagcaggcattatataggagacagtgtggctggatagggaaggaggcacaagacaggagtaaatagttacaatagttacttttggagggaaaaagagggtgggaggagttcaaggaaccaaagaagtgaaggcacgagcaatcagaaaggatagtaatggaagccagtgcataaatagctctgtgtgccaagcagtgttctgtattttgcacattaactcaactctctgggataggactactgttattcacatcttataagcatggaatgattgagtaacttgtctatggtctcctagctagtacatggcaaagctgggattcgtacccaggcatcaaagccaaagtttttcacgctatactgcactgcctctagaaggttgtggtccaaaggggaaatagtt

SEQ ID NO: 531646 - DNA, 577 bp, Homo sapiens
ctctcagagataggaggagagaagatagtggagctagagttagatctggggttggcatatttattgtgtgtgtttatttaaaagacaagaaggcaaggggattggggctatggaccagaacgcaggtgaggttatggatccttgattcattcacccatgatacaaatgtctattaagcaggcattatataggagacagtgtggctggatagggaaggaggcacaagacaggagtaaatagttacaatagttacttttggagggaaaaagagggtgggaggagttcaaggaaccaaagaagtgaaggcacgagcaatcagaaaggatagtaatggaagccagtgcataaatagctctgtgtgccaagcagtgttctgtattttgcacattaactcaactctctgggataggactactgttattcacatcttataagcatggaatgattgagtaacttgtctrtggtctcctagctagtacatggcaaagctgggattcgtacccaggcatcaaagccaaagtttttcacgctatactgcactgcctctagaaggttgtggtccaaaggggaaatagtt

SEQ ID NO: 531647 - DNA, 298 bp, Homo sapiens
agcactcacacgtcaagtatttgtgttgcacctactatataccagatactgagtttgatactggaaatacaatgctaagttaagaaccagtttctgccttcaagagctcagagtgggtgagagaggcacataaagagataataatgacatgggtgacagtaacaatagaaatctgyagaggctattccgggtatacaagggcgtgcaagccaagcagctttgtgggagtggaggaagtggatgcctatgccctatctcaggggataagcaggaattttacgggagaaacaggtgggct

SEQ ID NO: 531648 - DNA, 298 bp, Homo sapiens
agcactcacacgtcaagtatttgtgttgcacctactatataccagatactgagtttgatactggaaatacaatgctaagttaagaaccagtttctgccttcaagagctcagagtgggtgagagaggcacataaagagataataatgacatgggtgacagtaacaatagaaatctgcagaggctattccgggtatacaagggcgtgcaagccaagcagctttgtgggagtggaggaagtggatgcctatgccctatctcaggggatragcaggaattttacgggagaaacaggtgggct

SEQ ID NO: 531649 - DNA, 605 bp, Homo sapiens
caatggaagcagccactatttgctagcacagttgtcaattgcacaaagaagactattgtgccccatgtttccaaatgacatcccgtgttcttaagtcatgtaaacctcttagtaataacatggagaaacatttgtaaatcaaggggaactcttattccaagcatgggaaaagaatgttttccattgttcagaatgagtcaacagaaattaggtgacactttccctcaaaataatatctgattatattcatcactctattaaatgtctgccaaatgcttttgtgacacgtttttgagggcacaatgcaaaaccaaatagaaaagaaatgtaaaaatattacatcatttcctagagaaactgtacaacgtattgtcctggacagcttttgaaaaagattagaaacctatttgatgaaaataatttggctgaaattgtgcctagaccatgagctggaggacattgggaccttctgcttcaactctgcaattatggaagacagaggaaatccccaactagcatttcccattatcatatatagatgcmtgaactgcaattttattttaaaatacaactattaatctactcataaaaaaatttcaatggcc

SEQ ID NO: 531650 - DNA, 242 bp, Homo sapiens
agggatgccagccagtctgacccagggkttttgctccccagttgggctctcctggaaccgaccatgtgcttcattcagaacacctctgcctctgaaatgtgcctttaccctgtagggtattggtggccccctctccttcaacacacagaggcttctggaacttcaggttaaatctactgtccccacctgtgcttggtgtccacacgggctgctcaccgctgccacatcgatttcactttaca

SEQ ID NO: 531651 - DNA, 346 bp, Homo sapiens
gaggccctagcccgtgtgcattctcaactgggagtccagtcttgcttgagcctgtctccttttgctgacagcaaccaacgggtgtgagatctaagcagaggctggctttggtgagctacagggagtagctaatgatcagattagctgcccagccagatagcagcacctcagtgtcacttccagcctaatgtcatggcacctttgggttaagtttctttcagtcccatcctctctggggacggacggaacagtcaagccaaggaggagcggttctcgtgggtcccacagcgmcccccgctggcaggaggacactccaacgggagaccagtcttagggtagaggcgca

SEQ ID NO: 531652 - DNA, 486 bp, Homo sapiens
atcgtgatgaatgcagggagatgctagaatttgtttctcttttgaaataytgtatatgcctcttagtgagggaaaaactgtctctccctcactaaatagtgtgataaagggctagaaggatctgcatgtatcaatcacagtattttgggagaaaaggaggagttaaatgtttgtagcccaaggaaacagaaaagccccaaacctcaatgatatttgattatttaagagctggaaaacgatgtgtatgacacaccactcaggcttgttggcatttggtgtctggcaccaaaatggtcagggtgagttgaggatcgggccccttcctcagagatgtagaacggttctttgtgaaatgctgtctggttactttctgggtgctctgatttgtgggtgataatgttcccttttcctgccaccatccaatccttgaaagtcccactgtaaaaggaaaatgaaaaagagaccaatggcatgggttgaaaaagt

SEQ ID NO: 531653 - DNA, 565 bp, Homo sapiens
ctgctagaggatttagccatgmaactattctggtgtaggatttttctagaggccagccactgatgagaccctggaacccaaggaatgattatcatggcccctgcttttggccagggctcaggctagatgcgagaccaggttgcagaggaagaggaggaaacctgagtggtgaagagtccttctttgtctccttcacttcacacctccagttcttatgatgctggcagccttggtacctgatgctgccatcttcatccctttattctgtccttgatgagcatttagttagtgtcacaatgtgcaggccatgaagatcagaagtgaattagccacaagccctgtcctcaaggagctcaaacattagtgagaggaacagacacaagagctaactggaaagaaatgtggtctagaacaagagcatgccccaaatgctatagaattacagagggaggagtcattgattccaattagggggttagggaaaacttcaccaatcaagatttcagtgatactcagttgttgcacaatggtatgaaaatgtttaacactactgaactgcactctt

SEQ ID NO: 531654 - DNA, 565 bp, Homo sapiens
ctgctagaggatttagccatgcaactattctggtgtaggatttttctwgaggccagccactgatgagaccctggaacccaaggaatgattatcatggcccctgcttttggccagggctcaggctagatgcgagaccaggttgcagaggaagaggaggaaacctgagtggtgaagagtccttctttgtctccttcacttcacacctccagttcttatgatgctggcagccttggtacctgatgctgccatcttcatccctttattctgtccttgatgagcatttagttagtgtcacaatgtgcaggccatgaagatcagaagtgaattagccacaagccctgtcctcaaggagctcaaacattagtgagaggaacagacacaagagctaactggaaagaaatgtggtctagaacaagagcatgccccaaatgctatagaattacagagggaggagtcattgattccaattagggggttagggaaaacttcaccaatcaagatttcagtgatactcagttgttgcacaatggtatgaaaatgtttaacactactgaactgcactctt

SEQ ID NO: 531655 - DNA, 565 bp, Homo sapiens
ctgctagaggatttagccatgcaactattctggtgtaggatttttctagaggccagccactgatgagaccctggaacccaaggaatgattatcatggcccctgcttttggccagggctcaggctagatgcgagrccaggttgcagaggaagaggaggaaacctgagtggtgaagagtccttctttgtctccttcacttcacacctccagttcttatgatgctggcagccttggtacctgatgctgccatcttcatccctttattctgtccttgatgagcatttagttagtgtcacaatgtgcaggccatgaagatcagaagtgaattagccacaagccctgtcctcaaggagctcaaacattagtgagaggaacagacacaagagctaactggaaagaaatgtggtctagaacaagagcatgccccaaatgctatagaattacagagggaggagtcattgattccaattagggggttagggaaaacttcaccaatcaagatttcagtgatactcagttgttgcacaatggtatgaaaatgtttaacactactgaactgcactctt

SEQ ID NO: 531656 - DNA, 565 bp, Homo sapiens
ctgctagaggatttagccatgcaactattctggtgtaggatttttctagaggccagccactgatgagaccctggaacccaaggaatgattatcatggcccctgcttttggccagggctcaggctagatgcgagaccaggttgcagaggaagaggaggaaacctgagtggtgaagagtccttctttgtctccttcacttcacacctccagttcttatgatgctggcagccttggtacctgatgctgccatcttcatccctttattctgtccttgatgagcatttagttagtgtcacaatgtgcaggccatgaagatcagaagtgaattagccacaagccctgtcctcaaggagctcaaacattagtgagaggaacagacacaagagctaactggaaagaaatgtggtctagaacaagagcatgccccaaatgctatagaattacagagggaggagtcattgattccaattagggggttagggaaaacttcaccaatcaagatttcagtgatactcagttgttgcacaatggtatgaawatgtttaacactactgaactgcactctt

SEQ ID NO: 531657 - DNA, 584 bp, Homo sapiens
tgccagcattcacccgtgcaagcttccagcttgcttttctatgtctgtagcttcattttgcagactgttctttcttagaaaagaaatgactttggagctgctttttattaaaagggaaactttgccgacgacttttaccctcaccaactgcctaaatttctttttagctcctgtatcagtaccagatacaaaacccacaaaatttactactttacagaatagctgaattcyaattatgtttctggcagatggaagaagttaagattacttgctctggtagcaaagctttttagtaatatttgtggaaaagacaagaattttcatttgcccaaatgtcatttttcttctgatgagtcatctcccttaaaatttccatgtcaaagggctagctgtaaggttctagagaaaacaagagagaaaatggacatctcaaaggcatagagcatagacttctggcttaattactatcatttacctaaagaaagaaagaagggtataggtaaaggcccatttaagaagatggtcaggaaaaccgccttcaacaaaggtaagacttttgaagtagatgattcaaggccgtctcc

SEQ ID NO: 531658 - DNA, 613 bp, Homo sapiens
gggtgcagctggaggccattatctttagcaaactaacacagaaacagaaaacccaatactgcatattctcacttataagtagaagctaaataatgaaaacacatggatacacagaggggaacaatagggacaggggcctaccaaagggtggaagtaggaggagggagagaaatagaaaaaataactattgggtacaaggcttagtacctsggggatgaaataatatgttcaacaaacccttgtggcaagagtttaccaatataacaaacctacacatgtacccctgaacctaaaataaaagttgttttttttaaaagaaaaaaaaaagctaataaatcccttctttagaaaaaagaaaattagttccatgggcacagagtccctgtctgttttatgtatatacatacaaacgtgtgtgtgtgtgtgtgtgtgtgtgtgtgtgtgtgtgtgttaatagagacagggtctcactttgttgcccaggctggtctcgaactcctagcctcaagcaattcctccaccttggcctcctgtcccccttctgtttggtttcctgctctacttcccagaatggtgcatctgccctgcctaccaacaacagtgcctgactcac

SEQ ID NO: 531659 - DNA, 503 bp, Homo sapiens
gctgtatattatgcaagatactctatatagcttcagtaggaatggctgagctcttggattattggcatacaggctgtagcccacacacaacagcgaggcaggcacactgggccaggccagcctccaattcagaagtgctccttaatttgatagaaacaatgtgctaaaaagctcagatggcccaacctctaagccaggtggccctcctgtagccctcatgcagcatgtgaagtgtcagggttctattatactccactgggtcctgcccctggggtcaaactgggaggtaaaggcctggggactcacccatgttcacaagagggtgctggggtgtcctagccctggtcggyctccacctggatgatgcacctcttgtttcccttagtctgttttcttcttccctctgatgctcagagttgggaaatcgagaaaagaaagaagctagagagaaaggccagggttaaggtttggatgggcttccttgagggcaaaatcctggcact

SEQ ID NO: 531660 - DNA, 681 bp, Homo sapiens
ttccagctgccgccatggtgggccacgtggcacacgggccagcgatgcatgcagcagcggagccagtagttctcactgtctatcaggttggcggtcacagccagtggtaggtcaggggacaggtggttcaggaccttctgctggtgttccgggagcatctgcttcaggatagggttttctttgggaacagaggaaggagcgcagggggtcacagtgttgggggacacctcaacatgatgcctcaggctgggcctgcctgggagcaccaggcaaaggagagacccttccctgcttaggggatagacagcctctgctctcaggggggctcaagcagagggtgggacacagcctttagctttgggatgttccctgcctgaaggtggacatctcagcatctgttctcagggagttcccagactgaggaagactctcaggtccaactctcaattatcacctggtctgatgggggatacaatccctgaggtcagaggcttccaatcttatttgattcatccatttcaaaacaagaaattttttgagcacctactatgtgccagacactggaggtagcactatgagagactactatgtcccaygtgctggagatagaagagtaagcaaacagggctctcccttttggagtttacattccagtgaggggaggctgacaataaacaagta

SEQ ID NO: 531661 - DNA, 396 bp, Homo sapiens
ctgtaaccctgtcctcagtgctatctttgtacccataaatctctttatgtccaacttaggrcctgtggcaaagtttattttccaaagatggtcacaaccttctctctcatgtttcatgttcttaaaatccaactgtgatactccttccatcaagaggtagggtctatgttccctccccataaatctaggtgggcttgtgattcacctgaaaccaacagaacacaacaaaagtgacaatgcttgacctcccaggttagtttagaaaaaataacgcagcttcccaccgcactcacagtggagccctgagataccacgtgagaagttcaactgttctgagaccactacactatgagaaagcccaagcctcatggaaagaccacatgcagattcactcca

SEQ ID NO: 531662 - DNA, 556 bp, Homo sapiens
acccaccccaccaacagccagcatcaaccaccagacatggaaagacaacacctccaaatgactctatcccctatccatcaaatcacacagaaccgctgagtcctccttactaaggccctagacatcatggagcacagactaaccactccttctgtgccctgkctgaattcctgactcacagaagtcataagcatagtaaaatgcactaaatcactaaattttgaggcaaaatgaagatatccagagcaagacttattccattattctgtatatctttattcatgaaaaaaaatcttgaatttcacattatcaaaggccctgtgtgtgtgctttttgctattccaaatataaagcatttacttagaaagaaacgtatgtaggcttagatcttctgcataggaaagaggagaaataagaatcaaatggcaaaagtatatattcctggaagagtgggtgacgtgaaatatcatatgtgccaaaattacaaataggcaacactcccaaaaatggtgtggctaaaggagtgggggagtttggcccagtatgagattggccc

SEQ ID NO: 531663 - DNA, 645 bp, Homo sapiens
ctgctccctacatctgccattcctgtattatttagagatgtctttgtccctcttagtagttaactccctactactgggtcagacatcttcatattgagtcttccttgttcaaattactggtttgctttctttctcctgaacagatcctaaaccctgaatgataccataattatttgtaagatttaaaagacgatgtatattttctaaatcactaagaaaattaaaaccaagaaattacagtccatttacagacatcagtgagaaagtrtaagacatgattacagaagactaaagtcattaattagcatgaaaaacaaaacagaccctattaaaagccaaagactctccaaatggtttgaaatacaaaattcaacaagatatgctgtttaagagacaactaaaaattatatatgaaagttgaaaataaaaggatagacaatttatcatgcaaatataagcaaagaaagaagagaaattctaataaagaaagtaaaattccaggcaaaaggcataaacaaaacaaaaaggatagctttaggccatgaagtcttccttatgaattgtatgtaacagacacaagtattctatactaaataacactatcaaaatatacaaagcaaaagctctagagaaacaaatgaaatt

SEQ ID NO: 531664 - DNA, 604 bp, Homo sapiens
aaaagcaacaatgtgatccttgttttaggtttccatacatacaatttaggaaaatttatttcctaaattcctcttcccctcatattttcactttcaaaagaggaaactgtgcaagtatcaatttcgtagcctgattctcaatcccagttcaatgattaaatgtgctcgacagagtaggcaactcaacagatgttagtttccctactgcaacttactaaaaaatgagtgactcagttattctgaaatcagggacaagttattgaaatataaaycgaaaccctccttcctttctctattttctaaaaatcctataataaataatgtattacttatgcaataaagaaaacacaaagtaagaaattgtgaaaagcgaagaaagaggaagaatgcaggagagaagacaggagagtttgtaagaatcttgtttgttttatcctaagtatacagcagctcattccaaatccataggtctatcactgctcctcagggctgaaggctaaagaaaaaaagacttttaagctaatgaccactctgcttccaacgatgagacccactgtatcttcttatacaattatggagatttctatttacaatcacagttgtt

SEQ ID NO: 531665 - DNA, 626 bp, Homo sapiens
gctaagcctggctttcaagaacatccctcagagggtgctttcactgtgccaaaatctttcattcattttcctctaccattttaacatgcaatttagttaaaacactttcctttcatgtgtgtgccaagatggtgacttcataaaggtcaggaaatgaggaagcaagaacttccttgaaagatttaaaataaattatttttagtaataataaatgacaaattgggagatttaagacaaagattcctggtagttgaatgcgctgaaatctatgatgtttgrggattgttaacaatcttcttccaggatttgatcggttttgtacttgtattttctcaatctactattctttacttgctctccttcctttagaatggacaaatttttgtaaacttttaagttttctctttccttgaggtagtaaattggagttgagctacacaggttcctctttcctgatatcccctttctgctatttgatgtgagatggctcttgaggctaaaagtgcagtgagggaaagagagtcacattagcagagctatccagaatatcctctggttattttggagcctatttgtaaaataagcagggaagtgtttggggaagagtgttggcttaggtaggaaag

SEQ ID NO: 531666 - DNA, 626 bp, Homo sapiens
gctaagcctggctttcaagaacatccctcagagggtgctttcactgtgccaaaatctttcattcattttcctctaccattttaacatgcaatttagttaaaacactttcctttcatgtgtgtgccaagatggtgacttcataaaggtcaggaaatgaggaagcaagaacttccttgaaagatttaaaataaattatttttagtaataataaatgacaaattgggagatttaagacaaagattcctggtagttgaatgcgctgaaatctatgatgtttggggattgttaacaatcttcttccaggatttgatcggttttgtacttgtattttctcaatctactattctttayttgctctccttcctttagaatggacaaatttttgtaaacttttaagttttctctttccttgaggtagtaaattggagttgagctacacaggttcctctttcctgatatcccctttctgctatttgatgtgagatggctcttgaggctaaaagtgcagtgagggaaagagagtcacattagcagagctatccagaatatcctctggttattttggagcctatttgtaaaataagcagggaagtgtttggggaagagtgttggcttaggtaggaaag

SEQ ID NO: 531667 - DNA, 473 bp, Homo sapiens
ctcgtttccaaggccacactgctaaccgggagtggtggcaggtgtctgtaatcccagttacttgggaggctgaggcaggagaattgcttgaacccaggaggtagaggttgcagtgagccgagatcgcgccactacactccagcctgggtgacaagagcagaactctatctcaaaacaaaacaaaacaaacagaaaagaactgaagcacagctaagccggataagaatttatctctatctctaagtgtatctctctgtcttatgtgtatttcctgtatctcagtttctacatctgtgtattatctatctatctatctatctatctatctatctatctatctatctatcatctgtctatctttctatctctstattatctatcagctactatgtgccaggaattgtaggctgaggagatgtgacaataaacacaattgccagagttcctactctcatggatttttaataagtgca

SEQ ID NO: 531668 - DNA, 605 bp, Homo sapiens
caggactctgagttatattgcacaaggctccttgatgttctcatcatgcagcagaatttgaaaaccagtctgtctgatttcaaaacttgtgttcttttaccagamcaccatacactgcctctcagagtaaaggagagataaatcagtgaggacagctaagttgggaggtcaggagactctctctcctggaagagaaacaccgaactaaaacaaaaccatgaagttcagtgttctaatttagaacaccaacctttgaagtcccatattctggcctttgctgggtatagaatacgagccatctcatgctctaagatggctggtaacctttatctctttcttccaggttagaaagttagctgtttctgaaggcattaatcttagtgatattttatatcatacattgtaattcattatgccacacagttcgttcattcattcaaaaatgttttctggtagattgactgaaaaaagtagctctggttttatttatttatttatttatttatttattttactcttcccatacccattgcaatgtgacattgcagattttatcaagaggtagtctatttcaccatgattttaatctgggctctccttgtatc

SEQ ID NO: 531669 - DNA, 589 bp, Homo sapiens
tttcaattaagttaaatcacaagtatttggagaaaattctaagtgttggtgatggttagatgctgtgtgtgaggactgactcactgtgctttctttttttttttttttttccttttacaaacatccttcccctcacaaacaagtgcacactattctggagagtgtattcttggaagataagcagctaagaaagataatcaagaaaagacacttagtaagaartgatctcatcactacaggaacaaatatggagtgcttggctttgtccgtgggaggaagaaactgtcatccctctctcccggcatagaccatggctgtgtatttccctaattaatttcctattgaatggcctgcacaaagctactttctgttgtctcttaactcagtccccaaagtgctgaagaaaatcttatactacttaattaccacagcaaaagtgatggagatccttagtagcaccgataatacagacattaaggtttggattactgctttggaacattgctgttaatgaaacagtggtttgctagactgcaaccattcgccaaatcacaaggaacaaacttctacatgtgaacactgttgttgg

SEQ ID NO: 531670 - DNA, 589 bp, Homo sapiens
tttcaattaagttaaatcacaagtatttggagaaaattctaagtgttggtgatggttagatgctgtgtgtgaggactgactcactgtgctttctttttttttttttttttccttttacaaacatccttcccctcacaaacaagtgcacactattctggagagtgtattcttggaagataagcagctaagaaagataatcaagaaaagacacttagtaagaagtgatctcatcactacaggaacaaatatggagtgcttggctttgtccgtgggaggaagaaactgtcatccctctctcccggcatagaccatggctgtgtatttccctaattaatttcctattgaatggcctgcacaaagctackttctgttgtctcttaactcagtccccaaagtgctgaagaaaatcttatactacttaattaccacagcaaaagtgatggagatccttagtagcaccgataatacagacattaaggtttggattactgctttggaacattgctgttaatgaaacagtggtttgctagactgcaaccattcgccaaatcacaaggaacaaacttctacatgtgaacactgttgttgg

SEQ ID NO: 531671 - DNA, 634 bp, Homo sapiens
taagcctgtgaaatcgaaaaagttatgtgctttcaaaatacaatagttgggacaaacataggataggtattttcattccaaaagggtgaaataggcaagaagaaaggggtaacagttcccacataagtccaaaagccaacaaggcaaaaactactaaatcttgaggcatgagaataatctttttgagtccatgttccaccttctgaacacactgaggcagaggctgggcccccaaggctctgagcagccctgccctatggcttttctgggtgtagcccacgcaataactctcatgagttgtagtcacatgcctgcagctctcctggggtggagttacaatgttagtggctctcctagtttgatgtctgcatgttggtcctgtccacatggctgcactagttgttgccctaatggggggtttctgtagtggccctgacctcacagctcctctgggcattgccctagcgggtattctctgtggcgaccccacacycaagactacagtaggcattggcctagtgaaggctctctgtggtggccccaaccccacaactcctgcactctgcacacctacagagttagcactacatgcctgccatggaagtttatggcctccaccttccagaggggaggc

SEQ ID NO: 531672 - DNA, 665 bp, Homo sapiens
ctgcaaacatctgcagtgaaagaagtctgggacaaaaagcagtttctgctcttgcctcctgttctttcagaaaacaccagtcttctagggcagtaaattagtagtgagtcactagctgtataatacgtgctgcttgtctcatgagacattaaaccgaggtcccttctgctcacatcgtgcacctgtcaccaaatgtccaataaaaatcctgttctctgagggcatgtcaggaaggagcagggcaaagacttgcccaagccttcctcagcagtccaggagagcccccaggcaaggtactccctgtggcctgccccaaggctgagtcatcagaggccctcatccgcaaatcccacctgatctatggctgctggcaatcasacacagagaaatgaatgccaaataagggctgtgtgtgacacactcaagtttactccctctccgaggtggtctggggaatttctgaggtagatctcacctaggtagtggggaagaatgggcatgggccagaagtcaggagacttggtttcaaagcttttgtcatgtagtcagtgtgtgacctgagacaagattcccaacttcccagatggctctcctgcattatctcctgtaaaatagggacagtgatagctgtttgccaacctcacacatcagccttaatttttttt

SEQ ID NO: 531673 - DNA, 526 bp, Homo sapiens
cccgcagcgtccccacacgcggggcgagaatcacacactctggtaccaaaggcgcatttgtgtttttgtatcatttgcgtcgtgtaaaaatagcgtccccgtaaagatgtgggctttgtcgctgggtgacgtggtatctctcacgttccaggtggtgggagggcttgctatctttccatcagctccatttcccacaagtaaagattaaagaactggatacatcaggcatctcacctgacgctccagcagacagaagcacagccgcctccaggctgcgcgtctcacgtytagaattctaagacatcccatgatgtctcaggacaacagcagcaaacccttactgtggactttacatgggataggtagggagctttaccatcttaatgtttacgtcgaccctatgaaatggatcctataactaactccatcatggccacgggttggagaatgcggagctgggatttgaacccagggtgactccagagtcagctcagtggcccggtgtccttctgttcatcttctagga

SEQ ID NO: 531674 - DNA, 551 bp, Homo sapiens
acagtgatgccatcctggggamgaccccccggatcccgggctctcctggaagcctgtgatgctccttcaccacagcccctgtcccttcataggtcccataagccagtggtgcagggatccggcctttctctcctgtgtctgcctcctgcagaaccatgagcagcttcagggccgaggcagtgcctttccatccgtgaatctcctgatccatcagaatactcgagagagagtgatgcccaagaaatactgactgagtgtattcatgaaagaattaatgttcttacaggatcacttgttgttgaactgacctgacatgtgtatagtgatctcatgaacaagagggaagctgtgcatccattcacttcaattggatttagcaatcgcagtaggataatgatatttccacaatgtatatgctctgtccctttaaatttaactttttgctttttagacagaagctcatcagtcttagggagttctgaaggcggatttctcagccgcgttcaagctgaagagttcgccagttcttccccagacagtgcagagcggca

SEQ ID NO: 531675 - DNA, 552 bp, Homo sapiens
gacagtgatgccatcctggggacgaccccccggatcccgggctctcctggaagcctgtgatgctccttcaccacagcccctgtcccttcataggtcccataagccagtggtgcagggatccggcctttctctcctgtgtctgcctcctgcagaaccatgagcagcttcagggccgaggcagtgcctttccatccgtgaatctcctgatccatcagaatactcgagagagagtgatgcccaagaaatactgactgagtgtattcatgaaagaattaatgttcttacaggatcacttgttgttgaactgacctgacatgtgtatagtgatctcatgaacaagagggaagctgtgcatccattcacttcaattggatttagcaatcgcagtaggataatgatatttccacaatgtatatgctctgtccctttaaatttaactttttgctttttagacagaagctcatcagtcttagggagttctgaaggcggatttctcagccgcgttcaagctgamgagttcgccagttcttccccagacagtgcagagcggca

SEQ ID NO: 531676 - DNA, 509 bp, Homo sapiens
cgtggctgcttgagaacattgggagatcttgctacagaggtccgtgggtccttaccttgggaacgccggacacagcgcacacagcccaccaaccccagacccctggtggtatcacgctgtaagcacagaactcctactcgccttgtagtcctctccataatcctctccagttctcaaaacacatcatcagcttgattttctcctcggctgtgccagcataagccaacctgttccttcccacaccgtctgggccttcgggccctgccaggtggcaccactgcagaggggcaggactgagtgggacacataggtgtgtggttacctgcccgagagagggtggctgaccatctgggacaccatgcccagtcacactccctgccacacaggctggccctgagccatggcatttaggccaaggggaggggccctggctggcatttgtcacacgtcttccygtgtctaaagtgcagaattcgggaaatacttctgagggcaggattgccatgtag

SEQ ID NO: 531677 - DNA, 503 bp, Homo sapiens
gaggagaggacaagccctgcatggaggacagtcaaccaggaagcaactgagaggaaatggaacggaggcggaggatccaaagacaggaggagggatggcagtgcctgctccctgatcagccaggctggggagagggcagcacgccccaaatgaagggcacgtgaggctgggtgacaagaagaaggctgctggtggtcagagacactgggctatcaggggaattctaacaggtgggagaaaatgcacagctcggcgtggggcagcttgagaggtaacattcgagaggccaggaggcattagctcgtggcagctgcacttttctctgcctttgatcatcgcctgtctgggcacctggctgtcactgactggaaggagaaaaggccagggccgggtggcatttgctccccctcccatggtcagaggtggccagtggcctaatgaatkagggtgagtgaaggaagcatttggaatttcatggagaggcccatttccttccacacata

SEQ ID NO: 531678 - DNA, 525 bp, Homo sapiens
acttgtcaggacccctttgtaaaatgtatgaggttttgatccaagtagagttagaagtttaaaagttcgcccatttgtaaaattatggggctcaactacattttttaagcaggcttccaattcttaaaaacaactacagcaataaaactagggtgagtctatgatttcaggcaaattctaattggctgattgtacgttagacctttttcttttgcatctaaaattaaatgaactgataccttcatgtatacacttgatctctgttaagatggtggactaaaaatttgttagaatagaaaaaaaatacataaagagtgaaataatatgatctcttcagaatggccaaattgtgctgagatggtgatgaggagccgctctatgtcctgaggcatcttctaagaaaaytctctggctggtgctttctgagttcatcctcctcagacctcactgctctcacatttttgtttgtatttcttcatcctctgcctgggtcgcctgtcctggagcgtggggtctgatcgggtt

SEQ ID NO: 531679 - DNA, 290 bp, Homo sapiens
gccgcaggtcaggttcgagtctgcrttccagcaccctctgggatttgtagccccttccatgaacttgggtgctcatttcccagggattttgtgatttgcttgagcattcctcggtatttgtagtggatgtgtggctgggatgtctgatctgccccattgcaagggcagaatcaaggccgctgtggggtatctgctcctccgtgacacaacggacctccagatgggcccttgaagctgctgagacacactgtcctgtgaattcctggctcccaccctttttctttttgtcc

SEQ ID NO: 531680 - DNA, 290 bp, Homo sapiens
gccgcaggtcaggttcgagtctgcattccagcaccctctgggatttgtagccccttccatgaacttgggtgctcatttcccagggattttgtgatttgcttgagcattcctcggtatttgtagtggatgtgtggctgggatgtctgatctgccccattgcmagggcagaatcaaggccgctgtggggtatctgctcctccgtgacacaacggacctccagatgggcccttgaagctgctgagacacactgtcctgtgaattcctggctcccaccctttttctttttgtcc

SEQ ID NO: 531681 - DNA, 290 bp, Homo sapiens
gccgcaggtcaggttcgagtctgcattccagcaccctctgggatttgtagccccttccatgaacttgggtgctcatttcccagggattttgtgatttgcttgagcattcctcggtatttgtagtggatgtgtggctgggatgtctgatctgccccattgcaagggcagaatcaaggccgctgtggggyatctgctcctccgtgacacaacggacctccagatgggcccttgaagctgctgagacacactgtcctgtgaattcctggctcccaccctttttctttttgtcc

SEQ ID NO: 531682 - DNA, 624 bp, Homo sapiens
cttttttctcaataatttaccatggagtacttttctcattaatatataaggaggggttttttttttttcttttgagaccaagtctctgttgcccaggccagaaggcagtggtgcaatctcggttcactgcaacctctgcctcccaggttcgaayggttctcctgcctcagccacccaagtagctgggatcgcaggcatgcctggctaatttttgtatttttagtagagatgaggtttcaccatgttggtcaggctggtctcgacctcctgacctcaggtgatccacccacctcggtctcccaaagtgctgggattacaggtgtgaaccactgtgcccagtcagggttgtttttgtttgtttgtttgtttttctttaaaaaaaacaacaacaattgtataatgttcttctgtaaggaagtgacgtttatttaacctatccccaactgaagggtatacctgttgtttccgatcttgctattacacaccgtgctgtagtgaatgccacatgaaactgtatacatcacatagggacagatgtatgtctgccattgtgatgggctgtgacaatttacacttttgagcaatacataaaaacacttactagatgcttctccccacccatcc

SEQ ID NO: 531683 - DNA, 624 bp, Homo sapiens
cttttttctcaataatttaccatggagtacttttctcattaatatataaggaggggttttttttttttcttttgagaccaagtctctgttgcccaggccagaaggcagtggtgcaatctcggttcactgcaacctctgcctcccaggttcgaatkgttctcctgcctcagccacccaagtagctgggatcgcaggcatgcctggctaatttttgtatttttagtagagatgaggtttcaccatgttggtcaggctggtctcgacctcctgacctcaggtgatccacccacctcggtctcccaaagtgctgggattacaggtgtgaaccactgtgcccagtcagggttgtttttgtttgtttgtttgtttttctttaaaaaaaacaacaacaattgtataatgttcttctgtaaggaagtgacgtttatttaacctatccccaactgaagggtatacctgttgtttccgatcttgctattacacaccgtgctgtagtgaatgccacatgaaactgtatacatcacatagggacagatgtatgtctgccattgtgatgggctgtgacaatttacacttttgagcaatacataaaaacacttactagatgcttctccccacccatcc

SEQ ID NO: 531684 - DNA, 624 bp, Homo sapiens
cttttttctcaataatttaccatggagtacttttctcattaatatataaggaggggttttttttttttcttttgagaccaagtctctgttgcccaggccagaaggcagtggtgcaatctcggttcactgcaacctctgcctcccaggttcgaatggttctcctgcctcagccacccaagtagctgggatcgcaggcatgcctggctaatttttgtatttttagtagagatgaggtttcaccatgttggtcaggctggtctcgacctcctgacctcaggtgatccacccacctcggtctcccaaagtgctgggattacaggtgtgarccactgtgcccagtcagggttgtttttgtttgtttgtttgtttttctttaaaaaaaacaacaacaattgtataatgttcttctgtaaggaagtgacgtttatttaacctatccccaactgaagggtatacctgttgtttccgatcttgctattacacaccgtgctgtagtgaatgccacatgaaactgtatacatcacatagggacagatgtatgtctgccattgtgatgggctgtgacaatttacacttttgagcaatacataaaaacacttactagatgcttctccccacccatcc

SEQ ID NO: 531685 - DNA, 603 bp, Homo sapiens
gaccttcggaggagaaggggttgtgggttgagttgcrtcccccggaaaggtatgttgaagccctaacctggtgcctgtgaacgagccctcacttgcagaactgatcaagttgagctggggtcaactagagcagggtgagcctcgagttccatgtgaccaatgtcctcatgggaggagaggggagcacggggagaaggtgaccacttgaggacgaaggcagaggttggggtgacgcgtctacaaacgagggtttccccgaacaccagagctaagagcaaggcatgggcgccctcccgctgtggagtctgcagagggagcctggcccggctgacaccgtgggtgcagactcccggcctccaggctgggggacaagaagttcctgttgtggcgacctcaagaaactaacacaaaggggcatttgaattcagttgtccaggaagatacaggtgttgcagggatgggctgccacgtgggcggaggcctggatgggaaggattgtgccaggcatgggttcccgcagtgtgttcccctggctggcagcgtcgcggcacctgggagtcattaggcagcaagggagggaattgcgattctgggcggggctca

SEQ ID NO: 531686 - DNA, 288 bp, Homo sapiens
attccttttttttttttttttttttggaaatgaccatagctcctttctctgaagctcaatttccctgtggctggaggtgaaaataagacaagagaaatgaggkgttagcacgatctggacctgggaggggagccaggtttaggaaaatcaggtgtccctgaagtaagaggaaactgtgacattacagagatggacgatggtttggatatgagagcaagacaagaaaatgaaatgcaatgaacttgtgagagtcgacaagaaagttactgactgtggttgaaaaaaatg

SEQ ID NO: 531687 - DNA, 596 bp, Homo sapiens
catctgacctaaagcagtcatttagtgaggaaacagtcaataaatcaaagaactagacagggaggctgagcagcatagaaccttctaataaacctaagcacatcacagtcttgcttaaaaccttcacggtttcccatcaccaagtaacagaattcaaattctatagttgggcaaacagtttctgacatagcgcctacctcctctgccgttgcatccctgaccactgmcccagtgctccagcaatagtgggtcactgggagatccctccataaactgcccacctgctaccccccagtgttttcaatctccccaccaacttctgcctgcataatatacttctgttcctttgccaagactcctcctatttttccccctccgtttttctacctttgttacacttatgaaacatacatactctcctagaattagctatgtatgttttcgcctgggagctgagtctgacttatctttgaatgcccagaaattcacagggtctggttgcaaatggggcacaataaaagatttttgaataaaagaataaagtgctggaaagaaaagagaaaatgtgagactcaaacaggaaaggaactgatgta

SEQ ID NO: 531688 - DNA, 463 bp, Homo sapiens
agtatgggcaatgtgtgtgcacactcacatgtttgcacacacgaacacacacacttattctcaatgcttgccttggaggcaggagatggcaggaaacatcagggactggttgtagacttatcaagctggagatcatttgttccaactgtcattttgttcaggaaactcaagactgatttgtgcaaaagcagttagttacctcaggggtagaactaaaaccagaaccyagataccctgactccttattaaattttatttttctctacttcttctcattaaaatccaattcacacaaaaggtaaagatcaaaggcaaagacaagcaagagtctattgatagtttcctccaacttgaggtttcagcagtacaattttggataaatttaaaaaatgttgattccacctgtgcttctcacctgctggaagccaaaagaatgataagcaacgtattaacaggttgcaca

SEQ ID NO: 531689 - DNA, 463 bp, Homo sapiens
agtatgggcaatgtgtgtgcacactcacatgtttgcacacacgaacacacacacttattctcaatgcttgccttggaggcaggagatggcaggaaacatcagggactggttgtagacttatcaagctggagatcatttgttccaactgtcattttgttcaggaaactcaagactgatttgtgcaaaagcagttagttacctcaggggtagaactaaaaccagaacccagatacmctgactccttattaaattttatttttctctacttcttctcattaaaatccaattcacacaaaaggtaaagatcaaaggcaaagacaagcaagagtctattgatagtttcctccaacttgaggtttcagcagtacaattttggataaatttaaaaaatgttgattccacctgtgcttctcacctgctggaagccaaaagaatgataagcaacgtattaacaggttgcaca

SEQ ID NO: 531690 - DNA, 463 bp, Homo sapiens
agtatgggcaatgtgtgtgcacactcacatgtttgcacacacgaacacacacacttattctcaatgcttgccttggaggcaggagatggcaggaaacatcagggactggttgtagacttatcaagctggagatcatttgttccaactgtcattttgttcaggaaactcaagactgatttgtgcaaaagcagttagttacctcaggggtagaactaaaaccagaacccagataccctgactccttattaaattttatttttctctacttcttctcattaaaatccaattcacacaaaaggtaaagatcaaaggcaaagacaagcaagagtctattgatagtttcctccaacttgagrtttcagcagtacaattttggataaatttaaaaaatgttgattccacctgtgcttctcacctgctggaagccaaaagaatgataagcaacgtattaacaggttgcaca

SEQ ID NO: 531691 - DNA, 579 bp, Homo sapiens
accaagtgaccttaatcagtgctacaaagggcaaaagtatcaatgagatgaacacttccacaaattcctaactcacagaatctgcaagaaaaaaaatcattgagttttggggtattctgttacatagcaaaagtaactggaacagctagtaagttgtagaacctgaatgggagctgggcattctgactccagagttctcacacttcatccctaaagatgaacagtcccacaataatctatgacacgagtgtttgcatataacaggatcttgccttaactgcaagggctcaatttctaatggcaaaatttctggcaccartggaaaggttgatggtgtcctcacatcaaatcaaggtgctcattatctatttcacactagaaagacattagccctgatcattgaatactttgtataatttatttactacttattagaaaacacattttcaactttttattggaatgtaacacacatatagaaaaaagcacaaatcataggtgtatcatttaataaatcatcataaagttaattctcccatgtaatcaccacccaagcaataaatagaagggaataaggag

SEQ ID NO: 531692 - DNA, 495 bp, Homo sapiens
aaactgaattttatcttcccaaaagttcatgtgttgaagccctacacccccagtgtaatggtatttagagatggaacttttaggaggaatttaggtttagttaaggtcatgagggtggtactttgtgatgggatcaatgctcctataagaggaaacaccagcattctggctctttctctttctctccccactgtgtgaagacacatggagaaggcagccagaaagagtcctcaccagaacccaactgcaccagcaccctgatctcagactgccagccactggaartgtgagaaaataaatttcccttgttgataagccacccagtctgtggcaatttctttttatggcagcccaaacagactaatgcagcctgttgaccaagcacttacagcctgacttatttttcccctgtaatactgtgatgcctcacaatgcgaactgttcatcagttgtctttataactccagtttctatcagagtaactggaatatagta

SEQ ID NO: 531693 - DNA, 495 bp, Homo sapiens
aaactgaattttatcttcccaaaagttcatgtgttgaagccctacacccccagtgtaatggtatttagagatggaacttttaggaggaatttaggtttagttaaggtcatgagggtggtactttgtgatgggatcaatgctcctataagaggaaacaccagcattctggctctttctctttctctccccactgtgtgaagacacatggagaaggcagccagaaagagtcctcaccagaacccaactgcaccagcaccctgatctcagactgccagccactggaagtgtgagaaaataaatttcccttgttgataagccacccagtctgtggcaatttctttttatggcagcccaaacagactaatgcagcctgttgaccaagcacttacagcctgacttatttttcccctgtaatactgtgatgcctcacaatgygaactgttcatcagttgtctttataactccagtttctatcagagtaactggaatatagta

SEQ ID NO: 531694 - DNA, 383 bp, Homo sapiens
tgctaacataaatactgaagacatagttctacaagaagaaaaaagaatagtaatcccagaatactgggtccaaattctgactgcaattttctggctttgtgaactgtggtgagttacttccctgtgtgttatcttaaaatgagaataatcagagttcctcctcgcaaattgttttgaagtttaagcaagcagaaagacwagaagcgcttcacaaaatctaggtcctcagcacaaaattaatacctgttagttgttattacaggagaagctttatgagaaaaaaggcccttgggcgggacttccatacacaccctaagtctgtaaagattatcctaatagcataagaaaggcctcaaaaaactcacctgtgatgtgcagttgaa

SEQ ID NO: 531695 - DNA, 383 bp, Homo sapiens
tgctaacataaatactgaagacatagttctacaagaagaaaaaagaatagtaatcccagaatactgggtccaaattctgactgcaattttctggctttgtgaactgtggtgagttacttccctgtgtgttatcttaaaatgagaataatcagagttcctcctcgcaaattgttttgaagtttaagcaagcagaaagactagaagcgcttcacaaaatctaggtcctcagcacaaaattaatacctgttagttgttattacaggrgaagctttatgagaaaaaaggcccttgggcgggacttccatacacaccctaagtctgtaaagattatcctaatagcataagaaaggcctcaaaaaactcacctgtgatgtgcagttgaa

SEQ ID NO: 531696 - DNA, 593 bp, Homo sapiens
tttccaatggccctgccaacactccgctgcctctgggctggcccaggttgctggtccatctctcctgacccttcacgtcctactgcctgtggccctgcgtggtggggagggctggcgacaggtgagggccccagggccctggaagaccgaggcagggaaggggccgcatcctgttcccaagggacatgatgatggtgctgccaacatgcagccttagacctttggctctggtagtgccggggggagctctgtgcgtcaccgtgcactgcttaatgatggacagccctgcctggctgtcactgggctgacacatgggctgtgtctgctctggagcctctgaccctgcatccctccttgtccatcccagagcccaaggtggtgtttgccaaggagcagccggcatgcagggaggtgcaggcggaggcgggggccagtgccacgctgagctgtgaggtggcccagggccagatggaggtgacatggtacaaggacgggaagaagctgagctccagctcaaaagtgcrcatggaggccagcggctacacacggaggctggtagtgcagcaggcgggccaggcggatgctggggagta

SEQ ID NO: 531697 - DNA, 440 bp, Homo sapiens
gcccgcctcagcctcccaaaatgctgggactacaggtgtaagccactgcacctggccatttctgttgcattctattggccaaagcaagtcagagtcaacccagattcacaggatggggaaacagactccacctcttgatgrgagaagctgtaaagtcacattgctaagggggaggatataaggaggagactagttggaaccatttttgcaattttggaagataactgctatcttattcaaggaggttacacaacctctcacttttcaaacatcccagatttctataaatctccatctctggcttggtggcccctaagaattctcaatccattttggtgaggggacatttagtgatgagtgttgtcttgctacatgagtagttctattattggcattcccttgctactcatccattatttataatgctttcctgtatgtat

SEQ ID NO: 531698 - DNA, 614 bp, Homo sapiens
caacaacaaaaattctcaaaactataacagtaatttaaaaggcattaaatttcctttacataaaaatactccagaaaactcagaacatactttaaaatgataaagataatttgacagaaggaactacaaggaaggattcagtatgctaaattatgtagacaatagtaaacacacaaatattattaagcattatgtatcaatgactccctagacaaaacaagtgagttaaaatacaaaaatatatagcacaagtgttctcaaaacgattgttctcaaaattccctacactctaaagttactgagtsttccgaagagcttttatttatgcagaataattaaccatttaactataataatctaaatttctattttaaaaagtgatagtaaaactattatataaacataaaattttatgagaaatagtaatatttttcgaacacaaagtaagaacagttacagtgtcttacatttttataaatctttgtaatgttgtgtttaataaaaaacccattgatctttatacctgtttctgttttcaatctgtcacaaaattacacaccacatagcctctgaaaaactcttctgtattttctgagaacatgagaataaaaaaa

SEQ ID NO: 531699 - DNA, 614 bp, Homo sapiens
caacaacaaaaattctcaaaactataacagtaatttaaaaggcattaaatttcctttacataaaaatactccagaaaactcagaacatactttaaaatgataaagataatttgacagaaggaactacaaggaaggattcagtatgctaaattatgtagacaatagtaaacacacaaatattattaagcattatgtatcaatgactccctagacaaaacaagtgagttaaaatacaaaaatatatagcacaagtgttctcaaaacgattgttctcaaaattccctacactctaaagttactgagtgttccgaagagcttttatttatgcagaataattaaccatttaactataataatctaaatttctattttaaaaagtgayagtaaaactattatataaacataaaattttatgagaaatagtaatatttttcgaacacaaagtaagaacagttacagtgtcttacatttttataaatctttgtaatgttgtgtttaataaaaaacccattgatctttatacctgtttctgttttcaatctgtcacaaaattacacaccacatagcctctgaaaaactcttctgtattttctgagaacatgagaataaaaaaa

SEQ ID NO: 531700 - DNA, 627 bp, Homo sapiens
ctagacctgtccttttgctttacagtcccgacaccagttttctaaacaatggaagctctctcttttcttctttctctcttacagtctaaccatccaaattttgagctattgaggttttacttttttcccccagctttctgcactttaggaaatgtgtcttctactttgacggacagctgcaatataatgactgaaaaccaatgtccctcaatactatatatctcagtgtattcatttgctagggctactataacaaactagtgcaacagtatactgagtgggtaaaacaacagaaatttattgtctcatggttctggatgctagargtctaagatcaatgtgttggcaggggttacttaaacaacagaaattcattgtctcacagctctggaggctagaagtccaagatcaacatgtcagcaggggtggttcctcttgaaggctgtgaagaagaatgtgttccataccactttcctagatctgacagatttctgacaatctttgacattccttgggttggtagacatatcaacccaatctctaccttcatgttcatatactttgtgtatgtacatctatgtgtatgcatatgtatccaaattttccctttttacaaagacactagtc

SEQ ID NO: 531701 - DNA, 627 bp, Homo sapiens
ctagacctgtccttttgctttacagtcccgacaccagttttctaaacaatggaagctctctcttttcttctttctctcttacagtctaaccatccaaattttgagctattgaggttttacttttttcccccagctttctgcactttaggaaatgtgtcttctactttgacggacagctgcaatataatgactgaaaaccaatgtccctcaatactatatatctcagtgtattcatttgctagggctactataacaaactagtgcaacagtatactgagtgggtaaaacaacagaaatttattgtctcatggttctggatgctagaggtctaagatcaatgtgttggcaggggttacttaaacaacagaaattcattgtctcacagctctggaggctagaagtccaagatcaacatgtcagcaggggtggttcctcttgaaggctgtgaagaagaatgtgttccataccactttcctagatctgacagatttctgacaatctttgacattccttgggttggtagacatatcaacccaatctctaccttcatgttcatatactttgtgtatgtacrtctatgtgtatgcatatgtatccaaattttccctttttacaaagacactagtc

SEQ ID NO: 531702 - DNA, 607 bp, Homo sapiens
aatcaaagcaggccgtggaacaaccacttgatagagatatctgcattacaaaagtggagccaagttctaatatccaacacaatggagaaaaggcctgaaaagcatttcagagacctttgcagcagccctttccataacagccccagaggttttggaagacagaatagtttcatgggccaggcccagggccttgccacactgtgcagtcaaggcacagtgctctgtctcaggacactacctttcatttggggaacagccacgttctgttgagtaatattgtgccctgccccaycatgtgccccaccttagaggatgtcgcctttcacttaatctgaatcctgtctaccactgaggtagaaaaactctttcaaattaacttgtttctccttattccatatatgacgagttcttcctcattttgacactatcaggcatgaaatcaaccatgaatttctttcctcctgtgaagagattaatgctttctggaatttagtttacttggaattttttttgtatctttaactctttgatgtctttaaaaatgttttgcccaaatgtcttgtgatagggatacagcaccattctgttgtgattttgtacacattac

SEQ ID NO: 531703 - DNA, 339 bp, Homo sapiens
gtgctgaggacataaaggaggggcattctgaggccatcaggacatctcccagagggcaataggatgaggcttaggatgaataagactgggaggaagggtggaagcaaaacacacacacacacacacacacacacacacttgaacatgcacacacatgcacacacacatacatgtccataaatgtgcacacacacgaacacacatgygcacatgtacacacacgcacaggcacacacatgaatgtacacacacgcacacacacgaatacacatgcacacacatacaggcacccacacacgaacgccccatggttcctgcaccttacctaccagtagctga

SEQ ID NO: 531704 - DNA, 619 bp, Homo sapiens
gcccgccccggaccggggctcaggcggggcttcccgggatcagccgggaacaaccgactcccgggcgaaggaaacttttatctgggaggagagaagaagaaatgagatcaggcggtttagagcaggaggatttcaggtctttgggctccctcctgacgttgatccttgggctgtggggcttttccttacctctgttacaagacagagctgyctaccttcccagatcagcatgccaattatcttaataatgtttcctcccaaaggcaattagaagagactccctttcaaaaatctgatggctgttgaaagttaatgaacactttaccaggagatcttacttcctggttcctttgctgctcccctaagccgtttcctctggtgggtgacggccagagatatcggtttgtgggttgatgaaactccctcccccgcctttgtacaccttccgtaatctgtctggagtatgactgaaagttacatagtatcaatacaggaatctgacatatacagtgtaaggcaccaggatatctgaaaatccctaagctagttgcagcttccacttagcttttaaaatcactcactgttaagtaaatgaaaaactatactggggtctaaacag

SEQ ID NO: 531705 - DNA, 653 bp, Homo sapiens
tcagctgtcagaaaagacatctctgattattacacattgtaggcctgtatcaaaatagctcatgtaccccagtaatgtatacatctgctacatacccaaaaattaaaagttaaaaaaaaaagacatctttgtaatatgctctatggcaggaggattttttctggagaattagaatcctgttactttagagacaaaagtgcttaaagagaagagcttcattcctctcatttcacagatgaagagacaaaggcccagaaagtctcaatacttgagctcacagctaattagagctcaagtgattcctagaactcaggatcacaatgagtacctgcgggcatcacacatgaagaccgcaccgttaactgagcaaatttcttgagagagctacggacatggtccacacaggacgggcaccaaggagacaaagctgagggcacaatcaagagaagcttctgcctctgccccagacagtcttttgtctttcatcccatggaaatggaaatgcaaacgtttattagtttattacgtaagttccttccttccttccttccttccctccctctctccctcctttctctctttccctccctccctcctttcgttttccttccttcyttctctctctctctttctctctctctttctttctttct

SEQ ID NO: 531706 - DNA, 462 bp, Homo sapiens
ctgtttttctcttctaaatgtttttttatgagtatcaataggaagaactgtttggtgtgctttcttcataaaattgtgggtgagaagcctgcttgggagcctctgaaattatgggagaaagtaggaaatggcaaaatagtgccttgaaacaatgaaatgtgactagagcatctacctggcaccctcaaatgcatacaaggctgagcatcataagaggacaggcatctatcccagatgataagaacaaatctaaagtagttcaccgacagagcagtcacgaagtatgggwaatgcacagtggtttggttgtggaagatgctgggggaagccagtatgttttttgtattctatgaaaaaactcagctaactcaacccttcctcaaagtttttgtggtctctagctcttttaaaggcccaagaaaaaaaatctgaaagaacaaagaataaggccaggactggtgg

SEQ ID NO: 531707 - DNA, 651 bp, Homo sapiens
gggtctgctctgtatcttctcatgccaggacccagacttgggggacagcgtcctctgaaatgttgcctgccccaaggcagagtgtattagtctgttctcacaccgctataaagaactacccaagactgggttaatttataaaggaaagaggtttaattgactcagttctgcatgactggggaggaaacttagaatcatggcagaggggaagcaggaaagttaagatcatggcagaaggggaagcaggcacgtcttacatggcggcaggtgaaagaggcgagtgaaggagraacttccaaaccatcttataaaaccatcagatctcatgagaactcacccactatcatgagaagagcacggggaaaaccgcccccatgatcaaatcacctcccaccaggcccctccctcaatgctggggattacaaatcaagatgagatttgggtggggacacaaagcctgaccatatcacagagggaggaagattgcagctcatcatgatggttcttgggtctccctgctggataacttccacccaccttcactgccaaagcatatcacagagccacacttaacttctgaggggcaacaggaagctgtggccccacctggctagagggaggagagcttaaatgataattgtcctactcata

SEQ ID NO: 531708 - DNA, 651 bp, Homo sapiens
gggtctgctctgtatcttctcatgccaggacccagacttgggggacagcgtcctctgaaatgttgcctgccccaaggcagagtgtattagtctgttctcacaccgctataaagaactacccaagactgggttaatttataaaggaaagaggtttaattgactcagttctgcatgactggggaggaaacttagaatcatggcagaggggaagcaggaaagttaagatcatggcagaaggggaagcaggcacgtcttacatggcggcaggtgaaagaggcgagtgaaggaggaacttccaaaccatcttataaaaccatcagatctcatgagaactcacccactatcrtgagaagagcacggggaaaaccgcccccatgatcaaatcacctcccaccaggcccctccctcaatgctggggattacaaatcaagatgagatttgggtggggacacaaagcctgaccatatcacagagggaggaagattgcagctcatcatgatggttcttgggtctccctgctggataacttccacccaccttcactgccaaagcatatcacagagccacacttaacttctgaggggcaacaggaagctgtggccccacctggctagagggaggagagcttaaatgataattgtcctactcata

SEQ ID NO: 531709 - DNA, 486 bp, Homo sapiens
ccccacattgaaagtagaaactgaagtaatttaccttaaagctttagaatgtcatttgttttaacaagtttcatatacaattttcttttctcttaaactttctggacagatctttttattctccagtattaatgggttgagcgtggaasaggtatcgcctgtgaaatcatttttgatttttttcaccaaattgctggtttctcacaggttttgtccatagtgttgtattcagaattggttccatctgctaaattgactgatccagagcatacataggaccaggttatcctgattgtaaacactctgtgcctataaaccagacactttagggggtgtattaactcattcagatcattagtaaattgccaaaattacattaaaatgatactttataaatctgtaagtagagaactgacaaaaatagctcactgggttacccaaatgtggaatgatgcatgtaaaatacagtgttggcaaaactaggga

SEQ ID NO: 531710 - DNA, 486 bp, Homo sapiens
ccccacattgaaagtagaaactgaagtaatttaccttaaagctttagaatgtcatttgttttaacaagtttcatatacaattttcttttctcttaaactttctggacagatctttttattctccagtattaatgggttgagcgtggaagaggtatcgcctrtgaaatcatttttgatttttttcaccaaattgctggtttctcacaggttttgtccatagtgttgtattcagaattggttccatctgctaaattgactgatccagagcatacataggaccaggttatcctgattgtaaacactctgtgcctataaaccagacactttagggggtgtattaactcattcagatcattagtaaattgccaaaattacattaaaatgatactttataaatctgtaagtagagaactgacaaaaatagctcactgggttacccaaatgtggaatgatgcatgtaaaatacagtgttggcaaaactaggga

SEQ ID NO: 531711 - DNA, 486 bp, Homo sapiens
ccccacattgaaagtagaaactgaagtaatttaccttaaagctttagaatgtcatttgttttaacaagtttcatatacaattttcttttctcttaaactttctggacagatctttttattctccagtattaatgggttgagcgtggaagaggtatcgcctgtgaaatcatttttgatttttktcaccaaattgctggtttctcacaggttttgtccatagtgttgtattcagaattggttccatctgctaaattgactgatccagagcatacataggaccaggttatcctgattgtaaacactctgtgcctataaaccagacactttagggggtgtattaactcattcagatcattagtaaattgccaaaattacattaaaatgatactttataaatctgtaagtagagaactgacaaaaatagctcactgggttacccaaatgtggaatgatgcatgtaaaatacagtgttggcaaaactaggga

SEQ ID NO: 531712 - DNA, 486 bp, Homo sapiens
ccccacattgaaagtagaaactgaagtaatttaccttaaagctttagaatgtcatttgttttaacaagtttcatatacaattttcttttctcttaaactttctggacagatctttttattctccagtattaatgggttgagcgtggaagaggtatcgcctgtgaaatcatttttgatttttttcaccaaattgctggtttctcacaggttttgtccatagtgttgtattcagaattggttccatctgctaaattgactgatccagagcatasataggaccaggttatcctgattgtaaacactctgtgcctataaaccagacactttagggggtgtattaactcattcagatcattagtaaattgccaaaattacattaaaatgatactttataaatctgtaagtagagaactgacaaaaatagctcactgggttacccaaatgtggaatgatgcatgtaaaatacagtgttggcaaaactaggga

SEQ ID NO: 531713 - DNA, 671 bp, Homo sapiens
taagacagattttcattttagaaatgaggctttccacrttatgacattaccaatattggttggttatgtattattatagaaagcagtgatattcatttcatggctggaaggctgcgtgctggtgtttaaccagcagtttgcaaagatttgctacatgatttactacacatgctgctttgtcctcaagtgattcctggtaaaatgtgtgcttctccttgcttctctttgtctggggaatgtgtttcctgtcattactaagacaataccatggccatatggtgcatgtggatggttcctgtagatatcttacaacaaagagtaagttgggagcatggtagaacccagtgccgtggggaggtgggagttcgccacccaggaactgcaaacatcgccccttcacccctagaagtggtgaggaaaactgttttcctctactcacacaattttccccacccagaaggaaaggcttggggtttcctcttctgtatctgctaacaagatcttctcattgtgagtggagcacagtgtgaaagtaagttgtgggtagactttccaccaccagtgttagaatttcatatccatattggaaacagggtattgtgttgggtcacatttctaatcattatagtgccaacggcgctatgtattataacttagaaagtggtcaccag

SEQ ID NO: 531714 - DNA, 581 bp, Homo sapiens
agtttcataataaaatgtagacacctccaagtcctaaatccagagttattcttctgctttgagtaaaaaagactaaacacagatgtccgggctgaaacatctgggtttgaaatcaggctacgtgtaatctaccatcattattatacagtttatctcgtttgccttatagatcacagcttcaggatgttcatgcttcttgtattaattgcaagagccagaaacaatgaaaaatgttagtaaaattgttttggcctcttttctaggaatattgtaaacatctccccaaagacccattgcctgcagaattgtctaacacacactaaccaattcttcttccaaaagagggtaattactcatggtaaagggcagtgtctcttggtaaccaaataacctagtttctttcaacgattgctctcccacaaacaaatggcctgaggcagagagagaatggctgattttcaacttatatgaccactaatgaccacttctgcgcaagggaaaacgtctattagtcagyggcactggttcaaagggctttacataagttcacagaaaaagccacaacagggacttaagataaa

SEQ ID NO: 531715 - DNA, 646 bp, Homo sapiens
ctgcctctatgctcttcctctggtaatggaattcctttctgttaccatatataagcgtgtttatatgttagggagcctggcactgtctgtttaggggactgttccaggctgcttggcaggaagatactayacattaaatgagacgaaggctatgtctccaaaggcagaaatggtttaaattatgtctcagtgatactgcatgttctgtttaacctcgatagcctcaaccatttcaagaccaagattgattttatagttttcaatgcaagcccaagtgagaagaagaaagctcaactagaagaaccccagtatctcacaggtagggatacagatgcacatcagctctctgtcccactgaaaaaaaaaaaaaacaatccccccaaatccataatcatttctgctggagttctctcactgtttcaaagaaatcctctgtaatgaatgccacacttctctttcctcaacttgccaggaaagagtgtaattattacttagtctcacttaagattaaaatattttaattatgacattaaacagcaccgtcttcacttcaattaaaagtaagtacaatcatactacataaatcttaaggaaaagagtgaaacccacctttaaaaatctaaagtcattttaaggtacttatcaa

SEQ ID NO: 531716 - DNA, 517 bp, Homo sapiens
tgggacctgttgctaggagcaaaacaaacaggcccactggttactgtctgttcagtttcaggtgcgactggaggtgccactgacaatctctctgaggcctagagtgctgagatactgttcttgttactcctccgtttcctcttctgttacctatcaatccctgtcacctgcttcccgttcacccaaccttcacgcrggagctattcaattccctggagaattaccagtttcatactttaatgttgcccaatagaaatgtcatatggccaaatatatcactgaaattttccagcagccacattaaaaaggtaaacagcaacaggtgaaattaattgtaacaatgcatttgtttaacccagcatatccaaaacatggtcattgcaacatgtcatcaatttaaaatttactaatgaagatgtgttatattctttatttcatcttaagcctttgatatctggtgtgtatttcacatttacagcacatatcagttcagaccagccacatttcaagggctcaa

SEQ ID NO: 531717 - DNA, 612 bp, Homo sapiens
tttaccttggttccattttccaattcttattttcttatcagaaacacacttcattcttttcatttttctcattatatgattaatgattttccaaatcatttctgattaatatgttttccatccaatgtgaacctaaraataaggaaaaatctcaatccaacataagggactacttgctacacattcttaaaggattattttaaatcttttgagcttctaagttgctttaaatagtataacatgaatgagttgactgccaaggagtatgggattgtagtgattcaaaatttcttcgtgatcactctaagaatgacttcttatttgccagagtagcttcattcagataatagtaattataacagtgctacagttttaaaaaacaatgtggaaaattactacaggaagatgctggaggcctgagtgggagcccatctctgcctttaactaacacaaccgtaaaccattcaactatttttggcttcagtttccagaaaatgaaaaaagacctgattcgattatttctaaactcctacaattgtgaagtcacgagtttgctttttaattacagaggcgatgtgaaccctgaaggagtgttttaagatttgatggcag

SEQ ID NO: 531718 - DNA, 612 bp, Homo sapiens
tttaccttggttccattttccaattcttattttcttatcagaaacacacttcattcttttcatttttctcattatatgattaatgattttccaaatcatttctgattaatatgttttccatccaatgtgaacctaagaataaggaaaaatctcaatccaacataagggactacttgctacacattcttaaaggattattttaaatcttttgagcttctaagttgctttaaatagtataacatgaatgagttgactgccaaggagtatgggattgtagtgattcaaaatttcttcgtgatcactctaagaatgacttcttatttgccagagtagcttcattcagataatagtaattataacagtgctacagttttaaaaaacaatgtggaaaattactacaggaagatgctggaggcctgagtgggagcccatctctgcctttaactaacacaaccgtaaaccattcaactatttttggcttcagtttccagaaaatgaaaaaagacctgattcgattatttctaaactcctacaattgtgaagtcacgartttgctttttaattacagaggcgatgtgaaccctgaaggagtgttttaagatttgatggcag

SEQ ID NO: 531719 - DNA, 374 bp, Homo sapiens
ctgcagccatctctgccctgtggttattaaagcaatgacttaattttaacgagggtctaagtgttcttcaggaagctgcttcagccctgattaaaggaatgaatcaggcaggatccagcctctgcctagtgagtctgggaacgggagcattgggctgtaataatggaggcggagagttgtagaacccagagtcatctgagctctttttcggagactccagcatttgctgaggraacccaggctttggggctgcattgttctcttcttaggtaggaggtctggtggtggagggccaaggcttttaccaccagtggcctgggcttgcctcctggctctactgctgaccagcttgcaggactggggcgagggacgta

SEQ ID NO: 531720 - DNA, 613 bp, Homo sapiens
ctgcagccatctctgccctgtggttattaaagcaatgacttaattttaacgagggtctaagtgttcttcaggaagctgcttcagccctgattaaaggaatgaatcaggcaggatccagcctctgcctagtgagtctgggaacgggagcattgggctgtaataatggaggcggagagttgtagaacccagagtcatctgagctctttttcggagactccagcatttgctgaggaaacccaggctttggggctgcattgttctcttcttagrtaggaggtctggtggtggagggccaaggcttttaccaccagtggcctgggcttgcctcctggctctactgctgaccagcttgcaggactggggcgagggacgtagtctccctgagcctcagtttcttcctctgtgaaatggatcaggctcctgctgagacaatgtgaaaaagaacatcaggtgcatttgcagagccagggcctggctcatgcgccggtcagatgaggagctgtgacatgatatcccatgttatcagttttctctctcttgccttaaaaccatgtttgcgtgcacctgctacatgcaggctatgattagaaccccaggcttctgattccaagtc

SEQ ID NO: 531721 - DNA, 591 bp, Homo sapiens
atctctgccctgtggttattaaagcaatgacttaattttaacgagggtctaagtgttcttcaggaagctgcttcagccctgattaaaggaatgaatcaggcaggatccagcctctgcctagtgagtctgggaacgggagcattgggctgtaataatggaggcggagagttgtagaacccagagtcatctgagctctttttcggagactccagcatttgctgaggaaacccaggctttggggctgcattgttctcttcttaggtaggaggtctggtggtggagggccaaggcttttaccaccagtggcctgggcttgcctcctggctctactgctgaccagcttgcaggactggggcgagggaygtagtctccctgagcctcagtttcttcctctgtgaaatggatcaggctcctgctgagacaatgtgaaaaagaacatcaggtgcatttgcagagccagggcctggctcatgcgccggtcagatgaggagctgtgacatgatatcccatgttatcagttttctctctcttgccttaaaaccatgtttgcgtgcacctgctacatgcaggctatgattagaaccccaggct

SEQ ID NO: 531722 - DNA, 647 bp, Homo sapiens
tatgccgggagcgatttgtgtgcaggagcttggcttggctccctggtccctcctggcagtgctgtctgctaaggccctgcgctcccagccccaagcattctgggagtcctctgaaggtgggctccaggctcctcctccctccctcttcccaagacaaggtactgtacacagtaggtgcccaagctgtgtggcggacggatcatttctgcctgtcctggttctctgaagacagaacaggagggaggagggctgagtgagtctgagatcaacaagccaaatcttggcatttcccagatggggaagcggagtgcagagaggaggatgagctcccaaggtcactcaaggagccagtgtcttttgacctccagccgaggtgttcctaatgtcacctataggcaaaagacttactttctcctgggtggttccragtctatttctaattgtgtggctttgggcaggccccatagcttctctgagcctctatttcctcgtctgtaaaatgggagcagcgacactaatctgacaaagctttgcagtgcttagcaacacagtacatgtgagcttcaccctgtgcttggcttattgaaagcatgtattacctgggagctctggtttccctccaaggctccaatcccacgtttccagca

SEQ ID NO: 531723 - DNA, 468 bp, Homo sapiens
tgtaatttcacaaccctatgttgtgccttatatataagcctggttcctmtaatcattggaattcacatatctccccaaacggactccttcacaaatggcttacaaggaaattttttgagggcccccaaatctttcagaacatacatattttcctataaacttgtcctaaaacagaatcctgttcaatctcaccctgaaaatgtcaattaccagcttatcgtcataggtacccgacaaggacaagactagaaatcatccttccaccactccaagacaaattcaagattgacttttccctctactccctcttttcacatgtaaaatgtagattcactgagtgttaatcaaagcctcacaagaatgtaaccacttgcctcattgtccacccttcttcctttcttccccctctttcccctcctgcttgctcttttccttttaagtattagagttctcaaaacagtctttgca

SEQ ID NO: 531724 - DNA, 496 bp, Homo sapiens
ggctttgtcactctgacattatacttattaacataataatgtcctttgacataaaaagtatactttacctaacagtgatattgctgcactagcattctttgattagatcatgcttgtaggtgtgtttcatctattttctttcaaccatttactgtccttatactctagaggcatcttttaaagatgtatatctctggattcttgtattattatgcagttggagaatctttattgcatttatttagtcttctatactttttgtaattactgatatattttaacttatttctaatatattttccactttaatattttttcttkgatactttattctccattcctacttctcctggattgactaaggtttgtttatcttattttgctccttttattggtttagttgtaattctgttttgttaatgggattaaattatttaatgtacacttggattcaaatgcctaaaagttactattcatgtctcatggattttacatg

SEQ ID NO: 531725 - DNA, 673 bp, Homo sapiens
gcactgttaaaggcattaataagacacaataggtcaaagacatatttatatagaaactgaaccccaatctctcatcatatacaaaaaattacctcaaggtgggttaatctaaatgtaacatttgagactgtaaaagtcatataagaaaatttagaaaaaactattcaagacattggcctaggcaaagaatttatgcttagacctcaaaagtaaatgcaacaaaaacaaagaaattaatggaatttaattaaactaaaaagcttctgtaaagcaaaagaataatcagcagagtaaacagacaacatacagaatgggaaaaaatatttgcaagctatgcattcgatgaaagactaatatccagaatctacaaggaacttgaaaacattaacaagaaagaaacaaataacgtcattaaaaagtgggcaaaggatatgaacagacatttctcaaaaggagacacataaatggccaaaaaacatatgaaaaagattcctagtatcactaatcatcagataaatgcaamttaaaactacagtgattctgggcgtggttactcatgcctgcaatctcggcactttgggaggcagaagtgggaggatcgtttgagtccaggagttcgagaccagcctgagcaacatgaagaaaccctgtctctacaaaaaaatacaaaaat

SEQ ID NO: 531726 - DNA, 673 bp, Homo sapiens
gcactgttaaaggcattaataagacacaataggtcaaagacatatttatatagaaactgaaccccaatctctcatcatatacaaaaaattacctcaaggtgggttaatctaaatgtaacatttgagactgtaaaagtcatataagaaaatttagaaaaaactattcaagacattggcctaggcaaagaatttatgcttagacctcaaaagtaaatgcaacaaaaacaaagaaattaatggaatttaattaaactaaaaagcttctgtaaagcaaaagaataatcagcagagtaaacagacaacatacagaatgggaaaaaatatttgcaagctatgcattcgatgaaagactaatatccagaatctacaaggaacttgaaaacattaacaagaaagaaacaaataacgtcattaaaaagtgggcaaaggatatgaacagacatttctcaaaaggagacacataaatggccaaaaaacatatgaaaaagattcctagtatcactaatcatcagataaatgcaacttaaaactacagtgatyctgggcgtggttactcatgcctgcaatctcggcactttgggaggcagaagtgggaggatcgtttgagtccaggagttcgagaccagcctgagcaacatgaagaaaccctgtctctacaaaaaaatacaaaaat

SEQ ID NO: 531727 - DNA, 619 bp, Homo sapiens
ccagtcctaccatcccaactttatttttcacaagcagctaggaataaaatcttgacctcagactatactataactggagtctacatgagacaggcaagcaggtaagccctgaaattagggctaagcccaggacagtgctcaggaaaaaattcaagagcaagccagcggtgttagacaacagtctttagtataacgggatctgctccttgcagagcagggttacttgctgggcaatgcacccagaagcagaagttgtgggctgtatttatacccacctttaatgcaaattaagaggaaggctttgcagaaatctttagaaaaggggcagtaactcctaggtccttaccatagaaaagggcagtaactctgggtcattgccatgacatttgtaaaccgtcacagagctggayagagagatgtatgctaataagcaatgagggctactaaggggttgctttctatgtcatctgctggttccagctggtttttgcacttcatcctgtcagactaggaaataagtcctgatgatctcttacttcatacactccaaattacacattacatagatattttagatgggtcatttttgccatatttccatggttactatccaccagct

SEQ ID NO: 531728 - DNA, 619 bp, Homo sapiens
ccagtcctaccatcccaactttatttttcacaagcagctaggaataaaatcttgacctcagactatactataactggagtctacatgagacaggcaagcaggtaagccctgaaattagggctaagcccaggacagtgctcaggaaaaaattcaagagcaagccagcggtgttagacaacagtctttagtataacgggatctgctccttgcagagcagggttacttgctgggcaatgcacccagaagcagaagttgtgggctgtatttatacccacctttaatgcaaattaagaggaaggctttgcagaaatctttagaaaaggggcagtaactcctaggtccttaccatagaaaagggcagtaactctgggtcattgccatgacatttgtaaaccgtcacagagctggatagagagatgtatgctaataagcaatgagggcwactaaggggttgctttctatgtcatctgctggttccagctggtttttgcacttcatcctgtcagactaggaaataagtcctgatgatctcttacttcatacactccaaattacacattacatagatattttagatgggtcatttttgccatatttccatggttactatccaccagct

SEQ ID NO: 531729 - DNA, 413 bp, Homo sapiens
ggtttttgcacttcatcctgtcagactaggaaataagtcctgatgatctcttacttcatacactccaaattacacattacatagatattttagatgggtcatttttgccatatttccatggttactatccaccagctaaagaccaccagaaacatatctattgtcacacagagttgggtttatttagcctactgcaataagagtatgtaccagagtaaccatgggaagtctcagtgagggggaatttggaggatgtatcttacagaatttgtgttcaatctgggtgattttaaggcaagcttaggaatgtgggtatcagttttggattggataatatcaggaagtggaaacagtttggtcrttggttgtcttgatttttttttttttttttttttttttagctgggatatctg

SEQ ID NO: 531730 - DNA, 413 bp, Homo sapiens
ggtttttgcacttcatcctgtcagactaggaaataagtcctgatgatctcttacttcatacactccaaattacacattacatagatattttagatgggtcatttttgccatatttccatggttactatccaccagctaaagaccaccagaaacatatctattgtcacacagagttgggtttatttagcctactgcaataagagtatgtaccagagtaaccatgggaagtctcagtgagggggaatttggaggatgtatcttacagaatttgtgttcaatctgggtgattttaaggcaagcttaggaatgtgggtatcagttttggattggataatatcaggaagtggaaacagtttggtcatwggttgtcttgatttttttttttttttttttttttttagctgggatatctg

SEQ ID NO: 531731 - DNA, 640 bp, Homo sapiens
actcactggcaagaatgaacatcatgtactgtaagtctagaaatagactttgaagtcagtgtcctcactctggagggcaaatatcaaagctgatttggttggcaatccagaaatataaaattctaccatggttaccacataggagtgaattctattctatttgatgtctattatctcctcatttggtctggaaggaaaagaagaagttcagcgataaatattattagtataaagtattttaaaatttgtaaaaacttgaggtaaaattttttaaaaaaaggatttcatatcttccctctcattagtcgctaggtatttacagtattgatgmagtaagtaagtgacctacaaggttaaaacaaaggtttaaagttaatagttaagtaaaaaaggttattttctgtcatgagaaaacccatactattaatatttctggatcaatattgtaaacataataatatgatatagttcatgtatttaaattttcagataagtatgaacattaggcatgtgtacataaggtacatttatgttcagatacagatacatgtatctgaattgaggagagaatataattctaaattttccctgaattgttttctgattttgctttacatctctttatttcacatttcaaaag

SEQ ID NO: 531732 - DNA, 575 bp, Homo sapiens
tgtgcatttggtgtgagcttatgtgtgtgtgtttgtgtttatcttgcttgaggttcatttcgcttctttgatccatagactttcagtcttctctgtgctcttttcaaggctgctcatattttcttctgcagtgtctaatccagtgaactgtttactgaatataattttttatctctaaaagttacatttagttctgttttttatatatcttcatttctctcattatcttcatgttttaatttctaatctctaacttmatcatctttgtaatttctaagtctttctgttgtttttctcctagttatattcttttgcttcttggcatgtccagtaatttttattggaaattagacattgtgaacattgctttgttgagtctggagttttatttacttcctttgaggaggattaggctttgttctggcaagcagttaaatttcttgtagaacagtttgaaaagtccaggttttaagctgttttagggtgtgtctgagatagccttcactccagttcagccctacaatagcataatgcctctcaggcctctgctaaatgcccctaagtggtggctgaag

SEQ ID NO: 531733 - DNA, 496 bp, Homo sapiens
aacttcaagcccatgactcagaatcagctacctttaacttttagctatttcttctggtaatcatgttcacatttctaaataaatgctatgttgctatttcttgatttttccatttggcattatctgttgctatttatctgtggaattcttttacacctacttccactgatagggaagctctgttcctcttcttaattttgttcttttctgcctcgtccatctcatatattattgttgattaataatttagctctgtctcatttttaacccccaaactaaccattattactgtttttataatgtattttttattcatatttacccatgattaagtktattttttcccagttcttctcacattttagaacttcttttggtaatcatctcttctcttctaagtatatactatagaagtatgttttctgtatatttcagtttggacagtttctctctctgtcttcaagttcactaatcttttcttctgccgtgtctaatc

SEQ ID NO: 531734 - DNA, 582 bp, Homo sapiens
aaaccacctctgctagggaaacattgttttaaacttttcagaattcttatttaagaaaaaaatctttgttctttgctttacatggtcctcctgagaaatcttgacttctctgaaaaaagacaagggtctggcaggggaaatatttattgctcttaccaatcatctctggcaaattccttctaaaacctgacctcttcattttttttccccaccacagagacggactgccttgcataccaacatgaaggacaccaggaccaaagcaggcctttgcttcacctcctctccacccctttctrtgcccttgttcccagctctccattctgggaatgtgctttgaaatggggccaaggtgagagggcatgaggcctccttgccactaggtcagagactgagaggttttgaggagaagtttcctctaatgaaatgaaagcttcagaatactccagatggatagagtgccaaaagaaactgtctttctttagctgcctcggtaggagggacgctaccagtgtcaagcacagcaggaacgggggagccaggccttggaaggtggccattcatggttttgggactgggtgc

SEQ ID NO: 531735 - DNA, 602 bp, Homo sapiens
gaaaagttattgttctctccttttctcactgtcctatagtagatgaagttagggatttttaaaagcaactggcaagttcrgtctcactgttggccgtgcagactttcatgggcctcttgcctctcaacacctctggcctgttgttagtgttctaacaaagatcacctctgccatggtcacctggtgtgtggacaagtggctatgtctatataaaaggttgactttcatttgaactatatatgccactgataagaaagtttttgctcccattaaatgttcttctgagagaaaaaaaaatcaaagaagctttaggctttgggctgtggtttgtcatttagaaccaccatgagaacgaggatcacaagaaaagctgacatctcccctctccggtcccacttgctaacaactttctcccatgctcccaaccactcaaaaagccaagggagcaaaagaaaatgagtgatagaacattctggccacattgtctcagcaggatcttggcctgtacaaaatacagttacttatatgctggggaagtgttttggaggaagcagggaggagaggctaacaagcgaaactgaataccctctagggcaataaag

SEQ ID NO: 531736 - DNA, 520 bp, Homo sapiens
cctaacctcccaggttgcagaaagctacaggagcttaggcgacaatgcgaccggacatgcactgagctgctcctgtgtaccaggcatcaggcaccttaactcagtcttttattatcttcatggaaatctctgaggtagrtgctggtattatctccattttacagatgaggcaatcaagactccatgagggttgcttatccactgagtggtctctctgaagctagagactaatataaacagcttccaaatttcctctccaattgggggtaatttgggaattcaggcaaaataagggaatctaagaactagctagagaaaatttactaatataatctcacaaaaacagaagaaatgcattaaacaaaaaggaagaaacgaattaagttaaatacatagagtgagtcacagaaggctttgaaatcacaagcaaaaattggggaaaagtatatgacctcgcgaaagggtattaacatttagtcatggtgtccactttcccttgtaagctctcttcctgcccaca

SEQ ID NO: 531737 - DNA, 486 bp, Homo sapiens
aggctaatgaacagccaccttcggagcaacagggtcacttcagtcctccctgtttacttccaagctgctgrgagtcttatgcacatttcctcttctcacttgcctcttcacatccctagctgccgcaggaatttatggcttaattaaagtgggaagcagggtttatatatgtttatataaagttatattttcctccacctctttgttggaagaaaactcaaatgttaaaattcttaggagcccaggagttcgagactagcctgggaaacattgcaaccccatctctacaaagaataaaaaaattagctgggagtggtggtcccagctacttgggaggctgaggcaggagaatcatttgagcccaggaggttgaggctgcagtgagccatgttagtgccattgcactccagcctgggtgacagagtgagatcttgtttaaaaataaagaaagaaagaaacacctagaaaggacactagagataaatc

SEQ ID NO: 531738 - DNA, 486 bp, Homo sapiens
aggctaatgaacagccaccttcggagcaacagggtcacttcagtcctccctgtttacttccaagctgctgggagtcttatgcacatttcctcttctcacttgcctcttcacatccctagctgccgcaggaatttatggcttaattaaagtgggaagcagggtttatayatgtttatataaagttatattttcctccacctctttgttggaagaaaactcaaatgttaaaattcttaggagcccaggagttcgagactagcctgggaaacattgcaaccccatctctacaaagaataaaaaaattagctgggagtggtggtcccagctacttgggaggctgaggcaggagaatcatttgagcccaggaggttgaggctgcagtgagccatgttagtgccattgcactccagcctgggtgacagagtgagatcttgtttaaaaataaagaaagaaagaaacacctagaaaggacactagagataaatc

SEQ ID NO: 531739 - DNA, 539 bp, Homo sapiens
atttttgtgtttttactactcatagggtttctctgtgttgcccagtctagtctcaaactcctgatctcaagagatctgcctgccttggcctcctaaagtgtcatgaaccaccatgcccagcctacaaagcaatgttctaggaaaaactacagttactctttgattatgtaattgctggagaagaaaarcatggcatttctaaaatgatgaactatattacttatattttaatatctcataaagtttgaaatagacatttcaaacataaacatgtataaaaaattttataaattaaaaatataatatcaaaaacataaaattattttattataaaattattatagaatcaaaaacattataaatttaaacaacttttttaaaaatttattttgggatttcccatggagtgatggagaataatgagccttgggagagctatggcagctctcatactccttcctgggccaacttttttaggaaatgggagaaatataccctgttcaatgtttattgtgggtcaggatatttttgaagctata

SEQ ID NO: 531740 - DNA, 539 bp, Homo sapiens
atttttgtgtttttactactcatagggtttctctgtgttgcccagtctagtctcaaactcctgatctcaagagatctgcctgccttggcctcctaaagtgtcatgaaccaccatgcccagcctacaaagcaatgttctaggaaaaactacagttactctttgattatgtaattgctggagaagaaaaacatggcatttctaaaatgatgaactatattacttatattttaatatctcataaagtttgaaatagacatttcaaacataaacatgtataaaaawttttataaattaaaaatataatatcaaaaacataaaattattttattataaaattattatagaatcaaaaacattataaatttaaacaacttttttaaaaatttattttgggatttcccatggagtgatggagaataatgagccttgggagagctatggcagctctcatactccttcctgggccaacttttttaggaaatgggagaaatataccctgttcaatgtttattgtgggtcaggatatttttgaagctata

SEQ ID NO: 531741 - DNA, 637 bp, Homo sapiens
atttttgtgtttttactactcatagggtttctctgtgttgcccagtctagtctcaaactcctgatctcaagagatctgcctgccttggcctcctaaagtgtcatgaaccaccatgcccagcctacaaagcaatgttctaggaaaaactacagttactctttgattatgtaattgctggagaagaaaaacatggcatttctaaaatgatgaactatattacttatattttaatatctcataaagtttgaaatagacatttcaaacataaacatgtataaaaaattttataaattaaaaatataawatcaaaaacataaaattattttattataaaattattatagaatcaaaaacattataaatttaaacaacttttttaaaaatttattttgggatttcccatggagtgatggagaataatgagccttgggagagctatggcagctctcatactccttcctgggccaacttttttaggaaatgggagaaatataccctgttcaatgtttattgtgggtcaggatatttttgaagctatagttgttgatttgcttcaaactttaaaaaatttattataaaattatgggatgtaaaaaaatttattataaaactttgaaattttcaaactttcagaaaa

SEQ ID NO: 531742 - DNA, 637 bp, Homo sapiens
atttttgtgtttttactactcatagggtttctctgtgttgcccagtctagtctcaaactcctgatctcaagagatctgcctgccttggcctcctaaagtgtcatgaaccaccatgcccagcctacaaagcaatgttctaggaaaaactacagttactctttgattatgtaattgctggagaagaaaaacatggcatttctaaaatgatgaactatattacttatattttaatatctcataaagtttgaaatagacatttcaaacataaacatgtataaaaaattttataaattaaaaatataatatcaaaaacataaaattattttattataaaattattatagaatcaaaaacattataaatttaaacaacttttttaaaaatttattttgggatttcccatggagtgatggagaataatgagccttgggagagctatggcagctctcatactccttcctgggccaacttttttaggaaatgggagaaatataccctgttcaatgtttattgtgggtcagratatttttgaagctatagttgttgatttgcttcaaactttaaaaaatttattataaaattatgggatgtaaaaaaatttattataaaactttgaaattttcaaactttcagaaaa

SEQ ID NO: 531743 - DNA, 473 bp, Homo sapiens
actttttctaaagtcttctttctctggagatgacattatataatagcactgttcaatagaagtttctttgatgatggaactgttctrtaatctgcattgtcccagccactagccatatgtgactactgaacacttgaaatgtggctagagcaactgaagaactgaattttgcattttacttaattttaattaattaaaatagaaatgcaaataaccataagtggttagtagctaccatactggacagcaaagacctataattcagcatttaaaatcgattttgttttgttttcaaaaatggagtcagactgttacaacccaaaagaactgtaggttaaattaaggtaaatcaccaaatactacatacacatttgggaaatccaaaccagattttttcatgtgataaccacaccctcttttgactttagccttggaggtaatggagtatggcagaaaaaaccctgtatcagcag

SEQ ID NO: 531744 - DNA, 473 bp, Homo sapiens
actttttctaaagtcttctttctctggagatgacattatataatagcactgttcaatagaagtttctttgatgatggaactgttctgtaatctgcattgtcccagcyactagccatatgtgactactgaacacttgaaatgtggctagagcaactgaagaactgaattttgcattttacttaattttaattaattaaaatagaaatgcaaataaccataagtggttagtagctaccatactggacagcaaagacctataattcagcatttaaaatcgattttgttttgttttcaaaaatggagtcagactgttacaacccaaaagaactgtaggttaaattaaggtaaatcaccaaatactacatacacatttgggaaatccaaaccagattttttcatgtgataaccacaccctcttttgactttagccttggaggtaatggagtatggcagaaaaaaccctgtatcagcag

SEQ ID NO: 531745 - DNA, 473 bp, Homo sapiens
actttttctaaagtcttctttctctggagatgacattatataatagcactgttcaatagaagtttctttgatgatggaactgttctgtaatctgcattgtcccagccactagccatatgtgactactgaacacttgaaatgtggctagagcaactgaagaactgaattttgcattttacttaattttaattaattaaaatagaaatgcaaataaccataagtggttagtagctaccatactggacagcaaagayctataattcagcatttaaaatcgattttgttttgttttcaaaaatggagtcagactgttacaacccaaaagaactgtaggttaaattaaggtaaatcaccaaatactacatacacatttgggaaatccaaaccagattttttcatgtgataaccacaccctcttttgactttagccttggaggtaatggagtatggcagaaaaaaccctgtatcagcag

SEQ ID NO: 531746 - DNA, 275 bp, Homo sapiens
tcctcagcattgactctgtgctatggaagggcttcctaagtttttgtggactgctatcccagtctgtcaccactatacaatcttcataattttccctttaaatggctgagagaaaattttgaacaaaagctacaaacatttttcagattcttgattctccagacttattacttgagggcagtgactaaattatattcagttctatatcagaaggttcttccatattgccrgtttcatggtagatactcaataaaataagttgaatgactacataa

SEQ ID NO: 531747 - DNA, 434 bp, Homo sapiens
ggttgctcaggaaaagattctcctgtttagcagttaagcacacacaaaaaagtcatgcaacggccttccctatagtggtgagatcacattaaatagctacttcaagtgtcactaaagcattataactgctcttaagtgtatgtagaatgagattactttagaaaaacatttcraaaaatcatatgcttttcccatatgttcagtatttaatgttgttggacaatgactgcctaaaacttcatacgcagcaaaaaaaaaaaaaaaaaaaaatctaacaacgaacatttaagtttagttcccataagtctcagaatttcatgccctcgattttttccctatcatacacatttttaaaagactaatctagtggataaggatatgctatcaaaacctgaaactcatgaatcggaaatcatcttgcacattaacttgta

SEQ ID NO: 531748 - DNA, 554 bp, Homo sapiens
gatacattccccaaacccttatgggcagagtcctttggcttcagtgaccacggccaagggtgcagaggagaagcccaagaagatgccaggtgtctggcttatgcccctgtgtgaacgtgaagcctctcattgacatgcaggttacaggaggaaaagcaggtttatttgggaaggaggcttctagaccatgacttccattttagccatgtagtttttgaagtgcttgtacaagttctaggtggaaatgtccaggaggcagtggggaactcaaagtagatctcaggagagaggcttagccagagggcttggggaatcatcagcatgggggtgggaggagagctggtatttggatgagattgcagtggagcatgaacagagtgggaaaaggtggtgatgaacccagggactccagtatgcggtagctggctgtgagattaggaagcaatgaaggaggccgagaaggatgtgggggagaagcatcaataaggaataaatgagttgcacgtgctccagagaggccarctaaagactggatttggctctcgcaggtcata

SEQ ID NO: 531749 - DNA, 327 bp, Homo sapiens
aacagcttgtgatatcggccctactttgtggggagaggatgagttaagaattctagccatgagaaccaagaagaggaggataatctgttcatgcctattatggggctttgsgggagcagtttcagcctcaacctggagaatgttttagaaggccagagaaaggaaccctgcaaatcatgtgagctggcccctcactttgagatgaagtgtccatacagcagtaacgccaccctctgtagtggttctagagtgtggcaatctggaggggtcattatggaaaagggctgaagcataagaatgtaggcccaatactgagatagaaagagg

SEQ ID NO: 531750 - DNA, 558 bp, Homo sapiens
atgaatgcaagtttgagtgctttgccagatgctctctcatttaattcttacgaccgcctctgaaaaggttctagtatctattcccttttgacagatgaggaaactgaggctcagattttaagcaacttgcacaagatcacacagcatgtagatgacagagcctgttctcaarccccatctgtttgattccagatcctgggttttgtaaccacaacacccttttcacagataggctggggtggtgggtccttacctgatgatggaagtgaaactcaaaactgcagtgactgaagcatcataggatgaagacccaggcccacaagaccctggagcagggatagtatgaatgacaggggaggagtgggaaggaggggccagaaggagaaagcagctccgatctagtgtgcgtgtggggcatgacggtcacggagcataagtagtggaaatgcacagacctcacttctgcctctgaggcattgagaattcaatacccagagagaatgagatgatgtcagacactatgcatggaggaaggaccaggtgatactgaacaggaga

SEQ ID NO: 531751 - DNA, 471 bp, Homo sapiens
ttctctttctcttgttccctaagagtctgactagctcccctcctgaagrtgcaaggtgcaaggaagatagtcagagctgccctcctcctgctcccccacaagttgagcatgcactgggctgccaaggacattgggggacggaaacctttaatgccgctaaacagggaactggaggctgagcaggtctggcgaaggtagccagtccaggaaccccactacccccttggctctgggtcttcttggcctccctccttgggctaggcttctcctgctgggattgtgagctcccagaggtgggcagccacccagcctcacctgagctgcctcaggggtggtttgggtcttagcaattccaggaagacccagcacaaccctgttcctcccctgcctgaaactattcatggctcctcccagtgcaaggtaaagcccaatctcctgatcccggcatttgaggccgctaccccagcccag

SEQ ID NO: 531752 - DNA, 488 bp, Homo sapiens
tgggagattggcttgaatctgggaagcacagattgcagtgagccaagatcacaccactgcactccagyctaggtgacagagcaagactctgtctcaaaaactaattgaaaaaccaaaaccaaaaacaaacaaacaaaaatatactagtagacgtatagagtgtgggatactgatatatatagttttttgtagataaaaatatgaatttatttaaatagtttgcaatatgtatcaaaggtttcaaaacttcatattatttcatgcttatctctattcttgtttattttcaaaccaatagtcattgctcacattaagttatatatttatgtttttataatatatctaatagggcaatgggtttgttttggtctttcttgtgtgccaaagcataaaatagttcctggtatattatggctttctataaagatttcttaaataaataaatgaataactgccctctaccaaataattcaattgaaacatgaaat

SEQ ID NO: 531753 - DNA, 470 bp, Homo sapiens
agttactaataagctgatcatagaaaggtggcatcgagaaaaggtggtatgcttcttttctcaattatgtatattttttactataatgggaacccttgatggacagaatattcactaacaacttaagtgttttagaaattaaagaaaacacttcaaatgaatgagcatcaagttagtgactattcttcaactgtaggaatccaatttagtgaaaatgttgaaagcccagtgcttcacattcaaactcatttaatatttgcagcaacactggkgacagctctgattcccacctactcagaacaactgaaatggaggagagaagttacttctcagggttcatgaagcatagtataattgagactcagacataattctttaaattcagtgcttgttctgctctattacaattgtcctggaacaaagtagcatgtgacaacctcacaggatgtctcttttatgagaagaataac

SEQ ID NO: 531754 - DNA, 549 bp, Homo sapiens
ctgtgtaactaactgctccatggagcaaggcagtcccaggggagccttggaaatgacagccttggagtctgtgcagtcctttcacaggcacgatctcacgcatgacctccaaggaaggcagcagggcagggaaggtcacccccattttgcaggtggtaaaaccgaggctcagggggtgacatttctcagctataggagccagggatgagcttccggctcagggcttgagatagaggagaagcccccaggtgagggctgtcctgaacctaccaagggccaccaggggacgtggggagagaccggaaggagcggcgcaggctggaggagggaggtcattccaggagagagcasgaggcctgacagtttgcgggagccctggaggaaacaggtggttgctggagcaggggcctcaggttgtggagagagatttccagaccaggttgccagaggttgcctcctgcttccccttcctccaaggcctgggtgggtcatttgtgcacctgtagctcggctcatgcgtcgctaaagtgaggttggctctgctcagag

SEQ ID NO: 531755 - DNA, 242 bp, Homo sapiens
tgcaaaaatatctcctgagtttcctctagtcaaacattaccctctccccaaacccttgatatcactgatctgttttctgtccttattgttttgtctattccagaatatcatatggatggaatcatacagtctggagcctttcagcttgacttctttcactgagcataatatagtcartgttcataaactaatatcctagtcttttttttgcctattccttttttattccatagtgtggaatt

SEQ ID NO: 531756 - DNA, 410 bp, Homo sapiens
agctgtcatgcaagtaggtaggtagcaatgggcactagaatgtggatgaaccatgcagtttaagctgaaaggagattattaaaggagagtgctgataagtaaggagaatgcagcaaggtcaaagactgaaagtctaagggagagagaacaggtgttgtgggatgtggctgtgggtgggtggctggttcagaggggaagaaaatcccatctcttaaacccaatcagagatacaagcccgtagctgaaatattccagtaactcttagcaaatgccaaagaaatgatgctattcatactattaggagttggcagggctgggcacggtggctcaaacctgytatccaagcactttgtgtggctgaggtaggaggactgcttgaggccaggacttccagaccagcctgggcaaca

SEQ ID NO: 531757 - DNA, 563 bp, Homo sapiens
ctgtgggtactctataaatgtttgattaaaaaaatgccaaataaatgaattgcatctgtttctctcataatttatgagaaggtaatatagcaaagtattgtgcatgtgtctctctctttgaatgaactaattaaaatctttaaaaacaattttttttttttttgagacagggtctcactgggtcacccaggctggagtgcagtgtcacratcatggcttaccctagccttgatctccggggctcaagcaatcatcccaccacagcctcctgagtagctgggactacaggcatgtgccatgcccagctattttttgtatttttttagaggtagggtttcacccagttgcccaggctggtctcaaaaactcctgggctcaagtgatccacctgcctcagcctcccaaattgctgagattacaggtgtgagccaccacgcctggccaaattagaatcttttaaaatcacaaaagaattccaacaatgtagaaaaataccaaaatgaaagttaaacttatgccaaatcctgccactcagagattagaatgagtacaccactgaactc

SEQ ID NO: 531758 - DNA, 515 bp, Homo sapiens
aattgcagaaaaaaaggactctattgttcaaagagctgcctttaatattgagaagcccttgctaaacactgcagtctgcagtatggcaaatgttaattggctgtaaacttaacaagagccggttttcctccgttccctcaacctcccccagttcattttctccccactgcctcttccaatgttctagtttctagtattctacttccatttgccttgtaaactcgcctctcttagataccctctaagatttttggaagtgctattttctcatagtacttttttctttttgaaagtaaacagtgtacaaccagactcattagaggcaaaagttcagaagttttgaatgtccggtctgtggaagtctttggtgttcctgatggcctcctggatacttctgctttcrtaagccatgtgagattagtttcctctcagagcttctccagtgatttttcaagagcaaactttattttattatttatttatttgagacggagtctcccactgtcatccaggct

SEQ ID NO: 531759 - DNA, 515 bp, Homo sapiens
aattgcagaaaaaaaggactctattgttcaaagagctgcctttaatattgagaagcccttgctaaacactgcagtctgcagtatggcaaatgttaattggctgtaaacttaacaagagccggttttcctccgttccctcaacctcccccagttcattttctccccactgcctcttccaatgttctagtttctagtattctacttccatttgccttgtaaactcgcctctcttagataccctctaagatttttggaagtgctattttctcatagtacttttttctttttgaaagtaaacagtgtacaaccagactcattagaggcaaaagttcagaagttttgaatgtccggtctgtggaagtctttggtgttcctgatggcctcctggatacttctgctttcgtaagccatgtgagrttagtttcctctcagagcttctccagtgatttttcaagagcaaactttattttattatttatttatttgagacggagtctcccactgtcatccaggct

SEQ ID NO: 531760 - DNA, 552 bp, Homo sapiens
taaaaaccatgtagtgatgaacattactttgttcttacacatacactatctcrgacctgtcgggtcaccttcaggtaaatctctagagggtggatggctggaattaacagtaccatcggccttctgtattctcgcgttttgtgtcacagagtcaattaactgcagatggaaaatatttggaaaggtactggagcagaggacttcctttttcttttaaaactggaatcttaacttgtaaaaataactactgagtgtcaaagttttaaaagcagaactcattttgtgtaatgaatacaagggaagtctaactgtatagtttttttattttaaatgaagaaaaactttacttaagggctgcatacttttattagagtaaatatgggtgattccactcctttggagtaaaactagtgcttaatggttaccaattgtatttagcttctggctgggatttgaaaaaatgaaaacctacataaaataggcgaaagttcccagactattcaggtaaatatgcacacacgcacatacacaaacactggttcacacacacac

SEQ ID NO: 531761 - DNA, 538 bp, Homo sapiens
ttgtcaggtttgtcaaaaatcagatactcgtagatgtgcagtcttacttctgagatctctatcttgttccattggtgtatgtgtctgtttttgtaccagtaccatgctgttttggttgctgtaacctgtagcatagtttggagttgggtagcgtaatgccagctttgttctgtttgcttaagattgtcttggctatacaggctcttttttggttctgtataaattttaaaatagtttttttctaattctgtgaagaatgtcaatgatggtttaatgggaatagcattgattctgtaaattactttggacagtattttctacttaagtgcacataccttcaaagggacatatatagaagaaaaggaaaagggacctatcmtagccagcatatcacagggctcatgagcagcttcttcctttgaatggtccctgggctctcctccattcccatcactctggcccatcccacactcactactagaattgcagacctcagaacatgtcttgatgacatctttcatctctgaagctctggaaa

SEQ ID NO: 531762 - DNA, 635 bp, Homo sapiens
aatgcaaatatcatgttatactgaacctaagacaccagtggttgtaagatgcaccactattatgtaccagtaagagagaataaaatgctgccaattaaactctattccaaatttcttcacaagtagagtatccaactcctctgagtcactttcaactcagaattgaaatatttgttcccatttttcatacgatattggtatccatgtcatcaagaacattgagaatccagcatttatttacaaaacattctaatattatctttgaatcttcttccaagcaactaacacttgatctagaagctttgatgttgttactttttaaaaaatctaaccagcagatgacaacagtagatttacttttttttccagtaaaccaggatttaccttttcttagtttgttgactgaaactttgaggggttgaagttgaccagttatgccattgtgactaacaacaaaatttatactgcatgggcartgacacaacattccagtgccaccaggccaacagatgtccgggatgttaaaatgtaaagtatgattgtattagatttgacataatataataactccttttgcatatctgccttcttgtcttaggtgatacccttacctgataatctgagcactgctttcc

SEQ ID NO: 531763 - DNA, 635 bp, Homo sapiens
aatgcaaatatcatgttatactgaacctaagacaccagtggttgtaagatgcaccactattatgtaccagtaagagagaataaaatgctgccaattaaactctattccaaatttcttcacaagtagagtatccaactcctctgagtcactttcaactcagaattgaaatatttgttcccatttttcatacgatattggtatccatgtcatcaagaacattgagaatccagcatttatttacaaaacattctaatattatctttgaatcttcttccaagcaactaacacttgatctagaagctttgatgttgttactttttaaaaaatctaaccagcagatgacaacagtagatttacttttttttccagtaaaccaggatttaccttttcttagtttgttgactgaaactttgaggggttgaagttgaccagttatgccattgtgactaacaacaaaatttatactgcatgggcaatgacacaacattccagtgccaccaggccaacagatgtcygggatgttaaaatgtaaagtatgattgtattagatttgacataatataataactccttttgcatatctgccttcttgtcttaggtgatacccttacctgataatctgagcactgctttcc

SEQ ID NO: 531764 - DNA, 580 bp, Homo sapiens
gagcccccatgccctcccgttagcaggaattgtctcacagtgcaccagcctcagacaaggccacactgggacagtgaagggagggacagaactcagccagcccagaatgtcatctgagcacaggcaaaagccaggtctctgggcccatcagaaaagcttcaaacccccctctcctggctggtctgagccctgctgcctctttacgggtcacggctgcagcctcaccctcgtcccctctccctgcagataaggtttatkgagatgcttggccacggggtcagcctgcatcctgacagtaccaacccagagcaaaccccactttctcaaatgcccccaaaagtcactcaacacaagccacatcctattacaagccctttctaaccccctcttggagaggccctgtgggtccccagggtatgcgtagcctgttgctgccatgagcgataaaccgacttgttctggcacaggttgtccctggtggtccttggcgagaggacatgggcagcaccttctcacacgagcccttgctggcgtctcttccaggaatgccccaaacgctccctgggtgccccttccttca

SEQ ID NO: 531765 - DNA, 599 bp, Homo sapiens
tgggggagaagaggcccccgggggcctttccgccctccaagattgcatgggctgtggggagcgtctgcaaggggcacagggtggacgtgctcccagcagccccctccagctcttcccccctccttcttcatatgagctctttctttgacagaactccttgttcctcacagccctctctggtcatatttattttattctatggctttgatctgtaaagtatctggaaaatcctttctcagaaggtactggcttctgcctcactggttagtagttaaacgcggtgtttaaacatttcatggactcttggtaccttttttattacagaggcccattggctgtggatcggtggcttggtttgtctctcctgggtctcagggaagcctaggagacaagagargatgagtaccaaagagaggctgccaggccccttgtccagaaaaggcgccacggtgcccagtgccacgggcccagcaggaaggtagagccagccaggaccccgggagagtccaggctgggcctaatccttccaggtctccagctcctgcatgtcattctgcatgcagtaatgacagtgagaaggaagtaggtacaaattgcaa

SEQ ID NO: 531766 - DNA, 599 bp, Homo sapiens
tgggggagaagaggcccccgggggcctttccgccctccaagattgcatgggctgtggggagcgtctgcaaggggcacagggtggacgtgctcccagcagccccctccagctcttcccccctccttcttcatatgagctctttctttgacagaactccttgttcctcacagccctctctggtcatatttattttattctatggctttgatctgtaaagtatctggaaaatcctttctcagaaggtactggcttctgcctcactggttagtagttaaacgcggtgtttaaacatttcatggactcttggtaccttttttattacagaggcccattggctgtggatcggtggcttggtttgtctctcctgggtctcagggaagcctaggagacaagagaagatgagtaccaaagagaggctgccaggccccttgtccagaaaaggygccacggtgcccagtgccacgggcccagcaggaaggtagagccagccaggaccccgggagagtccaggctgggcctaatccttccaggtctccagctcctgcatgtcattctgcatgcagtaatgacagtgagaaggaagtaggtacaaattgcaa

SEQ ID NO: 531767 - DNA, 417 bp, Homo sapiens
ctgggccctggtggcttttatcattgagggtgarccacacgctgccctcctctagaaaacctcccaaaccaattttgcttgatctcttggtaacgatttggttcaaagcctcctttcttattatatttgctctttggagcatttttgcccacagtgatcactttataatcactggattacgagacctgccaggattcacatggcctgccctccccagcagagccgtcttcgggtagagccgtttcagagcaagggaggcctgcgagaaccagagggcccccagccctgctcttgtctccaggcccagcagtgagtctcaccgcagtttctcccgctttaggactcattttcctccctgctgagacccgcactgctcggcaggcctcttgtctgctcgtggagggagggggtcccagc

SEQ ID NO: 531768 - DNA, 417 bp, Homo sapiens
ctgggccctggtggcttttatcattgagggtgagccacacgctgccctcctctagaaaacctcccaaaccaattttgcttgatctcttggtaacgatttggttcaaagcctcctttcttattatatttgctctttggagcatttttgcccacagtgatcactttataatcactggattacgagacctgccaggattcacatggcctgccctccccagcagagccrtcttcgggtagagccgtttcagagcaagggaggcctgcgagaaccagagggcccccagccctgctcttgtctccaggcccagcagtgagtctcaccgcagtttctcccgctttaggactcattttcctccctgctgagacccgcactgctcggcaggcctcttgtctgctcgtggagggagggggtcccagc

SEQ ID NO: 531769 - DNA, 478 bp, Homo sapiens
ggaccacagtcacctgccaccatscctggttaatttttaaaatcattactactatctgtagagatggggtctctctatattgcccaggctggtctcaaactcataggttcaagtgatcttcccgccttggcctcccaaagtgctgggattacaaatgtgagccaccgcgtccggtccagaactcttttcatcttggaaaactaaaacccgcacctggtatacaacaacttcccatcctttctcctccaagtccctgacaaacaccattctactttctgtcactatgaatttgtctactctaggcacttcatataagtggaatcacatatttgtcttttgggaactggcccttcccctttgatataaaatacaatgcacgcacaaacatcagattagcctgagaccatgctggccttgggaaaggcccttgctgttctgtactcccacacacagggctgttctctctgcatacctcttc

SEQ ID NO: 531770 - DNA, 313 bp, Homo sapiens
aagtaaaacacttgaatgagctggtttattgattccatttaaaacacatagtgagaagcaaggagacatgtggagtaggctaatacacttagagaaagatctcagtggatggaagatcccactgtctgcaccctgtgctagcaatgttcatttgttctctctctctgctgcatcagcctccccaccatgtmctgtgtatgtatgtacagagtggatatgtaagcaagggagagaggcatatgaaagatgtctacagtcagcaacacacacatttgtccctttgctgaaacacaggaataagcactcctgaagg

SEQ ID NO: 531771 - DNA, 608 bp, Homo sapiens
atagttgatgtaggcattttagaaacagaatatattttcatttttcttgatgtaagagagagctgtcaggacctggcaaattcatttcttgtcttaaaatacatatatgtcaaaaaactacaggacatccttatgaaataattccaaatgatttttaatctctccatgttaactttaaccttttccattttgtttctatcctatgttgggaatggctgattkcttctcaaacatctccaggtgtgctttccattaccaagctgtgcattacaggtggctgcaaacaggaccatcccagtggactccttccttctctccctcctcatgctataaatggcatgcctagacccaagagaccacttataaggcttgaagttgccgtcaaacctagaggaatttttatagtttgacaccccaattccaaattttatctctggcatttcctcctcatgatggcttgtgtagtaatttctattttaggaagagaagttgtgttggatgaaatgagaattcagatcaaatgatctagattcaagtgctgacttgcttcatgtacttgtttatccaacaaacacagtatttatgagtgccgtataaactgcatatcg

SEQ ID NO: 531772 - DNA, 608 bp, Homo sapiens
atagttgatgtaggcattttagaaacagaatatattttcatttttcttgatgtaagagagagctgtcaggacctggcaaattcatttcttgtcttaaaatacatatatgtcaaaaaactacaggacatccttatgaaataattccaaatgatttttaatctctccatgttaactttaaccttttccattttgtttctatcctatgttgggaatggctgatttcttctcaaacatctccaggtgtgctttccattaccaagctgtgcattacaggtggctgcaaacaggaccatcccagtggactccttccttctytccctcctcatgctataaatggcatgcctagacccaagagaccacttataaggcttgaagttgccgtcaaacctagaggaatttttatagtttgacaccccaattccaaattttatctctggcatttcctcctcatgatggcttgtgtagtaatttctattttaggaagagaagttgtgttggatgaaatgagaattcagatcaaatgatctagattcaagtgctgacttgcttcatgtacttgtttatccaacaaacacagtatttatgagtgccgtataaactgcatatcg

SEQ ID NO: 531773 - DNA, 510 bp, Homo sapiens
tcctcatcattcttgttaaggaaattttctgaagcctcactctcctcacctaaaaactgaaggtaattataataacccctatcttttgcagttactgttgtagttaaagaaggtaaaactattaagtttttagcagagtatccagtgcattgtaaatactcratacaagctggttgttactaaattaggtagaaagatgataatactggtgtttcaatagataggcaaaaagtattgttttatcacagttttgaataaggaagttcttacagaggaaagtgtaaaattttattacatttcccattgccaacattactatccaaatatttacttacattaatcacaggcctctgcttaaggtgaattgcgtattgcctataagctagtataaggtgtatttttacagtaattctatctaccacatgtatgatgaccactgctactaagtaataataactacaatattcctccagcccttgccatgtactatgctctattcctaaatgcttt

SEQ ID NO: 531774 - DNA, 670 bp, Homo sapiens
ccctgacatcaaagtccagccattcactgccaggactcaacaatgacctgctgcactattgagccagcacgtacctggctgaagaaagcttttctctagtaccacagggaaaagctacaccaactcggaaattatcatggcttatttatatgttgatgcatatttcatgttttttaaaaaaacaactaaatatccttttagaaaaatggataaatatccggttaggttttcttgggtaggttgtgagtccctgtattgttcagtgcacgtatgcagttgataacttcccagtatcagccttccttcctacatttgtttgcccaattctttgattatttaggctttcagagccacatttaggcttgctgacccaagaaagcattatagtcttaacccagactcaagctcttcctatatttttttttcattttacactccactttcactaattttcagtgaagattttcatcccwgttatgagtcataaacctatcaaaacctctgggattcagcaaaggtggtgcttggaggaaagttcatagccttaaatgcctacatcaaaaagtctggaagagcacaaatggacaatctaaggtcacacctcaaggaactagagaaacaagaacaaaccaaacccagcagaagaaaggaaataaccaagatcagagca

SEQ ID NO: 531775 - DNA, 670 bp, Homo sapiens
ccctgacatcaaagtccagccattcactgccaggactcaacaatgacctgctgcactattgagccagcacgtacctggctgaagaaagcttttctctagtaccacagggaaaagctacaccaactcggaaattatcatggcttatttatatgttgatgcatatttcatgttttttaaaaaaacaactaaatatccttttagaaaaatggataaatatccggttaggttttcttgggtaggttgtgagtccctgtattgttcagtgcacgtatgcagttgataacttcccagtatcagccttccttcctacatttgtttgcccaattctttgattatttaggctttcagagccacatttaggcttgctgacccaagaaagcattatagtcttaacccagactcaagctcttcctatatttttttttcattttacactccactttcactaattttcagtgaagattttcatccctgttatgagtcataaacctatcaaaacctctgggattcagcaaaggtggtgcttrgaggaaagttcatagccttaaatgcctacatcaaaaagtctggaagagcacaaatggacaatctaaggtcacacctcaaggaactagagaaacaagaacaaaccaaacccagcagaagaaaggaaataaccaagatcagagca

SEQ ID NO: 531776 - DNA, 618 bp, Homo sapiens
acgtgttttttattttgtgcagcttttgtagttaggatgtagtgcaggacggtcggattgatgcacgtcactccatcagagccagaaatggaagttctggtttaataagtttgagttagaagttccgtttcttttctttggtctcatttttcctagtcaggtaatgaaatacatattacagaggccatagtactgaaattaaaattttaaaaactagattttcattctagaatcaatggaaaattgctttgcgatgatgagccttctggtttcaatttctttgtctgtaaaatggacacgatctcatctacatcattagcaggctattgttttttttwaaaaaaagtttttttttttttcctgacaaaatgctctcattattcttcctcattcttttgtaagttagctccacggggaattgagaaatgaattcttaactaaaaaccttacagtaagagccggcggcagcagtcatgcttacactgtgtcatgcccgtgtttaccacctcctcaccctcaaagaacatggggcagaagggcgagcagatgctaactcagtgtgcagccagtcggagggcagtgggggttcagtttgtaatacccgtacaggctggagtc

SEQ ID NO: 531777 - DNA, 618 bp, Homo sapiens
acgtgttttttattttgtgcagcttttgtagttaggatgtagtgcaggacggtcggattgatgcacgtcactccatcagagccagaaatggaagttctggtttaataagtttgagttagaagttccgtttcttttctttggtctcatttttcctagtcaggtaatgaaatacatattacagaggccatagtactgaaattaaaattttaaaaactagattttcattctagaatcaatggaaaattgctttgcgatgatgagccttctggtttcaatttctttgtctgtaaaatggacacgatctcatctacatcattagcaggctattgtttttttttaaaaaaagtttttttttttttcctgayaaaatgctctcattattcttcctcattcttttgtaagttagctccacggggaattgagaaatgaattcttaactaaaaaccttacagtaagagccggcggcagcagtcatgcttacactgtgtcatgcccgtgtttaccacctcctcaccctcaaagaacatggggcagaagggcgagcagatgctaactcagtgtgcagccagtcggagggcagtgggggttcagtttgtaatacccgtacaggctggagtc

SEQ ID NO: 531778 - DNA, 552 bp, Homo sapiens
tgctgggtgggtccagcctgcctggagttgctctcatgacctctttccgctcttcccctgcacacaaggatggcacaggcttccgcagagccctgggtgttagcccttgccatgtgtgcctttsccctcgagttgggtccattcccagtgaggccccacgagagaaactctcattccatcaatctgccagtcaggcacacgcaggggctggttttgtttgcccaaggctggattgcagtcacacagttgttgagaccagtgttcctctctggatacacttttcttgtcagagagcacctttattaactttcaaagcagagttaccatttcccaagatgaattcagtccagacagagtatcacgggaaacagtaactgtctgggctctccttttcgagggcaggggaggggagagctggggcagctttcgggattacagagaccgagaattggttcattttatggcaagtgtggaatggagatcatacccccttaaatatttgagggcatggctggcgcacattgccttcaaggctgctagatctaagatatt

SEQ ID NO: 531779 - DNA, 739 bp, Homo sapiens
agctcccagccaagcatgtgaatgagccagcccagctctatggagacttgagatggctgaagcccgagctgacctgtgtctgcctccacatgagagatcccaacagagaaatgcctgggtgagcccagtccatgcacaaagccacgagagacacacaagctgccccctgggttgttatgcagcagcagatggcgagaatgaacagtgatggggcaggcaggtgctgttgtctggctatttgtctgcaagtttacagaatggaccccagctctaccgcactggtggttccatttccagacatgacacagtccagaggggtgggcctcctgactcagtggtctcagacaacttgagaaacctccaggtgtctgaaaccacaggcttaattttggaagggctgacttggcctcttagctacctccgtcccgtcggctgttttgattcattaggcttttcygagctctagtaatgaaggattgccaggtagcacttggttcaggggaaggagatttgcaacctgatggccaaaaatagtaagtagagacctggctcaagaaggctgggaggctttagaaaatgatatgctgacaatacaatctttttcctgtatttttttttcagctttacccgagatgccttacctattagtagatactctataaatatcacttagagtaattaagtaatagagattgcaaacatttaaacagtgtaatgatagcctctgcatgcataatat

SEQ ID NO: 531780 - DNA, 519 bp, Homo sapiens
ctgtccaccaaccttcacatgtgagtgccaatgaccaggccctcctcctggagccttttaggagctgtatgaagaaactgtgttcactcattcccctcctgatttagagaccaactgaaaaacacagggattagagaacmaatcattagcttaattactgaacaaagctggcttggaaaatgtggtgaagatgggcagtccccatggccctggggctcaggcctgaattaagcaaggtgtatgcatacaccaggacacaacctcctgtgttgcttagggcaagcagacctgaaggtgtgggatcaatgatttcttcccagagcacttgcctgacacataactcctgagcccagcaggagaggctagtagagtaggcacgagctctccatgaggaatcctgagtccaggaaaaaagaatgaagtgtccttgagacctctcagtgccatactgtttcctcaagcctaccttatagatttcctacattctgacctggccgctgcagaccagccctcctgtgg

SEQ ID NO: 531781 - DNA, 519 bp, Homo sapiens
ctgtccaccaaccttcacatgtgagtgccaatgaccaggccctcctcctggagccttttaggagctgtatgaagaaactgtgttcactcattcccctcctgatttagagaccaactgaaaaacacagggattagagaacaaatcattagcttaattactgaacaaagctggcttggaaaatgtggtgaagatgggcagtccccatggccctggggctcaggcctgaattaagcaaggtgtatgcatacaccaggacacaacctcctgtgttgctyagggcaagcagacctgaaggtgtgggatcaatgatttcttcccagagcacttgcctgacacataactcctgagcccagcaggagaggctagtagagtaggcacgagctctccatgaggaatcctgagtccaggaaaaaagaatgaagtgtccttgagacctctcagtgccatactgtttcctcaagcctaccttatagatttcctacattctgacctggccgctgcagaccagccctcctgtgg

SEQ ID NO: 531782 - DNA, 519 bp, Homo sapiens
ctgtccaccaaccttcacatgtgagtgccaatgaccaggccctcctcctggagccttttaggagctgtatgaagaaactgtgttcactcattcccctcctgatttagagaccaactgaaaaacacagggattagagaacaaatcattagcttaattactgaacaaagctggcttggaaaatgtggtgaagatgggcagtccccatggccctggggctcaggcctgaattaagcaaggtgtatgcatacaccaggacacaacctcctgtgttgcttagggcaagcagacctgaaggtgtgggatcaatgatttcttcccagagcacttgcctgacacataactcctgagcccagcaggagaggctagtagagtaggcacgagctctccatgaggaatcctgagtccaggaaaraagaatgaagtgtccttgagacctctcagtgccatactgtttcctcaagcctaccttatagatttcctacattctgacctggccgctgcagaccagccctcctgtgg

SEQ ID NO: 531783 - DNA, 588 bp, Homo sapiens
attgatttcttctttttctatattttctcattttatggcatttatgtgggttttttttcccaactttttgagttgaatttttgctactcaacatttctgctcttctgagttgaaagttttcttttactattgccttagcacctcactgctcttgattcctcatgtccttattgtcattgagttgtaggcatttcataaggtctctgttaattttccacccaaggggtcatgtgtatttagttaattttcacacacatattcacatatacacagaaatacagtgccagtgctttttttttttttctttttgtcttattgaaggaagctatacctaccttaaggtcatgaagatatcctatattctgcaagcttgacagttttgtagatttttttctttgtgcctttaatctatttggagttagttttatgtgtgctttgaggtayggatcattttatttatttccctatggatacatagttgtcccagtaccatttattggagagtctttggccccaacaaatcaacatgacatgccattgtacatgaggtctgtttctatgacatttattctgattggtctgtttgac

SEQ ID NO: 531784 - DNA, 648 bp, Homo sapiens
ggggacagtgctgatctttcaagcacagccggagagccacggccttaatctaagataataccatccctgcaaactactaaaaaccgagcaaagaacaagaacacaccggtttcaaagatacaartaccaatcacttttaacagaaaagacgctcaatgtcacccaaattaagcaaatgcaattaattcagtaatgagaaacagacatcttgtttcaatggaagggatcaaagagtttgataatacaccatattatgcaaggtttggggaaatagcactcatacaccttcatgggacaggtgatggagaacttgatagtaattttcaacagcaacaggccatctctacccaatttgaagtgtacctaccgtttgattctgcagttccatttacaggagttttctctacagataggctcagaaacatgaaatatttaagtataaggttttcattgagcaaaagactgaaaatagcaagaaagtggttaataaatgatagcttatccctcagcagagtcttctgaagctgttaaaaaacacaatctggctctatatatactaatatgaacaaatctgtagatggctcctaacttgcaatgtttcaatgtatgatgttttgactttacaatggtgggactactacatacatt

SEQ ID NO: 531785 - DNA, 537 bp, Homo sapiens
agctgcccagtatctgaaatatttcctcccaaacagcacttctctactttgagtaatgaactggtaactttggaaaaaaaaaaagattgtgaaccttgggtggagatctatattacgtgtacttaatgttacttagtatgtccaaatgcagcgcttgctgaacttcttcagcttatagttttatgcaactttaacacaaaaacaaaattccacagcagcttcaagtaaaaccgttcaatcaattaatataaaattagcataattagtctagtgggaaatagatatttttccctccatggctgctcttggtcaaatacagcaccaatgggtctgattctgcaattttgyggtggctacagcagattatgctatgtgctagctcaattattccagcatatttctgtctgcaagtcactgcaaaaagcattattgcaaagtgtatcagatgccatttgggccccatctctttctcactcatgataaagaaagttagttttccttggttcaaacggtatcatagctacaaggaagcttcaa

SEQ ID NO: 531786 - DNA, 588 bp, Homo sapiens
ctccttcctgctctttccaaaaagccaggtgccgccggccagcatcccgctccctttgacccgcagtctgtgcgggaagtaggcccggagtggtgccagcaggaggtggccttagaaaggcggagacccaaggagcagagtgagtcggcgtccagctccacctgaaagcgccatcttgtcgccacttccctcaggagcaggtgagctcttccccaggacccgcttcgcggcttcctttttcccccagtaccactgggcagaggccgcggcctctctggccctgcaggggacagggcccagggaggggagmcgcagcctacgggcctgaggcgggcagacggcctgcggcctccgggcgctgcctgctccagcccaggagcctcctggatccgccctcggcccaggcctccctctttcactttattggtgtctatgaggctttagagatgcaaccgttacaaacacagccaagtacaatagaccagagcgctttcctgtatgaacgccccctggggcagatgtcctggtttcatttagcgtttaacacatctttagtaccatggcaaacactggaatgctacaggctct

SEQ ID NO: 531787 - DNA, 563 bp, Homo sapiens
acatcctcaagtatgttagtggaaatgaggcatctacaaatatttctgctgtttcactcatttttcacctgatagtcatgccgagaaatattctacacacctgtttttctcttgtgcttaggagttttagaacacaacagaccatggccccttaaatagcctccaggggctggatttggggaaagagcaggtttgcagattatacacggtgtctgtggggcagagactccactcatagagactgactctaatgagcacagaaagagtggagttaaaggaggaagagaagggcaaatccaaaaacaggaaaaaaaaaataccctcagggtgttccgtccttccctctgtcaagcttctgagctcttcccctgggcaaggcagcgcagaggccatgtatgaaacagaggggaggcacagaaagaagaacgtgtttcaggggtgccagtctaggatatgagatggatctcagagggagaaagctgaatatttatagcaaaagcaatgctaaatgaattataggcytagtttaaagaaagaggcaaaactatagatctaaatggcag

SEQ ID NO: 531788 - DNA, 590 bp, Homo sapiens
cagctgaactggcacttcattcccttaaactgactaacttatctgccattgaaataaccaataaggttgtctattgttcttgcatttaatagggttcattcttttgaccaaaattgtagagtagggaaaggaaatagaaaaattcttttgagaaaagtaatagcttaggtagttaataaatatgaatgactatgtttcacaaaatttaaaactgtcaagaatgaaaaagaagctaattgttgttggtctaccaaaagctaaatatggtaaatggctcttaatgagcacaatgtagaaatgtctgttctttccttaggggcatttcaaaggaaataaaaatagtttattggaattctgtcatttacagtgcattataaatatgccaatatctgtttacactcttgaagaaaattttatttcttggatataaaactattattgtgacattgtttcattttcatagcaagtctgaacctgatttagattttgactctagagaaggagaasttcccttgtttttttatctgactcccagggcaagttcttagcttccatgattttgaaaatataacagcaaaatggtctcgagt

SEQ ID NO: 531789 - DNA, 623 bp, Homo sapiens
gtcacgccaccttaatcacatacccacctgaataatcactattcttcctgtcaacagaaaaggatagatggcagcgtggagatcgtgtgactatcagagtgaataaaattataggaaagaaggaaatggacttcattgccacatgttccaaaataaaggttaaattatggtatttatcactcaatcaatatgattccaaaagtatgtttatawgctttgatcagttaagtgtgttcagccattcttccttagattgaaaatgaaagaataaaaaaagtctggcaccatgttctctagggttatagtcttttatcaaagattagcagcctgtgttccattatctaacactctggagttctcccaatctgttgcctttggaaagcagaatgacaaaattcaaatttcaaatgcagccagggaataaataaagagtggagatgactcagcctggagaaaatatgactgttggagaattactgtaaaacaagcctctctgttgaagctgtcaacacaaacatccagcacagcacagaaaggccatatattagtctgttctcatgctgttatgaataaataccctgaaagaaaataagttcaattgactcaagattctgcacggctgg

SEQ ID NO: 531790 - DNA, 456 bp, Homo sapiens
cgagacacacccaggtggatctaattaaccctccctcttggaaaaagaatgggggacgatgtccagggccctggatctagtgtctgtcgctgaccttgggcagtccctgccacgcttgagcctcagtttcccacccgtaggccgagctgaccgtctccatcgctgcgctccttcccttctgctggtttttcctggtcctgggagggacgccttcctctgcccagtcgccctcccccagcccttggctgcgaggtcgcccgcagaaacccaacactgctgccgcgctctcggcgcgcccggcgaacmtaaggtgtggacgcgccgcgagggtcccctgcttgcgggcggccattaggcgccaggccccttggcgcttcggccctgctaggctcggcgagggtcttacccagactggcacgcgccccgctcgcgtccttctattgacctgtcagcgca

SEQ ID NO: 531791 - DNA, 535 bp, Homo sapiens
ggccattgtggagtggcttctcaaaggggtagcatattttwaaaaaatgatttaataatcaaagtgctacaaaaaacccttcatattcctgaatcattttgagatgctagaaatttcttcaaaatgaagaaatgaaaaaaggtttctctaatatttgtctcagtaattgtttagattacaagtgacaaaaaaattcacctcaaactaaaaaaacaaaatgggtaatgtttcatccctggaccagttctctgatgcagacatattagttactgtaaacacctgaatcgtgttctcatacttgaagtttaaagggcagaatactgagtttaaaattacccattccaacaccatcattggaacaggggaaatagttccttgaagtagagaaatgtactgaattgctggattatccttgtttagaggctcaggaccaaatctgtcacttatgttaagattaatgtattgtctttatcttataactgaactaaaagatgtaaactattttacccacttggataaggaatgggaggacatt

SEQ ID NO: 531792 - DNA, 535 bp, Homo sapiens
ggccattgtggagtggcttctcaaaggggtagcatatttttaaaaaatgatttaataatcaaagtgctacaaaaaacccttcatattcctgaatcattttgagatgctagaaatttcttcaaaatgaagaaatgaaaaaaggtttctctaatatttgtctcagtaattgtttagattacaagtgacaaaaaaattcacctcaaactaaaaaaacaaaatgggtaatgtttcatccctggaccagttctctgatgcagacatattagttactgtaaacacctgaatcgtgttctcatacttgaagtttaaagggcagaatactgagtttaaaattacccattccaacaccatcattggaacaggggaaatagttccttgaagtagagaaatgtactgaattgctggattatycttgtttagaggctcaggaccaaatctgtcacttatgttaagattaatgtattgtctttatcttataactgaactaaaagatgtaaactattttacccacttggataaggaatgggaggacatt

SEQ ID NO: 531793 - DNA, 568 bp, Homo sapiens
ctcaggtactgcatggccagcccctgctccgtatcctgtcattagccaaggagcaaggccagccctctttttgggcaaggttaaattcttgccttccctcttgttgccgttgcttctgttcctggaggagctcctggcacagtgatggggtctcaggcctccaccttactgcacgatgaagagtttgaggagatcaagaaggagactggcttttcccacagtcaaatcacacgyctgtacagccggttcagcaacctggacaaaggagagaacaggacgatttccaggggattccagaacttgccatcaacccagtgggggactggatcatcaatgccttccttccagagggagaggaccaggtaaacttccgtggattcctgcaaactctggctcatttccaaaccattgaggataatgaaaagagcaaagttgtgaatggacctgaaccactcaacagccgaagcaacaaactgcagtttgcttttcgactatatgatttggataaagataacaagatctctcgtgatgagctgttaagggtgctgtgcatgatggtccaaataaa

SEQ ID NO: 531794 - DNA, 630 bp, Homo sapiens
cttaaattttgtttttctgagaaagttttctatttgctttctttgttaaaggaaatttcaatatatagaattgctttatccccctaaagtcatatgctgttgaatatattttcaaatacttatttgccatttttatatttcctttggtgacttatccatttatattgtttccccatttttaactgaattgtttgctttcttgtgaaatttgaagggtttcttgtgtattttgaataatagcctttattacagattagtggataaagaaaatgtggcatatacatacaatggaatattattcatccttagaaaaaaggaaatcctaaaatttgtgatagcattgatggactgagagaacatattgctaagtaaaataagtgagacacagaaagacaaatatactgcatmatctcacttatctgtgaaatctaaaaaatttaaactcattagatgctagggattagaaggtaggaaaaagggggagatgcttttagttaaaagatgaataaattctggatacctaacatatatagcatagtagctacagctgataagaatgcattgtatacttgaattttgctaacagggtaggtcttacgtatttccatacaagcacacatagacacacac

SEQ ID NO: 531795 - DNA, 663 bp, Homo sapiens
ctgactgaacccccaaggtagcccaccaggcctccatagagctgcccagcatggccatggccagtaccaagagtcggtgggagacgggtgaggtacaggctcagtctgcggccaagactccgtcctgcaagatgaaggtaatgaaacagaagtgcagccacaacaaaacagccagttaatgtggaaacaaagtcgacaactactcagacaaaggtatttcactttctccagattaccacagaagacagctctgtggatcctcctcagatgagatgatttaatatggtactggggaaatgagaagccatacgagcacaagtgctccctgagggtgggccaccactccggctcatcttccataatcgtcactgcaaattgtagcctgggaacgctccagctatatttcagctcgccttcggggatcgccgcctccgaagcacaacaacaagcaatgcagtctgtccatggaccttcgcagagactctcagcacctccygcctctcagcagaaatgcccaacagaatggtcaggaccagcgagcatgtgcaccttagctggtcccgagcaacaggcccgaggtggagaaaccgccctagcagctctctcgtggcacccagtgcaggcggcgattgctgctcaggtgcctcgggctggcggggctcc

SEQ ID NO: 531796 - DNA, 543 bp, Homo sapiens
acttaataattcatttagaaggaagagtcaaggtatawatactctaaattttcttggcgactggcttgatattatcatcattagctgagatgggcaatgctttaaaagaaatagatttatttgccaaaatataaaatgtgtttatggctatgtcaaatttgagatgcaggtggtgaagacgggggggagaatcagttgacattttaaaatataggtttgaaacctacaggaaaatattggagtaaaaaaaaataaagaaaatcaaacgtcaaaggaaatgctggaagtgtgggaatggataaaaggagcacaggaaaagtgtgcagagcattgttacccaaagtgctgtgggaattttatacacatatgaatacaactcgcaaaacacacaaatatttttcttccctggatcatttactggagtcttttacatacacattctgaagtataaggtatgcagaattttctaagcgtatcatagaaatccattccaagaatacatttcaggaaaactattgtcaatcagggaaacattggtgcaga

SEQ ID NO: 531797 - DNA, 543 bp, Homo sapiens
acttaataattcatttagaaggaagagtcaaggtatatatactcyaaattttcttggcgactggcttgatattatcatcattagctgagatgggcaatgctttaaaagaaatagatttatttgccaaaatataaaatgtgtttatggctatgtcaaatttgagatgcaggtggtgaagacgggggggagaatcagttgacattttaaaatataggtttgaaacctacaggaaaatattggagtaaaaaaaaataaagaaaatcaaacgtcaaaggaaatgctggaagtgtgggaatggataaaaggagcacaggaaaagtgtgcagagcattgttacccaaagtgctgtgggaattttatacacatatgaatacaactcgcaaaacacacaaatatttttcttccctggatcatttactggagtcttttacatacacattctgaagtataaggtatgcagaattttctaagcgtatcatagaaatccattccaagaatacatttcaggaaaactattgtcaatcagggaaacattggtgcaga

SEQ ID NO: 531798 - DNA, 543 bp, Homo sapiens
acttaataattcatttagaaggaagagtcaaggtatatatactctaaattttcttggcgactggcttgatattatcatcattagctgagatgggcaatgctttaaaagaaatagatttatttgccaaaatataaaatgtgtttatggctatgtcaaatttgagatgcaggtggtgaagacgggggggagaatcagttgayattttaaaatataggtttgaaacctacaggaaaatattggagtaaaaaaaaataaagaaaatcaaacgtcaaaggaaatgctggaagtgtgggaatggataaaaggagcacaggaaaagtgtgcagagcattgttacccaaagtgctgtgggaattttatacacatatgaatacaactcgcaaaacacacaaatatttttcttccctggatcatttactggagtcttttacatacacattctgaagtataaggtatgcagaattttctaagcgtatcatagaaatccattccaagaatacatttcaggaaaactattgtcaatcagggaaacattggtgcaga

SEQ ID NO: 531799 - DNA, 644 bp, Homo sapiens
tgctatgatctccccagtcccctgtcgactattaggttgaaccacatgaaattgccaatattcagctggttttgaccaataaagatggtgatttcatataattcaarcaaaccctattagaatgaggtagcaaattgtgaaaattctcatgcagaacaatgcaagttattgaccaagtcaactacggctccatcatatggaatcgagttggatgtgtatccaagctctaatacaatctattgtaaaatgcaggctaattagcttgttaaatgagaatttaatatttggaatattaaaagggaatttcaacttctgatagggaaaaaatgtataactgatgtgcactcaggtatgttaatatgccaagattctctgtgtgcaatggctgtggccactactcagcatatgcaacttcctcaggtctttgaaaaccaactctttacatactttctctcctccaccacccccaacttccccactctctttctctgtctctagtctctcatggtcagacttctgaaaagagcagtctacactcacttttctacattctctttcttattcatcctgtagctcactgtaatctggtttctgttcccaacactccactaaaacagtttctgccaaggtcactaatgaacttt

SEQ ID NO: 531800 - DNA, 653 bp, Homo sapiens
gatgtgcctttatgctattcttaaggagctcctgaagaggaaattacaagatgtcccagaggggcacattgtgagggtctcacagccttaagcgccaagaagttcttttccayatttgaggagcattggaccagggagtcatgaaacctgggctccccatcaattcagatatttagtagtggttaaacctcggagtaactgttctttgacttggttttctttttcatatgtaagatgagaataaaagcatttctcttgatacccacatgagactgttggaaggatcaaaggagacagtgatatgtagagcaccattgcatttctaaattagattgcgatttaccaacttaaaggtacaaattgagatcaattagatacaattaaagaccgatgaggcccaaggagaagcagagtgattaagagtggaaagcctcagtgcatttagattgagagaacaggtataagatggagtctatcatgcttaaggttggacattaggtgcatttgacttggtcatgttcaagcctactgtcttcatcacaatgtgataccaaaagttaagttatataatatggctgtctcaattgtcattgttgggtttaagtactccttggaatgatttttgcttctagtttaagatgctgtatgaccca

SEQ ID NO: 531801 - DNA, 633 bp, Homo sapiens
ctcaacatttgtgcttcctcttctagagtatagagttgttgaaaggaagttatttttcagcagagactgtatcttcagcttcatctctcttatatctaagggatcatctaattggttttcaccaatgtattgtaagcactgtgttgatgctgagtcaaagaggttaagaaataagtgtgcttctytttcttcatttctcagtttgatgcaaaagagcacattgattttgggagccatgtgtttgaacatagtgaaggtacaagatggaaggagtctgggagcctggatgatacttggaagaacatctactttggtgtttttgagtgagaagtaaatttttgttgtattttatccattaaggcattttgttagagcagataggatcaccctaatacaaaagatggtctgatgaaagcactggtactacaggataagactaacatctgctcaatacatgatcctctatgtggtagtgacacttttggtaaaattatttccctgaatcatgtgtatttgaggatctcagagtaggatctctactgtatagtcagacaatctgggcatacatggacctgtctatctgggctggtataatgatctggtaaaactcttttggatagcagggagaattca

SEQ ID NO: 531802 - DNA, 633 bp, Homo sapiens
ctcaacatttgtgcttcctcttctagagtatagagttgttgaaaggaagttatttttcagcagagactgtatcttcagcttcatctctcttatatctaagggatcatctaattggttttcaccaatgtattgtaagcactgtgttgatgctgagtcaaagaggttaagaaataagtgtgcttctctttcttcatttctcagtttgatgcaaaagagcacattgattttgggagccatgtgtttgaacatagtgaaggtacaagatggaaggwgtctgggagcctggatgatacttggaagaacatctactttggtgtttttgagtgagaagtaaatttttgttgtattttatccattaaggcattttgttagagcagataggatcaccctaatacaaaagatggtctgatgaaagcactggtactacaggataagactaacatctgctcaatacatgatcctctatgtggtagtgacacttttggtaaaattatttccctgaatcatgtgtatttgaggatctcagagtaggatctctactgtatagtcagacaatctgggcatacatggacctgtctatctgggctggtataatgatctggtaaaactcttttggatagcagggagaattca

SEQ ID NO: 531803 - DNA, 633 bp, Homo sapiens
ctcaacatttgtgcttcctcttctagagtatagagttgttgaaaggaagttatttttcagcagagactgtatcttcagcttcatctctcttatatctaagggatcatctaattggttttcaccaatgtattgtaagcactgtgttgatgctgagtcaaagaggttaagaaataagtgtgcttctctttcttcatttctcagtttgatgcaaaagagcacattgattttgggagccatgtgtttgaacatagtgaaggtacaagatggaaggagtctgggagcctggatgatacttggaagaacatctactttggtgtttttgagtgagaagtaaayttttgttgtattttatccattaaggcattttgttagagcagataggatcaccctaatacaaaagatggtctgatgaaagcactggtactacaggataagactaacatctgctcaatacatgatcctctatgtggtagtgacacttttggtaaaattatttccctgaatcatgtgtatttgaggatctcagagtaggatctctactgtatagtcagacaatctgggcatacatggacctgtctatctgggctggtataatgatctggtaaaactcttttggatagcagggagaattca

SEQ ID NO: 531804 - DNA, 633 bp, Homo sapiens
ctcaacatttgtgcttcctcttctagagtatagagttgttgaaaggaagttatttttcagcagagactgtatcttcagcttcatctctcttatatctaagggatcatctaattggttttcaccaatgtattgtaagcactgtgttgatgctgagtcaaagaggttaagaaataagtgtgcttctctttcttcatttctcagtttgatgcaaaagagcacattgattttgggagccatgtgtttgaacatagtgaaggtacaagatggaaggagtctgggagcctggatgatacttggaagaacatctactttggtgtttttgagtgagaagtaaatttttgttgtattttatccattaaggcattttgttagagcagataggatcaccctaatacaaaagatggtctgatgaaagcactggtactacaggataagactaacatctgctcaatacatgatcctctatgtggtagtgacacttttggtaaaattatttccctgaatcatgtgtatttgaggatctcrgagtaggatctctactgtatagtcagacaatctgggcatacatggacctgtctatctgggctggtataatgatctggtaaaactcttttggatagcagggagaattca

SEQ ID NO: 531805 - DNA, 622 bp, Homo sapiens
aatctatgtaacatctttctgagcttccttccaacattttacttacagtgctgtagaagagtagtgtccatagccttcaattaaagcttgtaattcttggaaaaaattaactttatttttgaaccccaggagtttttataaataataaataactaagcagttttcaataaaaaatgtactcaatcaaagaaaaagtagcagtaggtggggatcagcagaaaaaaataaaaatattgttaacagattaaccagggctacagatctatagatactaggcataaacaccatatattaaatatttgtatttttttaaaaggcaagctttaaaatatttttagtgaaaagaactgcataaaaatgagcatcccaaatgagtatgcttgataaagtattaaatggacctaaaaatttaaaaaatgtattaaaggatttagacttctcctgatggcacaatagtttgtgtagaattaataaggaaagagaaaaattagaaagtggactaaaaggaaaacaaaagtagacaagtctcatctgcttgggagcatcagagggagttaacawgacagtgaaaaattatctaagcaggagctaggagatgatggaatacaggcaggtcaggcga

SEQ ID NO: 531806 - DNA, 503 bp, Homo sapiens
gtacatattaaaattattagtttttcggaaactacaatttaatagcaaactaattcaaaatagtaactaaacaaatcaatgatctaaaacatatttgtttttatggtaatattagttaaacaaaggaagaaaatgttggacctatgtgacaatatgtttgatttgtcaaaactgatgtttcttctggacattatattcgatggttggacaaaatattttaatattaattagatatattagcttattaatgtatttaaaaattttaacaagtggcattaatgattgtgtatgttttaaataactgataaggaaagctgaataatttttcttaatttcaaaaagttttgtgatatatagatttattacccaaaattacaattttttttgtcaaacgtgaactgatttttgataactgaaaaaagtggtcattttagattttcaaaagcaaagctcttcattcaagtraaattacacagacaaatttattgtgaaacaataaatgt

SEQ ID NO: 531807 - DNA, 391 bp, Homo sapiens
aaaaagataaagaaaaaaggggggtgggggagttaaatttagcatccccggtgccttttcagtgaattttcacaaaaacctacaacaaatgtgggctcaggaaggtcctaagcaccttgtccaagatgacacartgagcaaacaaggaaatgcatcaggtgcctgccatgcagaaagactagccggcttgggcatagctctgaactcttcctttcccgcttatcccctttgtaaaggtttacatgacccgattaaaagagagagatattatttttcactatttgatcactaatacagtgtgctaatacaaaatgagtcagaactcaaaaactaaaaggcatagactttctacctttgtttggtctcctgggtctcctcgtgcctgaggctc

SEQ ID NO: 531808 - DNA, 588 bp, Homo sapiens
tctttcccattgcccttctaatgctgtcaaaaccttccctatttgcaaagctcattctaascctttgtcccatttgaggttcacaactctgaggaggaaagcattgcccctgtcccctgcccccacccatcagtcacacagtggtaggcattgacaagtatcattgcagatacatgaaaaccctaatccaagtccttccatattaggttcatctaccccagaaaatgggaaatggtcttgctgatacacttaaggagactcctgggtacccaggtgtccaaacagagcttttggctttccctaccccatagggtttccctaccccacagttatacaactggctgtcaagcttggttctctgaacctcagcctctttcccttacttccctttcagctcaacctctcttctgaactctcagtttctgtctaaagagctgctccaaacactcttttagacaatgtctgaatagccacaataataagcacttggctgacacatagtaagtcctcaatacatatttatgtaacaaggggttgaataaatgactaattacaactaatatttttaagtgattaccatgttccagt

SEQ ID NO: 531809 - DNA, 588 bp, Homo sapiens
tctttcccattgcccttctaatgctgtcaaaaccttccctatttgcaaagctcattctaaccctttgtcccatttgaggttcacaactctgaggaggaaagcattgcccctgtcccctgcccccacccatcagtcacacagtggtaggcattgacaagtatcattgcagatacatgaaaaccctaatccaagtccttccwtattaggttcatctaccccagaaaatgggaaatggtcttgctgatacacttaaggagactcctgggtacccaggtgtccaaacagagcttttggctttccctaccccatagggtttccctaccccacagttatacaactggctgtcaagcttggttctctgaacctcagcctctttcccttacttccctttcagctcaacctctcttctgaactctcagtttctgtctaaagagctgctccaaacactcttttagacaatgtctgaatagccacaataataagcacttggctgacacatagtaagtcctcaatacatatttatgtaacaaggggttgaataaatgactaattacaactaatatttttaagtgattaccatgttccagt

SEQ ID NO: 531810 - DNA, 588 bp, Homo sapiens
tctttcccattgcccttctaatgctgtcaaaaccttccctatttgcaaagctcattctaaccctttgtcccatttgaggttcacaactctgaggaggaaagcattgcccctgtcccctgcccccacccatcagtcacacagtggtaggcattgacaagtatcattgcagatacatgaaaaccctaatccaagtccttccatattaggttcatctaccccagaaaatgggaaatggtcttgctgatacacttaaggagactcctgggtacccaggtgtccaaacagagcttttggctttccctaccccatagggtttccctaccccacagttatacaactggctgtcaagcttggttctctgaacctcagcctctttcccttacttccctttcagctcaacctctcttctgaactctcagtttctgtctaaagagctgctccaarcactcttttagacaatgtctgaatagccacaataataagcacttggctgacacatagtaagtcctcaatacatatttatgtaacaaggggttgaataaatgactaattacaactaatatttttaagtgattaccatgttccagt

SEQ ID NO: 531811 - DNA, 443 bp, Homo sapiens
aagtatgctttcccagttctgacaccccgtggcttaagagggaaggttccgagtccagtgagccccaggcacatccgaaagcatatgtttgtttaaaaagaaccagggtagccagtgctggtcttctgctatgtaaatgacatccagcgttcctactgcaggcagattcagatcctgacacaatcagttccaactgtgcctactggacacctattcacaaagaaatttaaacagtaatcagtgcctcagtatctgcaccccactagcatgtccttgatgcagttgttatgcactcttccaggtcctgagtataaatcaattttcatgacagcagggtgtagtgaaaagagccctgagcaggaggcaggaatcccaggtcttctaccctgctctcttaccaattagtaaagtgaccttttyctccacacacattcactgggcac

SEQ ID NO: 531812 - DNA, 587 bp, Homo sapiens
atgtttttgttggaagggattgaggaaagaaggaaggcaagagggcaagaagtgagcaaaggaaggaaggtagtttcttcccaaaygtgaagctgcaatcatagtttctgtttagaaaattctctatttaacacctagcatctgagccaaaggatgcagaagaaaagggaaccaacatggatgaaagactcctgcaccatgtaccttagagaccacatctgcttgggagtcaggccatgcggatttaagggccagtcatctggacaagtcacttcacatctccaagcttcggttccctcaccaatgaatagggatgataatgcctacaacgggtagcagttgtgaaaattaagtgaaaagatgcatctacaaggcatcgtaaacctaaagtgctataaaacaagaaagaatttgtttctcttcccagacattgcaacccctcaccagctcctctccaggcactgagtttcattttccacttgagtttagaagtcaaatatttagctgtgctaatggggtattggatctttttattatggccccaccactcagtgcgtgcagctttgccgagataataaaagatgtta

SEQ ID NO: 531813 - DNA, 587 bp, Homo sapiens
atgtttttgttggaagggattgaggaaagaaggaaggcaagagggcaagaagtgagcaaaggaaggaaggtagtttcttcccaaacgtgaagctgcaatcatagtttctgtttagaaaattctctatttaacacctagcatctgagccaaaggatgcagaagaaaagggaaccaacatggatgaaagactcctgcaccatgtaccttagagaccacatctgcttgggagtcaggccatgcggatttaagggccagtcatctggacaagtcacttcacatctccaagcttcggttccctcaccaatgaatagggatgataatgcctacaacgggtagcagttgtgaaaattaagtgaaaagatgcatctacaaggcatcgtaaacytaaagtgctataaaacaagaaagaatttgtttctcttcccagacattgcaacccctcaccagctcctctccaggcactgagtttcattttccacttgagtttagaagtcaaatatttagctgtgctaatggggtattggatctttttattatggccccaccactcagtgcgtgcagctttgccgagataataaaagatgtta

SEQ ID NO: 531814 - DNA, 610 bp, Homo sapiens
cataagtgctcaataaataagcattattgttattgctatttttttcattcctaaaacatttgactgaggtttcatttgttcccagccatgattagaaattatcgccttagcagataggatagtgatgaagatcataagcattttcatcaagcaaactagggtctctccgtctgtaktaggtcactcgtgcactgctgtaaagaaacacctgaagtgtttcatttataagaaaagaggtttattaggctcatggttctgcaggctgtacagaaagcatagcaacatctgtttctggggaggcctcagcatcttccttttgtggtggaaggcaaagaggaagcaagcatgtcacatgatgaaagcaggagcaagagagagtgaggtaggtgccatgcacttttaaacaaccagatctcacaggaactcaatcactatcttgagtacagcatcaaggggatggtgcttgtgatggttaatactaagtgtcaacttgattggattgaaaggtgcaaagtattgattgatcctgggtgtgtctgtgagaatgttgccaagagattaacatttgagtaagatggctgggaaaggcagacccacccttaatctgggt

SEQ ID NO: 531815 - DNA, 642 bp, Homo sapiens
tgtataacatctggtagccaagaaatactgctggagaggttttcagtctcagagtttgatgggtcctgatacacaaaccatttctcatcaacttttcctggatgcaaaaatgcatctcaggaatatgttcttgggaaatatccatgtgtctgacattttccccacatcttagctgaggaatacccccacagtaagtcratatactttattgcagaagaaaataagagaatacatctaggtctcactgacttttttcacttactagcaactacctgaccccagaatagttgatctagggggaagcactgctgtttcttaggagggtctatacaattatggtgagatggataataatatcattctgtcttgatttaaagacatttccaatgataagacatgctactgatttaataagagctccttgagaaaaagagagaagcactacattaatgtacatgtcaattgtaagatattccaatttcagaaatgttaaataaaaaagtatatctcaaaatttggaaaatataatagctaatatatctaaattggcaaaatgtgtctgtgttttttttaagtttcttttatactcaaaatgaagtagtgagttagatattttgatctctcttttacagatgaggaaat

SEQ ID NO: 531816 - DNA, 642 bp, Homo sapiens
tgtataacatctggtagccaagaaatactgctggagaggttttcagtctcagagtttgatgggtcctgatacacaaaccatttctcatcaacttttcctggatgcaaaaatgcatctcaggaatatgttcttgggaaatatccatgtgtctgacattttccccacatcttagctgaggaatacccccacagtaagtcaatatactttattgcagaagaaaataagagaatacatctaggtctcactgacttttttcacttactagcaactacctgaccccagaatagttgatctagggggaagcactgctgtttcttaggagggtctatacaattatggtgagatggataataatatcattctgtcttgatttraagacatttccaatgataagacatgctactgatttaataagagctccttgagaaaaagagagaagcactacattaatgtacatgtcaattgtaagatattccaatttcagaaatgttaaataaaaaagtatatctcaaaatttggaaaatataatagctaatatatctaaattggcaaaatgtgtctgtgttttttttaagtttcttttatactcaaaatgaagtagtgagttagatattttgatctctcttttacagatgaggaaat

SEQ ID NO: 531817 - DNA, 608 bp, Homo sapiens
aggagagcatgtgccaaaatatctgaaggaaagagaaagagagcagaattgctatcaaactctaactgagatactaatttcctttaagaagaccatggattctctccttagaggattaatagcttctttatatttgcattcaaaacattttccccattcttttcatgtatctcatcatcagtatcgcctgaaaaccttgtcaactggacaccctgtcatggaccctgtgttttagagctgtgctaactaatataggagtcactagccacatgtggatatttaaatttaaattaattaattaaaatacaatacaatgaaaaaaaatcaattccgaagtcaactagccacatttgrcatgctccatagttacaaatgccaggtcatatatagagtactgccatcatcaccgaaagatgtacttagagtgctactttagagaacctctctctggttcttcttcggggaaaggaggtgagaactatatggattcccatataggggatagccaaacttccagaccctgcatcatgcccagagtgatccacctggactgctccaagtccacttgcagggtcctatccatggatctggcgccttgagaatggact

SEQ ID NO: 531818 - DNA, 610 bp, Homo sapiens
gcctggtgagctctggaccagccccacggcacagggcttccatgttctgggttcctctcaattgcccctcaattgccctcctgcccctcttgctccttcagagcctgtggcctaatccttcctaaccctagcgagcggtcaggagccagacacaggaaggctgaaccccagctcctacactcagtgggctctgagaagtctcagaatattcaccggtcagatgcacagtaacagacctacaggggcttggatgaggtgggcagggggagtggactgtctcctctctgtcacccacrcactttcccctcgaatcacctggcccccttccctgcgtctctgcacgaaccattccttctgcccacatcctcactctcctgacccttcccatcctgcaagacccacttctgagcccacagcctgtgcctctggctgtgggtttggcctatggggtcctcttctgtccctcaagctaaattctagaattaaaaaggataaaaataaaaatacactttttttttttgagacagagtcttgctctgtcgcccaggctggagtgcagtgggacgatctcagttcactacaaaccccacctcccaggttcaagtgattc

SEQ ID NO: 531819 - DNA, 624 bp, Homo sapiens
tgaggctcagaaaggttaagtaacttctccatgggtcacacagcaagctagaggcagagctgagtttcaactccaggccttcccaactcaayatccatcacttctctctcaataacacttgagatcagaagtcaagaaagtggcaataaagcatcaagaggttcaaattccacagatagggaaagaaaagggaaagtgttacctctaggaaccaagccacttggcctgggacctaaggaaataaagggcaggacattttattgagttgtttcctctgcactgggagcatccagtgcagacagggggcttatttatctctgtatccacagcacctggcacagagaaggtgctcaataagtgtttggtgaataataatggaagagtgtggaaaatgaccttaccaaagggaaggccaggagggaaaaagtgcacacagaaagaatattattgtctatgcctctccaatattacacacctgggagaataggagtgttgacatcaccccagacaggaagtactaacaactagctaagattctaccccaagatattcagaaaattccagtttgttgccaattgtcttgtgtatagtaataaggtcagaagagttaccatttactaaatc

SEQ ID NO: 531820 - DNA, 620 bp, Homo sapiens
ccagggaccatcctttcctggcccgcagtaccctccccaaggataaagtttctgggaattggacatctagcctccgaggagccaggatgacctcaccaaggaaattccctttaaggacacttttccaggcagaggctctgggccctagtgacctacgtgacccaagatggagcctctggagttttcgaggtgggtgaggagccagggcagggatcctagcattggatcgtatatctccttttcaaatgtattccataatcttggccattttcaccacatcacacctccagctaagatcgctctctgcctgaacctctttcagtattatttttgcattgttcttctctccagggaatatcctggtttagactttcctcccaattgaatttgcctttctcccctctgagccaaatcctattttgttattttccattggtatctttaaccctctttgagacatctgcattacctctctgcccttcttggtgatagcaacacctcccaattaaggatcttatgcaaatttcattagcrtgctgttgactcatcttccagatcattattaaggatgttaaataagagcagaacaaacaccggtttccacacaccttcagggaggc

SEQ ID NO: 531821 - DNA, 590 bp, Homo sapiens
gctgctgttttccgcttcttgaagggattatacacaacggtggctgtggggaaagaaaaggaaaagctaccagctaacaagtgcggaagactttccagctgggagcggggagctttggacatgaattgactttaatatgatgttcagtgggaagatgaggccgccaggcccaaattggcaagggcttaattagagccatgagaaagccagccctgaaggcatttgcttcagagcctgtctccctccatcctccgtggcccagcccaggaaaggattagtgtctccagcggcgttttccgcccgcagcgctgtcctccagacagcttgacattggcaggcgggagaaacatctggcccaggagttcagaggcccagctggactctgttcaaagagcccgaagcacctgttgggaggcactcgggggtattcaggatctttcagggaccagggtcttggggagggagrgagtcctggcttggctgcccagggacacactcaggtgtgtgggaagcaagttctcgccatggcctgtgtgctgtgccaaggccccatggaagcccggtctgctcctttggaactgggaagccct

SEQ ID NO: 531822 - DNA, 649 bp, Homo sapiens
tttttctatcttaacttttcctgccctttcggatgtgaccgatgcctcattgttattttatttctatgagtattttgtgaccttgaataccttttgtgaccttggacaacttttacattagaaatttgaatttgatgttcaatgaattttctatatatttttcttttggagttttttkttagtcaatatttaaaaatttttcatataatttagatattaagcctacatctgtcacattatattttaactaaaagattggttattgatttttatataagcttcttctttagaaaactatatatgtaaataaaattgtatatatcatatacaatatgtatatatacacatgtatactgcatatgtacatatgtatactatatatgtacacaaacacaaaaacacatgtttatattaatttttttttcctctttacttctgattgtcatggttaagaagatattcatcatcttagggttagatatcatttaagcttcctggagtttaattttattactgtttgtgcctgctaaatatgtcttttgaaaagtgtaaatatgaaattatcactgcaataatattgaaataatacatggtctaaaggctagatttgttaaatactgctcctgaagtgacttcacagacatccaca

SEQ ID NO: 531823 - DNA, 646 bp, Homo sapiens
agattacaggtgcactgcaccacacccagctaatgttgtttctattgttgttgtagagacggggtctcaccaggttgcccagtctgatctcaaactcctgacctgaagcaatcctctcatcttggcctcccaaagcactggattattggtgtgagcctccataactggccttagcttccaatttttgtatgagttatagctttctttgtttggaaatgctttccatcttatttactactagaaaagaaaaacaatacaaaagactttacccagtattttaatatctgtgtcacatattaccatttcattttagtgtttcttgacctcagtctaaattacagcttaccttgattgcctaaaaatggacgttaaggtgacaatcaattgagaaagggacaaatgaggccyccgtcaggagaattctagctcagtgattataatgtttacatgtattaatacctaagtcaaccctgcacttactcatagaggaaaaaaaattatgttacttttgctctgttatattggacataaatcccttctttaggaaatttgttattaatgcatcataataccggccatttgtttcaccctaaattgttaaaaatgacattttgattaatgttattaagaccacataatcatttca

SEQ ID NO: 531824 - DNA, 623 bp, Homo sapiens
taagttgtttgtcaggaaatgaagactcagccttgaacctagctcaatccagttgagaccaccaagccttcaagtaagtttgcattagtgtctaatggttgactttttgatgttaaaaagaagtcaaaactccacccctggaaccaaataaaagcaaaaacaaaaacaaaagcaaaagaccctcaatgactaggaccatgttcttgtggatctgtttctgaagtgaaaggtgacccagatagttgcactctggtacctaatccatggtccctggagtttcytccatcccagccaatcaacagatggctcctcataacccaatccccaacccctcagtccagtccctaaaatactcctgcttatgacccataaatgaggtggatttgagaattgctttcccatctcctcacttgggtgcctcataaataaatccttgctttgctgcaaatcttgatgtctcagtgattgccttgctacacattggataaatgagcctggtttggtaacacaaacaaaaaacaccaaaaatccttgggaactcaaaattattgaactcctaagtctgagagcactggaattttgagctagggaagttttagaggaggaagtgtaaagaaccaaag

SEQ ID NO: 531825 - DNA, 562 bp, Homo sapiens
ttggctaaagctgttggaacatacacttgacattaggcttgcttcattggatggccacagaaatatggtattttgtactaactaggagacaatgcctttgagaatgcaactacctacaaaagttgtaaaaagttaagaatttcaagtaggatcataattaatgattgaaacctaagcatgcattcagttttcaatttctgtatttcatgtgatagtcaaaagaaaataaaattagtcctaataagattttggttatcagtgaatttttaattaattcaacttttatttatcctcttttcctcttttttctgtttctcattttatagatatggaacctatgggtctgggagattaagaaattatggtttataaatagagcacaggattttaagggaaaaattatttatttatttccctgaatggtctctcagggggaaaaaacaggcatcaggcatttttagtgtttggcaagagggagatgaggtcgatatgatcagaygatgcacaaacaccctgcctgatacccaatgatctggtttaaaaaaggaaaatgtgttgattt

SEQ ID NO: 531826 - DNA, 623 bp, Homo sapiens
tttgtttccttccttgatttggagagtctgactttgacctaattctattccttaaaactggcccttacaatctyacatgcccacctttcctgtgacagtccctgagcctagaggagggtacttgtatagttttagcagcagggcatttgcagtgaaaaacagattgggggcccattgggatgccaaatgagggagattcatatctctggtcttcagaataccatgatttgggtttccttggaagtaaaacaaggagagataaataacatttatattttgacaatcaaaagagtatttgtgtgttagaacagaaaaaggaacctattctgttagggcaccaactaaaaatatgaagaaaatttataatctggtatctctagaggattattatagccaagaaataatgattcaatctgcactcaaaaaaagggctgaaatatagtattaagtgttacactttgcctttgaaacaatttatctttctctagccatccttttctattaaagagaaattatagtaagaccaatttgtgtgcaaaataagtttcaggcttattatacttggcctaattatttgcataaaatgcagcaagaaatgaatggtcatataggctccttttaag

SEQ ID NO: 531827 - DNA, 605 bp, Homo sapiens
caaaaaacatagttggatccaaacagtggtttttattgtagtacaaaagtaatagcagattcaaagcaggcagaaaagaaaatagagaaaaagaaaacttaagaactctatagtttgcaggtcgaccttacagctctttttccttgatgtaaatgtgcacaaaawgactataatatttccattttacacaaatactggccaagtagaggtgccagaaatccaacagagtgcctgaaagggggccattctccttgttttctcctcattcttagattatttgtttcctacttttttttcttaaacagatgaactgagctgtggcctagggttttgtggagtgggttgaagtgtgctgctagtgggaagactccacagtgtgtcaccactgagttgttgccacattctgttacatgtctcagtttccccctccagagacctagcactttcaggaggacttaaagcatggagtgaccagctcccatatgcacttcctggacaagccttttttaaactaaatttgttggggtttccctgtggggccactgcacgtgatgggaggggccaccccccagacactcccacaaggcccccagtcacccatagtg

SEQ ID NO: 531828 - DNA, 576 bp, Homo sapiens
tttttattgtagtacaaaagtaatagcagattcaaagcaggcagaaaagaaaatagagaaaaagaaaacttaagaactctatagtttgcaggtcgaccttacagctctttttccttgatgtaaatgtgcacaaaaagactataatatttccattttacacaaatactggccaagtagaggtgccagaaatccaacagagtgcctgaaagggggccattctccttgttttctcctcattcttagattatttgtttcctacttttttttcttaaacagatgaactgagctgtggcctagggttttgtggagtgggttgaagtgtgctgctagtgggaagactccacagtgtgtcaccactgagttgttgccacattctgttacatgtctcagtttccccctccagagacctagcactttcaggaggacttaaagcatggagtgaccagctcccatatgcacttcctggacaagccttttttaaactaawtttgttggggtttccctgtggggccactgcacgtgatgggaggggccaccccccagacactcccacaaggcccccagtcacccatagtg

SEQ ID NO: 531829 - DNA, 484 bp, Homo sapiens
aagtagatcttcaaactcatccacttgcttggtagaaggagacaagatggcttctcccactatgtggtgctagcaaactgaatgggggctgatcttctcgaggaagaaaaatggtgctccaactaaatgcttaagtagtgtcactggaatacagttagtgatgtgaagaacctctgtaacaggccaagctaatcttgcatgctgcccaaaaaagccaatgcactgggaacagcaggtattgcagcaaagaaagtttaattaacacaaggccagccaagcaggctaatgggatatttatctcaaatctttctctggaaagctcagaggctaggactttaaagaattatttgrtgggcaggaaatgaagaaatgggtgctgcttattggttggagatgaaatcatagggatgtccaaatggtcttcatgtgctgagagtttctaaaagagggttccaagacaggctgaacaagtttcttggtatga

SEQ ID NO: 531830 - DNA, 484 bp, Homo sapiens
aagtagatcttcaaactcatccacttgcttggtagaaggagacaagatggcttctcccactatgtggtgctagcaaactgaatgggggctgatcttctcgaggaagaaaaatggtgctccaactaaatgcttaagtagtgtcactggaatacagttagtgatgtgaagaacctctgtaacaggccaagctaatcttgcatgctgcccaaaaaagccaatgcactgggaacagcaggtattgcagcaaagaaagtttaattaacacaaggccagccaagcaggctaatgggatatttatctcaaatctttctctggaaagctcagaggctaggactttaaagaattatttggtgggcaggaaatgaagaaatgggtgctgcttattggttggagatgaaatcatagggatgtccaaatggtcttcatgtgctgagagtttctaaaagagggttccaagacaggmtgaacaagtttcttggtatga

SEQ ID NO: 531831 - DNA, 515 bp, Homo sapiens
tccttctattaattttgggttttgtttttgatgttttggtttgtttacagatgaaaagttattccccattggcggcagcaatgattgggaatttggtttcatgctcttgaccatccggtgacctgtataaatggattaatagattacggagatctgttttccactgggtgacagataggagataatgtggattgctagtcttttgtttttatgtcattatgcctattttgaactcaaatcaagtaaaaattttgtagtcatcaaagaagagtttagctcattgagatacagtgaaggccaattatatccctgccaaacaaaaataatttccagggaaastaccttgattcttcagtctcagtcaacatgtagtgagtatgtgactcagtccagtcaaaagaagtatattccatgccctgtgactattttagtgaggggcatgtggcccacctggagccaagcagaaacaataagatgtttgcagggactcttgtgaaagaggcaatgcattttca

SEQ ID NO: 531832 - DNA, 546 bp, Homo sapiens
aaaaagaacccataaaatcaaaatgaataaatgtttaattaaatgtctgcaagacataacattatgtaaacgtcattaattattaaatttagtattcataaaagttttaytgaatttgaaaacagtttgctggatatattttttccacttcgcaagaatttctgagttctgctgaaaaatcatggcccatccttaattatatcatagttaaataatttcaaaaacaaaattacaacattcctttccagaattttgcagtaaataattaatgttgaatgtgggtgtgctttcatatgtttgttatgaggcatgctgtggcttcgaaagggctgaccaagttcttaaaacagctccactttgaattcttccattgcttgctgtgccatgatagataagaaagaaatacttggctcatgttccacttttttattataaaacctttcaaactaggggaagccttagattgtgttctccagaagcagtctctgggaaaggagttgtgtttagaaggttttttttactggggagtgttctcaggagatacag

SEQ ID NO: 531833 - DNA, 620 bp, Homo sapiens
ggtacagctaatgcgtctcatgagatgaaatcatagtcttgtgatgactggggaagtttgcccaggcgagttagaatttaagtgagagagccttacatattattagtatttaattamgatcgaaggagaacagataaaaaaaagtagaagcataagcaaggaatgaaaatggggggcatagagtattttgtagagctgcgttgtccaatatggtagccactagtcacatatggctacagagcacttcaactgtggctagtaagaattgagatgtacaattgtgaagattcagtatgaaaaataatatgaaatatctcattcatattagtcattattatctattaaaatgagaatgttttagctatattgggtaaatataacaatattattaacactaacttcacatatttattgttacattttataatatgactactagaaaatttaaattatatacacggttcatatttgcgacttgcattatatttctattggacagtgtcaagctattgagtaactgttggaaggttgagattattaaatacgtatttttaagaaaaggaatcagactaaaaagtgctgattggttaggaggggctagagattagaaatttaaaaaa

SEQ ID NO: 531834 - DNA, 620 bp, Homo sapiens
ggtacagctaatgcgtctcatgagatgaaatcatagtcttgtgatgactggggaagtttgcccaggcgagttagaatttaagtgagagagccttacatattattagtatttaattacgwtcgaaggagaacagataaaaaaaagtagaagcataagcaaggaatgaaaatggggggcatagagtattttgtagagctgcgttgtccaatatggtagccactagtcacatatggctacagagcacttcaactgtggctagtaagaattgagatgtacaattgtgaagattcagtatgaaaaataatatgaaatatctcattcatattagtcattattatctattaaaatgagaatgttttagctatattgggtaaatataacaatattattaacactaacttcacatatttattgttacattttataatatgactactagaaaatttaaattatatacacggttcatatttgcgacttgcattatatttctattggacagtgtcaagctattgagtaactgttggaaggttgagattattaaatacgtatttttaagaaaaggaatcagactaaaaagtgctgattggttaggaggggctagagattagaaatttaaaaaa

SEQ ID NO: 531835 - DNA, 620 bp, Homo sapiens
ggtacagctaatgcgtctcatgagatgaaatcatagtcttgtgatgactggggaagtttgcccaggcgagttagaatttaagtgagagagccttacatattattagtatttaattacgatcgaaggagaacagataaaaaaaagtagaagcataagcaaggaatgaaaatggggggcatagagtattttgtagagctgcgttgtccaatatggtagccactagtcacatatggctacagagcacttcaactgtggctagtaagaattgagatgtacaattgtgaagattcagtatgaaaaataatatgaaatatctcattcatattagtcattattatctattaaaatgagaatgttttagctatattgggtaaatataacaatattattaacactaacttcacatatttattgttacattttataatatgactactagaaaatttaaattayatacacggttcatatttgcgacttgcattatatttctattggacagtgtcaagctattgagtaactgttggaaggttgagattattaaatacgtatttttaagaaaaggaatcagactaaaaagtgctgattggttaggaggggctagagattagaaatttaaaaaa

SEQ ID NO: 531836 - DNA, 620 bp, Homo sapiens
ggtacagctaatgcgtctcatgagatgaaatcatagtcttgtgatgactggggaagtttgcccaggcgagttagaatttaagtgagagagccttacatattattagtatttaattacgatcgaaggagaacagataaaaaaaagtagaagcataagcaaggaatgaaaatggggggcatagagtattttgtagagctgcgttgtccaatatggtagccactagtcacatatggctacagagcacttcaactgtggctagtaagaattgagatgtacaattgtgaagattcagtatgaaaaataatatgaaatatctcattcatattagtcattattatctattaaaatgagaatgttttagctatattgggtaaatataacaatattattaacactaacttcacatatttattgttacattttataatatgactactagaaaatttaaattatatacacggttcatatttgygacttgcattatatttctattggacagtgtcaagctattgagtaactgttggaaggttgagattattaaatacgtatttttaagaaaaggaatcagactaaaaagtgctgattggttaggaggggctagagattagaaatttaaaaaa

SEQ ID NO: 531837 - DNA, 638 bp, Homo sapiens
agggaatgtgttgcactatgacataatggtgactatgacattaggagagagaaaattttcagctctattataatcttaagggaccaccaataaatacgtggtccatcagtgactggaatgttgtatatataaattaatgaaagtgtgaatttcttcttgaaggagactgtagtgaagacaaaattcatgcacaaataatcagagtacaaataggaaagagacacctgacaaaagtactcagataaaaacatattaggagttaggtgaaagaacaaaaaatgcctcataggataaatgggacacggcttcctggacgtgctggcatttgagcaagggcagaaggatggtagaattggacagtcaaaaaatggggcattttactaaatggaagactacctattggtcttatctacagattttgattcttttatatttattaaggataatcacatatttttcatgtctggttaggttttatttgaactcctgtaatcttttttttcattataaaaagctttttttccataaaaaatttcttaaaatatgtagccacacagccgagttttattttaaggacaacrgcatttttacctcctgttttgcgtgagggtctgtgggttgtaggagatgagaaaaga

SEQ ID NO: 531838 - DNA, 593 bp, Homo sapiens
gttccaccaaaatttgcgtatatgtgaatcaatcctaaagcattttcattatcaatgatcatttttacaaattgtgttttacttgttttataccctgtgctactccttatctcttttcaattattcttcatgtaaacttcagtatttcagccatcagcacatttatcccattgaagatcaataaaactcaggaaaaaggaagctatattcagaaaagtaaccatcatttcactgtcaaaataagtggcttaatatcctaagagctatttaaacttctctcagctttagttttttcatctctaaataatatttttttgtgggattattttaaggataacaaaacagcttctatttaatgaaaycttaggtgtgtcaggcactatgctacccacttgacatctcacataattcccacttttctggaaggttatactataattagtccttattttacaggtggggaaactgttgagaccaatattacacagactagatgcttaattacatttagtatattatatatggattatcacatataatataaaaatgaggatttttaatggattttggagaattagaactggcatttagtt

SEQ ID NO: 531839 - DNA, 493 bp, Homo sapiens
atgaagcctgttagtacaacaatcataatgtgcccttgggtaactcaagtactgaatgtattgtacggtctatgtgaaaatcagagatagacaggcttgagttctgactctaccyctttaagggttgagtaatttcagagaaactcctgagtctgtctatgtttctgtatctaatcagtgaagggaagataaagacttcctttcttttcccctgaagaaccttgtttttttaccttcaagtccaaacaccacattattaagcaagggaccacagacttatcaaaaagcatcaagattagaatttttcaaaggtcactatatgcacgtgtatatttattaatgtatctgtatttctgtatatattttcactctaaatttaacaaaattcaaaaacccaaatgattcatgaaatcaaaacaatggattatgacagcctttacagaaagctgtcatttattaataacttcttctggtcatcactagacaaagaaaa

SEQ ID NO: 531840 - DNA, 493 bp, Homo sapiens
atgaagcctgttagtacaacaatcataatgtgcccttgggtaactcaagtactgaatgtattgtacggtctatgtgaaaatcagagatagacaggcttgagttctgactctacccctttaagggttgagtaatttcagagaaaytcctgagtctgtctatgtttctgtatctaatcagtgaagggaagataaagacttcctttcttttcccctgaagaaccttgtttttttaccttcaagtccaaacaccacattattaagcaagggaccacagacttatcaaaaagcatcaagattagaatttttcaaaggtcactatatgcacgtgtatatttattaatgtatctgtatttctgtatatattttcactctaaatttaacaaaattcaaaaacccaaatgattcatgaaatcaaaacaatggattatgacagcctttacagaaagctgtcatttattaataacttcttctggtcatcactagacaaagaaaa

SEQ ID NO: 531841 - DNA, 493 bp, Homo sapiens
atgaagcctgttagtacaacaatcataatgtgcccttgggtaactcaagtactgaatgtattgtacggtctatgtgaaaatcagagatagacaggcttgagttctgactctacccctttaagggttgagtaatttcagagaaactcctgagtctgtctatgtttctgtatctaatcagtgaagggaagataaagacttcctttcttttcccctgaagaaccttgtttttttaccttcaagtccaaacaccacatyattaagcaagggaccacagacttatcaaaaagcatcaagattagaatttttcaaaggtcactatatgcacgtgtatatttattaatgtatctgtatttctgtatatattttcactctaaatttaacaaaattcaaaaacccaaatgattcatgaaatcaaaacaatggattatgacagcctttacagaaagctgtcatttattaataacttcttctggtcatcactagacaaagaaaa

SEQ ID NO: 531842 - DNA, 581 bp, Homo sapiens
atggataccctgaaacagtcaaggcaattaagttagcagcaaactacagaaatctccacatcttaacatcctgtaccaaggattctctgatcagaacccgctgtatcacgtcagactcttcgcccaatatatgggctattctcatctccataattatttaaatacttcaattaagaaccctataatttgtatgtttgacactactcacttttaacagatgtattttaaatctttacctccattaaagtgcccatgtattatctaatttttatttaaacgagtaaggactctgagcagttccagaattcacttcatagtcctctggtaatgctacagtaaaaagggatgtcgtcttcaatgttctctgttttattttcatttagttcatcaggggaaaaaaggactatgctattatttcacaaaatcaaacaaatgaaatcaacaaataatatatrtaactccatatatgagaaaatataaagaaataataataaactaaggctacacattaaaataaaagcctattaattggtatctcaataatttacaaaaagagaaatttttaaaaggacagaaaaaca

SEQ ID NO: 531843 - DNA, 435 bp, Homo sapiens
agtatacaagatacagtgctgagcaacaaaataagtaaaattcaaatctaaataatagtattacagcaacaaaatagaatttaaatgtttcatgtccttaaaagaaatataaggtagtatgtaataatctgtctgtaacaacaaactgtaaacaacataacgatccatgattaagcctgcttcaatatatcacaacasacctacatgtgcttacataactacctttcccaggtaagtttttaagtaaaataaaaaggtataggcaaatataatatgatgctatttaagtataaatacatagaatttttctaaattttaaaccataaactattattagtggctattatgagtggtttctatgagaaggctttttaaccatgttcaaattttatattctttaaaccttaaagacaaaaattaatgtaaaataaatga

SEQ ID NO: 531844 - DNA, 435 bp, Homo sapiens
agtatacaagatacagtgctgagcaacaaaataagtaaaattcaaatctaaataatagtattacagcaacaaaatagaatttaaatgtttcatgtccttaaaagaaatataaggtagtatgtaataatctgtctgtaacaacaaactgtaaacaacataacgatccatgattaagcctgcttcaatatatcacaacagacctacatgtgcttacataactacctttcccaggtaartttttaagtaaaataaaaaggtataggcaaatataatatgatgctatttaagtataaatacatagaatttttctaaattttaaaccataaactattattagtggctattatgagtggtttctatgagaaggctttttaaccatgttcaaattttatattctttaaaccttaaagacaaaaattaatgtaaaataaatga

SEQ ID NO: 531845 - DNA, 522 bp, Homo sapiens
agcctgtaacaaatttcataatcataaacatcttttatcataaatatrttttacagtttgacctaacataactaacaatttcaccaataattgttttatcaattcacctatatagtttatcaaaatattttcatagaaaaacttgtcataaatttgtatattatataataaagttgtgcaattataaaataaatacaactggtacaaatagctttaaaaatgactttttgagaaatgcacatttagctggtacaagctagcgaaggacacaaactagagcatctctgaatagacaactgtttagtgccctgggtatcattcaatatgccttccagaagaaatggacagtatcttcttaggaagttcctcatttgcaggtgtgctaggagagctgtttctagagtagcatccaagaaaacataatttatctttagttctatatacaatgaaggtcactctgtgtgaataactgtatcagagtaacctttccactgagaacaattaaaaatgtgtataaaagct

SEQ ID NO: 531846 - DNA, 617 bp, Homo sapiens
tgaaaggaaaggaaagatacaagaaaccctccagggggaattcaataagatgcagtgagtggatacatttaggagatgccagagaagagtgagtcagaaattctccaaggctgcaggcttggcaggctgagcgtgtatgtcagagaagtcaggagtagatacaagtttgggggcataatgatgaatttgtttctccacctgctaaatttgaggtaacagcaagatatacaggtgacaatgcccagtaggttgttgaagatataggagccagtccaaatagagttcctggtatttgttaaaatagcactgactggaaaactcacctaaaacacacaagcattgcagtgctttgctgaaacctctgaagcttatgaattgtctgttctcagttctttgtgaaatgctgagttatagatatataaccccaaggctcatgatatctaagtctttctaaacaaatagctgtgagtgcaaagaatcataaggtctggaaatgtctgggctggaaatactccagttaagcttggactgtggacattcctccctcccccaaaacctttgtgaattttataatatctgagtatcactacatawctggctgtagcaacgtagcatct

SEQ ID NO: 531847 - DNA, 625 bp, Homo sapiens
tctgtaaatccccatatgcacatatgaggtggcagggatgggacctgccccaagttgaaaactggatcatctctgctagccaaaagagcagacagcccagagatcaaacaaaagtcaccagccaaacagtccatgcttttcttttaagaccacacacacacttgtccatcctattatagtgaccgttaggctccaaaagagtcatatcaatacccaaaaattgttaccccaaattccaaggaagcaaaataagaccaacaaggacagtagtgaaaaagacagaataaagataacccaatgtgggactgtaagaaacagaattttgaagaaatgagaagaayctgagattggttgtctggcctgattaggaataaaggctgagattcaactagtatgaaaatacaggctctggaagcacttggcatgacagctaggtaaattaccaagtatggtcacctggattgaactacccaatgaagacaaggctctgggaaaccaactggccattgtcaacaataataataataatatgaagattaggaagaactcaaagaatgaactcaagggatgagtttaaaactggaccactgaaagaaaagtagtgatgcactaagtcctaaattat

SEQ ID NO: 531848 - DNA, 625 bp, Homo sapiens
tctgtaaatccccatatgcacatatgaggtggcagggatgggacctgccccaagttgaaaactggatcatctctgctagccaaaagagcagacagcccagagatcaaacaaaagtcaccagccaaacagtccatgcttttcttttaagaccacacacacacttgtccatcctattatagtgaccgttaggctccaaaagagtcatatcaatacccaaaaattgttaccccaaattccaaggaagcaaaataagaccaacaaggacagtagtgaaaaagacagaataaagataacccaatgtgggactgtaagaaacagaattttgaagaaatgagaagaatctgagattggttgtctggcctgattaggaataaaggctgagattcaactagtatgaaaatacaggctctggaagcacttggcatgacagctaggtaaattaccaagtatggtcacctggattgaactacccaatgaagacaaggctctgggaaaccaastggccattgtcaacaataataataataatatgaagattaggaagaactcaaagaatgaactcaagggatgagtttaaaactggaccactgaaagaaaagtagtgatgcactaagtcctaaattat

SEQ ID NO: 531849 - DNA, 562 bp, Homo sapiens
caagattttataattatcagcaggaaagagtgggaatctgggaataagaataggactataaaagaaaacttgaatgattcctagtcactcaagcccccaaactcccttggcagcagaagcatgccctcttccttatgtaacgaggctgttcctgctttgtttgaagatcctcttcggaactcacttaaggcagttaccttggaaagggaagccgatctcctcccacccctctcccaccatctctgactactctcactcttaatacttgaaccagattcagtcacaccctaggagaccaactataaagtcaaccccaagaagagaaagaattgcaagattctgctaatttacattgaagagtatatgygtgaataaacctgaatctgtccatttgaattcacttcccaatgactctggtttcaatgtactatctaaattgactaactgacttctggactcagctaaatgaagatgagaaaaaggaaattccctggtacatgtacaggaaaagatccaaagaatcaaggagatggaaatattgcagtgtatttccacatgtggc

SEQ ID NO: 531850 - DNA, 621 bp, Homo sapiens
ttctaatgaaaatttagcatcctactgaagatataaagtatgcacagaatttcaaagacttagtccagataaaaagaatataaaatctcattcataattttttaacattggttatgtattaaaatgaaaattttttagattgggttaattcaaattaatttccacctgtttcctgtttgttttaattttttttttttttttttttttgagatggagtctcactttgtcacacaggctagagtgcagtggcatgatcttggctcactgcaagctctgcctcccaggttcacgccattctcttgcctcagcctcccaagtagctgggactacaggcgtctgccaccacgcctggctaattttttgtatttttagtagagacggggttttgccgtgttagccaggatggtctcgatctcctgacctcrtgatccatctgcctcggcctactaaagtgctgggattacaggtgtgagccaccgcgcccagctcttttaatgtcttaatgtagctacaagaaaatattaaattatgtatgtggcttatgttataattttattcaacagcactgctctagcttgctaaatatggtggggtaactaacaataatagcatgttattcat

SEQ ID NO: 531851 - DNA, 556 bp, Homo sapiens
gccctcaggggaaaaacatctgtcaggtgtatcctagtgtcattttggacagtactgcacccagaatttttgtttacatagacactcccgtgccattctctcagttgggtttgcttgggtgccctggccagtcagtgtcagcaacagttatgatcatcagcttcaccagcttttcctgtttcaggaagatttttgcatcttggtgacaaaacccaaggacccaatacaaggatattgccacgttagaggtaacatactcattttgcaaacatgcctcatctcgaaagcctgaagagctattatcatatggtagatcttacagtaaagcctttctttatcyagtagatatttctctcaagtgttgctttactcagttttagctcattaatattaatgataatattagttgggaaagaggatggaaggtcttgtctaagagctgttttgagtggaaaatacactgttttttctttgattatatgttttcttttcttttttttaaaggggtgatagctttgagggtagatattgaaagggtattctaaactagagctgt

SEQ ID NO: 531852 - DNA, 484 bp, Homo sapiens
catcagcttcaccagcttttcctgtttcaggaagatttttgcatcttggtgacaaaacccaaggacccaatacaaggatattgccacgttagaggtaacatactcattttgcaaacatgcctcatctcgaaagcctgaagagctattatcatatggtagatcttacagtaaagcctttctttatctagtagatatttctctcaagtgttgctttactcagttttagctcattaatattaatgataatattagttgggaaagaggatggaaggtcttgtctaagagctgttttgagtggaaaatacactgttttttctttgattatrtgttttcttttcttttttttaaaggggtgatagctttgagggtagatattgaaagggtattctaaactagagctgttcagtagaaatgttcatgatgatggaactattttgccctgttcaagatggtagtcaccagtcacacttgtctcttgaacata

SEQ ID NO: 531853 - DNA, 653 bp, Homo sapiens
cttctctggttgacctgagtcatgtctgggtcatgggaatcctggaaacaaacacttagtgattccagacggtaatttctctctgtccctgaagtggggaatcagtgcaggttgtaccagaaacccaaggggcttgacaggaaagccagctttagatgtgagacatgatgtgtctcttgttcagaatttaatgaccagaagaacttaaatacttgcaaatcatttttctcagttttaatgaaatcacttaatttaattaagtgctatrcagcaggaaagaacgatgcactgtttatagatctctcatctccttaagatcaaaaagggactggaaaatcagtcatgtgcttgctgaattatttacgaattactctgaggtctaatgagatggatgctcgtgttgaaggcaaaccagctgattttccacatcaaattactgaagggcatttcaacatcagaattattaactataagtacacggaattctacataccagggagccaatgaaatgagcgtaactcaggtttgttgtctgtatgggctttcccagcccctctggtgtggaattttgatttgggttcatctgtctggtgttgtctctaagagaatttattagtgaaaggcccagatagagctatcatcaatatttgttt

SEQ ID NO: 531854 - DNA, 653 bp, Homo sapiens
cttctctggttgacctgagtcatgtctgggtcatgggaatcctggaaacaaacacttagtgattccagacggtaatttctctctgtccctgaagtggggaatcagtgcaggttgtaccagaaacccaaggggcttgacaggaaagccagctttagatgtgagacatgatgtgtctcttgttcagaatttaatgaccagaagaacttaaatacttgcaaatcatttttctcagttttaatgaaatcacttaatttaattaagtgctatgcagcaggaaagaacgatgcactgtttatagatctctcatctccttaagatcaaaaagggactggaaaatcagtcatgtgcttgctgaattatttacgaattactctgaggtctaatgagatggatgctcgtgttgaaggcaaaccagctgattttccacatcaaattactgaagggcatttcaacatcagaattattaactataagtacacggaattctacayaccagggagccaatgaaatgagcgtaactcaggtttgttgtctgtatgggctttcccagcccctctggtgtggaattttgatttgggttcatctgtctggtgttgtctctaagagaatttattagtgaaaggcccagatagagctatcatcaatatttgttt

SEQ ID NO: 531855 - DNA, 498 bp, Homo sapiens
tgcttgagggggacccggggcgagtgctcgaaggggtctccgtgtgcgccccctcatgccctggccgctgcctgcgcccccacaggacttacctagaggaggagctgaccaaggcccgtgagcggcccaagctgcggaaggacatgtacaagaaaatgctggcggtggatcctgaagctcccacggaggaggagcacgcgcagcgcgccgtcaccaagccgcgctacatgcagtggcgggaaggcatcagctccagcaccaccctcggcttccgcatcgagggcatcaaggtgaggcaggcgcgcttcgctggcaccgccgcagccccactgcgcgctgtctttyccgatcccccgctcccgccccgcctgcccctccgccctctcccaccgcctcgccgtcccctgcaactgggaggtaccgctgctctacgctgtcctcttccccactggcgggcccggggcccctgacactcctgtcccacatccagaaagcgga

SEQ ID NO: 531856 - DNA, 594 bp, Homo sapiens
ctatgagagcatcatctgagaagctcctatgtgggtcaagctgaacatctcactgtggccagtaataacagggtgtacaatacaccctgtacaagagtgtatgcatttagggagacaatttttatcaaaatagtcaaacagaaatggaaagtttgcaatatctcactttataccaagcttgtccaacccacgggccttaagatggctttgaatgcagcccaacatgaattagtaaactttcttaaaacattatgcgatttctttgcaatttttgtttgtgttctctgttttgttgtttgttggttttkaaaatggagtcttgctctgtcacccaggctggagtgcagtggtgcgatcttgactcaccgcaacctgcacctcccaggttcaggtgattcttctgcctcagccacccaggtagctctacaagtgtgtgccaccacacccagccaatttttgcatttttcgtagagacggggtttcaccatcttggtcaggcttgtctcaaactcctgatctcaggtgattcacctgcctcagcctcccaaagtgctgggattgcaggcgtgagccactgcgtccagccctttgcaa

SEQ ID NO: 531857 - DNA, 594 bp, Homo sapiens
ctatgagagcatcatctgagaagctcctatgtgggtcaagctgaacatctcactgtggccagtaataacagggtgtacaatacaccctgtacaagagtgtatgcatttagggagacaatttttatcaaaatagtcaaacagaaatggaaagtttgcaatatctcactttataccaagcttgtccaacccacgggccttaagatggctttgaatgcagcccaacatgaattagtaaactttcttaaaacattatgcgatttctttgcaatttttgtttgtgttctctgttttgttgtttgttggttttgraaatggagtcttgctctgtcacccaggctggagtgcagtggtgcgatcttgactcaccgcaacctgcacctcccaggttcaggtgattcttctgcctcagccacccaggtagctctacaagtgtgtgccaccacacccagccaatttttgcatttttcgtagagacggggtttcaccatcttggtcaggcttgtctcaaactcctgatctcaggtgattcacctgcctcagcctcccaaagtgctgggattgcaggcgtgagccactgcgtccagccctttgcaa

SEQ ID NO: 531858 - DNA, 591 bp, Homo sapiens
tacctggcagaggccaacaccaaagccctgaagagtccggggggcagaagaagacctcaggtcactgcttcatacccatcccaatcaccgttaccatgcrtgggggtcaggggccaggcctcacactccagagactgattcagtagatctgggtggggccgaagagacttattcactatcacgaaaacagcacgggaaagagccaaccccatgattcaatgacctcccactgggtccctcacacgatatgtggaaattgtgggagctacaattcaagatgagatttgggtggggacacagccaaaccatattgctcctggtgctagtactgtgggtactagcaccttttcacatttctccaagagcccctggttaatattcaagagactggacttttatagggaatttagtctccatttttcttcactggcagtacagtggcatcatctgtcaggcctcttagtagaagatggtgctggcctccttgcaggtgaggagaatgtgaccgtcccatggggcctatgttctcaagaatcaggagaggagacccatttgctgagtgttggttctttgtgacagaatcatctctac

SEQ ID NO: 531859 - DNA, 535 bp, Homo sapiens
tacctggcagaggccaacaccaaagccctgaagagtccggggggcagaagaagacctcaggtcactgcttcatacccatcccaatcaccgttaccatgcgtgggggtcaggggccaggcctcacactccagagactgattcagtagatctgggtggggccgaagagacttattcactatcacgaaaacagcacgggaaagagccaaccccatgattcaatgacctcccactgggtccctcacacgatatgtggaaattgtgggagctacaattcaagatgagatttgggtggggacacagccaaaccatattgctcctggtgctagtactgtgggtactagcaccttttcacatttctccaagagcccctggttaatattcaagagactggacttttatrgggaatttagtctccatttttcttcactggcagtacagtggcatcatctgtcaggcctcttagtagaagatggtgctggcctccttgcaggtgaggagaatgtgaccgtcccatggggcctatgttctcaagaat

SEQ ID NO: 531860 - DNA, 629 bp, Homo sapiens
taccctaggctgatctaattgaagaagaaaattttgtgtatgtagcaaactagatagactgcatacccttcaggtaatctttcctacttattattattttgaaaccaagcttttgaaaaatgttgaacratgtcccacagtcctcctcctgcatatcacttggggacctatttaaaaacgcatcaccccaagggtaacatatcagaatttctgagtgaatatcctagtatctgtaaagctcctttgggcagctagagttggttaccatcgttgctaagtatttgaccctgttagcttattgtttatgtgcttcctccactgccttctgtgactctgaaccctcttggcttgtttctttacttttctcaaaggtacttctcagatgctgccacttattctcgtgccctaaatagttgtgacattttcttagttttgttcttcagtttcacactcagtgacacaaacaggtatatacagttgatatagtttggatgtttgtccctgcccaaatctcatgttgaaatgtgattcccagtgttggaggtggagcctggtgggagctgattggatcacttggacagatttatcatgaatggtttagcgccatcctcttggtgctgtttctgtga

SEQ ID NO: 531861 - DNA, 586 bp, Homo sapiens
gcaataaaatgccctaactcctgcaaagggccataaaggtattatgagaaccaaatgaaataacatgcatgaaagccatttggaagggacagatgactgtacaagggcaaggggttattatttctctgcacctgttactacagtgctgctgtaagaaaacccacatgcctgcacaggggcccagctttgcaaactaaggattggaacagctctggctgccacacgagacaccacagatctcacagactgggtggctgaaagaacagaaatttattttctcacagttctgaagctcgaagtccaaggtcaaggtgctatcaagattggtttctggtgaggcctctcttcctggttggcaaacagccaccttcttgctgtgtcttcacatggcctttcctctgtgctcatgcatccctcgtgtstctgcctctttttcacttggttttgtttctttttttgagacaaggtcccactctatcacccaggctgaagtgcagtgcgggctcagtcacagctcactgcagcctcgaccacctgggctcaagcaatccttctgcctcagcctccagagtagctgggactgcag

SEQ ID NO: 531862 - DNA, 608 bp, Homo sapiens
gggtttcttttttggcctggggctttatgaagtaacattccatttctataggtggagaccacagtaactttgtgctgcagtttcacatctcagaacatggctgattttgctgtatgaaagggtatttaatgtagaaagtcttgagtagaactttaagttcaacagacgtttagggatgagcggccccggtggttgtcactgggcacctgaaccccacctgcagcacagtatggcctggtgctctgacaaggtcttccacggcatagctctgaatctccagatcctctttgrtgggtgagatgagccaaggactgggtggggctgtcatggtcaaactcaacaccttcctcaacaggagaagaagacttaagccacacgcaagcaaacttctaagaaattacttgatttttagttttcttctgaaagatgcagaccaagcattttgtttgccctgggtgacagatgtgtccagcccatctcggtgtcaggacgagggtgtgacatcatggttacaggaaccatgacttccaagcccatcagggatctcatttcttcagatcatcatccgtccactgctgcagcttctgggttcagccttagtgccatca

SEQ ID NO: 531863 - DNA, 628 bp, Homo sapiens
caatcccagcactttgggaggctgaggcaggaggatcacttgagcccattagtttaagaaatttaaaaaaaaagaattgaacagwatagtacttccatattctcttgagttttagtttgatataagcctatattaaacatccaatgagaaagttaagtaggtatttttagatgatcacaccacaagcaaaagcagaattcatgaatctataaagtgggattatttcactttttcatcttgttgtaggtgagactatgggagagagtagggaggtaactctttcctcctgagcttgggaaaatcactttctcttcaatggagagaaaagaaagtaaaataacactaaaaatagaaaaaaccaggaggataatcagatagttttttcaatcttttgactactctggccctaaaacatgaaagctaccaggctacagtgatacctgccagcaggactgatccttccaccaatgcctaaaggtgctactgcaaccacaatgcttctaagaaggtcccaaagattgcagtggtcagtggaaatgcatctaaaggaaggccctcccgatgtgctactcagtaatgtagcaaaggtaccacaagggcacttttgctggagcagtttcatatccca

SEQ ID NO: 531864 - DNA, 524 bp, Homo sapiens
agctgggctgaggcaggagaatggcatgaacttagcgggggagcagagcttgcagtgagtggagattgcgccactgcactccagcctgggcgacagagtgagactccgtcctcaaaaaaataaaaatwaaaattaaataaataagtaaataaatatatgtgaccagttgcagtggctgacgcctgtaatcccagcactttgggaggcagaggtgagtggatcacttgaggccaggagttcaagaccagcctggccaacatggtgaaccctcctatctactaaaaatacaaaaaattagctgggagtggtggcgcatgcctgtaatcccagctatttgggagacaggcaggagaatcacttgagcctgggaagcagaggttgcagtgagccgagattgtgccactgcactccagcctgagcgacagactccgtctcaaaaaaataaaataaaataaataaatacagagcatttaaaaataatttagtcttacaggtgaagatttgctttcatcactcatcatgtc

SEQ ID NO: 531865 - DNA, 524 bp, Homo sapiens
agctgggctgaggcaggagaatggcatgaacttagcgggggagcagagcttgcagtgagtggagattgcgccactgcactccagcctgggcgacagagtgagactccgtcctcaaaaaaataaaaataaaaattaaataaataagtaaataaatatatgtgaccagttgcagtggctgacgcctgtaatcccagcactttgggaggcagaggtgagtggatcacttgaggccaggagttcaagaccagcctggccaacatggtgaaccctcctatctactaaaaatacaaaaaattagctgggagtggtggcgcatgcctgtaatcccagctakttgggagacaggcaggagaatcacttgagcctgggaagcagaggttgcagtgagccgagattgtgccactgcactccagcctgagcgacagactccgtctcaaaaaaataaaataaaataaataaatacagagcatttaaaaataatttagtcttacaggtgaagatttgctttcatcactcatcatgtc

SEQ ID NO: 531866 - DNA, 524 bp, Homo sapiens
agctgggctgaggcaggagaatggcatgaacttagcgggggagcagagcttgcagtgagtggagattgcgccactgcactccagcctgggcgacagagtgagactccgtcctcaaaaaaataaaaataaaaattaaataaataagtaaataaatatatgtgaccagttgcagtggctgacgcctgtaatcccagcactttgggaggcagaggtgagtggatcacttgaggccaggagttcaagaccagcctggccaacatggtgaaccctcctatctactaaaaatacaaaaaattagctgggagtggtggcgcatgcctgtaatcccagctatttgggagacaggcaggagaatcacttgagcctgggaagcagaggttgcagtgagccgagattgtgccactgcactccagcctgagcgacagactccgtctcaaaaaaataaaayaaaataaataaatacagagcatttaaaaataatttagtcttacaggtgaagatttgctttcatcactcatcatgtc

SEQ ID NO: 531867 - DNA, 574 bp, Homo sapiens
cttcatttttaaatgttttcccacagacggggtctcatcatttctttgcaaccctcctgcccggcgtctcaaagtgcyggcgtgacgggcgtgagccactgcgcctggactccggggaatgattcacgaccaccatcgctctactgatcctttctttctttctttctttctttctttctttctttctttctttctttctttcatttattgatgaattatcttatgatttatttgtgtacttattttcagacggagtctcgctctgggcggggcggggcgaggcgaggcgaggcacagcgcatcgctttggaagccgcggcaacgcctttcaaagccccattcgtatgcacagagccttattcccttcctggagttggagctgatgccttccgtagccttgggcttctctccattcggaagctttgacaggcgcaaccccacccagaggctggctgcggctgaggattagggggtgtgttggggctgaaaactgggtcccctatttttgatacctcagccgacacatcccccgaccgccatcgcttgctcgccctctgagatcccccgcctccac

SEQ ID NO: 531868 - DNA, 552 bp, Homo sapiens
taaccttgtttttcttaccatctctgggacctaataaaagtcactgtgtatttgaggcttccccagcctcctagcgtgcacagtggggataaygttatctacttcctagggaatgtatcagatgtatataagataaaatgtaaaaatcgtggtgtagtttcacatgtaaataatgcacacacttagagatggaagcattaggagaataggtgggaggtagcatgggccacaactcaggtaggcctggggtccagcagtgtaatcttgggaaagtcacttccccactgggcttcagtttcattctgctgcagtacgaggttgaaattaaatgtagatatcatcctctggcactgatgtggtttagctgtgtgtccccacccaaacctcattttgtattataacctccaggtgttaagggagaaacctgaggggagttgattggattatggggacgggtttttcttatgctgttcttgtgatagtgagtgagttctcaagagatctgatggtttcataagcttctggtgtatcccctgctctcactcacttcac

SEQ ID NO: 531869 - DNA, 552 bp, Homo sapiens
taaccttgtttttcttaccatctctgggacctaataaaagtcactgtgtatttgaggcttccccagcctcctagcgtgcacagtggggataatgttatctacttcctagggaatgtatcagatgtatataagataaaatgtaaaaatcgtggtgtagtttcacatgtaaataatgcacacacttagagatggaagcattaggagaataggtgggaggtagcatgggccacaactcaggtaggcctggggtccagcagtgtaatcttgggaaagtcacttccccactgggcttcagtttcattctgctgcagtacgaggttgaaattaaatgtagatatcatcctctggcactgatgtggtttagctgtgtgtccccacccaaacctcattttgtattataacctccaggtgttaagggagaaacctgaggggagttgattggattatggggacgggtttttctyatgctgttcttgtgatagtgagtgagttctcaagagatctgatggtttcataagcttctggtgtatcccctgctctcactcacttcac

SEQ ID NO: 531870 - DNA, 552 bp, Homo sapiens
taaccttgtttttcttaccatctctgggacctaataaaagtcactgtgtatttgaggcttccccagcctcctagcgtgcacagtggggataatgttatctacttcctagggaatgtatcagatgtatataagataaaatgtaaaaatcgtggtgtagtttcacatgtaaataatgcacacacttagagatggaagcattaggagaataggtgggaggtagcatgggccacaactcaggtaggcctggggtccagcagtgtaatcttgggaaagtcacttccccactgggcttcagtttcattctgctgcagtacgaggttgaaattaaatgtagatatcatcctctggcactgatgtggtttagctgtgtgtccccacccaaacctcattttgtattataacctccaggtgttaagggagaaacctgaggggagttgattggattatggggacgggtttttcttatgctgttcttgtgatagtgagtgagttctcawgagatctgatggtttcataagcttctggtgtatcccctgctctcactcacttcac

SEQ ID NO: 531871 - DNA, 533 bp, Homo sapiens
gtgccctttacaaatgtaagaacatgtttgttttctatatgattgtcyaattatagagggacatgagtcactgtgacatgaaagaccttctggggtgaaagaagagaaaaaagtaataaatacgaacaatcagagcatgccccagcaggctttccacaaagccgagcattaggaaaccacttttcatattgtatgccattcatttctcacaaaaaacatataaggttgtgggggaaagttaaatattaaatttgaattcaattgaacatggacaaaagcaatggtcattaagtctcagacaggttgcatgagccgcttgaagcattcatctggcactgttttggagaaatatctatttcaatctattcctatgtgttagttattgaaaaaccacagacaattgcaaaaacaagataaccttttcaagttccttgagcccagttgtgaagagccctcgtgactgggcctcatgccaaacaactcattacaaaaagaactagggctctaggccacgctgaaacttcctaagacct

SEQ ID NO: 531872 - DNA, 595 bp, Homo sapiens
ggtgacctactctggagtcgaggctgttgcttcccggtctggtaatgaatcctccgcagtctggtggrcgtaaatatgtatatatgtttcccttctccccttcccattgcaatttgcttattatagctgcactgccatttacgtcagataaagcttgtttacccttaaaggtttttttgggtgtgttttcttctccccttgcatgtctctcgtacagaacagaggttcattttacaattctctataaagatgcaaattgaggctgataaagatgcactggtatgctaagacacagttagtagctggcagagtcaccactgtgccttggagaagacatatgctcaactactagacagctggtccaggaactacagagtggtgaggaagtcctggtaaaacttgagaaaaatgataaaaagaagagagtttgaccctggaaggctgctgtcagggacttcgtcagcttctccgttgtgcctggtttggcgcattggcatcattcacacctctaggttaagaatagactcatttcctcttggggaggggacaagacttttcatggcaagaccatgaaacaccagaggcttggaatgtg

SEQ ID NO: 531873 - DNA, 595 bp, Homo sapiens
ggtgacctactctggagtcgaggctgttgcttcccggtctggtaatgaatcctccgcagtctggtgggcgtaaatatgtatatatgtttcccttctccccttcccattgcaatttgcttattatagctgcactgccatttacgtcagataaagcttgtttacccttaaaggtttttttgggtgtgttttcttctccccttgcatgtctctcgtacagaacagaggttcattttacaattctctataaagatgcaaattgaggctgataaagatgcactggtatgctaagacacagttagtagctggcagagtcaccactgtgccttggagaagacatatgctcaactactagacagctggtccaggaactacagagtggtgaggaagtcctggtaaaacttgagaaaaatgataaaaagaagagagtttgaccctggaagsctgctgtcagggacttcgtcagcttctccgttgtgcctggtttggcgcattggcatcattcacacctctaggttaagaatagactcatttcctcttggggaggggacaagacttttcatggcaagaccatgaaacaccagaggcttggaatgtg

SEQ ID NO: 531874 - DNA, 595 bp, Homo sapiens
ggtgacctactctggagtcgaggctgttgcttcccggtctggtaatgaatcctccgcagtctggtgggcgtaaatatgtatatatgtttcccttctccccttcccattgcaatttgcttattatagctgcactgccatttacgtcagataaagcttgtttacccttaaaggtttttttgggtgtgttttcttctccccttgcatgtctctcgtacagaacagaggttcattttacaattctctataaagatgcaaattgaggctgataaagatgcactggtatgctaagacacagttagtagctggcagagtcaccactgtgccttggagaagacatatgctcaactactagacagctggtccaggaactacagagtggtgaggaagtcctggtaaaacttgagaaaaatgataaaaagaagagagtttgaccctggaaggctgctgtcagggacttcstcagcttctccgttgtgcctggtttggcgcattggcatcattcacacctctaggttaagaatagactcatttcctcttggggaggggacaagacttttcatggcaagaccatgaaacaccagaggcttggaatgtg

SEQ ID NO: 531875 - DNA, 442 bp, Homo sapiens
cagcacccacttgtattaataatctttatgaagagcattatcccagagaattcccaaaaaaacatactcagcctacaaatgagaaaataaagctttgtgatgtcaaatggctgctcagaaaaacacaagtaagaaagagaatcttccacggtrggggttgcatgaaattccctttaagctacctgaggctctatgtctgtccctgacttagggggaagggcatggggaaggctcactttctttctgttttagagacagggcacaggataagataccctaagacaacccttttgacttaaagcaactgaactgggtcttttaaaaccttaaagggagtgttgagaaataactacagcaaccccacacctgacaaaggtgtcagtgcttggggactccaaggtgagagaaacccctcacagggccaaggaattgagcggattaa

SEQ ID NO: 531876 - DNA, 612 bp, Homo sapiens
ccgagatgatatcaaaggtgaggcctggcctggataggcctgccatgggtggccttgtgttatctatgggtaaccctttccaaatggccagaagagccagcagtgcagaatgagcactgtctccatcataaaaaaaagtctctctgttcaagccttcctgagatgagagcctcagaaattcaagacatagcaggagaacatcttgctgtcttcagagtctccttagtaaatacaaagctgtctctagaattagggctccaggttaccagagttctaaactttctttgagtttgtaactaaggaagtgaggtcacttcgagattccatcacctgggctccggtgcgggaaatgaacgaggggaaaagaaaaggcacccacaatagttttaaggataaatagcctttatcccaagtgtatggcaatacagacttgataagcaaataatataataagcaaattgcaatgggaaggacagaaagaaaatatatatatgtatatttacacgcaccagactatggaggattcattaccagactgggaagcaasagcctgggctccagagtcagccacgtgtccatgcacagatgaggagaggtctcatgaaacttcag

SEQ ID NO: 531877 - DNA, 612 bp, Homo sapiens
ccgagatgatatcaaaggtgaggcctggcctggataggcctgccatgggtggccttgtgttatctatgggtaaccctttccaaatggccagaagagccagcagtgcagaatgagcactgtctccatcataaaaaaaagtctctctgttcaagccttcctgagatgagagcctcagaaattcaagacatagcaggagaacatcttgctgtcttcagagtctccttagtaaatacaaagctgtctctagaattagggctccaggttaccagagttctaaactttctttgagtttgtaactaaggaagtgaggtcacttcgagattccatcacctgggctccggtgcgggaaatgaacgaggggaaaagaaaaggcacccacaatagttttaaggataaatagcctttatcccaagtgtatggcaatacagacttgataagcaaataatataataagcaaattgcaatgggaaggacagaaagaaaatatatatatgtatatttacacgcaccagactatggaggattcattaccagactgggaagcaacagcctgggctccagagtcagccacgtgtccatgyacagatgaggagaggtctcatgaaacttcag

SEQ ID NO: 531878 - DNA, 411 bp, Homo sapiens
caggaggcaggggtttataagatttcagcggacaggacttgggtgggcacctcccaagtcatgccctctctggggacattcctcactgatgtggtgatgctggacattgccatgaaagagtgtgtggatgtgagtgagcctggagcagacaggtcagggaccaggatcctgaggcctgggagaagagagtcttgaactgagctcctagatcccagtccttgccaaaattttttgcgagggcctcgcagccctcctcatcccgtaaacagggtattttactcatgagtgatggaggctccacagcagccatcagtcccactccctgagtagtgaagctgcagagctgcaagacctcttttgtgcacattccstgaccctggtggctctggaggtggtgaagcttggaaatcg

SEQ ID NO: 531879 - DNA, 209 bp, Homo sapiens
ttctttctctctttctgtccttttttccttcgtgctttatttctctttcgttccctgtstttccttcttttttctttcctctctgtttctttttcccttctttccttcgtttctttcctcattctttctctctttttcgtgtttctttcctttccgcctgtcttttaaaaaatggagtgtttcagaagtttactttgtgtatctacgtt

SEQ ID NO: 531880 - DNA, 145 bp, Homo sapiens
gaagtgttcttgtataaaacacaacgtgaagaaaagaagactttatcaatgtcttaaaaagtgggtttgttcatagacaatctgacaagttaccattaaaagtgtttcctgtgacataagaaartgcaatattatttttcttgaa

SEQ ID NO: 531881 - DNA, 501 bp, Homo sapiens
tgtctccctcatctccagtgacacctgctggctgtagcaggcagtgwgaggagtgcagatgagattgggggcatctttcaacggaccctgagcaaagctaaagggctgcgactcgttcacgtcgaggactgcccttcgtatcctgccttccttgagggcctgtgctaaggctctctcgtccaccaggccaccacgggctgcgttcacaaggaatgctccctgcctcatctgctttatggtaaagtcattgatgaggtggtgcttaagttcgttgagactgcagtgcaaggagatgcagtcgctctgatacagccaatcctgcagggtgtagaccctctgcatgcccagggactgctcgatcccatcctgcaagtaggggtaataaaacatgacgctgaatccaaaggctgtggctggaactgcaaaagcctgctgcgtgcgaccctagccgatgaggtccagcgtcttcccacgaatgcgggccactcccgaggccacctc

SEQ ID NO: 531882 - DNA, 631 bp, Homo sapiens
gtggaaattgtcttaatttccacttctatatattaatgaatctatattacttttgtgttgaaggaaacacttctgtgatttgaagttaatttttttttacctctgaactttttactggcctcctgctccccaaagggaccttgcttctgatggcttagcacaacaaaacgtctgtattgttggtctcagacaccactttcccgtccactatcctgcgggggctgttcttttggatagcttgcaggtatttactgctgtccagagcatccaggagattgaaatcctccccgtcttctagsaggcggcagtaagtggcaatcgcagcctccagctcgaccttgatgttccacaggtcctcgtgctcttgggcgtggtacctctcttcccggttttgggatagctctgactccaggtgcagcaggatcctgttgagctgctccatctgcgtctacctcccttaggctgttctccaagctgactttcagatatctcattgagtccagttcgatatccaaggactggactgtacatctcaaccccctgagcatcctctcagcagctccgatctcagcggactgcatggtgactactctggtgctctcctcagtctgctgggaccagtacttgtcca

SEQ ID NO: 531883 - DNA, 631 bp, Homo sapiens
gtggaaattgtcttaatttccacttctatatattaatgaatctatattacttttgtgttgaaggaaacacttctgtgatttgaagttaatttttttttacctctgaactttttactggcctcctgctccccaaagggaccttgcttctgatggcttagcacaacaaaacgtctgtattgttggtctcagacaccactttcccgtccactatcctgcgggggctgttcttttggatagcttgcaggtatttactgctgtccagagcatccaggagattgaaatcctccccgtcttctaggaggcggcagtaagtggcaatckcagcctccagctcgaccttgatgttccacaggtcctcgtgctcttgggcgtggtacctctcttcccggttttgggatagctctgactccaggtgcagcaggatcctgttgagctgctccatctgcgtctacctcccttaggctgttctccaagctgactttcagatatctcattgagtccagttcgatatccaaggactggactgtacatctcaaccccctgagcatcctctcagcagctccgatctcagcggactgcatggtgactactctggtgctctcctcagtctgctgggaccagtacttgtcca

SEQ ID NO: 531884 - DNA, 349 bp, Homo sapiens
tgttctcagccatctcgtcatattgggcccrgatgcctgtcatgatcttgccaaggtcctgagacttggggacatctacctccatggtcaaccaagagctggaaatcaggtattatagacctttaacttcctcctcatgattcttcatgaagagcagctcttccttgagggcctccatctctgtctccagcagaggctgactgacactggtgttatcagtaatgtcgcactccacaaactggcacatggccaggtctgtctcactctttaaagtcatcagcagcaaaatgatcattgtcagtctgcaggatgatgcaggcattgtctgcagcagtggcaaagatttttt

SEQ ID NO: 531885 - DNA, 349 bp, Homo sapiens
tgttctcagccatctcgtcatattgggcccggatgcctgtcatgatcttgccaaggtcctgagacttggggacatctacctccatggtcaaccaagagctggaaatcaggtattatagacctttaacttcctcctcatgattcttcatgaagagcagctcttccttgagggcctccatctctgtctccagcagaggctgactgacactggtgttatcagtaatgtcgcactccacaaactggcacatggccaggtctgtctcacwctttaaagtcatcagcagcaaaatgatcattgtcagtctgcaggatgatgcaggcattgtctgcagcagtggcaaagatttttt

SEQ ID NO: 531886 - DNA, 349 bp, Homo sapiens
tgttctcagccatctcgtcatattgggcccggatgcctgtcatgatcttgccaaggtcctgagacttggggacatctacctccatggtcaaccaagagctggaaatcaggtattatagacctttaacttcctcctcatgattcttcatgaagagcagctcttccttgagggcctccatctctgtctccagcagaggctgactgacactggtgttatcagtaatgtcgcactccacaaactggcacatggccaggtctgtctcactctttaaagtcatcagcagcaaaatgatcattgtcagtctgcaggatgatgcaggcaytgtctgcagcagtggcaaagatttttt

SEQ ID NO: 531887 - DNA, 350 bp, Homo sapiens
ttattcctatatcgtagttattgaaaatcaatagacaatcaaaaaaacaagttgacctttttgtgttccttgagccccgttgtgaagagccttcctgaccggacttcatgccaaataactcattayaaaaagagctggggttccagactgcgccaaagcttcatgagatctcacgttgtctgtggacggatgagtggccaatctggagcccaggctgttgcttcacagtctcgtggtgaatcgtccatagtttggtgagtttaaatatatatatatatcttttcccttctccccgtcccattgcaacttgcttatatatttgcttattatatctgcattgccatttaagt

SEQ ID NO: 531888 - DNA, 350 bp, Homo sapiens
ttattcctatatcgtagttattgaaaatcaatagacaatcaaaaaaacaagttgacctttttgtgttccttgagccccgttgtgaagagccttcctgaccggacttcatgccaaataactcattacaaaaagagctggggttccagactgcgccaaagcttcatgagatctcacgttgtctgtggacggatgagtggccaatctggagcccaggctgttgcttcacagtctcgtggtgaatcgtccatagtttggtgagtttaaatatatatatatatcttttcccttctccccgtcscattgcaacttgcttatatatttgcttattatatctgcattgccatttaagt

SEQ ID NO: 531889 - DNA, 485 bp, Homo sapiens
gctgaactagaagccatcctccgaactattcaggtggaggccagagcaatttgttgcttgtataccgactgttggtcagcagaaaatggtcttactacctagttgcccgaatggcaatgaaacaaatggtgaataatgaataaagaggtttggagaaaacaatactaggaagatacctgaatcctgatgcacattactattattgctgtttttcatattgattctcatgcatctctgcattctcttgacagactaaacagcaggtagatcaacaggccaaaatttccagcataaatgcaaacttgaatgtgggtgaatggattacaacacgttcaagcctggcgatgagacacattataatgtatggtggtataattgataatgattaccaggaagagttaaagttcactttacacaataccactccacattcttttgttacaagactgcagattcrggttgctcaattgtcagtgatacctggt

SEQ ID NO: 531890 - DNA, 626 bp, Homo sapiens
tttcttttttaatttttttgagacggagtttcactcttattgcccagactggagtgcaatggcgcgatctcggttcaccacaatctctacctcccgggttcaagcgattctcctacctcagcctctcaagaagcagggattacaggcatgcaccactacgcctggaaaattttgtatttttggtagagactgggtttctctatgttggtcaggctggtcttaaactccagacctctggtgatccgtctgcctcaacctcccaatgtgttgggataacaggcgtgaactacagcacccggtctgggttttcttctatatgtaggaaaatgtaatcctaactaaagtgctagctttgccatggaatctctgtgtaattctggatgttatgtcactttcctaagacttttttctatctgcgtagtggtggaggcagtagtggggaagatttaattatacaaagggtccatcaatccatgtgttaagtgaggatgtcactactttccagactcagaggacaggggacatattgttatgctccatgggaagctgttkgggggtggaggtggggctcacttgcacacattgtctgtgggccttgaaagatcaagtgtgtatgacccttcttg

SEQ ID NO: 531891 - DNA, 564 bp, Homo sapiens
ctgccttatttgagtggcttcctatatcattataattgtgttatagatgaagaaacggtattaaacactgtgctaatgatagtgaaagtgaagacaaaagaaaggctatctattttgtggttagaataaagttgctcagtatttagagctacctaaatacgtcagcatttacactcttcctagtaaaagctggccratctgaataatcctcctttaaacaaacacaatttttgatagggttaagatttttttaagaatgcgactcctgcaaaatagctgaacagacgatacacatttaaaaaaataacaacacaaggatcaaccagacttgggaaaaaatcgaaaaccacacaagtcttatgaagaactgagttcttaaaataggacggagaacgtagctatcggaagagaaggcagtattggcaagttgattgttacgttggtcagcagtagctggcactatctttttggccatctttcgggcaatgtaactactacagcaaaatgagatacgatccattaaacaacatattcgcaaatcaaaaagtgtttcagtaatataat

SEQ ID NO: 531892 - DNA, 564 bp, Homo sapiens
ctgccttatttgagtggcttcctatatcattataattgtgttatagatgaagaaacggtattaaacactgtgctaatgatagtgaaagtgaagacaaaagaaaggctatctattttgtggttagaataaagttgctcagtatttagagctacctaaatacgtcagcatttacactcttcctagtaaaagctggccaatctgaataatcctcctttaaacaaacacaatttttgatagggttaagatttttttaagaatgcgactcctgcaaaatagctgaacagacgatacacatttaaaaaaataacaacacaaggatcaaccagacttgggaaaaaatcgaaaaccacacaagtcttatgaagaactgagttcttaaaataggacggagaacgtagctatcggaagagaaggcagtattggcaagttgattgttacgttggtcagcagtagctggcactatctttttggccatctttcgggcaatgtaactactacagcaaaatgagataygatccattaaacaacatattcgcaaatcaaaaagtgtttcagtaatataat

SEQ ID NO: 531893 - DNA, 595 bp, Homo sapiens
actgaagctgcacccacagcctccccttcccccatgtgctctgtcccagggagatggaggttttctgtgtaagcctctgactagggctgttacctttccttcaaatatgacctgcccaatgaggaggactctaaagaagcagtctgccacagccactttgctgcacccaacccggaccttccagcctccttggcacygtcaggggaaaactgtctactaaagcctcagtaatggtggactccactccctccaactgacctcaattggcccaggtcaacttcagactgctgtgctggcagcgagaatttcaggatgaggaacgcattagctgtttgtgattttcatgtctgttgcagggatttgacccattgttagtgctagatttggagtcttaaaaaacagatttatcttactgaactcaaagtacaacttgaagatgtactcagctgtttacttaaattgcagcaggagaaaatgtatctttgcagatctatttttatgtcacttgcttttagacacgagattgtctctggcacagtaattcaacttagtctatgtcaaaaacatagcctgaaaatgctcaaaaaaaattatg

SEQ ID NO: 531894 - DNA, 387 bp, Homo sapiens
tgcgctataggcataagcatcatttggatccacttcgagagttctctggaagaattgaatcgcaatatcgtgttcccgttgcrgaccgaaacagttccctgcagcacaccaggcctctggctggcgaatttttatccatgtctgtgaagtctttggacagaactgaaagagcaacctctttcggaggatgccaaagtgttgtagagtagatctccatgccttcgactctgtaattctcaatcctcctaacctctgagaattgtctttcagcttgcgtggactctgaaagtttacaataggcccttccgatttggcacagtacccaaccggtattgcagtggtgagaagctagatggctcaagatgctgatagcttctttgccgtggt

SEQ ID NO: 531895 - DNA, 387 bp, Homo sapiens
tgcgctataggcataagcatcatttggatccacttcgagagttctctggaagaattgaatcgcaatatcgtgttcccgttgcagaccgaaacagttccctgcagcacaccaggcctctggctggcgaatttttatccatgtctgtgaagtctttggacagaactgaaagagcaacctctttcggaggatgccaaagtgttgtagagtagatctccatgccttcgactctgtaattctcaatcctcctaacctctgagaattgtctttcagcttgcgtggactctgaaagtttacaataggcccttccgatttggcacagtacccaaccggtattgcagtggtgagaagctagatggctcaagatrctgatagcttctttgccgtggt

SEQ ID NO: 531896 - DNA, 563 bp, Homo sapiens
cccgctgcttcccgcctcaggcctccctccctaggaaagcttcaccctggctgggtctcggtcaccttttatcacgatgttttagtttctccgccctccggccagcagagtttcacaatgcgaagggcgccacggctctagtctgggccttctcagtacttgcccaaaatagaaacgctttctgaaaactaataactttgctcacttaagatttccagggacggcgccttggcccgtgtttgttggcttgttttgtttcgttctgttttgttttgttcgtgtttttcctttctcgtatgtctttcttttcaggtgaagtagaaatccccagttttcaggaagacgtctattttccccaagacacgttagctgccgttttttcctgttgtgaactagygcttttgtgactctctcaacgtgcagtgagagccggttgatgtttactatccttcatcatgacatcttattttctagaaatccgtaggcgaatgctgctgctgctcttgttgctgttgttgttgttgttgttgttgtcgtcgttgctgttgtcgttgtcgttgttg

SEQ ID NO: 531897 - DNA, 149 bp, Homo sapiens
ccttctcggctcttgagacttagccgctgtctcgccgtgycccgggtcgaccggcgggccttctccaccgagcggcgtgtaagagtgcccgtcgggacgagccggacccgccgcgtccccgtctcggtcggcacctccggggtcgacca

SEQ ID NO: 531898 - DNA, 128 bp, Homo sapiens
ccgcccgcgagctccggacttagccggcgtctgcacgtgtcccgggtcgaccagcaggcggccgccggacgctgcggcgcaccgacgcgagggcgytgattcccgttcacgcgcccgcgacctccacc

SEQ ID NO: 531899 - DNA, 128 bp, Homo sapiens
ccgcccgcgagctccggacttagccggcgtctgcacgtgtcccgggtcgaccagcaggcggccgccggacgctgcggcgcaccgacgcgagggcgcygattcccgttcacgcgcccgcgacctccacc

SEQ ID NO: 531900 - DNA, 618 bp, Homo sapiens
agctctggacttagccggcgcctgcacgtgtcccgggtcgaccagcaggcggccgccggacgctgcggcgcacygacgcgagggcgtcgactccggttcacgcgccggcgacctccaccggcctcggcccgcggtggagctgggaccacgcggaactccctctcctacatttttttcagccccactgcgagtttgcgtccgcgggacttttaagagggagtcactgctgccgtcagccagtaatgcttcctccttttttgctttttggttttgccttgcgttttctttctttctttctttctttctttctttctttctttctttctctctctctctctctctctctctctctctctgtctctctcccctccctccctccttggtgccttctcggctcgctgctgctgctgcctctgcctccacggttcaagcaaacagcaagttttctatttcgagtaaagacgtaatttcaccattttggccgggctggtctcgaactcccgacctagtgatccgcccgcctcggcctcccaaagactgctgggagtacagatgtgagccaccatgcccggccgattccttccttttttcaatcttattttctgaacgctgccgtgt

SEQ ID NO: 531901 - DNA, 618 bp, Homo sapiens
agctctggacttagccggcgcctgcacgtgtcccgggtcgaccagcaggcggccgccggacgctgcggcgcaccgacgcgagggcgtcgaytccggttcacgcgccggcgacctccaccggcctcggcccgcggtggagctgggaccacgcggaactccctctcctacatttttttcagccccactgcgagtttgcgtccgcgggacttttaagagggagtcactgctgccgtcagccagtaatgcttcctccttttttgctttttggttttgccttgcgttttctttctttctttctttctttctttctttctttctttctttctctctctctctctctctctctctctctctctgtctctctcccctccctccctccttggtgccttctcggctcgctgctgctgctgcctctgcctccacggttcaagcaaacagcaagttttctatttcgagtaaagacgtaatttcaccattttggccgggctggtctcgaactcccgacctagtgatccgcccgcctcggcctcccaaagactgctgggagtacagatgtgagccaccatgcccggccgattccttccttttttcaatcttattttctgaacgctgccgtgt

SEQ ID NO: 531902 - DNA, 618 bp, Homo sapiens
agctctggacttagccggcgcctgcacgtgtcccgggtcgaccagcaggcggccgccggacgctgcggcgcaccgacgcgagggcgtcgactccggttcacgcgccggcgacctccaccggcctcggcccgcggtggagctgggaccacgcggaactccctctcctacatttttttcagccccactgcgagtttgcgtccgcgggacttttaagagggagtcactgctgccgtcagccagtaatgcttcctccttttttgctttttggttttgccttgcgttttctttctttctttctttctttctttctttctttctttctttctytctctctctctctctctctctctctctctgtctctctcccctccctccctccttggtgccttctcggctcgctgctgctgctgcctctgcctccacggttcaagcaaacagcaagttttctatttcgagtaaagacgtaatttcaccattttggccgggctggtctcgaactcccgacctagtgatccgcccgcctcggcctcccaaagactgctgggagtacagatgtgagccaccatgcccggccgattccttccttttttcaatcttattttctgaacgctgccgtgt

SEQ ID NO: 531903 - DNA, 628 bp, Homo sapiens
gtgaccctggtcacccacttaatctccctgagccttgatttcctcatctttaaaatgatgggcttcatgttgacaatccttgttttttcagaataacacctagaagcaatgtgagagtcttcaattccaaagaaatattgaactatgtttactacactacagttaggaatgcatttagtattttaggaaagactttttaaaaaataagagagccaaaacgtccagtttcacaaaagttctgttttgtttaaactacattgtagtttcttattgctagatgctttaaatcacattatctcaaattctcacagatayattttcaaagatatatgaaattatcctcaattttcagaagcaaataaatttagttgatttcccccaaattaaagatgtaataagttgatggggttagattgaagccaggctagaccactcatccttcttccaggcctcctctagtggttttgtacactgatagctcaagcagcaaactctgacagcaaggatgagagggtcatgccatgaaattaatgggcattggttagcatattttttttttttgatccacagattttaaaatcaggttattaaactgttagaagcttacttggcacaagatgaacaagaa

SEQ ID NO: 531904 - DNA, 469 bp, Homo sapiens
tttgtaataatctgttacaaaagcaaatagaaaacgagtataatgtgtcaacgttcagaaaaataatggaactaggttcatagtcagcattttcatgacgtacatttggtttttggcttactaatatgagtgggaaatgcccatacaaagtagtctcagctacttgggaggctgagccatgagaatcacttgaacctgggagggggmagttgcggtgagctgagatcgcaccactgaactccagcctgggtgttggagtacaagttaaaattttaaagataatcacacatacacaagaagtatatttgataacttccaaaccagaatgaaaaaaaaaagcagaataaagaagactttaaatatccaatggaaggcaaggaagaaaatgaagaaaagcaaaacaaaagtgaaaaagttttaaaatataaaaatattatcagtgatcacaataaagctaagaagattagat

SEQ ID NO: 531905 - DNA, 233 bp, Homo sapiens
ttcctctccaacctgtgctgggctgacatcagtttcacytcggccacggttcccaagatgacggtggacatgcagtcgcatagcagagtcatctcttatgcgggctgcctgacacggatgtctttcttcgtcctttttgcatgtatagaagacatgctcctgactgtgatggcctaggactgctttgtagccatctgtcgccctctgcactacgcagtcatcgtgaatcctca

SEQ ID NO: 531906 - DNA, 233 bp, Homo sapiens
ttcctctccaacctgtgctgggctgacatcagtttcacctcggccacggttcccaagatgacggtggacatgcagtcgcatagcagagtcatctcttatgcgggctgcctgacacggatgtctttcttsgtcctttttgcatgtatagaagacatgctcctgactgtgatggcctaggactgctttgtagccatctgtcgccctctgcactacgcagtcatcgtgaatcctca

SEQ ID NO: 531907 - DNA, 612 bp, Homo sapiens
aagggaatgtgattatgggtcctaagtcacataagcagagacctgtaacctaaagcagctctaacctttgtttctttgattatggattagccttttccctttcttacactgtcttgtaaaatgttgtgaatgactaacgggttccaggcaagaccccttcccctcttaactgctgatcttcattacagattaacttccctcttaactctaacacacaaacacttcatgacttttgcattgtctaagatggaatgttaaatatactcttttaaactggaaaggaaaagaaaagctgtatagaaaagaaaaccaatggtaactaattaaattgttgtaacacataaaccaggcttgtatagaaaacgctgtaatcctactaagtttctttgttttctatcctatataagcaagattttaactttaacttcagagcactgacctcatttctctggagttcatgtttcccagatggctattcccagcttttcactgaaataatctcttaaaactacattctaatccttttgattatttcaggctgacctgacaatamgaatgatatgctcatgagagaaattttggaaaacacaggctatgcttaaagaaagaaaa

SEQ ID NO: 531908 - DNA, 560 bp, Homo sapiens
ctggctaattttggtacttttagtagagatagggtttcatcatggtgtccaggctggtctcgacctccagacctcaagtgatctgcccatcttggcctcccaaagtgctgggattacaggygtgagccaccatacctggccaggaagacagatgttgggtatagataagccacatggtgtggctcacccaggccttgcaccccactggcacaggccatccccttgtcagtcacttcagcatctggggtagaataccatatatgcacttgtatttggagggcggatgtggtctacacattttgtaagtatacattggccatttgaaagtctggttcgttattcctcagccattgcaatgaagcaattttctgcttttgcagcgccaataataactatgttggcaagcctgtagttctgatatccaacgtagcagaagaaaagtctgtcttagctcttagagagagaccaatttgccttctgtatgttctccttagacctccagcagattggatggtgcacacccacattgagggcagatcttcccagcctagcccactcag

SEQ ID NO: 531909 - DNA, 560 bp, Homo sapiens
ctggctaattttggtacttttagtagagatagggtttcatcatggtgtccaggctggtctcgacctccagacctcaagtgatctgcccatcttggcctcccaaagtgctgggattacaggcgtgagccaccatacctggccaggaagacagatgttgggtatagataagccacatggtgtggctcacccaggccttgcaccccactggcacaggccatccycttgtcagtcacttcagcatctggggtagaataccatatatgcacttgtatttggagggcggatgtggtctacacattttgtaagtatacattggccatttgaaagtctggttcgttattcctcagccattgcaatgaagcaattttctgcttttgcagcgccaataataactatgttggcaagcctgtagttctgatatccaacgtagcagaagaaaagtctgtcttagctcttagagagagaccaatttgccttctgtatgttctccttagacctccagcagattggatggtgcacacccacattgagggcagatcttcccagcctagcccactcag

SEQ ID NO: 531910 - DNA, 560 bp, Homo sapiens
ctggctaattttggtacttttagtagagatagggtttcatcatggtgtccaggctggtctcgacctccagacctcaagtgatctgcccatcttggcctcccaaagtgctgggattacaggcgtgagccaccatacctggccaggaagacagatgttgggtatagataagccacatggtgtggctcacccaggccttgcaccccactggcacaggccatccccttgtcagtcacttcagcatctggggtagaataccatatatgcacttgtatttggagggcggatgtggtctacacattttgtaagtatacattggccatttgaaagtctggttcgttattcctcagccattgcaatgaagcaattttctgcttttgcagcrccaataataactatgttggcaagcctgtagttctgatatccaacgtagcagaagaaaagtctgtcttagctcttagagagagaccaatttgccttctgtatgttctccttagacctccagcagattggatggtgcacacccacattgagggcagatcttcccagcctagcccactcag

SEQ ID NO: 531911 - DNA, 534 bp, Homo sapiens
gaattgaagatagtgggtttgaaatggttccaaactgcagttccagaagctcatttatctgggtatggagaaaatgtattgttataggtccagggttggagttccccaaacagtcactgcagaagtcctgggtgcaaaaaaattgagaaagctggcaaggaattactttagattataatacgaggttaccaacctasgtcaccaacctagaagagcaagttaggtcagagagtaaaaaatttgagctgaagacttcagaggcacaaatgtgacccctagatccatgatgtggccatgctaatagatggctgaaaagggctagaggtggatgtcattggcgatgaggtgctggatggccatccacattaacaatgaacaatatggcaagacttgggagagaggaggaatgggagccagatgtaattaataaataaagagttaagacctcagaaatgaacctcaagaagaaggagtaagtgtcctagaaagagtaggatggcatgagcattaaaatgtgggcatttttacatgaag

SEQ ID NO: 531912 - DNA, 569 bp, Homo sapiens
taacctagtcatttatcatagcacagttaatctcttgttaatcaacattgggaagaattaatcaaccttgctacccaggtgcctagcagtttgcttattactatcttataatacctaccataatctaggaagaaaactggtcagatatgtgttcgtcyacactggtaaaaacagagctctttgaatgcaggaactttgtctttttcatggttatatgcctcatacatataagttagtaagtcacagttacatgtttattattcaacattttaattgttttacaaattactgttggtgctgttcatattatatgatgaaaaatagcattgttcttaacagcattcttatattatatatgggagatgtcaatacctagctagaattaggagaaaatacaccaacctcctgacatgacattcaatatttttcatcatacttttgcattaggataattcatatactttgaaaaaaaagaaagggcatatatattggaaaaatattatgtttcctccaaaaactaatgagaaaagatagagacagatggagttcaattgactaattttctgccc

SEQ ID NO: 531913 - DNA, 514 bp, Homo sapiens
gttattagaaagcaattgattgaataaataaaacagggactccttgctaagccagtttctttgttttgttttgctttgaattattttgaacctattttttaaggaattttttgaattacaaaaaattcaaacatatataaatgtatagtgtagtataataaatcaccgcatatccatcatctgagtttagcaattatggacttatgagtaatctggtttcattttcatttatacccctccttcttctctcacagacccagatttcattayaatccataaatatgcctgtatgcatctcgaaaagacacaaacacaccaataaaatgaccataatataattatcacagttaaaattaacattaactttataatacaatcaaaacaccagtcagagttcaaaagtccctttttcatattgtttgtttgtttgtttgtttgtttgtttgtttgtttgaataaggattcaaaccagctgcagtctgcatttgattgatttgcctcgtaggcctctttt

SEQ ID NO: 531914 - DNA, 514 bp, Homo sapiens
gttattagaaagcaattgattgaataaataaaacagggactccttgctaagccagtttctttgttttgttttgctttgaattattttgaacctattttttaaggaattttttgaattacaaaaaattcaaacatatataaatgtatagtgtagtataataaatcaccgcatatccatcatctgagtttagcaattatggacttatgagtaatctggtttcattttcatttatacccctccttcttctctcacagacccagatttcattatmatccataaatatgcctgtatgcatctcgaaaagacacaaacacaccaataaaatgaccataatataattatcacagttaaaattaacattaactttataatacaatcaaaacaccagtcagagttcaaaagtccctttttcatattgtttgtttgtttgtttgtttgtttgtttgtttgtttgaataaggattcaaaccagctgcagtctgcatttgattgatttgcctcgtaggcctctttt

SEQ ID NO: 531915 - DNA, 514 bp, Homo sapiens
gttattagaaagcaattgattgaataaataaaacagggactccttgctaagccagtttctttgttttgttttgctttgaattattttgaacctattttttaaggaattttttgaattacaaaaaattcaaacatatataaatgtatagtgtagtataataaatcaccgcatatccatcatctgagtttagcaattatggacttatgagtaatctggtttcattttcatttatacccctccttcttctctcacagacccagatttcattataatccataaatatgcctgtatgcatctcgaaaagacacaaacacaccaataaaatgaccataatataattatcacagttaaaattaacattaactttataatacaatcaaaacaccagtcagagttcaaaagtccctttttcatattgtttgtttgtttgtttgtttgtttgtttgtttgtttgaataaggattcaaaccagctrcagtctgcatttgattgatttgcctcgtaggcctctttt

SEQ ID NO: 531916 - DNA, 598 bp, Homo sapiens
ctgtttcatcttcctctagatcttcctatagctcttctcaattctgggccaggtgtatttttagcttcataagaaggagcccagaatctgcaggacagccataccctcaagatcagaggcaacaagactgatatgaggtttaatccatgccaagacaacttgtgcttgtgggctctagcttgctcttgcacttctccrttttacattcatctttccttttctgttgcctgccctgtagtcttcaagtaccaacagcatcagatgcacagatgacagctttacagaaactgcttagccagctcctacaattgtgtaaggtaaaatccttgtaacagaatcctttctgtgtgtgtatgtgtgcatgtgtatgtatgcatgtgtgtgtatacttatatatatgtatgtatgcatgtgcatatgtatacatatgcatacgtacatacatacagtaacatatgcatacatttacttataagtaggacaattacaatacataacgtgtttgtgtgtatatatatcttagtactcttacttctccaattgactcctgactgatttatatgttagcctcacaatctgtgaataattgtttttgctg

SEQ ID NO: 531917 - DNA, 598 bp, Homo sapiens
ctgtttcatcttcctctagatcttcctatagctcttctcaattctgggccaggtgtatttttagcttcataagaaggagcccagaatctgcaggacagccataccctcaagatcagaggcaacaagactgatatgaggtttaatccatgccaagacaacttgtgcttgtgggctctagcttgctcttgcacttctccgttttacattcatctttccttttctgttgcctgccctgtagtcttcaagtaccaacagcatcagatgcacagatgacagctttacagaaactgcttagccagctcctacaattgtgtaaggtaaaatccttgtaacagaatcctttctgtgtgtgtatgtgtgcatgtgtatgtatgcatgtgtgtgtatacttatatatatgtatgtatgcatgtgcatatgtatacatatgcatacgtacatacatacagtaayatatgcatacatttacttataagtaggacaattacaatacataacgtgtttgtgtgtatatatatcttagtactcttacttctccaattgactcctgactgatttatatgttagcctcacaatctgtgaataattgtttttgctg

SEQ ID NO: 531918 - DNA, 598 bp, Homo sapiens
ctgtttcatcttcctctagatcttcctatagctcttctcaattctgggccaggtgtatttttagcttcataagaaggagcccagaatctgcaggacagccataccctcaagatcagaggcaacaagactgatatgaggtttaatccatgccaagacaacttgtgcttgtgggctctagcttgctcttgcacttctccgttttacattcatctttccttttctgttgcctgccctgtagtcttcaagtaccaacagcatcagatgcacagatgacagctttacagaaactgcttagccagctcctacaattgtgtaaggtaaaatccttgtaacagaatcctttctgtgtgtgtatgtgtgcatgtgtatgtatgcatgtgtgtgtatacttatatatatgtatgtatgcatgtgcatatgtatacatatgcatacgtacatacatacagtaacatatgcatacatttacttataagtaggacaattacaatacataaygtgtttgtgtgtatatatatcttagtactcttacttctccaattgactcctgactgatttatatgttagcctcacaatctgtgaataattgtttttgctg

SEQ ID NO: 531919 - DNA, 653 bp, Homo sapiens
tcaatttctaatttccctttaatagcttattcaaccaaagttagactttattcttcaagtaactgccttgttacattcaattttttttgtacaggacttattttcacaattagattgtaaaacactgcagacaatgtgtggttttatatttcctcatttatctggacctaacataactcatgattcagcatgtattaatgtttgctgtagataatattaagttaggatgaatctttgattaaacttaaataactgctttaatttattgctaattatgcttattatggaattattaggcatattttgtgtgagggaagggagagaaagtgaacaagagaaagatattcagagaaaaagagagtaataaagaagactatttttgaaagtgtaaaaaacttctgaaaccaatcttttttaaaaataattatcaaaatgaaatgtttttcatgaagatgatataatcttatttaataattcaagcactattgaaaatcataaaatgttttaaagatattttaaaatttttctgttattaaatcgatctctgtctctcttcatggctgcataaataagaacaaatgtgcatctgtttttacatgcagaggtataattkaatagacctgggagctttctatgcactattctcatttagc

SEQ ID NO: 531920 - DNA, 615 bp, Homo sapiens
tacaattcttcttgagttcaaggctgccactttatttattgtgtgcttttatgacaacagcccctaaatgcatcctgtatgatttgataagggcctcttggccccactgcccccaycccatgtgtgtctttctttgccacaaatttccagcacactgttcaaatatgtaccacctaaattgaaccctcatgctgggagcactaatgggacgccccttcaaagcgactttctgtaacccaacagtttacatgttgctggaaacaatggacttaagcacacaatttatttgtgttggctggtttcatgctggttggaatctgctttggggggaaaacaaactctgcatctgtttagatttataatttatattgaaagcacaaatacctcataatagggctagaatgagacccagttatgggcaggagtcaccatatatgctggctttgttctttcatgaatgcactaagagattacaaactgcctttttttttttggagacggagtctcactctgtcacccaggctggagtgcagtggcacaatctcagctcactgcaacctctgcctcctgggttcaagcaattctcctgtctcagcctcctgagtagctgggatt

SEQ ID NO: 531921 - DNA, 621 bp, Homo sapiens
ttgtacattttaaataaataaattgtatattatgtgaattatgtctcagaaaggctgttcttaaaataacctgggtaagggtgagacaggggagtgtaggtgagcaaataaaggaaacaagattgactaggatttcaccatgctgaagcttgttaatagtaaatgcaggttcatgataccattctctctacttctgtgcatgtttgaaattgcctgtaataaaaataaatataaataaaaaacagaagaccatattagactatcaataaatggcactgttattgttacatcacagagccaagcaccaaatttaagaactcaggcacatacccctgaataacctatcatacaattcccagttttcctttaacttgcctaaagtctctttgcaggatttggcacttttctttccatcctggctccagagggacagagaacaactggtcatagacatagaaatagttcakaaacctgactcagccccttctttatctctctgtggccagtcagccacccactcttgccaattttccttccaaaagaccgttatgtttacccatccttcatacccactgccacttctaaaccaagccctttgcaaattccaccaaggtcacagca

SEQ ID NO: 531922 - DNA, 622 bp, Homo sapiens
ttgtacattttaaataaataaattgtatattatgtgaattatgtctcagaaaggctgttcttaaaataacctgggtaagggtgagacaggggagtgtaggtgagcaaataaaggaaacaagattgactaggatttcaccatgctgaagcttgttaatagtaaatgcaggttcatgataccattctctctacttctgtgcatgtttgaaattgcctgtaataaaaataaatataaataaaaaacagaagaccatattagactatcaataaatggcactgttattgttacatcacagagccaagcaccaaatttaagaactcaggcacatacccctgaataacctatcatacaattcccagttttcctttaacttgcctaaagtctctttgcaggatttggcacttttctttccatcctggctccagagggacagagaacaactggtcatagacatagaaatagttcagaaacctkactcagccccttctttatctctctgtggccagtcagccacccactcttgccaattttccttccaaaagaccgttatgtttacccatccttcatacccactgccacttctaaaccaagccctttgcaaattccaccaaggtcacagcaa

SEQ ID NO: 531923 - DNA, 627 bp, Homo sapiens
ttgtacaaaacatccttttgtgcaacacataaggagcttcctcttgtaaatacttatgaaaatgtgctcacataccccaggatggtcatagcagcaatggttgcaatgagagtcctttgaaatggctaaaattacttgtgtgcacaattggaaattttctggttttagaaacagacaaattgaatgggatacttactgccacctaaaagtctctaaaagaagttctgagaaaattgccttctttcaagaagtaaacaaaaatatatctgaaactatatccaaatttcaawggcatcagaagcctccactcttccttctccaactattcctcctcctcctacactatgcatttgtatcctctcttatctggactttcctgctctgatttgccttcccttctacaactaccaccatcacctaagaaaaccatagatttctgacactcctcactgaaactcctgttttggcagctcctttcaagataaaactcacaaaaagaggtgagcctgctattgtgtatagcccttagacaaagaaaaaacttaagaatatcgtaaaagacttcccacacctgctccaaaatcccatagggtttgcaaaagagtttaatttaattgtctggactta

SEQ ID NO: 531924 - DNA, 561 bp, Homo sapiens
ctgctcgggaggctgaggcgggagaatcctttgagcccaggaggcggaggttgcagtgagcccagactgcgccattgcagtgatccgagatcatgctattgcactccagcctgggtgacaagagcaaaactttgtctcaaaatggaaaaaagagagagagaagttatcccaataagaaagataaaagttttgaagagaaacttcacagaagaatctatgggttcrgtcagtgagcacacgaaatcccaataaggacgagaatatgcaaataagcatggagcatcctgtggtgccagggagaaaggagccgcccaaaaccaaacaaagccaaaagccacagcgatgggaggttgacaaagggacacggaagccaactaaaggagctcccggtggccaaagctggaaacgttgagtaacaaagtaattagctaaatgattaataattaaatagttaagtaaaatatttgacaaaataattagttcaattattaaataattcatcccccgaagtactggagtgtaaaccaaagcatacaataggtgtccataagtccatacgga

SEQ ID NO: 531925 - DNA, 561 bp, Homo sapiens
ctgctcgggaggctgaggcgggagaatcctttgagcccaggaggcggaggttgcagtgagcccagactgcgccattgcagtgatccgagatcatgctattgcactccagcctgggtgacaagagcaaaactttgtctcaaaatggaaaaaagagagagagaagttatcccaataagaaagataaaagttttgaagagaaacttcacagaagaatctatgggttcagtcagtgagcacacgaaatcccaataaggaygagaatatgcaaataagcatggagcatcctgtggtgccagggagaaaggagccgcccaaaaccaaacaaagccaaaagccacagcgatgggaggttgacaaagggacacggaagccaactaaaggagctcccggtggccaaagctggaaacgttgagtaacaaagtaattagctaaatgattaataattaaatagttaagtaaaatatttgacaaaataattagttcaattattaaataattcatcccccgaagtactggagtgtaaaccaaagcatacaataggtgtccataagtccatacgga

SEQ ID NO: 531926 - DNA, 561 bp, Homo sapiens
ctgctcgggaggctgaggcgggagaatcctttgagcccaggaggcggaggttgcagtgagcccagactgcgccattgcagtgatccgagatcatgctattgcactccagcctgggtgacaagagcaaaactttgtctcaaaatggaaaaaagagagagagaagttatcccaataagaaagataaaagttttgaagagaaacttcacagaagaatctatgggttcagtcagtgagcacacgaaatcccaataaggacgagaatatgcaaataagcatggagcatcctgtggtgccagggagaaaggagccgcccaaaaccaaacaaagccaaaagccacagcgatgggaggttgacaaagggacacggaagccaactaaaggagctcccggtggccaaagctggaaacgttgagtaacaaagtaattagctaaatrattaataattaaatagttaagtaaaatatttgacaaaataattagttcaattattaaataattcatcccccgaagtactggagtgtaaaccaaagcatacaataggtgtccataagtccatacgga

SEQ ID NO: 531927 - DNA, 499 bp, Homo sapiens
ccgggctggggcagcgagcacgaggggccgtgaggcacggggcgggttccsgcgtcgctcccagcaagggcgtggggccctgccacgcggaagccgtcgggaagcctcgcgtccacctgggacagcaccgaggttccgcccaaatcacagccaagggtgcccattgtggggggcacagtgctcatccccacagccactcccagcctcagggccagcagcaggggcgggggaggcagtggcagcactgggggctggcaccagcagaggctacgctgccgacccagctctttctgggccctcgtccgttttcttagcctctttgagaggatgaatgagcccctggtggttttcttggttggtgtgggccggaagcattgcccgtctttccagctcaaggcactgaccatgactccccttctgtgggatgtggggtggctggaaaaatgcagctcagccccactccatctccccgcacccaagccccgcagtgtctcgccag

SEQ ID NO: 531928 - DNA, 520 bp, Homo sapiens
gcaggcacacccccggcgctgggtggcgtgctctcgggggaaggcatggggagggctcaggcagcctacagccctcaagtcttacactggcacaacagcgcttggtttgcrgagcaagaatgatctggagtgtttggggaacatctcacagcctcctgagcccctgcatcctacattcacccatgcgcctagtgccttgaaggtttacatttatttggctccactgcatacagggcaccgtgcaggggtcctctgaaatcccgggaggcccgtggagcagacctctgcttcgtgctttgctgaagtgggtgtggaaacagcaggcgcaaggtgcccaggactcggggtgtgcaggtggccgctcagtctcagtccccccgtggggcacctgcacgaggccttccctgcacttcattctgtccccacccgttcacgctgtctagggaagagcctgctgcagtgggtgtgtggggtggaaggactcattccagagcccagttcgtgtcaggggccaagggct

SEQ ID NO: 531929 - DNA, 520 bp, Homo sapiens
gcaggcacacccccggcgctgggtggcgtgctctcgggggaaggcatggggagggctcaggcagcctacagccctcaagtcttacactggcacaacagcgcttggtttgcggagcaagaatgatctggagtgtttggggaacatctcacagcctcctgagcccctgcatcctacattcacccatgcgcctagkgccttgaaggtttacatttatttggctccactgcatacagggcaccgtgcaggggtcctctgaaatcccgggaggcccgtggagcagacctctgcttcgtgctttgctgaagtgggtgtggaaacagcaggcgcaaggtgcccaggactcggggtgtgcaggtggccgctcagtctcagtccccccgtggggcacctgcacgaggccttccctgcacttcattctgtccccacccgttcacgctgtctagggaagagcctgctgcagtgggtgtgtggggtggaaggactcattccagagcccagttcgtgtcaggggccaagggct

SEQ ID NO: 531930 - DNA, 566 bp, Homo sapiens
cccggcgctgggtggcgtgctctcgggggaaggcatggggagggctcaggcagcctacagccctcaagtcttacactggcacaacagcgcttggtttgcggagcaagaatgatctggagtgtttggggaacatctcacagcctcctgagcccctgcatcctacattcacccatgcgcctagtgmcttgaaggtttacatttatttggctccactgcatacagggcaccgtgcaggggtcctctgaaatcccgggaggcccgtggagcagacctctgcttcgtgctttgctgaagtgggtgtggaaacagcaggcgcaaggtgcccaggactcggggtgtgcaggtggccgctcagtctcagtccccccgtggggcacctgcacgaggccttccctgcacttcattctgtccccacccgttcacgctgtctagggaagagcctgctgcagtgggtgtgtggggtggaaggactcattccagagcccagttcgtgtcaggggccaagggctaggcccccggcatagaaactgggccgaggagtgggtcagggagccttggggaaggct

SEQ ID NO: 531931 - DNA, 566 bp, Homo sapiens
cccggcgctgggtggcgtgctctcgggggaaggcatggggagggctcaggcagcctacagccctcaagtcttacactggcacaacagcgcttggtttgcggagcaagaatgatctggagtgtttggggaacatctcacagcctcctgagcccctgcatcctacattcacccatgcgcctagtgccttgaargtttacatttatttggctccactgcatacagggcaccgtgcaggggtcctctgaaatcccgggaggcccgtggagcagacctctgcttcgtgctttgctgaagtgggtgtggaaacagcaggcgcaaggtgcccaggactcggggtgtgcaggtggccgctcagtctcagtccccccgtggggcacctgcacgaggccttccctgcacttcattctgtccccacccgttcacgctgtctagggaagagcctgctgcagtgggtgtgtggggtggaaggactcattccagagcccagttcgtgtcaggggccaagggctaggcccccggcatagaaactgggccgaggagtgggtcagggagccttggggaaggct

SEQ ID NO: 531932 - DNA, 520 bp, Homo sapiens
gcaggcacacccccggcgctgggtggcgtgctctcgggggaaggcatggggagggctcaggcagcctacagccctcaagtcttacactggcacaacagcgcttggtttgcggagcaagaatgatctggagtgtttggggaacatctcacagcctcctgagcccctgcatcctacattcacccatgcgcctagtgccttgaaggtttacatttatttggctccactgcatacagggcaccgtgcaggggtcctctgaaatcccgggaggcccgtggagcagacctctgcttcgtgctttgctgaagtgggtgtggaaacagcaggcgcaaggtgcccaggactcggggtgtgcaggtggccgctcagtctcagtcyccccgtggggcacctgcacgaggccttccctgcacttcattctgtccccacccgttcacgctgtctagggaagagcctgctgcagtgggtgtgtggggtggaaggactcattccagagcccagttcgtgtcaggggccaagggct

SEQ ID NO: 531933 - DNA, 594 bp, Homo sapiens
gcctcgccctcccaaagtgctgggattacaggcgtragccaccgcgccctgccgggttcaagcaattcttgtgcctcagcctcccaaggagctgggattataggcgcacgctgccatgcctggctaattttttgtatcttcagtagagttggggttttgccatgttgggcattgcttgtctcaaattcctgacctcaggtgatccgcctgcctcgtcctcccaaagtgctgggattacaggcgtgaactactgcacccggccaatttctttagttaacaattagaatacttatctgttcttattaggaaaaaaaccaatgtcttcctcttgagaccctctcttttctactgaataaacccaagaaatctggggcttattaagtctaaaacagccagtccagcttccaaacaagtcagccaagcccaggttgtgtatctaacttgtgaaaaacaggtcacctggaggggacactgtctgagagccacctcacatctacatggagatggcgcaaaggaatgttgccagttgtggcaaccgtgaaaattcatcgttcagctctcctgccgtggggagcggagttgactggcagcccc

SEQ ID NO: 531934 - DNA, 568 bp, Homo sapiens
gtggggcctgaaacagcggccttctgtactcccgcctgcacctgacagtgcaagtacagggtgatgcagcccaaatcaagggtgcagctcagagcccccccaaccccggcagggcagaggctcagcccaggacagcgagtgcccccaccttgggccctggcctccgccctcatcattcaggtgagagctcccacaggccctcccaggagtgggcttctccccagagtcctgggtgggggatggggatcagagagcagaccccgtctcatgaccgctccccaccaccgtctcagccaccaaagaggaatcgcttcaaaaggtcagctaggaggtcacctcatccaggacccccaccccagggctgccctggacagcagccctccacagcccagcacaagaaaatggagcagacgggccggctgcccatcaatcagctattaatagtagcgtgygccctggcagggccctaggacaagtgagggcagtaccatccccagccccagccttggccctggggggaagggggtaaggctccagcgccctccagccccagctcaacatggcagag

SEQ ID NO: 531935 - DNA, 568 bp, Homo sapiens
gtggggcctgaaacagcggccttctgtactcccgcctgcacctgacagtgcaagtacagggtgatgcagcccaaatcaagggtgcagctcagagcccccccaaccccggcagggcagaggctcagcccaggacagcgagtgcccccaccttgggccctggcctccgccctcatcattcaggtgagagctcccacaggccctcccaggagtgggcttctccccagagtcctgggtgggggatggggatcagagagcagaccccgtctcatgaccgctccccaccaccgtctcagccaccaaagaggaatcgcttcaaaaggtcagctaggaggtcacctcatccaggacccccaccccagggctgccctggacagcagccctccacagcccagcacaagaaaatggagcagacgggccggctgcccatcaatcagctattaatagtagcgtgcgccctggcagggccctaggacaagtgagggcagtaccatcyccagccccagccttggccctggggggaagggggtaaggctccagcgccctccagccccagctcaacatggcagag

SEQ ID NO: 531936 - DNA, 480 bp, Homo sapiens
atgcacttcctgctccttgccaccttactctcctccagtattaacattctcccatcctccctcatcttcctaccctcccccaccaggtgagaaagatttggctccccagttggctgactggcgttcagagataggttcctgattccctaccatggagaagttgcttgcaagagaaacccagcattataaacgaactttcaaaagggtcagttagacaagttggctgtgacatgagggttaattagggaacttgaaatgtaatattctttctggcacagaggattctgttgwcctccaggctgcatgacttaagacagcaatggacagtttccagaccccagttgcaagcgggcagggtcagagcttctaattctgctaggctgagtcagtttttggtgcctagatgggtgtggccaagaacgcagatggcaggtaatcattaggggatgttgggatgggtctgggacaggctgaacttga

SEQ ID NO: 531937 - DNA, 407 bp, Homo sapiens
gtcaccagattcctagggctgaggtagcaggaaataatcagcccaaatagaaatagaaatcatcagaaattggttggggcaagggaggggatgctgggaaagttgggaagccagaggtggtggacgtctcaaagaactcgtgagagcacctgtaagagaacacgtccagattaaacacacatcaggaccagagaacagcaccacccaacccacaatactaccaggcatgtaagatacagcttgccccaacctatctctcctcctacccttgtctccatcagctctaaccctgaagggaaaagaaaatttcactaataggagcatgtggaarggtagatgtgcttggcagagtagaagaagccaactactctccatcctttgggctcaggcttccaacctgaaatgtg

SEQ ID NO: 531938 - DNA, 611 bp, Homo sapiens
atccatttattgatttatttggcatctcaggctactaattagtcacaggaatccttccatgaggccactggggttgagagagaacagcagcrtagcaggatgataccaggaagatgagaatcctccttgtgcaatttaacatgtgcatttaagattggcttggaaccattcctgtgcatatgtgtgtgtgtatatgtgcacgtggatgcatgggtatgtgtgcatttcacttgagggagtactgctgtggattcctcactttattttttggtgaatgagcttgtgactcattcataatgggaaattcagatcataatgccaggtatttagtcctaccaaggtccagtagcatttcaagagttgtttctcaaaataggactagttacttactggagaggtcataactttgattttttaaatgatattagaggtcttgactgagaatttactactggagctccataaagcatcccaatctgctacaaactcttcaagcttcattggatccgctggatcaaatgggctgccaggtagagttgattgcactgcagcctggactgattgccaggagctctgttgatatgagttagtgaggagacaacatctggaac

SEQ ID NO: 531939 - DNA, 622 bp, Homo sapiens
tcttttggcagctgccactctctataaatatcaccccttatcaaattgtctgtaataatactggctccattgaggggtactttccatctttagtacccaaagtgcccaatggcaaatgagcaaaatagaattatttaggtcgttgaggattctcctgataggtactraaaggttatactaaatgaaagtaaagcttatgtttcaagtacaaagtgttactcagggaacagttccaaaggaaaagggagtttgctttcctatgaccagggcatggggagggcaagagagtagctgtggttccataaatggcaaaaactcaccaaaaagataagagtctctgaggcaagggtatggcccctgtgttctgatgggctgatcacaagaagctggggccttgggaaggatgacaaaaaaaaaaaaaactcccaagtgcttgaggaagcagcaaccatgttgaatcctaatggctaccgctaccagaggagctgcaactctgctgtgcccaaaggcagtgccacatctccacctcaggggtctatgtctcatttactctccattagccatgacacctttttccaaaatgtcacagtgattagtgatatcccttgttccttcccctcca

SEQ ID NO: 531940 - DNA, 622 bp, Homo sapiens
tcttttggcagctgccactctctataaatatcaccccttatcaaattgtctgtaataatactggctccattgaggggtactttccatctttagtacccaaagtgcccaatggcaaatgagcaaaatagaattatttaggtcgttgaggattctcctgataggtactgaaaggttatactaaatgaaagtaaagcttatgtttcaagtacaaagtgttactcagggaacagttccaaaggaaaagggagttygctttcctatgaccagggcatggggagggcaagagagtagctgtggttccataaatggcaaaaactcaccaaaaagataagagtctctgaggcaagggtatggcccctgtgttctgatgggctgatcacaagaagctggggccttgggaaggatgacaaaaaaaaaaaaaactcccaagtgcttgaggaagcagcaaccatgttgaatcctaatggctaccgctaccagaggagctgcaactctgctgtgcccaaaggcagtgccacatctccacctcaggggtctatgtctcatttactctccattagccatgacacctttttccaaaatgtcacagtgattagtgatatcccttgttccttcccctcca

SEQ ID NO: 531941 - DNA, 622 bp, Homo sapiens
tcttttggcagctgccactctctataaatatcaccccttatcaaattgtctgtaataatactggctccattgaggggtactttccatctttagtacccaaagtgcccaatggcaaatgagcaaaatagaattatttaggtcgttgaggattctcctgataggtactgaaaggttatactaaatgaaagtaaagcttatgtttcaagtacaaagtgttactcagggaacagttccaaaggaaaagggagtttgctttcctatgaccagggcatggggagggcaagagagtagctgtggttccataaatggcaaaaactcaccaaaaagataagagtctctgaggcaagggtatggcccctgtgttctgatgggctgatcacaagaagctggggccttgggaaggatgacaaaaaaaaaaaaaactcccaagtgcttgaggaagcagcaaccatgttgaatcctaatggctacygctaccagaggagctgcaactctgctgtgcccaaaggcagtgccacatctccacctcaggggtctatgtctcatttactctccattagccatgacacctttttccaaaatgtcacagtgattagtgatatcccttgttccttcccctcca

SEQ ID NO: 531942 - DNA, 622 bp, Homo sapiens
tcttttggcagctgccactctctataaatatcaccccttatcaaattgtctgtaataatactggctccattgaggggtactttccatctttagtacccaaagtgcccaatggcaaatgagcaaaatagaattatttaggtcgttgaggattctcctgataggtactgaaaggttatactaaatgaaagtaaagcttatgtttcaagtacaaagtgttactcagggaacagttccaaaggaaaagggagtttgctttcctatgaccagggcatggggagggcaagagagtagctgtggttccataaatggcaaaaactcaccaaaaagataagagtctctgaggcaagggtatggcccctgtgttctgatgggctgatcacaagaagctggggccttgggaaggatgacaaaaaaaaaaaaaactcccaagtgcttgaggaagcagcaaccatgttgaatcctaatggctaccgctaccagaggagctgcaactctgctgtgcccaaaggcagtgccacawctccacctcaggggtctatgtctcatttactctccattagccatgacacctttttccaaaatgtcacagtgattagtgatatcccttgttccttcccctcca

SEQ ID NO: 531943 - DNA, 637 bp, Homo sapiens
ttttaatgtgttcataatattctatttcttgatctgtagggtggttgctcatcaagctgtatccttgtgatttgtgcaagtatcaatatgtatgccatttttaaatgaatacatatttatttagttttttttttttactasccatgttattttcacatgttgattaggtatttaatggtaaattgatgtaagtctaattttatttcttattttcagtgacaacatctcaacaatgaatatttgatcttacaagaaaagtgttatggccaaattacaaaaaaatgcatatgttaactttttatagtagatatgactgcattttaactttagcaatgcaataatcctcagaaactacatctgcaaggagcctcaaagcaagtgttttttttaagttgacaaaaatgttctttgatctgtaagactatataaatcagtcaacaaacatttattggaccctttttatatataacatggggtactatacaaaattcagaaaagcacaagacatgatctctcctagggaatttgaattcaaaactggaaaaacaaactgcactcatgtactcaaaaaaatatatattatcaatccagtgtattaaatggacactaaactaatagtacagattgcaaagaagaa

SEQ ID NO: 531944 - DNA, 595 bp, Homo sapiens
tatttagcccccaagtcaagttgttttcacattctgagagttgctaatgagatagttaagtgcaggaggaaagagtcatcacattaggttaaaaagtacatggcattccctgaccttgatggttatgacacacagatgtgcctaatgagtttagagcagcaagagccgggagcttcctggttctgccaaggactagcaaaagccctataattttccacaaggcaggggtgaagaataaccactgcttttcagattcgtgcttttataatcatctgaggtgtttttaagttaayattcctgttgtgaactgcatcgcgtcccccaaaatttatatgtttgaagccctaacctccagtacctcagaatgtgtctgtatttagagacaggccctttaaagagttcactaaaactgaaaataaggtcattttggtgggtcctcattcaatctgactggtgtccttctaagaggagggaattagaacacatagggaaacatcagaggtgcacaggcacagaaagggaccatgtaaagaagcagcaggaaggtggctgtccacaaactcaggagagaggtctccagaggaactcgatctgc

SEQ ID NO: 531945 - DNA, 595 bp, Homo sapiens
tatttagcccccaagtcaagttgttttcacattctgagagttgctaatgagatagttaagtgcaggaggaaagagtcatcacattaggttaaaaagtacatggcattccctgaccttgatggttatgacacacagatgtgcctaatgagtttagagcagcaagagccgggagcttcctggttctgccaaggactagcaaaagccctataattttccacaaggcaggggtgaagaataaccactgcttttcagattcgtgcttttataatcatctgaggtgtttttaagttaacattcctgttgtgaactgcatcgcgtcccccaaaatttatatgtttgaagccctaacctccagtacctcagaatgtgtctgtatttagagacmggccctttaaagagttcactaaaactgaaaataaggtcattttggtgggtcctcattcaatctgactggtgtccttctaagaggagggaattagaacacatagggaaacatcagaggtgcacaggcacagaaagggaccatgtaaagaagcagcaggaaggtggctgtccacaaactcaggagagaggtctccagaggaactcgatctgc

SEQ ID NO: 531946 - DNA, 516 bp, Homo sapiens
tctttaaaaaaaaataaaattctcaattaaaatattttttactgtaatcccagcactttgggaggccgaggtgggcggatcacgaggtcaggagatcgagaacatcctggctaacatggtgaaaccccgtctctactaaaaatacaaaaaaaattagccgggcgcagtggcgggtgcctgtagtcccagctactcgggaggctgaggcaggagaatggtgtgaaccatggaggcagagcttgcagtgagctgagatagcgccattgcactccagcctgggcgacagagcaagactccgcctcaaaaaaaacaaaaaatattttttattctattatggttctcaaattgtttttctatgtggctgatatccttcargaagaaagatctttcttactatgttcatggatataagcaaaatttgaccaacttctaattaaagtctcccaagaatatgctatttcatcaactcaacaaacatttattaagcacataatatgtatcagggactgtgttgga

SEQ ID NO: 531947 - DNA, 640 bp, Homo sapiens
cacttccttctccccatcatccaacccaatcatctatcattatctacatgtttcaggctcagagagataaaggatgtgcttaaggatacatggcactgtaactggctgcccattacagccaaggcaatgataaaacatgaaacaagtttatcaaaattcctaggaatgaatacctctgactatataaaatgggtataggaatgactgtaaaaaattgtgaatctctaaaactgaaaaacatgcccattaattgtctgacaaaatctcgattccaaatctgggaaatgtgatgaggcagtgagtcctctgtaaaggcaggaagttctggtgcctgcgttggcaagaaatcaaatacactgggaaggagaaacttcctggaggaaggacaatcccatttgaataatgaagctaccagttgtgcaggcaggccatgcctgagtaatcctgagggtgatctgagagggtaatactccaagatgacacttgagcaaacacatgggtgatacytgagcgagtatgaacagtgacacctgagagtgaaatgtgacacctgagttagcaagtgctgttgtttcaagtcaataaatatttatttatgaggataactgtgtcaggtatccataaattatataagctttcc

SEQ ID NO: 531948 - DNA, 593 bp, Homo sapiens
gaaattatggtctctagttacatttcttggaaaaatctccttttaatacttgcttacttaaaaagcatgcagagagaaagtctttggagaacataaagatgttatgaataktcattttattattaagtcctcagtggattttgtctgaaggcccttagtcagcaaaacttccattaaagattttgccaagctgattcttataaactgatgtgctgtaaaatcctatggtgtacaattgtcacaaacaaccccaaacacaaacaaaactagtataaaacctacaaataaactcaggaaagtttcagtttatagtactagttacttttctgaagtagaaatgttcagcttttcaataatttgtaaggcaatctgtaagttaaaatttacctttttggtagatacataataaggaaaagattttagacagagcagtctgagtcatgaggcaaaaaggaaagggtagaagcatcttttgtggatactctcaagcccaccaacctctgagcactggagtggtccccttcctggccataatccccttttctcatcacaagttatccgtcaacacagccaagtctgcctcccagccttgt

SEQ ID NO: 531949 - DNA, 593 bp, Homo sapiens
gaaattatggtctctagttacatttcttggaaaaatctccttttaatacttgcttacttaaaaagcatgcagagagaaagtctttggagaacataaagatgttatgaatattcattttattattaagtcctcagtggattttgtctgaaggcccttagtcagcaaaacttccattaaagattttgccaagctgattcttataaactgatgtgctgtaaaatcctatggtgtacaattgtcacaaacaaccccaaacacaaacaaaactagtataaaacctacaaataaactcaggaaagtttcagtttatagtactagttacttttctgaagtagaaatgttcagcttttcaataatttgtaaggcaatctgtaagttaaaatttacctttttggtagatacataataaggaaaakattttagacagagcagtctgagtcatgaggcaaaaaggaaagggtagaagcatcttttgtggatactctcaagcccaccaacctctgagcactggagtggtccccttcctggccataatccccttttctcatcacaagttatccgtcaacacagccaagtctgcctcccagccttgt

SEQ ID NO: 531950 - DNA, 634 bp, Homo sapiens
gtgtttgtggaacatatacagtctatgggacacctgcttatgccctgagcggggggagagaatttctacttgagactaaactaggaccctaaggacttcgggatatggttttgttgcctggttaatgtgggtgttcttaggaggacaaagaattcctctgtgaggaggtctcgtgagtttgcatgcagatgtggccttttcagagtgaaggggacagcatcatggccctagtgaggctgttcatggctgtcacagccttctactcagaaggctgagcctccacaatgtctgatcccttttctgcagtcaggttttgttgctgtcagattggacatgtgaacagttaaatcttgtgccattgcctgctgggtgcagattaaatgcccaagaatacagactccrtgggtgtttgaggcgtgccccctctggagtctctctggcaccactggtctctctgcacctgcatcagggttaaccctctcctgtggttaattctgcttggtagtgtcctctggagctctgagttacaccaggggtgtacttaggtactccccaggtctttgtggaaactccaaagaaaacaaatccaccttgagcaaggccctgcttctccctgccttcccttactgattgt

SEQ ID NO: 531951 - DNA, 621 bp, Homo sapiens
aaaattgtaaatataagaaagatttgaacacttgatttcttcacgtgtttatgatttctccttcaagatggatataagatgcttcttcgttggttcctttgcctattcccttgattaaaatcaacctctttgatattatttgcaaccagtaaaagtgatcagttgatgatgagaaatcaatacatttaaaattaaacagagtagctccctctctacctgctctctgcaaarcctatcctcagttctgttgtcaacggcacatccatccaccagatgcccatacttgaaacttcaactttgccttccacctctccctcacctccctctcatccaatctgtccccatgccacactgatgcctcctaagaaatgtcttttgattcctgtaatagagatatgttggttgtgacctcactctccccaccacttgatgtactgagacccaggtcaaacttcactttgagtccacttcttctgccatgacccttggtactttggttctatttagggactgactggttgaaaggagcaaaaactacctcaagggagcatagataaaggggatatgcatggaggagacattaggcagactcaccagcatccaaggatgggaagtaaagga

SEQ ID NO: 531952 - DNA, 621 bp, Homo sapiens
aaaattgtaaatataagaaagatttgaacacttgatttcttcacgtgtttatgatttctccttcaagatggatataagatgcttcttcgttggttcctttgcctattcccttgattaaaatcaacctctttgatattatttgcaaccagtaaaagtgatcagttgatgatgagaaatcaatacatttaaaattaaacagagtagctccctctctacctgctctctgcaaagcctatcctcagttctgttgtcaacggcacatccatccaccagatgcccatacttgaaacttcaaytttgccttccacctctccctcacctccctctcatccaatctgtccccatgccacactgatgcctcctaagaaatgtcttttgattcctgtaatagagatatgttggttgtgacctcactctccccaccacttgatgtactgagacccaggtcaaacttcactttgagtccacttcttctgccatgacccttggtactttggttctatttagggactgactggttgaaaggagcaaaaactacctcaagggagcatagataaaggggatatgcatggaggagacattaggcagactcaccagcatccaaggatgggaagtaaagga

SEQ ID NO: 531953 - DNA, 621 bp, Homo sapiens
aaaattgtaaatataagaaagatttgaacacttgatttcttcacgtgtttatgatttctccttcaagatggatataagatgcttcttcgttggttcctttgcctattcccttgattaaaatcaacctctttgatattatttgcaaccagtaaaagtgatcagttgatgatgagaaatcaatacatttaaaattaaacagagtagctccctctctacctgctctctgcaaagcctatcctcagttctgttgtcaacggcacatccatccaccagatgcccatacttgaaacttcaactttgccttccacctctccctcacctccctctcatccaatctgtccccatgccacactgatgcctcctaagaaatgtcttttgattcctgtaatagagatatgttggttgtgacctcacyctccccaccacttgatgtactgagacccaggtcaaacttcactttgagtccacttcttctgccatgacccttggtactttggttctatttagggactgactggttgaaaggagcaaaaactacctcaagggagcatagataaaggggatatgcatggaggagacattaggcagactcaccagcatccaaggatgggaagtaaagga

SEQ ID NO: 531954 - DNA, 621 bp, Homo sapiens
aaaattgtaaatataagaaagatttgaacacttgatttcttcacgtgtttatgatttctccttcaagatggatataagatgcttcttcgttggttcctttgcctattcccttgattaaaatcaacctctttgatattatttgcaaccagtaaaagtgatcagttgatgatgagaaatcaatacatttaaaattaaacagagtagctccctctctacctgctctctgcaaagcctatcctcagttctgttgtcaacggcacatccatccaccagatgcccatacttgaaacttcaactttgccttccacctctccctcacctccctctcatccaatctgtccccatgccacactgatgcctcctaagaaatgtcttttgattcctgtaatagagatatgttggttgtgacctcactctccccaccacttgatgtactgagacccaggtcaaacttcactttgagtccacttcttctgccatgacccttggtactttggttctatttagggactgactggttgwaaggagcaaaaactacctcaagggagcatagataaaggggatatgcatggaggagacattaggcagactcaccagcatccaaggatgggaagtaaagga

SEQ ID NO: 531955 - DNA, 567 bp, Homo sapiens
ctgaatatttttcactctttgaaaagtacacaacctaaattagagcccaagggtctacttgaatcctaccaagaaaggtagataggtcagaactttctcagttacaagagacggaaacatgacttatactttcttaagcccccaaagttttttttctcttaaatatctgaaaattccaggaattggttccagtttcaggtataggtggatctaggtgctcaaatgacatcacaaatgttctctttcttttctctagtttcttctttgttggtttctgacatgcttcctctacatgaagatctccagcaactccagggtaacatgaacctttcagcttatgatctcaaagggagaaggagttttcctctagcagcatccatatttgtcccctttccgaagatctctgattagccctgtttggatcacatgatctttcctggaccaatcactgtttccaggagctatatcccctatggtagaagagacaggggaagcttcttgacaactctatggaatcctgaccattaaggatgggttagaccyacaggtgtgctcagaaatgttaac

SEQ ID NO: 531956 - DNA, 592 bp, Homo sapiens
atgtactcttggaaaaatggtgtggataaagttcctcaacacagtattgccacaaaccttcaatgtgtaaaaaccaccattgagtgaagtgtaataagacaaggcatgcctggatacatccagtacctggggagcggctggggtatgagtgcaaataatgtgtatcactctcaggcctggcctataaaatctcatactcaggaaccttcatgctcactctcctttcttggtttgatgaaggtgaacacagtgaccttagaagacaaaaacccaacatatggtagacccataagatgaaagaagccaaggtcttgtgccagttttgctcctttgggaagcatatgccaagaaggagttagaagttcaggggatttatgggggaaatgcctctgaaagatctaagggaaggggargatgaacaggcatggagagccttcaggtggggctgcaggtctgacacctgtgaaagagagggttctggaagaagattgggcaagaagtcttatcttctagtttagcaccccatttggcaaggaagacgcaaacccaagagggatgtggggcacagataatcctgggcataatgtggcag

SEQ ID NO: 531957 - DNA, 629 bp, Homo sapiens
gttgctgcttctaggcggccaccttggccccgcccttcctgtgtattttgcgatttttacaagtctttcaaaataggctgagtagggattgatgtttcttctcatattacagacaaaaaacaaaacaggccgggcgcgctggcttacgcctgtaatcccagcactgtgggaggcctagaagggcggatcacgaggtcaggagatcaagaccatcctggctaacatggtgaaacccagtctctactaaaaatacaaaaaatcagccgggtgtggtggcgggcgcctgtagtcccaaccactcaggaggctgaggcaggagaatggcgtgaacccgggaggcagagcttgcagtgagccgagrtggcgccactgcactccagcctgggcgacagagcgagactctgtctcaaaaaaaaaaaaaaaaaaaagaaaaaaactaaagaaaatagctacttagaagaagtcttgtagcatttggagtatatcaatctttttttctggaaaaaacaaatacaccagttttttttttttttttttttttaaagagatgtaataattaactctttcacttaaaaattttggatttattctattatttcccttacatttcattgtttacatcatatttt

SEQ ID NO: 531958 - DNA, 466 bp, Homo sapiens
ctgcaggcttcctaatagttgctttttcagcactaggtccaggggacagctccaagcagttccccactgagatccattagcattagcttggtgttgaacacagacccagctagaaycagatagatcttcaagggcctcttgaattgtaccaggaagtatcactctgtgtttcatctgaaacagctctttcagggtccagcctgcactacaatagtcaatttcacattttttggttgtaagaaacaaaagtcaagttacttaagcacaaaggacatacattagctcacatagcttgtgagtctgggagtgcatctgccttcaagtctgcttggctccagaggcttcaataatgctaccagaatttattcttctgcaccttggatgagctcttccacatgatgaatgaggtgactacctacaaccccggactcaggccctgttagcttagaaaatccccaaaagacac

SEQ ID NO: 531959 - DNA, 466 bp, Homo sapiens
ctgcaggcttcctaatagttgctttttcagcactaggtccaggggacagctccaagcagttccccactgagatccattagcattagcttggtgttgaacacagacccagctagaatcagatagatcttcaagggcctcttgaattgtaccaggaagtatcactctgtgtttcatctgaaacagctctttcagggtccagcctgcactacaatagtcaatttcacattttttggttgtaagaaacaaaagtcaagttacttaagcacaaaggacatacattagctcwcatagcttgtgagtctgggagtgcatctgccttcaagtctgcttggctccagaggcttcaataatgctaccagaatttattcttctgcaccttggatgagctcttccacatgatgaatgaggtgactacctacaaccccggactcaggccctgttagcttagaaaatccccaaaagacac

SEQ ID NO: 531960 - DNA, 456 bp, Homo sapiens
aatggaaatggcaagcagttgtactttcaccatttgcaaggcaactatctgaaacatccttctctcctctaattggatctgtttccttctctgtctccaggacttatgtcttaactcataacccctgaacatctgaatggagtgagacactccaagccaagtgtaagttttaacatagcaaacaccatccctcgatttccagagaggagcccctgagtgcccctcctgtttgatgagaagcaggtgcagaataggctgctttaatcagtgctaaacgcacacgtcttactgaaacctgaatrtgctgtgcttcacaataccgtggtttgatggcaaatgcagatgatgaagagaacactacgcactccattaacaagtgtgttgtagctcagtcataactaatgataatgaagcgctgactgaacgctcagtgctaatactcgattgaactggaga

SEQ ID NO: 531961 - DNA, 624 bp, Homo sapiens
ggagggtttacataggggagaaatttaatcactggaggaaaaaattagggactctgaacaagtatactcttcccccatgggaagaatctgatttaaaaccatgcatgcagtcattcacccattcattcactaaacgtttcttgacatctacactagcagtgtcaatatcctgggccccaaaggcatgagacagacctgccttcaaagaaccatagtctgggagggggagccagactagtaaacagattacaatataatgtcatatgtgcccaagagctgacagcagcagctcagaattaggaatgactattgccacctgagaagmaggtgatttatgaactggaatttggaaaaggaaaaaagttcattacgtgaagaagtaaaggaatggagtgtccatggggtgaaaggagcagtgcctgcaaggacaccagggcctggaataggtagtgcctggacaggatgaccagtagccctgcaggaagaggaatgtgggctctgaagtccatcctaccaccaattctagcttatggcctgggaggacattgggcaaatcaccagactcagtggtccacaactctacctgcatgttagcctcagcgcaggaaattaagaaataaaagt

SEQ ID NO: 531962 - DNA, 496 bp, Homo sapiens
tctgacctgatagcatcttatcactattcttgcccaagacttgacaggccagcccatattacagtaggtagggttaggtggaagtggtgtgagatgttcataaaaattaaagtgaactcctgcttctcaaagaaaacaaggtctcttttggtcaagaaaaagaggggtttcattaaatgacactcttggtaacctgccatccctttcaaatggatgtattcactttcagagtgaggttcagattttccacaatacagagagggaaaacatgagttgaggagaacctcattttcccctaataaatgctagtgctttttaatgggggaaaacaaacaaaaaccccaaagaactctggctcttaaaggaccaagggacttctcatgtactamctgcatagaagggataaaccagtctactcatctttctttacatcagagaggcctccttgctcccaagattttagtttttaaaaactttattctaactgataacctgg

SEQ ID NO: 531963 - DNA, 648 bp, Homo sapiens
gggcaagtagagaggccagggttcacttgcacagcctggtgtaataagattgagagrtatgctggagagagaaagccctgccgttaggggtttagagctgaaatgcagataataacacagtggtcacacaccttgcttcagcagacaagattacattagagcaagtcaaggctggaaggccaggaatcaaagtgattctgacttgagctgtggcagccaggccattccagttgattttacttttcttcataaaaccaagaccaaagcattgagcaacttggaggactcgtgtttaaacacaaatgcatttccagatattctcctccaccactcctaatacaagcaaatagaatttcaatttcaaattagggttcaaagagcaccaaaaattcagtagaactgaagcatgaaatgaccacatgggaagttgcctccttgatttgcagcaaaagttcttggcaagagatgggtctcaatagcacgaggaaatcattttccctgctgactttacttccaaagaaagagtttcagggttgactgactacctttggatagcagagacagcattgagagctgtaaacagaatgagaggcaaaaggtggtttgattctaggagagggctgagactaagatattctcatctttgat

SEQ ID NO: 531964 - DNA, 648 bp, Homo sapiens
gggcaagtagagaggccagggttcacttgcacagcctggtgtaataagattgagagatatgctggagagagaaagccctgcygttaggggtttagagctgaaatgcagataataacacagtggtcacacaccttgcttcagcagacaagattacattagagcaagtcaaggctggaaggccaggaatcaaagtgattctgacttgagctgtggcagccaggccattccagttgattttacttttcttcataaaaccaagaccaaagcattgagcaacttggaggactcgtgtttaaacacaaatgcatttccagatattctcctccaccactcctaatacaagcaaatagaatttcaatttcaaattagggttcaaagagcaccaaaaattcagtagaactgaagcatgaaatgaccacatgggaagttgcctccttgatttgcagcaaaagttcttggcaagagatgggtctcaatagcacgaggaaatcattttccctgctgactttacttccaaagaaagagtttcagggttgactgactacctttggatagcagagacagcattgagagctgtaaacagaatgagaggcaaaaggtggtttgattctaggagagggctgagactaagatattctcatctttgat

SEQ ID NO: 531965 - DNA, 648 bp, Homo sapiens
gggcaagtagagaggccagggttcacttgcacagcctggtgtaataagattgagagatatgctggagagagaaagccctgccgttaggggtttagagctgaaatgcagataataacacagtggtcacacaccttgcttcagcagacaagattacattagagcaagtcaaggctggaaggccaggaatcaaagtgattctgacttgagctgtggcagccaggccattccagttgattttacttttcttcataaaaccaagaccaaagcattgagcaacttggaggactcgtgttkaaacacaaatgcatttccagatattctcctccaccactcctaatacaagcaaatagaatttcaatttcaaattagggttcaaagagcaccaaaaattcagtagaactgaagcatgaaatgaccacatgggaagttgcctccttgatttgcagcaaaagttcttggcaagagatgggtctcaatagcacgaggaaatcattttccctgctgactttacttccaaagaaagagtttcagggttgactgactacctttggatagcagagacagcattgagagctgtaaacagaatgagaggcaaaaggtggtttgattctaggagagggctgagactaagatattctcatctttgat

SEQ ID NO: 531966 - DNA, 614 bp, Homo sapiens
aaccattgataaatgcattaatgaggagagccccaatatctttaaatatctatggttaatttattctacaggctatggatgacaccaagatttgatgactttgaaatacatccattttaatggagagatgagatcttggaatgtcagggatcaggtagcaatagcactttactgacagagacaaaataaccataattactgtaatgagcagggagggttgagtggcaattcagatgtttttatctacagggatctatgatgatagctaattgattatagtttcctaggaattaaatagaaggatagcccaacaaagcattatttgatccagtgaacaggaagttatcttgagtaagtgccacaggaagtcacagcgtctctgttagttcacagatctagagcctaagtaggaggctatgttctcttgaagaaggattctgaaaaattgccccaagtatatattataaatyatcctccaaattgtactctaaagggccttcaaattatttatcaggatgactctgcaaagagaaaagagaataggtcacaggactagtgatgccctgaaggggagaactgcatatgatatgaagatattcaactttgatatgggc

SEQ ID NO: 531967 - DNA, 552 bp, Homo sapiens
cagttgcccttctgcaaatacccatttgtgcacttggccaggttaagatgtacaacactgattatcactagtgcccctgtccttactccattttctgaaaactcctgtgatgctccattgcrtgtatcagggtttgacaaattatgggtcacatctgacaccttgcctgcttttgtatggcccgtcagccaagaatgctttttacatttttaatgatttcaaaaaaatcaaaagaataacgccatcttcggatatgtgaaaattacatgcaatttaaattttaacattcatatatggtgttattgggacacagacacactgatttctggatatattatctatgtcttctttcacctaccatggcagagctgaatagttgtaatggagatggcatggcctgaaaaacctaatatatttactatctggccccttagagaaaaaaaaaaattgctgacctctggcatataggaataccaacttcttatcatttattttatgtaatctgacctctacttattttccgaccccaattcttcctacaccaatcctcaa

SEQ ID NO: 531968 - DNA, 552 bp, Homo sapiens
cagttgcccttctgcaaatacccatttgtgcacttggccaggttaagatgtacaacactgattatcactagtgcccctgtccttactccattttctgaaaactcctgtgatgctccattgcgtgtatcagggtttgacaaattatgggtcacatctgacaccttgcctgcttttgtatggcccgtcagccaagaatgctttttacatttttaatgatttcaaaaaaatcaaaagaataacgccatcttcggatatgtgaaaattacatgcaatttaaattttaacattcatatatggtgttattgggacacagacacactgatttctggatatawtatctatgtcttctttcacctaccatggcagagctgaatagttgtaatggagatggcatggcctgaaaaacctaatatatttactatctggccccttagagaaaaaaaaaaattgctgacctctggcatataggaataccaacttcttatcatttattttatgtaatctgacctctacttattttccgaccccaattcttcctacaccaatcctcaa

SEQ ID NO: 531969 - DNA, 575 bp, Homo sapiens
cagctgacctctacaaggtcattgcaagtcttgggacttaaaatttgctattataatatttaaacattacaagggtagaagagatgttatagagagggaccaagttcagtctaaactkaagtgcctgaacctgatttagattataagcctttagaaaatattatagggtatatctacataattctccttaagtgaccttttgcaaagccaagtacattcagagacctaatcaacttgtcatgctcttgcagcttatcagagaattctaacttcaatggctaaatactgggcccattgctaggggtagagatacaaataagacatgctctgacttcaaataattctaagtctggcatgggggaaatgagaaatgcttgcaacttgctatgatgcagaggtatagatgcctccttgcagaatgaataaagaggcatcacaggaaaaagagattcactcttcttggaggtgctgaggaatgctcaatggagaagatgacttttgaagtagatcttatagaaatggctatttttgtttcttctgagttaagggaaggacaatgggaattctagatagaa

SEQ ID NO: 531970 - DNA, 593 bp, Homo sapiens
ctaaagcaaatattggttacttcagtaatttatcctagaataagaattgtggtaacctttggcaggggagaagtatgaacttctttaactctcaagggcttggatgaggagatcttgggaaaggcttacatcttgacacaaagtgtggccaagtccttggcttcttatgatttttcttttcttttctttttttttttttttttgagatggagtctcgctccgtcgcccaggctggagtggagtggcgcgatctcggctcactgcaaactccgcctcctgggttcacgccattctcctgcctcagcctcccaaggagtgggactacaggcacacgccaccacgcccggctaattttttgtatttttagtagagacagggtttccttgacaccatggtcacacccggaaactgcttctgcttgcacttaatagaagcaatatatkcagtggactccaggactagcatgacagtggggagacagaaacatcatttttttttttttgtattctaatgaacactaaagattcaaaatcacagtgaggttcatcaatgacaatggtaaaacatcgtggggagaaaccaggaacattatg

SEQ ID NO: 531971 - DNA, 576 bp, Homo sapiens
aaaacatcaaagcttcctggaattgatcaacccatcttggttccttaagatttcccttccacctactgggaggcactaagctaagggtagggtaggtacatggggcaatgtttatttccggccccactctagagctaacctctgctactggatgcctgaaaccacatgcctgattgtagcctttggcttgactcaagaatcctaatgaacctctccagcacatttmtctgtgtactggagaaccagtgatgaacactattcttgaaacatcgctagaattgtccatacttcttttctgtatgacacctcttttcatttggttgttttcttttaaattttattttgctaaaattcatagtgaggtaggtttacattctcacaaaatataatacaggcaatcaagagatagtctaggagcctctcttaaggctcctattacacacagcccccaagtactgggaccccttcagaccatctcatttttaggaggtgttcccaatcactaacaatggcctgtgtcaaaatgcctccccatagtgatagccaacgtcctgagcaggtgtctatgtctcaggc

SEQ ID NO: 531972 - DNA, 576 bp, Homo sapiens
aaaacatcaaagcttcctggaattgatcaacccatcttggttccttaagatttcccttccacctactgggaggcactaagctaagggtagggtaggtacatggggcaatgtttatttccggccccactctagagctaacctctgctactggatgcctgaaaccacatgcctgattgtagcctttggcttgactcaagaatcctaatgaacctctccagcacatttctctgtgtactggagaamcagtgatgaacactattcttgaaacatcgctagaattgtccatacttcttttctgtatgacacctcttttcatttggttgttttcttttaaattttattttgctaaaattcatagtgaggtaggtttacattctcacaaaatataatacaggcaatcaagagatagtctaggagcctctcttaaggctcctattacacacagcccccaagtactgggaccccttcagaccatctcatttttaggaggtgttcccaatcactaacaatggcctgtgtcaaaatgcctccccatagtgatagccaacgtcctgagcaggtgtctatgtctcaggc

SEQ ID NO: 531973 - DNA, 619 bp, Homo sapiens
agaggcttgctgattctccatgacttattttcctctgggaggctggatcccatccagaactgcacacctcccagaaactatgctttctgactttgtgtctctgtaaatgactctttcctgattgaattgataaccaacttacgagtctaaaatcacagtatgaaataaactgaaaaaatctacagacratatgaaatttaattcaataaacatttgcatatctttttatatcaggcattatattagaagttggggtataaagacaagtggaataaaaatccaagagttcaggaaactcatgctgcagaatcataaacattcacatggcaatcaatgagacagaggcatggctaagatgcttgggaacaaagaggaggtcatgtaaggctttaggcttctgacacaagaaaggtgaccttggctgggtcttgaagggttaagcaggacctcagcagatactaaaagggaaaataatgtacatagaaaaatgaacagatacaggtagtgggcaagaaaacccgttattgtgtttagaagacaacaggaaacaccatggggttatgcatttgagcaggtaatgaatgacctgaaataggttggtaagtaacgcttggactca

SEQ ID NO: 531974 - DNA, 619 bp, Homo sapiens
agaggcttgctgattctccatgacttattttcctctgggaggctggatcccatccagaactgcacacctcccagaaactatgctttctgactttgtgtctctgtaaatgactctttcctgattgaattgataaccaacttacgagtctaaaatcacagtatgaaataaactgaaaaaatctacagacaatatgaaatttaattcaataaacatttgcatatctttttatatcaggcattatattagaagttggggtataaagacaagtggaataaaaatccaagagttcargaaactcatgctgcagaatcataaacattcacatggcaatcaatgagacagaggcatggctaagatgcttgggaacaaagaggaggtcatgtaaggctttaggcttctgacacaagaaaggtgaccttggctgggtcttgaagggttaagcaggacctcagcagatactaaaagggaaaataatgtacatagaaaaatgaacagatacaggtagtgggcaagaaaacccgttattgtgtttagaagacaacaggaaacaccatggggttatgcatttgagcaggtaatgaatgacctgaaataggttggtaagtaacgcttggactca

SEQ ID NO: 531975 - DNA, 560 bp, Homo sapiens
tttatcctgtgttagtcgtgtctcagtctacgcagtgccaagtgccttgctattgtaacagagaaagcctggaaggcaatcattcttgttagcccctaatgctagaagtggccacatacaagtcctgggtcatttttattttcaactccttacaacagaaacattaasgaggccagaaaaagggagagaaaaataaaacaaagcttttgaaatcataaaagaaaaggaacttgggttttgattgtgtttctagaaaaataaaaacaaggcatagattcatcgattctccctcaagtatttcctgtagtgcaataaagcaaccccaagtgtgacccccagaagcaggtacggtgagctgagaagctcaggggcaaggtagggagggcatctgtccccataacaatctgcagactttaaacacacagggagagccttgcagttaccctgaggcggtgggttgggtggggagggtagagtcagtgcccatgccctgtccttcacctgagggaacgtggcttctctgcggctctccgtgttttggaactcgtttgagttgttga

SEQ ID NO: 531976 - DNA, 560 bp, Homo sapiens
tttatcctgtgttagtcgtgtctcagtctacgcagtgccaagtgccttgctattgtaacagagaaagcctggaaggcaatcattcttgttagcccctaatgctagaagtggccacatacaagtcctgggtcatttttattttcaactccttacaacagaaacattaacgaggccagaaaaagggagagaaaaataaaacaaagcttttgaaatcataaaagraaaggaacttgggttttgattgtgtttctagaaaaataaaaacaaggcatagattcatcgattctccctcaagtatttcctgtagtgcaataaagcaaccccaagtgtgacccccagaagcaggtacggtgagctgagaagctcaggggcaaggtagggagggcatctgtccccataacaatctgcagactttaaacacacagggagagccttgcagttaccctgaggcggtgggttgggtggggagggtagagtcagtgcccatgccctgtccttcacctgagggaacgtggcttctctgcggctctccgtgttttggaactcgtttgagttgttga

SEQ ID NO: 531977 - DNA, 328 bp, Homo sapiens
gggaagacacgcctctccataccgagtcagaggttcaccgtgaaagagaggccgccgccctgcccctacccagccccarccccgcgtcctaaagctcctccagcacagcccgctattcttcctggctgaggagtggctccagcggagcgggctcttccacgtccttcagctcccccagtggcgccggatctaggaaaagttgtgccttttgctggaactctggggtttactggcagggggtttactggctgggggtgagtgtagatgagcgccccggctcctggagcggttgggaggcgcctggatggcttgcatatgtgcttgaccc

SEQ ID NO: 531978 - DNA, 328 bp, Homo sapiens
gggaagacacgcctctccataccgagtcagaggttcaccgtgaaagagaggccgccgccctgcccctacccagccccagccccgcgtcctaaagctcctccagcacagcccgctrttcttcctggctgaggagtggctccagcggagcgggctcttccacgtccttcagctcccccagtggcgccggatctaggaaaagttgtgccttttgctggaactctggggtttactggcagggggtttactggctgggggtgagtgtagatgagcgccccggctcctggagcggttgggaggcgcctggatggcttgcatatgtgcttgaccc

SEQ ID NO: 531979 - DNA, 328 bp, Homo sapiens
gggaagacacgcctctccataccgagtcagaggttcaccgtgaaagagaggccgccgccctgcccctacccagccccagccccgcgtcctaaagctcctccagcacagcccgctattcttcctggctgaggagtgsctccagcggagcgggctcttccacgtccttcagctcccccagtggcgccggatctaggaaaagttgtgccttttgctggaactctggggtttactggcagggggtttactggctgggggtgagtgtagatgagcgccccggctcctggagcggttgggaggcgcctggatggcttgcatatgtgcttgaccc

SEQ ID NO: 531980 - DNA, 328 bp, Homo sapiens
gggaagacacgcctctccataccgagtcagaggttcaccgtgaaagagaggccgccgccctgcccctacccagccccagccccgcgtcctaaagctcctccagcacagcccgctattcttcctggctgaggagtggytccagcggagcgggctcttccacgtccttcagctcccccagtggcgccggatctaggaaaagttgtgccttttgctggaactctggggtttactggcagggggtttactggctgggggtgagtgtagatgagcgccccggctcctggagcggttgggaggcgcctggatggcttgcatatgtgcttgaccc

SEQ ID NO: 531981 - DNA, 377 bp, Homo sapiens
ggtgaggatctattattcagctacattagaagtgactgcttaagactcaggtgtgtggtgaaatgaggcagaattttctcaatggagtgttaggagaattttctcctcataattaccatcttactatcactaaatcatagctaaactgaggaaattattcaagaagaaatagaaatgtaatcttaggaaracataaatttagacatttgtggagagcccttcataattttatggtgttctctttgagctgggattatagttgacttttcattataatatattagctgttctagactttatgcatttacgtaaagttttctttgttgtactttaagttctgtgatacatgggcagagcatgcaggtttgttacatagt

SEQ ID NO: 531982 - DNA, 487 bp, Homo sapiens
acaagtactagaccaaaaaataaaagaaaaatccccaaaccctagtgtgctacacaagaacacacaaatgttttatcttgttaatctaaattcagaaaggggaaaaacaggccaggygcagtggctcacgcctgtagccccaacactttgggaggccgaggcaggtggatcatttgaggccaggagttttagaccagcctggccaacacagcaaaaccccgtctctactaaaaaaatacaaaaattagctggacgttgtggcgggcgcctgtaatcccagctacccgaggctgagacacaagaatcacctgaacccaggaggcggcagttgcagtgagccaagactgagccactgcactctagcctgggcgacagagtgagactctatctcaaaaaataaaataaaataaaaaataagtaaataaagagaagaagcaaaaccaaagacacatttaccaatctcactttggccataccctgcaggcag

SEQ ID NO: 531983 - DNA, 254 bp, Homo sapiens
tgattctactggtttaggtagagtcatcatgtgtctgtggtcaacttctggtccactagacagctcttctgcgttttcaccaactgtatgctggggcagagaaggcttatgggccacatawcttccatcaaccaggagactagcctgctcttggtcatgttgttcacagggtttcattagcagcaggagaggaaggtctcttgaagcacaggctatgaacttgcacaacatcattgccacccaataggtcaaag

SEQ ID NO: 531984 - DNA, 632 bp, Homo sapiens
agtattcaataaaatcatagtatttgtttctcaagaaagggagtaggatttccttcccggttctataaaattattcccttttggagcactgtttccaatgatcacttttgaaaatgacttcaggtatttatgaactatcctagttaatgctatatctttaatctttgagagaagattgatttttttcttaactgaaatccttctgaaccaaatattgatcatatcaaccactatgatatttttggttaataactaagtgtttctctaataaaatataatcttctttttcatttttttttttttacaacttgtacattatctctcaagtcattatgttcgtttggaccgtgcatattttagtatgctaattaactcacctaatgccattactttatcatcttattttttatatatgcctatggtgagaaattgatagacatgacataattatcagagaatgaatatatgtagaatgatacatctcacgattgttacatgggacttctttgtgattcmgaaaatttttgcccaaaccatgaaagatcccctacttgctacaaagagataatgaccagattttatcaccaccaatttgacccagcatctgcatcttctatgtaccttctcattgt

SEQ ID NO: 531985 - DNA, 491 bp, Homo sapiens
acatcgcataggcactggttagaaatgcaaattcctgagtctgccccaaatctactgaatcagaaactctgagatcaggacccacctgtctgtgtactaacaaaccctgaaggtaattctcatacatgttccagtttgagaacagctaggctaggctgtagcagacaaatctgaccaccacaccagaacaatggcacaaaggaattacacatcaatgcatatcttggcctccatgcagcagagtgtgtgcaggtaccgtataagaatgggcctgccacaaagctcstatagaatcctctgtcctatatggtacagcctcatatcttttgcccaggtcacagtgacagagaccacagtacctaaaacgggccctgcacggggaagtagtgagcatcagcttccctctctctgcttcattagcagtttcaaaagggaaagaaaactgtaggttggaaaagagttatgtggtggaaacaggaaggatgtgaaac

SEQ ID NO: 531986 - DNA, 491 bp, Homo sapiens
acatcgcataggcactggttagaaatgcaaattcctgagtctgccccaaatctactgaatcagaaactctgagatcaggacccacctgtctgtgtactaacaaaccctgaaggtaattctcatacatgttccagtttgagaacagctaggctaggctgtagcagacaaatctgaccaccacaccagaacaatggcacaaaggaattacacatcaatgcatatcttggcctccatgcagcagagtgtgtgcaggtaccgtataagaatgggcctgccacaaagctcgtatagaatcctctgtcctatatggtacagcctcatatcttttgcccaggtcacagtgacagagaccacagtacctaaaacrggccctgcacggggaagtagtgagcatcagcttccctctctctgcttcattagcagtttcaaaagggaaagaaaactgtaggttggaaaagagttatgtggtggaaacaggaaggatgtgaaac

SEQ ID NO: 531987 - DNA, 595 bp, Homo sapiens
tgtgccccttacctcctctctgttgctagggatgcttctggcaaggtcggggggtaaagcatggtcctcagtgggcctgggtttctagatggcttcctgaccgccccataggcagattcccttgcccatgctccacatactctccaagtttaatatctgttcttcctgtcctttccactccttcctcaaccaaagtgacttccagatttcctagtgaaatggagagtgcagttgagatttgaaataaaaagcaaagagatggaaggaaattttttgcaagtggcagaaatggttttaactcagaatttgctcctcatgggccaggccattttttcttatcctgcatgtacagggatatccagttctgcttgcagcttctcaagatgtaacctctttcaaacctcagtgctggaaggctgcctcccactgtgattctagagcattcttgtcaaaggaagcactacccacactcaacatacacattgacrtactcttctgattttattttgtcactctaaactcccttgcttatggttctagaaatcagaatctttttgtcacttaatatctatttctctgctttttgctgacattc

SEQ ID NO: 531988 - DNA, 616 bp, Homo sapiens
taattaatatctaggtgaggggtcacaagcttttcctttaaagggcacacctttgcaggccatgctcaactttgctgacagagcattaaagcagccatataaagtaatatgcaaatgaatgagcattactatgttccaacaaaaccttatacacaaaaactgtaagtgaggcctgattcaattcacaggcattaagtttgccagatcttgatctagattacatctcatcatacaaagatatgttgtacatcatgcagacatgttacatatgcatcatcatacacagatacacacactygaatataaagtactatactgagtatttcaggaactgtgttctgaaagtgaaagaataatctaaataatggaaaatttccccttactctgtttcttttctattatatgattagtgataaagttatttgagccgtatcaaagataatacactttttctctgtggatattttattatctttcaaacaactagacaacaataccttatacttattgtttctatgcttataaatcagatagtttataaatattcatagatgcagactattccctacagaattatctccaaaacaataattatgcaaattactgattgtccaaa

SEQ ID NO: 531989 - DNA, 627 bp, Homo sapiens
gggtctcccctctgaggacacagctaggccatgcctggattcctcacttacaaacacaatgagacacgaggtggttggatcacttgaggtcaggagttcaasaccagcccgaccaacatggtgaaatctcatctctactaaatacaaaaacttagctgggcgtggtggcgcatgcctgtaatcccagctacttgggaggctgaggcaggagaattgcttgaaccagggaggcagaggttacagcaagctgagattgcaccattgcattccaacttgggcaacaatagcaaaactctgtctcaaaaaaaaaaaaagtatattgttttaagctactaagtttttgataatttattgtggagcaatgaataactaatacagtggctgaaaagtatagaaattgggctacagggtagaatatcaataaagactaatttcagctcatagaggagaaaaaatatctaaggtcagagctttccaaccttgaaatgggctgccctataaggtattgagttctttttacctgaacacattcaagctcatgctggctcatggcttagcagagaagagaatttgagaactgaatggggttaaacattaaaacaactctaaggtcctttcaagccccaa

SEQ ID NO: 531990 - DNA, 617 bp, Homo sapiens
tctgaggacacagctaggccatgcctggattcctcacttacaaacacaatgagacacgaggtggttggatcacttgaggtcaggagttcaagaccagcccgaccaacatggtgaaatctcatctctactaaatacaaaaacttagctgggcgtggtggcgcatgcctgtaatcccagctacttgggaggctgaggcaggagaattgcttgaaccagggaggcagaggttacagcaagctgagattgcaccattgcattccaacttgggcaacaatagcaaaactctgtctcaaaaaaaaaaaaagtatattgttttaagctactaagtttttgataatttattgtggagcaatgaataactaatacagtggctgaaaagtatagaaattgggctacagggtagaatatcaataaagactaatttcagctcatagaggagaaaaaatatctaaggtcagagctttccaaccttgaaatgggctgccctataaggtattgagttctttttacctgaacrcattcaagctcatgctggctcatggcttagcagagaagagaatttgagaactgaatggggttaaacattaaaacaactctaaggtcctttcaagccccaa

SEQ ID NO: 531991 - DNA, 652 bp, Homo sapiens
atgtacttagaaaaaatgttaaagtattagaaaatgaacctaagtagggctgctaaaatcatcctgttgctctcttagcgagtgaataacctgaaagtcaaggtcggtggctcttagcctttcggggttccttggaaaagggcctcatgaaagccacagtacatacttatgaggtcccagaaagaaattctaattacaccaggggcttatcccatatgccaaaaatatttgttgagttaaaaagaactaattaattaatagagcaaggattcttaacctgggtccaagtatctcatgaacatcctggatggtcagcaaaaattgggtatatatttacatttctggggaatctacgtagaattctcaaaagttctatggtccaaaatgattaagaaccattttgccttttgggatccctggccatcttggtggctgcttttggttagaggccatcccacatccaaggccagaatatggtggccgcaaagaagacgawaagtcactggagtccatccactctaggctccaacccattaagggtcaaaaatacaagctggggcaatccggctctgaagatgatagacaaggcaaagtgaaaccggtcatccccaccaactgcctggcctcgaggaaatctgaaatacagaactaa

SEQ ID NO: 531992 - DNA, 652 bp, Homo sapiens
atgtacttagaaaaaatgttaaagtattagaaaatgaacctaagtagggctgctaaaatcatcctgttgctctcttagcgagtgaataacctgaaagtcaaggtcggtggctcttagcctttcggggttccttggaaaagggcctcatgaaagccacagtacatacttatgaggtcccagaaagaaattctaattacaccaggggcttatcccatatgccaaaaatatttgttgagttaaaaagaactaattaattaatagagcaaggattcttaacctgggtccaagtatctcatgaacatcctggatggtcagcaaaaattgggtatatatttacatttctggggaatctacgtagaattctcaaaagttctatggtccaaaatgattaagaaccattttgccttttgggatccctggccatcttggtggctgcttttggttagaggccatcccacatccaaggccagaatatggtggccgcaaagaagacgaaaagtcactggagtccatccactctaggctccaacccattaagggtcraaaatacaagctggggcaatccggctctgaagatgatagacaaggcaaagtgaaaccggtcatccccaccaactgcctggcctcgaggaaatctgaaatacagaactaa

SEQ ID NO: 531993 - DNA, 538 bp, Homo sapiens
aagaaggcaagggctctggccctacccattccacctgggacccagaggctgtcaaaggccagtgctggaactccgatccccacctcagtaccagacctctcactcagcctcagttttctgccattttaactccatccagatcgtaccctgcatttccctcctttcagcctttccttcagctggttgctggccctggatcccttccccctagaaatcccactgatcatcacatcgcttttccataaagccttcacraatcccacgagggtttcatcgctttgcttctcctttctactgcacggtgaaccctagactgcaatgtgccgtgtagtggggatagcagggtcctagcatcctcccttctcccctgcctccccagtaggtggtgatctccttgagccccagaatatgttcatttcttcagtctataaatatgtgagtgctagctatgggctcattgatctcctgaggtatgaaaggagaactatattattccatttaattaaacacctatttctgctgcggagaagcctggatg

SEQ ID NO: 531994 - DNA, 378 bp, Homo sapiens
ttttgcctgtccaataacagatactttcaagcattaaaaaaaaaaaaaaawttctgtttaaatctcttactcaaatcactagtctggtatgatgatttcttatttctctaaataaataaaatgtcttctacctctgaataagttacctgaataatgttgggtcatacataggccagccttagacaggaatacaaccaagacagaagaaagtctaaatccttaaaagttttgaggtgatataaatcactgaagttatctcaacggccccgaggaaggccttacacagaggaacatacagcaaaacatcaacaatctttgcactcaaccatcccccaccatgtgcatgagacaaatgggtttgttacctcatatccacag

SEQ ID NO: 531995 - DNA, 612 bp, Homo sapiens
atgtaataaaagtctttctccttttttttttttttttgagatggagtttcgctcttgttgcccaggctggagtgcaaaggctygatctcggctcactgcaacctctgcctcccaggttcaagcgattctcctgtctcagcctcctgaatagctggaattacaggcatgggccaccatgcccagctaattttgtatttttagtagagacagggtttctccatgttggtcaggctggtcttgaattcctgacctcaaactatctgccagccttggcctcccaaagtgctgggattacaggcgtgagctaccgcgcccggccttttctcgtttttaacataagtctttaaatatcttgttggtctagtgtactaagtaatttaaatatattttaccatgtaaacagttcagtaaatcagatgggttttaagtagaaattacagttcagagctgagaatgatcttacagatagatcatctggcctaattggttcatatggttaaagttttaactgtggtttcaatgagccaatgtttataaaacccatttactttattctgtgacctcatactctgtttcattatgcatttgaaagtttccagatccagcagctgt

SEQ ID NO: 531996 - DNA, 612 bp, Homo sapiens
atgtaataaaagtctttctccttttttttttttttttgagatggagtttcgctcttgttgcccaggctggagtgcaaaggctcgatctcggctcactgcaacctctgcctcccaggttcaagcgattctcctgtctcagcctcctgaatagctggaattacaggcatgggccaccatgcccagctaattttgtatttttagtagagacagggtttctccatgttggtcaggctggtcttgaattcctgacctcaaactatctgccagccttggcctcccaaagtgctgggattacaggcgtgagctaccgcgcccggccttttctcgtttttaacataagtctttaaatatcttgttggtctagtgtactaagtaatttaaatatattttaccatgtaaacwgttcagtaaatcagatgggttttaagtagaaattacagttcagagctgagaatgatcttacagatagatcatctggcctaattggttcatatggttaaagttttaactgtggtttcaatgagccaatgtttataaaacccatttactttattctgtgacctcatactctgtttcattatgcatttgaaagtttccagatccagcagctgt

SEQ ID NO: 531997 - DNA, 612 bp, Homo sapiens
atgtaataaaagtctttctccttttttttttttttttgagatggagtttcgctcttgttgcccaggctggagtgcaaaggctcgatctcggctcactgcaacctctgcctcccaggttcaagcgattctcctgtctcagcctcctgaatagctggaattacaggcatgggccaccatgcccagctaattttgtatttttagtagagacagggtttctccatgttggtcaggctggtcttgaattcctgacctcaaactatctgccagccttggcctcccaaagtgctgggattacaggcgtgagctaccgcgcccggccttttctcgtttttaacataagtctttaaatatcttgttggtctagtgtactaagtaatttaaatatattttaccatgtaaacagttcagtaaatcagatgggttttaagtagaaattacagttcagagctgagaatgatcttacagatagatcatctggcctaattggttcatatggttaaagttttaactgtggtttcaatgakccaatgtttataaaacccatttactttattctgtgacctcatactctgtttcattatgcatttgaaagtttccagatccagcagctgt

SEQ ID NO: 531998 - DNA, 587 bp, Homo sapiens
acagcctcggctcagcaaggaaggacattgccatcatgacaaaaagctgcagaaactcaacatcaggtgcatgtcatctcaaccttagaaaaccacctaaaactcagtcatgctgcttaaacgctttttygatgagaatctgaccgagcactgacagcgttaaggaatgctttcagcttcctgcctatgtgggcaagtttggaattttattctgactctccctcaataaaaggggcaaaattagagctcatccccaacatacctttgttccaggcagacatcgggggagaatctccaatctgaaaatttagagataggctccttttgtatgttttgtgtttttgtaacaccctatatgaagactgtgtgcaaaataaattatgttctttcacacatgtgtgctcatttgcgcttcatacaaactgtgaaataaatagaaaacatgcccttatggccattttaagtggaaactgaggctcagcaaagtgagtgacttgcctaagatcactggctggtgtgttctggaacgcacatgaatcaggcttcctgatgttcaagcatacagaactcacttgttccttcacagt

SEQ ID NO: 531999 - DNA, 267 bp, Homo sapiens
tcagccttgactacagtaggttttcagtctttcttagggcaggagatcmccaaaacgagggtttcagcgaggatttcagaggtgcaagctcttctgattgtggctggggacagcacctggaggcccaagagagtcagacaagagacagagagcccttggagggatcccacatggccagtggaagtcccaacctcatcacagggcacacaataagttagtagcccccagatagcctagagcacaaaatggggtacagaaaatgatcag

SEQ ID NO: 532000 - DNA, 593 bp, Homo sapiens
atgactattccttcctaactagaagtttattctctgcaaaactgaaccaaagaagctctggactgagggacaccaggcatggtaaaaggtgagtggagtgagatgcttgattgaaaaaaagaggggtcagtgaaagtctgcacaccagccaggaagatcccaaccccttgcttctccactcctgctctcagaatgccagcagtcagaattacctctctggagagactgatccacaaataatggcatttagggatttcccccaagaaagatagctcatcctctaatcacctaagtcaagtaccagctaacaagtcccttctttgtacacagtttttaattatatttgatacctcctttgtaggtttttgagccttggagtttaatattttgtgtgcacccactttaagaaaaagaagagtccacaaaagtgaaacttgagttttattagctttataatgaatcrgcctctgctcccttgcaaatatggacaatcaaattttcattagaccattaagacactcagagaaaaatggaaacaatgcaagaaacagatgaaaatgctgaaagttaattatatcataaatatcttaaaa

SEQ ID NO: 532001 - DNA, 494 bp, Homo sapiens
cctaactgctcctttcccaaggatttggctcctatgtcacctcctttgtgaacattccatgacwtcataagcaaaactgcactctgtgtgtgtgtgtgtgtgtgtgtgtgtgtgtgtgtgtgtgtgcgcgcactcagggaatagaattgagtacatactctgggaaagtgagttgcttggtttgctggtacaaatgggacatgcaggggaatcatggggaactaggttgggaaagtagcttgggctggatcatggaggctgctggtctaccagcggctcctgaggcaaggaggtgtttccaagacaaaatcttgccacagggtctaagaaggaggaggacaaggagaataacagcagagagatttgaagaaagctattgcaatcagccaggtgggagataatgagatactgaataggactcaccatcaagagaatggaggagaagggccagacttagtgactgagtgtcagagtaggtgagtgaaaaggagaat

SEQ ID NO: 532002 - DNA, 615 bp, Homo sapiens
cttttatctaagcctcctggcatttgtgtagcttgaacagtcatgaataaaagagcccagctcctctagagtcagtccctgaggcgggccaagaggcttgggattgccttccggtccycagttttgatttcctcctgcatatggttgagctggagacaaccctcccatggtggggtccatggttttcaggggagctttgagggctggccacctggctgattacctctggctggttaggaatgaaactcagggcttttaaaaagataccataaaatatttgctcctgttgtatactgttgcattagatgtggtctaacttaaaggtatcccccagccccttctattttaaattgtggcagagaaaggtaacataattgtctgttggccctggacactgtcctcttagtgctcaaacatctttcagagattggggttatctgggctttgtgaaaggaggtttttgcacagctcattcaacattgttcagggcagtaacacatcactgaacaaattgcccccttgcatatgctaatcccacacttaaaagaactcattgtaacatgttctgatgctttagcctgaggggagatgggaattgaagagatgtcagatcat

SEQ ID NO: 532003 - DNA, 619 bp, Homo sapiens
tttaagtgtctttacattctgcactttaacaatacaagtaaaactcttaatagagcttactatgtgaaagaaataattgcacataaktatatattacatattaaatatatgtattatatattatatattatatatgtgtgtatatgtatatatacatgtgtatacacagtatatatgtgtgtgtgtatatatatatatataaacacatacatatacacatatattggctcaattatccacacataagctctaagaggtagaaactattataatattcattttagaaaaggaagatgtctaagagaggataaatcacctgctctgatagtactaaagaagtagtggaggcagcctggcactaaagctcatgctcgtaatactgtgctatgctgctggcctttttccttttatcatggtctggaacattcctgtcttgcgactgtgttgataagggcaatatccaacaccatagcgtttgttaggggttacggggaagtaacttatctagtagaaatcaaatccaatgaaatctacattttaaaattaagaacaacaaaatcaaagatcttgtctactaaagcatcttctccaaaatgtagtgtcttcatactcattgcac

SEQ ID NO: 532004 - DNA, 619 bp, Homo sapiens
tttaagtgtctttacattctgcactttaacaatacaagtaaaactcttaatagagcttactatgtgaaagaaataattgcacataagtatatattacatattaaatatatgtattatatattatatattatatatgtgtgtatatgtatatatacatgtgtatacacagtatatatgtgtgtgtgtatatatatatatataaacacatacatatacacatatattggctcaattatccacacataagctctaagaggtagaaactattataatattcattttagaaaaggaagatgtctaagagaggataaatcacctgctctgatagtactaaagaagtagtggaggcagcctggcactaaagctcatgctsgtaatactgtgctatgctgctggcctttttccttttatcatggtctggaacattcctgtcttgcgactgtgttgataagggcaatatccaacaccatagcgtttgttaggggttacggggaagtaacttatctagtagaaatcaaatccaatgaaatctacattttaaaattaagaacaacaaaatcaaagatcttgtctactaaagcatcttctccaaaatgtagtgtcttcatactcattgcac

SEQ ID NO: 532005 - DNA, 619 bp, Homo sapiens
tttaagtgtctttacattctgcactttaacaatacaagtaaaactcttaatagagcttactatgtgaaagaaataattgcacataagtatatattacatattaaatatatgtattatatattatatattatatatgtgtgtatatgtatatatacatgtgtatacacagtatatatgtgtgtgtgtatatatatatatataaacacatacatatacacatatattggctcaattatccacacataagctctaagaggtagaaactattataatattcattttagaaaaggaagatgtctaagagaggataaatcacctgctctgatagtactaaagaagtagtggaggcagcctggcactaaagctcatgctcktaatactgtgctatgctgctggcctttttccttttatcatggtctggaacattcctgtcttgcgactgtgttgataagggcaatatccaacaccatagcgtttgttaggggttacggggaagtaacttatctagtagaaatcaaatccaatgaaatctacattttaaaattaagaacaacaaaatcaaagatcttgtctactaaagcatcttctccaaaatgtagtgtcttcatactcattgcac

SEQ ID NO: 532006 - DNA, 579 bp, Homo sapiens
aaagcagtagagttttcctatgcattggagttaagtctgtatgtgaaaaagctctggagattgatgttggtgatagctatacaataatgagagtgtatttaatcctacagaattgtacacttgaaaactgttaaagttgtaaatttgttgtcatatattttaccaaaataaaacaaagaaaaacgtatttgaattttgctaattcctgataatatggcttcataagcaagaataccataagacaacatagtattaaattatgcacatacaaattgtctcaacaacatatcatccaggctctcacactgtttggaaactaatagtactggaaataaatcaaccattacatagctcgccagaggaaatgactgggaaagtgatggagctgtcacacttgctgcatgggtgggagccctaggccctctgtcaagatcatgctgccctcctggatcaytttcatgcctgttgcccatgtgccatccctagtttcaaatggctgaacaaataattagttttcccaacacacgaatggggtatgcaatcattctcctgcaacaaattctaatcatcgccattcag

SEQ ID NO: 532007 - DNA, 478 bp, Homo sapiens
attgatcaggttacaagatgtcagtaggtcacagtcaaaattctgaagatttattgttgraagacaaaaatagtgagagacagtgagtccttctgggattaatactggtgccatttgacaaaaaaataatatctaagaaaacagtgaaaattaatggaatacattgaatggccttcacagagacttctcaggttctcaccccatccgtatacgagctaggccttatcccttacaagagcagtcccagtatttcttggtgtgttgctcatgttcataaatatttttgcatattcctttgctccagtcacttactaagacagacagaaggctcccaaatctgaaaccaagcctccagtttccaaaggagccgagatttcctaatagtctaattgtgctcagctcattttgcctctgtccaaaagtgggaagaatggttctctccatttctagtcataattctgtcccatggcacaaagca

SEQ ID NO: 532008 - DNA, 478 bp, Homo sapiens
attgatcaggttacaagatgtcagtaggtcacagtcaaaattctgaagatttattgttgaaagacaaaaatagtgagagacagtgagtccttctgggattaatactggtgccatttgacaaaaaaataatatctaagaaaacagtgaaaattaatggaatacattgaatggccttcacagagacttctcaggttctcaccccatccgtatacgagctaggccttatcccttacaagagcagtcccagtatttcttggtgtgttkctcatgttcataaatatttttgcatattcctttgctccagtcacttactaagacagacagaaggctcccaaatctgaaaccaagcctccagtttccaaaggagccgagatttcctaatagtctaattgtgctcagctcattttgcctctgtccaaaagtgggaagaatggttctctccatttctagtcataattctgtcccatggcacaaagca

SEQ ID NO: 532009 - DNA, 440 bp, Homo sapiens
ttttcaatattttaataattttaattataaatgaayatatatactttcatattataaaaataaaatataaaagcataaatattatatatatagaatatgtatatagagaaattcctgaaagcacagtgttatattttatagaataatagtagaattatgagaaaaacactttctctctttgtgcttttctgtattttagacattttctacaatgcttatgtattatttaaaggtaattgctaggttgtggtaggaaaaacgaccctccaaattaaaataaaaaattgatattaaaaataaaatacaattaaacaaatcattttgtaatcaaatgtaaacaaatcattcaacaggaagcagggcatgaaagtttggaaaatctgcagcccgaagatgtgatagaaaataaaattccattttctgaagataaattcaagcca

SEQ ID NO: 532010 - DNA, 440 bp, Homo sapiens
ttttcaatattttaataattttaattataaatgaacatatatactttcatattataaaaataaaatataaaagcataaatattatatatatagaatatgtatatagagaaattcctgaaagcacagtgttatattttatagaataatagtagaattatgagaaaaayactttctctctttgtgcttttctgtattttagacattttctacaatgcttatgtattatttaaaggtaattgctaggttgtggtaggaaaaacgaccctccaaattaaaataaaaaattgatattaaaaataaaatacaattaaacaaatcattttgtaatcaaatgtaaacaaatcattcaacaggaagcagggcatgaaagtttggaaaatctgcagcccgaagatgtgatagaaaataaaattccattttctgaagataaattcaagcca

SEQ ID NO: 532011 - DNA, 440 bp, Homo sapiens
ttttcaatattttaataattttaattataaatgaacatatatactttcatattataaaaataaaatataaaagcataaatattatatatatagaatatgtatatagagaaattcctgaaagcacagtgttatattttatagaataatagtagaattatgagaaaaacactttctctctttgtgcttttctgtrttttagacattttctacaatgcttatgtattatttaaaggtaattgctaggttgtggtaggaaaaacgaccctccaaattaaaataaaaaattgatattaaaaataaaatacaattaaacaaatcattttgtaatcaaatgtaaacaaatcattcaacaggaagcagggcatgaaagtttggaaaatctgcagcccgaagatgtgatagaaaataaaattccattttctgaagataaattcaagcca

SEQ ID NO: 532012 - DNA, 440 bp, Homo sapiens
ttttcaatattttaataattttaattataaatgaacatatatactttcatattataaaaataaaatataaaagcataaatattatatatatagaatatgtatatagagaaattcctgaaagcacagtgttatattttatagaataatagtagaattatgagaaaaacactttctctctttgtgcttttctgtattttagacattttctacaatgcttatgtattatttaaaggtaattgctaggttgtggtaggaaaaacgaccctccaaattaaaataaaaaattgatattaaaaataaaatacaattaaacaaatcattttgtaatcaaatgtaaacaaatcattcaacaggawgcagggcatgaaagtttggaaaatctgcagcccgaagatgtgatagaaaataaaattccattttctgaagataaattcaagcca

SEQ ID NO: 532013 - DNA, 459 bp, Homo sapiens
gtctgttgaactggctgttctctagaggggctgcataagctgatattccagaacttcactgataacctgggaaatgttatctccttcttatattcatgaccttatttcctgggggccattttctcttctttcttggtggagcatgtggaaatttgagagtattgctccatggaattctagctttcaggattgatactgagaagtcatggtctattctggctcttacgcttttgtaggtgactctttttttcccctttcttctctctctggaagctgtagtgtactcttctgtctcttctattctgagcttctatggtagcatcataaaagttgttattatagcatcactgggcccttttaatctgaaaataattccggctattagtttgcaattattatttattaatcactcamctccaacctttctttatttcaagaactattatgagtcagatggtg

SEQ ID NO: 532014 - DNA, 465 bp, Homo sapiens
atgctcctctataactccaaacacataatccccctcaatccatcacctcaggcaaccaatactctgaattccacatttatcactcccttcttttccatgttatgcactatatatatatatatatatatgcctgtgtatgtgtgattttttaacttaaaaaaggtaataatgttgtatgtaatcatttggacattttttcagttaacattttattgtagttattgataygttttgatatacttcattttagtttattatttcaattttgtctcattttctatacctttcagtaataattgtctaccctttttcccactatttttaaaacaaacacttcagcacacatcacattcattgaatttcactcctcaaatacgtctgtcatgttggcattatcattctagacttttaattctgtgttagtgctttctcttttctttgctcttagcaatatttataacagtt

SEQ ID NO: 532015 - DNA, 534 bp, Homo sapiens
ttttctcataggggtaggaaccctattgtgaactgagtatgcaagggatctaggttgcatgctccctatgagaatctaactaatgcctgatgatctgaagtggaacagtttcatccccaaaycacccgccgaccctccactaccaccatccatggaaaaattgtcttccatgaaactggtccctggtgccaaaaaggttggagaccgctggttgagagtcagtttcaaaagctaccttatagcctttccttggggtctcttgctttaaaaagtagattccatagagtgttactgctaggatatagtccatttatacatatttccatatttcatgaggacttaaaatctttttgtgaggggcagagggagacagggtatcactctgtcaccaggctggagtgcagtggtaggatcatagcttactgtagcctccaactcctgggttcaggtgatcttcctaccccagcctttgaagtagctagggccacagatatgtgacaccacacccagctagtttttgtatttttgtagaga

SEQ ID NO: 532016 - DNA, 534 bp, Homo sapiens
ttttctcataggggtaggaaccctattgtgaactgagtatgcaagggatctaggttgcatgctccctatgagaatctaactaatgcctgatgatctgaagtggaacagtttcatccccaaatcacccgccgaccctccactaccaccatccatggaaaaattgtcttccatgaaactggtccctggtgccaaaaaggttggagaccgctgrttgagagtcagtttcaaaagctaccttatagcctttccttggggtctcttgctttaaaaagtagattccatagagtgttactgctaggatatagtccatttatacatatttccatatttcatgaggacttaaaatctttttgtgaggggcagagggagacagggtatcactctgtcaccaggctggagtgcagtggtaggatcatagcttactgtagcctccaactcctgggttcaggtgatcttcctaccccagcctttgaagtagctagggccacagatatgtgacaccacacccagctagtttttgtatttttgtagaga

SEQ ID NO: 532017 - DNA, 534 bp, Homo sapiens
ttttctcataggggtaggaaccctattgtgaactgagtatgcaagggatctaggttgcatgctccctatgagaatctaactaatgcctgatgatctgaagtggaacagtttcatccccaaatcacccgccgaccctccactaccaccatccatggaaaaattgtcttccatgaaactggtccctggtgccaaaaaggttggagaccgctggttgagagtcagtttcaaaagctaccttatagcctttccttggggtctcttgctttaaaaagtagattccatagagtgttactgctaggatatagtccatttatacatatttccatatttcatgaggacttaaaatctttttgtgaggggcagagggagacagggtatcactctgtcaccaggctggagtgcagtggtaggatcatakcttactgtagcctccaactcctgggttcaggtgatcttcctaccccagcctttgaagtagctagggccacagatatgtgacaccacacccagctagtttttgtatttttgtagaga

SEQ ID NO: 532018 - DNA, 534 bp, Homo sapiens
ttttctcataggggtaggaaccctattgtgaactgagtatgcaagggatctaggttgcatgctccctatgagaatctaactaatgcctgatgatctgaagtggaacagtttcatccccaaatcacccgccgaccctccactaccaccatccatggaaaaattgtcttccatgaaactggtccctggtgccaaaaaggttggagaccgctggttgagagtcagtttcaaaagctaccttatagcctttccttggggtctcttgctttaaaaagtagattccatagagtgttactgctaggatatagtccatttatacatatttccatatttcatgaggacttaaaatctttttgtgaggggcagagggagacagggtatcactctgtcaccaggctggagtgcagtggtaggatcatagcttactgtagcctcyaactcctgggttcaggtgatcttcctaccccagcctttgaagtagctagggccacagatatgtgacaccacacccagctagtttttgtatttttgtagaga

SEQ ID NO: 532019 - DNA, 671 bp, Homo sapiens
ctgtccttatccagcttgtgaatactcatwtggagtcccctccctcaactatttgcccacactaaaacctctttccacattccctaatttgttctttattttctctattctttgatcttagatcaatgaatatcaacctatcttcttttctaatatacacatgtaatgcatttctctctaagaaatctcttagcagtaacccacaaatttcatatgttgttttatttatcattcaattagaaatacttttaaaatttccttgtgatttctttggcacagtggctatttagaaatacgttgtctgttttccaaacatttggggaatttttaggatatgttaatgttactaattttaaaatcaattcatgacatgatacaaaagcagcaaacaaaaatcagttgcagttatttacacaaatagcaatgtatccgaaaaaagaattcaggaaaacgatctcacttatggtagtatagaaaaaaataaagtacttagcaataaatttaactaatgaggtgaacgatcttcctgtgctaaccaaagttatatgcaattcaatacaatccctatcaaaatttcaatgatatattttacagaaatagaagcagcaattcctaaatttgtattcaaccaaaaaaggcctcaaatagccaaaccaatccttagaaagaat

SEQ ID NO: 532020 - DNA, 671 bp, Homo sapiens
ctgtccttatccagcttgtgaatactcatatggagtcccctccctcaactatttgcccacactaaaacctctttccacattccctaatttgttctttattttctctattctttgatcttagatcaatgaatatcaacctatcttcttttctaatatacacatgtaatgcatttctctctaagaaatctcttagcartaacccacaaatttcatatgttgttttatttatcattcaattagaaatacttttaaaatttccttgtgatttctttggcacagtggctatttagaaatacgttgtctgttttccaaacatttggggaatttttaggatatgttaatgttactaattttaaaatcaattcatgacatgatacaaaagcagcaaacaaaaatcagttgcagttatttacacaaatagcaatgtatccgaaaaaagaattcaggaaaacgatctcacttatggtagtatagaaaaaaataaagtacttagcaataaatttaactaatgaggtgaacgatcttcctgtgctaaccaaagttatatgcaattcaatacaatccctatcaaaatttcaatgatatattttacagaaatagaagcagcaattcctaaatttgtattcaaccaaaaaaggcctcaaatagccaaaccaatccttagaaagaat

SEQ ID NO: 532021 - DNA, 671 bp, Homo sapiens
ctgtccttatccagcttgtgaatactcatatggagtcccctccctcaactatttgcccacactaaaacctctttccacattccctaatttgttctttattttctctattctttgatcttagatcaatgaatatcaacctatcttcttttctaatatacacatgtaatgcatttctctctaagaaatctcttagcagtaacccacaaatttcatatgttgttttatttatcattcaattagaaatacttttaaaatttccttgtgatttctttggcacagtggctatttagaaatacgttgtctgttttccaaacatttggggaatttttaggatatgttaatgttactaattttaaaatcaattcatgacatgatacaaaagcagcaaacaaaaatcagttgcagttatttacacaaatagcaatgtatccraaaaaagaattcaggaaaacgatctcacttatggtagtatagaaaaaaataaagtacttagcaataaatttaactaatgaggtgaacgatcttcctgtgctaaccaaagttatatgcaattcaatacaatccctatcaaaatttcaatgatatattttacagaaatagaagcagcaattcctaaatttgtattcaaccaaaaaaggcctcaaatagccaaaccaatccttagaaagaat

SEQ ID NO: 532022 - DNA, 549 bp, Homo sapiens
gccttcatgcctacttcatttcaaattagccgctggaatttcttaacaggcatataaatgttatttatatgaataacatttagataaacgtgcatggggtaagggggtatacagtgggaaagggaagggattggattttcaaagtacattttaaggctatattttaagacaatggaacaaaaggggtaaaaagttttctgcagtttatgtcaaggttacagattgagactgggaagaaaataggaaaggaaaaagttttaaaatgtattttaaagctaaactactcataacaggtatagataaaaattctcaaacatggaacwtaagttgtttttaaaaataattaagtgaaaatgaaatttatggttcaacttctaggaaaatggagaagaacttctctttcctattcctccttttaagtacaactaaaacctctggatgttatgtaaaacaaacataagaagactttggaagatggagagaaggcagactggctggggacttcaggatccaaaaaaatgacgtggtaaggtgttcccaggatttttt

SEQ ID NO: 532023 - DNA, 618 bp, Homo sapiens
tcgctggactatacacaggtgatttgtagatatggggatctctactcaaatactctcatgatttccttggctagagcatcattttatttccacttattggaagagaccttagagaccagttagttcatttatagataaattagttgattctgtcattcaacccttatatattgagcgtctcctatatgcgaatcactgttctaagtgccgagacacagaggtgtccaaaacaaatatggcccctctccatatggaatttctattctagagaagaatctgacccagaagggggaagtgactgtcccaagtctacacaaccacagaagggatattctgggaataaatcacggctaaamccccctgctgctccaggcagttctccttctacagtgctctattgtgctgttttaataatctttcaactgggaagaactcccatttcaggaattaagccgtggacaaatcttttaattatccttgaaatcatcctaataagaaatccaaggaggaagtcttacagggtgcctcacccacttttctcatcactggaactttttagacattttattattttcttcctaaaccagagtacaggcacacaagttgagtggtgtggtg

SEQ ID NO: 532024 - DNA, 618 bp, Homo sapiens
tcgctggactatacacaggtgatttgtagatatggggatctctactcaaatactctcatgatttccttggctagagcatcattttatttccacttattggaagagaccttagagaccagttagttcatttatagataaattagttgattctgtcattcaacccttatatattgagcgtctcctatatgcgaatcactgttctaagtgccgagacacagaggtgtccaaaacaaatatggcccctctccatatggaatttctattctagagaagaatctgacccagaagggggaagtgactgtcccaagtctacacaaccacagaagggatattctgggaataaatcacggctaaacccccctgctgctccaggcagttctccttctacagtgctctattgtgctgttttaataatctttcaactgggaagaactcccatttcaggaattaagcygtggacaaatcttttaattatccttgaaatcatcctaataagaaatccaaggaggaagtcttacagggtgcctcacccacttttctcatcactggaactttttagacattttattattttcttcctaaaccagagtacaggcacacaagttgagtggtgtggtg

SEQ ID NO: 532025 - DNA, 549 bp, Homo sapiens
aacaatactgggcagcctttttttttttttttttaattgcaacaatgcaaaagccaagaaagtataagggtcacaagtctaaacaatgaattcttcaacagggaaaacagctagcttgaaaacttgctgaaaaacacaacttgtgtttatggcatttagtaccttcaaataattggctttgcagatattggataccccattaaatctgacagtctcaaatttttcatctcttcaatcactagtcaagaaaaatataaaaacaacaaatacttccatatggagcatttttcagagttttctaacccagtcttatttttctagtcagtaaacatttgtaaaaatactgtttcactaatacttactgttaactgtcttgagagaaaagaaaaatatgagagaactattgtttggggaagttcaagtgatctttcaatatcattactaacttcttccactttttccaraatttgaatattaacgctaaaggtgtaagacttcagatttcaaattaatctttctatattttttaaatttacagaatattatata

SEQ ID NO: 532026 - DNA, 604 bp, Homo sapiens
tcttttctctctgccttttccccaagggccaggacccctggatctctgggcagagcagacgcaggcccctataatagccctcatgctagaaaggagccggagcctgtgtataaggccagcgcagcctactctggacagtgcagggttcccactctcccaactccccatctgcttgcctccagacccacattcacacacgagccactgggttggaggagcatctgtgagatgaaacaccattctttcctcaatgtctcagctrtctaactgtgtgtgtaatcaggccaggtcctccctgctgggcagaaaccatgggagttaagagattgccaacatttattagaggaagctgacgtgtaacttctctgaggcaaaatttagccctcctttgaacaggaatttgactcagtgaaccttgtacacactcgcactgagtctgctgctgatgatactgtgcaccccactgtctgggttttaatgtcaggctgttcttttaggtatggcggcttttccctgggtgtcagtaatactcaagcacttcctccgagtcaagaagttaatgatgccatcaaacaaatgaagaaacacctaaagctggccaagg

SEQ ID NO: 532027 - DNA, 643 bp, Homo sapiens
tgatacattaagacatgaggatgccagtaagacacrcaacagaaactaggtaccctggacagcagtggggttaagtggccatcttaggcctcctacagaaggggaagatggtagacgaaggaggtcaggctccatggatggggcatgggtgtcagaggacacttaggaagcagtgctgctattgaaggagaaagaccagaggctagccaccataaaggactgtctactgagaagtatccaaaatatttagggagaaatgttttgggtgggttgaagttgctcagaggcaggggcttagaaagaatgaccttggcaaagacgggttcccggtgtatatatccaccgtgtgccagcattgcctgcgaatgactgggatccattccacaccacccattttcagcccttccccttccattgcttcatattccagctccaatagggcaggggaagcgtcggggggagggcaatttgtactaaatgaaccagttatctcttattaggcttaatggatgtctcattgcctgagtcacggggattggaagatccctgcttccaatgagtagcctggttcaggagacctgttcagaaaaaagaagagtgttagcattcagcaactctgcgcagaggcgttgagatggggagt

SEQ ID NO: 532028 - DNA, 643 bp, Homo sapiens
tgatacattaagacatgaggatgccagtaagacacgcaacagaaactaggtaccctggacagcagtggggttaagtggccatcttaggcctcctacagaaggggaagatggtagacgaaggaggtcaggctccatggatggggcatgggtgtcagaggacacttaggaagcagtgctgctattgaaggagaaagaccagaggctagccaccataaaggactgtctactgagaagtatccaaaatatttagggagaaatgttttgggtgggttgaagttgctcagaggcaggggcttagaaagaatgaccttggcaaagacgggttcccggtgtatatatccaccgtgtgccagcattgcctgcgaatgactgggatccattccacaccacccattttcagcccttccccttccattgcttcatattccagctccaatagggcaggggaagygtcggggggagggcaatttgtactaaatgaaccagttatctcttattaggcttaatggatgtctcattgcctgagtcacggggattggaagatccctgcttccaatgagtagcctggttcaggagacctgttcagaaaaaagaagagtgttagcattcagcaactctgcgcagaggcgttgagatggggagt

SEQ ID NO: 532029 - DNA, 472 bp, Homo sapiens
tggagatttggtcttctgatcgccacttcttacccacggagactgaaattgtaattctgcttatccttatcacccaccttgagaagttatagtttcttgatctgatttcccatttctaatcctaaatctggggacttttatgaatattaatcactgtgcaatattgcaccgcagcaatgctgaaaacatgaggactgtacagtatgacttaatcacattatttaaatataaaagattcagttaggtctatgaaggagaaataatcctaaactatagccattcagcttaattgagtacagtattataggtaagtattgtttcaaggagtggagaagattatgtgaattgctctggaaaaccagtaaggcttttagctcctatggttctgcttcrtctaccagcttgctctgtttcccactgtggtatgcctgtagataaatactctgcaagaaacgtttactccaggcttttg

SEQ ID NO: 532030 - DNA, 422 bp, Homo sapiens
tcctccaacatgtctcttcccactctccccttctctccctcttcctccccacccccctcgctgccggctaggagcaggaggttatgaaaatgagctgcgtgcccaggagactgtaattatctgctaagtgtgaaagccagaatgattaattaagagataataaaaagaaaaggagggcgagaggggggcctcccggctttgctttgatgatagaacctgaggtgagccaagcaattaggggaatctttatckagagttagctataatccacaaattatcaagctccaaatgcttcaggagcagggcgcacttcactcctgcagagtgacagaccaacagacagggaaggacagcaggagcggggagcatccggctcgggggcagagagaagccagggcacaggggctgctggtggatggcca

SEQ ID NO: 532031 - DNA, 436 bp, Homo sapiens
tctttggggtgaaatctctttcgtcttgcatggctttcatttcttatcataatatttatttattaaggcctcgggtttccaattccatttaaatccaggtcagaattgcattaaaataacaaagtagaattccaggccggggagctctgacagatccctctaggaattaaagagagacagggaggcctcccgcccccgtccctgacccccagctcatcgcctggcaggtcccaaggctgtgcaggcagagactaggctgakgtactacagttctctcgggacagtttctcctcccccttgacctcttgctgtacccctcccccatcgtgtcctcaccgacaagagatttatatggacaaaaagaaaattcctcctggcaaggttttgcccaggagagtatgattctgcctattgtcccaggggctcctgaagccag

SEQ ID NO: 532032 - DNA, 443 bp, Homo sapiens
ggctcccagtggctgtcctgggcaaacccacgatgaggccagagggtaggaggaagaacagcacgtcctctgagaaaagcccaaggagtagggttgtttctcctggaaaagagaaggcttgagggaaaaaccagatacttctttctctctttgaattcttgtagaaagtacaatggcttcrtccagttgggttgagaacagagaaagtaaaccaataggaatggcactcctgcccaggatggatttaggttgaacacaaaacttcccaggagttgagggctgtgagttcttgcaaggttcccagaaccgcctctaaaaacctttggaaggtagccatcctgacagagggctatagagaggggagcccttgggaatgatgtgtgtcctactgaacacaccctcttacccaggggagcagttttgattttagaactagtggagga

SEQ ID NO: 532033 - DNA, 443 bp, Homo sapiens
ggctcccagtggctgtcctgggcaaacccacgatgaggccagagggtaggaggaagaacagcacgtcctctgagaaaagcccaaggagtagggttgtttctcctggaaaagagaaggcttgagggaaaaaccagatacttctttctctctttgaattcttgtagaaagtacaatggcttcatccagttgggttgagaacagagaaagtaaaccaataggaatggcactcctgcccaggatggatttaggttgaacacaaaacttcccaggagttgagggctgtgagttcttgcaaggttcccaraaccgcctctaaaaacctttggaaggtagccatcctgacagagggctatagagaggggagcccttgggaatgatgtgtgtcctactgaacacaccctcttacccaggggagcagttttgattttagaactagtggagga

SEQ ID NO: 532034 - DNA, 656 bp, Homo sapiens
cctttcatcctattttttagtctcagtgttctactcccaccaccccaccttctgccatcctcagccacattctgtgacctgaaaccttcatataatttgtccttcatttagtgacctcttgatgtgactagcttcaatggaatckgctccttccatcccagcatgaagcaatcctgtataacttgcacaccctcccattctaaggcctctcctctcatacccttgcccagtatcctgtgagatcctgcctctcagattcctccctcaccttttcaaacccggattgtctttcacccttccacagggcctcctcttcctgccttcctcttatttgtcccctcagccatcctcacctcaccaatcttgataattgattacaatataaatctcccttccatctcaggtctgctcctttcttcctccactctcttgtgcatctatctccagggccatgcgtatgcccctgctgctttcagctctgcttccttcatatgctgcactgttccaccaaacttcatcagtctcttcggtttatccagagaactacactcttctctgggaacttctgatgacttctgataatagatcaccaaaggatcttggttttttagagggcagggagagagccctttgaagtccttcagaatcaatctagc

SEQ ID NO: 532035 - DNA, 543 bp, Homo sapiens
cgcatttgcatggggttccacgtaagtggcgtccctggggtgatgaggctgttcatacagacagattgacctgctttagagggggtgaggctggaggcccttcctcctcccagcccaaagtggccacccagccccttctttttggctgcctgcacayccacacgccttctgcacacctggacaccttacacaccccctgcacacccactgaacacccacacacaacccctgcacacccaccgaacacccgcagaccttaccccttccacacccagcgaacacgcgcacaccttacacaccccttgcccacccaccaaacacccgcaccttacataccccttgcacacccactgaacacccacacacctccttatacctcctgcacacccaccgaacacccacagaccttacacaccccttgcacacccaccgaacacccgcacaccttacccctgcacacccaccgaacacccgcacacgtcacacaccccctgcacacccaccaaacacccacacatcttaccctccacacacccacgcacc

SEQ ID NO: 532036 - DNA, 591 bp, Homo sapiens
ctgaatatcattaaacagtccttgccaaagcatccttgaattgacagtcttgagagcctttggaggtctgctctgtgggtcacggtctctaagctcattcacttttgatttcctttttctgtttcttgaagaataatggaaaaagaagggrcaggtggaagacttccgcctaagggcaaagccagactcttgggaagagggtttcagggggagactcttaggaaagggtctctgtggaggcatcctgcctggccataggcatgggccacctctgctccccttccctctcttcctccagaaccggggttctcaaagtaagttcctgggacctgcagtgtcagcagcacctgggaacttgttagagatgcagattcccgggccccaccccagacctgctgagacggaacccttaggggtgtggcccagcactctggactcgtcttaaggtgattgagacgttcgcagcagcttgaggaccagtgcctcagaccagcctcctgagaggcccttgattctgtatgtggagtaaaagttgccagcaagtgtgagccagccagagaatagcaggctttctcaaactttggagggacc

SEQ ID NO: 532037 - DNA, 577 bp, Homo sapiens
ctggcacagcccttccaagaacagcttcatctccagcctctctctcatccctgtgccatctaggggaggagatgaccttttgtgccaaggtccaggaagccttgatgtcttacctccaaggggtgattttcagtgaaatcgtgtgctggagaggtgactatagacagggctggctacagcagagcacggcccaccatggcgtcaccttgcacagttgccagcagcttccctgacagtcaaggagacagggtggggggtgtttgtgtgcctgttgygcgtgtgcacctgtgtgtgtgcgcttaggcatgtgtgcattggaggttgtgtcgcagcttctctccttccacgtctgttctgtggatggctgatttctggacaaaggtcaccgccctcctgcaggctgtgaggccgtcgcagcccccaggcatctcagtctcaggtttaggacctgcaggcccttccctgccgctctgggaggatcccacagtgatacagtggctgtcaccaagcatacctgcctttaatgttcagaagtcctcacacctgtgctctcccccgagcctcaccactgtcctgg

SEQ ID NO: 532038 - DNA, 532 bp, Homo sapiens
tgagatgacatttcagtcagttttaagttcttactggtataaaatgtatcaattctgctttgcttctcagttccattttaactaaagcccctctccatggacacctaattcttgcaatgtgtataatcttatgaaaactaggaggaggagatttttagaaactaaaagacatttctgccatattcccaactcagagtcatatttcatatttataatctaaactgattactttctccatggctgtccctgaataaaattgtaaactgggccaaaatgtgtcttgagtcccattttcttctactttttcttttcctggtcaaaatttactatcaggaaaggaaataatataacttagcctccttgattattaaattactttgagtaaattactctgctgtggagatgcctctggtaggacaaaaatagtgctgaatttgkacttgagttgggatacaggcctggctctccaacttcacaaggcatactagtttcatgaaatcagccacatcacatgtacagagctgatattcag

SEQ ID NO: 532039 - DNA, 532 bp, Homo sapiens
tgagatgacatttcagtcagttttaagttcttactggtataaaatgtatcaattctgctttgcttctcagttccattttaactaaagcccctctccatggacacctaattcttgcaatgtgtataatcttatgaaaactaggaggaggagatttttagaaactaaaagacatttctgccatattcccaactcagagtcatatttcatatttataatctaaactgattactttctccatggctgtccctgaataaaattgtaaactgggccaaaatgtgtcttgagtcccattttcttctactttttcttttcctggtcaaaatttactatcaggaaaggaaataatataacttagcctccttgattattaaattactttgagtaaattactctgctgtggagatgcctctggtaggacaaaaatagtgctgaatttggacttgagwtgggatacaggcctggctctccaacttcacaaggcatactagtttcatgaaatcagccacatcacatgtacagagctgatattcag

SEQ ID NO: 532040 - DNA, 532 bp, Homo sapiens
tgagatgacatttcagtcagttttaagttcttactggtataaaatgtatcaattctgctttgcttctcagttccattttaactaaagcccctctccatggacacctaattcttgcaatgtgtataatcttatgaaaactaggaggaggagatttttagaaactaaaagacatttctgccatattcccaactcagagtcatatttcatatttataatctaaactgattactttctccatggctgtccctgaataaaattgtaaactgggccaaaatgtgtcttgagtcccattttcttctactttttcttttcctggtcaaaatttactatcaggaaaggaaataatataacttagcctccttgattattaaattactttgagtaaattactctgctgtggagatgcctctggtaggacaaaaatagtgctgaatttggacttgagttgrgatacaggcctggctctccaacttcacaaggcatactagtttcatgaaatcagccacatcacatgtacagagctgatattcag

SEQ ID NO: 532041 - DNA, 582 bp, Homo sapiens
tgtgtgttatgtttttctaaactggaaaagacccaaactaatagttttctcataaaaaactctttagtaggctcaaagtctaaacaaactgatataagtaattggatttattatagtgttttttaaatctcttttttctaatatgataagcctccatgcaaaatcatagaagcttactgttgctcgtgtacccaagctggaatttcttaatgcctccaattcttcagtcattttagaagctaaggcctgaagataccatcgtgcatccttttcatcgctgaccctagaatatataaagacaaagtacaaaagtaaaacaaaaaagcttcagtgcaatatatgttattttaaagcttcctaaagaaataagtggtaggaaattcaaagatagtcttaaataatttctttgaaaaggtctaccatagtatactacctgtcaacaactgggaagaggtttatggaactgttcttttatgtacatggtagagcaggtgatgtttacaaaagtccaagttactcatagctgatacaytattaaaacttcacccttgaaacacagaattaacactctttaaatctaac

SEQ ID NO: 532042 - DNA, 574 bp, Homo sapiens
attagaaccatacgttatccattcctgtatccaccatgtcacataatgccttgcacatagaatatcctccataggcacttggtaaatgaatgaataatgaacgaatagttatgaaagaaccaggagaaagaaagaggaaggagatacagaaaagaggagatagaaatggaagaagagagaaaaagacaaattgggtagagaataattaacatataaaattaataaataaaaatcagaaaatgtggtggtttgtcaagtgtaagtggcttgactgataaaaagcaatcagggatgccttgttctttgtcaatggaagcggaaatcattgccacaccctctccctgtaccctgctccttgtttatcttcctccccsaccacagaccctactgaaccatagagaaaacagaaaggcacatttcagacaaaaatctctcttgcacatgacaaatttatcttagtttccttgttcctacagccttctatacgtagatctgtagttctagactatggtggctgaaattattctgcctatttctatcacctaattctatgcacaaagatcatttgcacagt

SEQ ID NO: 532043 - DNA, 631 bp, Homo sapiens
ccccagtctggtttcttctcctccgcttttccctgattcctgtccagcatcactgattgtctccttcccagctctgcagatcccctaggtatttcctggcctrtgcattgtcttaggaacttccgttgcttcctcccttcatcattcagagctgcccaagcttctggctctaatttacatatcccatccagcagcaaagaaaaggtcttcagctacaagaaactctattcaaaggaagtaatttaaaatagcatgtttagttacatcatcgtcatcaatcattacatttagttcaaatctcactttgctaatcattcaacctcatagtgattcattctctgtcctttcctcagaattacttattagcaaaactttgctttccaaatcttattccaggcactgttcaattccggcctcttaaggaattcccatggtgcctgcctttcaccattaatcctgtgtctgaatttcctgtagctccaggatgtcaattagttaaatctggaaattcaatctgtgtttagttgctgtgagaagagaaaagacaaggcaagaaaattaggtgaaggaattaagtttctgccaaacttgaaaccagacaaaaagtaaatccttatttctcagctttgaa

SEQ ID NO: 532044 - DNA, 623 bp, Homo sapiens
cctttgaagaaaggaatggcagtatctagttttggccaatgtcatataagctgaagtcttagagtgggtcttccaaaaatgctcttcaaaagtggaagtagcattaagtgataaagctgcttaagaccttaaggatataagcatggaaaggcaacagtatcttgaattccttatattgtggaaccattacattatcccgctgcctactgccatgtgtattgtgatgtgacagaaaactccctatttgctttccaagttgctgtatatatggctaatgttttgtgttacatgcagctgaattcaatctgtaactgactaattatcaccaactaggaagttttgcaagggtgagaagcaaatgagaaagctgtatgaagctggactgtggtaggggcagcatcactagaaatggaaaagaatagtaaacagaagatacattgkgggatagaaatcacaagacaattactgtttgaatgtgtgattggaggaaaaggaaggactccaacataaatttaagtttaagcttgggtgaccaggaaaacggtgacattatttaccaactgaagataactgtaagaaaagaaagacagctcaagtgatatatacatgaaatgaaataaatg

SEQ ID NO: 532045 - DNA, 623 bp, Homo sapiens
cctttgaagaaaggaatggcagtatctagttttggccaatgtcatataagctgaagtcttagagtgggtcttccaaaaatgctcttcaaaagtggaagtagcattaagtgataaagctgcttaagaccttaaggatataagcatggaaaggcaacagtatcttgaattccttatattgtggaaccattacattatcccgctgcctactgccatgtgtattgtgatgtgacagaaaactccctatttgctttccaagttgctgtatatatggctaatgttttgtgttacatgcagctgaattcaatctgtaactgactaattatcaccaactaggaagttttgcaagggtgagaagcaaatgagaaagctgtatgaagctggactgtggtaggggcagcatcactagaaatggaaaagaatagtaaacagaagatacattgggggatagaaatcayaagacaattactgtttgaatgtgtgattggaggaaaaggaaggactccaacataaatttaagtttaagcttgggtgaccaggaaaacggtgacattatttaccaactgaagataactgtaagaaaagaaagacagctcaagtgatatatacatgaaatgaaataaatg

SEQ ID NO: 532046 - DNA, 623 bp, Homo sapiens
cctttgaagaaaggaatggcagtatctagttttggccaatgtcatataagctgaagtcttagagtgggtcttccaaaaatgctcttcaaaagtggaagtagcattaagtgataaagctgcttaagaccttaaggatataagcatggaaaggcaacagtatcttgaattccttatattgtggaaccattacattatcccgctgcctactgccatgtgtattgtgatgtgacagaaaactccctatttgctttccaagttgctgtatatatggctaatgttttgtgttacatgcagctgaattcaatctgtaactgactaattatcaccaactaggaagttttgcaagggtgagaagcaaatgagaaagctgtatgaagctggactgtggtaggggcagcatcactagaaatggaaaagaatagtaaacagaagatacattgggggatagaaatcacaagacaattactgtttgartgtgtgattggaggaaaaggaaggactccaacataaatttaagtttaagcttgggtgaccaggaaaacggtgacattatttaccaactgaagataactgtaagaaaagaaagacagctcaagtgatatatacatgaaatgaaataaatg

SEQ ID NO: 532047 - DNA, 486 bp, Homo sapiens
ctgctgtgaggtgggcaagcagagccactcaacaactcaccaaagcacacactgaaataatgaggcttggttgcagcatgctgggaagtcacagcagcagatgtgagcctagtgctatcaatgcatgagcaggcactttgtgagccagaagcccagagtgtggggacgggcttggcaggaggctccagagatagcagttaacacacacagatgtcacagggcgatatttgtgccaggtggtcgggaagcgacctcccatgccagtcaggttcctgccacccacacttggactcattgggtcttagaattgggccagtgataggacagtggccracttgtggcccacctacatgtcttttaagcttcagttaaggttagttttgttaaagtgaagcagtctcacttgtatattttaattaatggaatgtatacatatacagtttattttgtatagcagcatagatttacagaaaaatttaatggaaa

SEQ ID NO: 532048 - DNA, 601 bp, Homo sapiens
gtaggggctctggccccgtctcatctcactccagagccccaggtgagtgcaaggcagaacctctatgtttctgtctcagattcttctcattgctttgtttttctcaaaacatttcattttatcaatgatgaatactaaaattagattattttctttttgttgaaactatatgtattgattttttgtctttggagtygtcataaaacacctgtggtcaaatccaggcccttccagttaccagcaatgtgaccctctgcacgctaatcacctccctgatgactcagtttccccatctgtaaaggagaagcaatggaagtactgggcagtttaaataacataaatgttgcagaacacttggtacatggccagacatgcagtaggtattccataaaggaagctatttgtattttttgtttcaaattctattccatggtgaacgtttgtttactgtctcagatgtgatgtgagattccattttgaatagctttcaggaatgtgacacgaaattatcttccttcttccatcagctaaaaactactgtataaatgtttcaagctctgctccccctactcttaccaatgataaacatgcccctaggttt

SEQ ID NO: 532049 - DNA, 510 bp, Homo sapiens
ttttttgtatttttagtagagatggggtttcaccatgttggccaggctggtctcgaactcctgacctcaggtgatctgcccgcctcggccccccaaagtgctgggattacaggcatgagccactgtgctctcagccagggcattcttaaaatttaacctgaaaggctgattcagggaagtgggggtcrgacagccctcactgtacttctctggcgttaacgctgccttcttgccaatgcaccacaacgtttcagtcttgttgtctgaggtagtacccagagttctttgtctcctgaccaagaaaattaaggagcgtggacacaagggtgatgttggagagaaatttcaataagtgaatgaagaaagttctccacagcagagagggggcctgaaagaggattgctctttttacagattaatccaaaagcatttgtaagaaaaagcttccctcatctctgtagctgtttgtgtaacttcccttgtccgtgcagtggttgtccatgtaactct

SEQ ID NO: 532050 - DNA, 529 bp, Homo sapiens
cccagaaagcacagagaaagggaagtaaaaacacttatggtgtgcatggaatgcattttatggtatatcttagattaaaatacaggtggaaataagtgaaaagtaattaatagaagtaataaaacagaaggaggaagagaaggcggggagagaaaattgagaaaatagattttggatttttaaacaccgttttctacaaaaaatctagagctattttaatatgtggctaatcctatttctagtgcatagaaaggaggaagacacaaaaaacgaaaaggaaaacattaaaactaatagggacgactgaacgttcacagacaaggctcctactggcaagaataattatgacataagcatgcaaattattataattaattgctacatactgattttttttaaaaagactccattattaaattcaagaacraaacaaaaaagaaatgacttctgattttgctactgttatagtgactataactcttcattgggcaactgggtagctcaaagggaagatttacatttttctctt

SEQ ID NO: 532051 - DNA, 611 bp, Homo sapiens
tgctcagttaatatttactgaaatttgtaatgagcatcattcacagcagtgggcagcagggcacacagtctgccaggatccgtggcctctgggacaaggagaccagatctggagtcccactctccaggggaggaggctggttccctttctcctcacccccttmtgtggagacctcagttttactgatccaagatcagatagatgacaaaatgagtaaagctggctgagtgtgagacattagggagtggtgaggactgtagccagtgtatcgatggcatttgaattctggttttttcaagaagcattgagccgaccaatagaaaccctggcatacctaagggccaagttaggcccctggccgtgggttagtcatagtcagtgttctgtgtgatgctggctggggagtctggagactagcgtttcatcctggccctcttccagttgagtccatgggcttgggcgtcactggccttggtgtccccacctgtgctcggaaggactgggtcgggatcagctctgaggctttgtgccaggaaggtgccaggaagactgggatggacaccagcgtgacaccaggctgctctggctttaaacttgcctcaatttgatag

SEQ ID NO: 532052 - DNA, 654 bp, Homo sapiens
ggcagctggagaaataagtacctcattcctaaagtcaaacctgggtacatcacagatttagtagggaccacaccttgtcactcaaaaccaatagctgcctatagtgagtatactccatcagaaaacaactcccatggratctttctggtttgtgtctattcctgtggacactttcaggttggcagttattgagacaaattagaacttctgcgattgtagatggtcatggggtgtacacctggtactcactgtatcctttctgcaccatccattctaaattccccttaccttctgctagcacctctgcagggtttgatggtttaccaatcggagacacaggccctcatccctaaggggtctgaacccctggtccacatgtccttttcaggctgtagctgctgcacttgtccatttactattaaaattgtataggagagaaccaagaaacatcccattagagcacctggatgccaaaggcactctgacatgcctccattgtataaaagcagccctgtcttatcctaaggttcaggatcaatgactcttgctgggacgaggactcattttctcaccttctgatctcgtagcacaagcagcccaaagtgactgggtggcagcctagtttaaaatgtagtaggatccttgtcatgtcct

SEQ ID NO: 532053 - DNA, 606 bp, Homo sapiens
tctcactctgccttatgtccctgggccaaagtgtttcttctgaggcaagaatcgagttttcggcagacctgtacagattcgccactgctaacatactttggtgctgtgactcggatacatcccctaatggtaagacacctctatgcctcaccttcttcagctagaggtgtcaaaaccctgtacatggttttcttctcaccttttgctctcctgcttgctaaccaacccccaggacaattccttttgaccactgttccccactggctgatctcagttcaccctgaggggtggcttgtaggggtgggaaggacttcagagttcataccaagttgacttgaggcactaaaggccctcctggacaggaagctcatgagagtggtaatgcatccatccataaagatcttaatcmcactcatttatgcttaatgttctattattggaacactaagcatgtgggagttatttgtatcttactgctcaaggtcattgccaaggtctgatttttcacacatctgcaattcagaaaactgcagcctctggcataaatgggttaaataccctggcttcatccctggttttcgggtcctgatggaagtttgtctggac

SEQ ID NO: 532054 - DNA, 629 bp, Homo sapiens
cacagaggtagctaaggtcatgcccttctctgtacagccaactcctggcaactgaaggaggcagggataaaaaggctggtccattttggttsaatatggaacactgatgggcaatattcactccagagttcactgctgggaggactgaagcttcatcaggcctgcctcacaggtcagtttcttcctctgttcagccctactttctcctcattgcctttcacaggtgttgatcactaataaaccttttgcaccccaaactccatctcagtgtctgcttttggagaatccaaaacctgaagcagcagacaagcagtaagaataatcaaatactccaaccagcaatgggtaaaattcattgagcactaataggacccagggatttttgctgagtgctttatattcagtatatgtcttgtttcagcctaaggaaaataataaactcgtgggatagatactattattatcatcaccactttgcacataaaggaacttaaggcacagagaacttatacaatttgcctaaggtcatatttctaggaactccagagcccatgcacttaatcactaaatacattaaaaagtaaaataacttgaggtaagattatcttgaagagttttgtaagctgtga

SEQ ID NO: 532055 - DNA, 629 bp, Homo sapiens
cacagaggtagctaaggtcatgcccttctctgtacagccaactcctggcaactgaaggaggcagggataaaaaggctggtccattttggttcaatatggaacactgatgggcaataytcactccagagttcactgctgggaggactgaagcttcatcaggcctgcctcacaggtcagtttcttcctctgttcagccctactttctcctcattgcctttcacaggtgttgatcactaataaaccttttgcaccccaaactccatctcagtgtctgcttttggagaatccaaaacctgaagcagcagacaagcagtaagaataatcaaatactccaaccagcaatgggtaaaattcattgagcactaataggacccagggatttttgctgagtgctttatattcagtatatgtcttgtttcagcctaaggaaaataataaactcgtgggatagatactattattatcatcaccactttgcacataaaggaacttaaggcacagagaacttatacaatttgcctaaggtcatatttctaggaactccagagcccatgcacttaatcactaaatacattaaaaagtaaaataacttgaggtaagattatcttgaagagttttgtaagctgtga

SEQ ID NO: 532056 - DNA, 612 bp, Homo sapiens
tacaaacttggagctcccacatatcacatttcatgcaaaatttgttgaagctcagatatatagctaatattctctaatagagtggagctggcttaattcataggaatatgacagactttacttgggtaaagactctaaatgtcaatgttggtagagaaagaaggggagacagtgagggcaagagaaaggagagagacagagcatctgagagagagagagagagagagtacaagaaagacattgtaagagaaagacatgcagagagggagaggaaggggagagagagggggaagggaaaaggtatgggagggaaggaggcagagaagaaccgagagacagttgaaggaaaggaagaaaggagggagggcggacagcaaagacaaatattgcacttaagtgatttgattctttcctaacaatggttttatgacaatttttagcctgtggcctttggcaaataattttgttttactcagcttccatttcttaaggtataaaatgaggagagtaacaatacttattcctcaggatttccaggatagagtgttacgttagagtgycttagcccatttgtgttgctataaaagaaccccgaggctgggtaatttataa

SEQ ID NO: 532057 - DNA, 526 bp, Homo sapiens
  misc_feature (1)...(526): n = A,T,C or G
acatatgtttgaaacagaatgataagcgttggctctgtgtccccacccaaatctcatcttgaaatgtaataatccccatgtgctgtgggagggacctggcgggaggtgactgaatcatgagggcggttttccccacactgtcctygtgatagtgagtgagttctcatgagatctgatggtttcgtaagtgtatagtatttcccctgctggcactcattctcttcttgcctggtgccatnnnnnnnnnnnnnnnnnnnnnnnnnnnnnnnnnnnnnnnnnnnnnnnnnnnnnnnnnnnnnnnnnnnnnnnnnnnnnnnnnnnnnnnnnnnnnnnnnnnnaacctctttttctttatacactacccagtctcaggtatgtatttattagcagtgtgagaatggactaatacacagagcataacaaaatacaaattctactcgtaaaaggaggtgaaagtcctagtagaagagactgctttaaaaaaaaaaaaaaaaaaatcaggctctagtgcccttcccaagttttt

SEQ ID NO: 532058 - DNA, 307 bp, Homo sapiens
ctgcagccaaagaattacaataatactgatgaagtgtgcaagagcttctggaatcatggtagggaacagagaaattctccagcaataatcaggctattctgcctttccctcagctcttmtagtaggatcaaaataaaaatattttacaatgtaatagtaagcaaaaatatgtaaatgtgctttcttatccacttagtatcttgtacttaatctcacatagatttctaaaccatcttcaacacagtcatattaagtaactgaaaatatcataacagagacagtaaaaagtaaggcaagcttaagtgat

SEQ ID NO: 532059 - DNA, 571 bp, Homo sapiens
cttctccatggctaggattacaggagtctgtggtgggaacctgaaccactggggatctcttgcttgcttttcttccacactggggagttctttttgactctgcactactttgcgtccctctccttccatgccttagaggtttcctgtcactgctttgctaaattccagtgttctctcttaaactctgtctttgacatgtgattatctacttgctgtttttgtacttctccgtggatgagttgggtgctgggtgcctgtagtaaaccatctttgaaaaaaacgttttcaaatacataaagtacaaygcattagactaaaaaagggacccattttatggaaatatacttaccaaatcattttaaagtttgtgatagaataatgtgattcttagctaagggatgctgggcttaatacctaggtgatgggatgatttgttcagcaaaccaccatggcaaatgtttacctgtgtaacaaacctgaagatgtacccctgaacttaaaagttgaagaaaaaaaatgtgatttttttattaagttcattcaataggaagatatttcagtgagcctagta

SEQ ID NO: 532060 - DNA, 471 bp, Homo sapiens
tgagacactgacacagactctctcccaccacacacaatcactcacagactgccaggtacacagtcgcatgctgagacactgtccccaacacacacacacagaggaacacacagacactctcacatgcacactatctctcctgcacatatagacacacactagttgacacccattcacacaccaagatgcccccccccccacacacacacacagaccctcccacagacacagtatcatatgcagggtcacaaaaacatagacactgtcagatgtacagttgcatgctgagatgttgcacacacagggactcattcccacacagactgttacacacagggtcactcacacatacctgggaactgggggytcatatagcctactcccttctccccctggtctgtctcagactacctgtctgtatctctgtcccctcctccaaccaccaccaccaccacacacacataggaattt

SEQ ID NO: 532061 - DNA, 669 bp, Homo sapiens
ccatctgcacctggccagatgtccttactccctgggactctagggaactctttggcctctcagaggtggtttgtgcaaatgaaattgccctgtcatcaaccacattagccgcccccaccctgccgccaccacccatttatagctatagaaactgaggcctagagaggcagggtcgatatccccggcccccaagcgctgggcagggcatcgcatggaggcgtgcctgtcctcttgactggcgctcttgatcatcctgccacgcggtctccctttatcacagcagctcctcgaggtcagagaccctgtcctgcacagtgcttcgaaccccatcgcacctgctgcatcagtgggcacttgctgggttcggactgcatcccaggcacaatgtttggggctccctggccttccctcatgccgtctgcatagctgcgcagtgaggcaggtctcattaccatccccgtttctcagggggaagctgaggcacagagagatccgacaggttgcctcaggtcaagcagtaggaagtggcagagctgggactggaacccaggctggctgcccccagctcatgctcagatccacaagccaaagaaatgcccacagccccagcttcttgtggctccctggtgccagcaggccccrgggccattactgagaagggtgggtgca

SEQ ID NO: 532062 - DNA, 497 bp, Homo sapiens
caggggaatgacagacagactcaggagctggctgccacyctcaggcagggagcaaggagcaggtgtgtgcctcaatctctgctttttagtgtggttgcctgggaatcaataactgctgaaacatgtggaagctttagactacaaaaaaaaaaaatcccaatgggaggtttgctcatactttcattccacaaatatttattttgtacccactcagcgctaagccctctgtgctggaagttctagggtgaacagatcagacacacagccctgctcttatgaaattcactgtcttgcaaaaagtacagttaagcaatggcagtcatgttcaccagggtatttgatgtgggaagcagagtgcccttggttctaaaagtctgtgagtttaaagcgtgagagaagatatccataataaagtagtcttatccataatatataaagagttactacaaatcaataagaaagaggcagatagtcctacagaaaaaaatgagcaaaat

SEQ ID NO: 532063 - DNA, 567 bp, Homo sapiens
ctgctctctagaatcatcaaggggcatttaaaaaaatgctcatgtcagccaggcttacgtctgtaatcccaactactcaggaggcttaggagtgaggattgcttgagcctggaagatcaaggctgcagagagccactgcaccccagcctgggcaacagagcaagaccatgtcttwaaaaaaaagtgctcatgtctgcatcccacccctagacattctgcagtcaagaatcctctgtgacatagcttaagctcccccgccatggattttcaagttcaaatggtattaatgtcagctatccacaggtaaaggcagaccaaaatgttctcaggtttctggtgcaggcccttcctcctgtcagttcatcactgccttattttgaaccacttgcctccggtaagtttttatgtctcctcgtgccatcagcccagctcatcctgtttgtttctaaaagctaacagctcccatgaagtgttggggacaaggagcagagaattgcctgttctgccttgaggactcaggcagagtttggcagaactaagagacttttttagaaaacgttatgggta

SEQ ID NO: 532064 - DNA, 575 bp, Homo sapiens
gagacggggtttcaccatgttggccaggctggtcttgaactcctgacctccagtgatccacctgccttggcctcccagagtgctgagattacaggtgtgaggcaccgtgcccggaccaattcatgatctttccacagacctgcttccattctggaattttccatcttggttggaggcactgccattgctcaagccaaaatcctgacatccatccttagcttctcttcctcatcttccatactcaatcaggctgtctcctaagtagctctccaacccattcatttgtttcttgccctctgctgcttacctctcactcacacaactgccatagcctcctcctgggtctctgagcctcccggcttacccgctccaatccgggctcwctctgcagccacatggtcttgcataaagacaggtctgttcatttcactgccccacttaacatctttaaaggcatctcatggcctacagtatcagaaccaaaatttcctggtgggcagtgtggtgccgtggttaagctcatggcctgtctaggcagaccacagagttcaaatctctgctcttctgcttaccag

SEQ ID NO: 532065 - DNA, 306 bp, Homo sapiens
ttgtggatggggatggccaagaaaaggccacgcgctcctggtggcaggagyagggatcacgtccaagctggcgagtgaagacaagaccccaggcagcctagtcagggcaggccaccttacactagtctgaagtctgctttcgattacctgctaggcttcaaatgaaactgggatttgaataatatgacttctcctttcttggaagaggtcctctaacacaacaatgatcattaactccacccagttcactctctgcatccccagaaagaggcaggttctaactgacagatggaagcccagcacttc

SEQ ID NO: 532066 - DNA, 474 bp, Homo sapiens
ttctgtccctgagcagagtgctaacgtgctaacccaaacgctcggtctacgtttggtttgtttttaaatgtgttggaaacaaattataatccratattgtatttggggaaaaggaaggagagaatgacaaccgggttaagcaccccaggttgataccactgaactgcatttaagggacctaatcccagcacttacctccaccttcaaatagttactaaaaacccacagcactctgctaagtgctgaagggaacatgtgtcgagatgggatgtttgggttcacaaggagcttatgacgtaagcagagagcagagcaaacaggagtcacagcacatgaagcagcatatggggagtgttaaagaaaaagtgcagagaaagctgcagatgcaggaaacagaaggtcaccacagcttcactaaagaggtggggatggaaaaggccatgaagacacacatttgacaacaaatacatcacc

SEQ ID NO: 532067 - DNA, 450 bp, Homo sapiens
tatcagcaaagactagagaaatgttgtctcaagctgctaagacttttttcttacctgcctttgtaattgttgacatcgaacatcttctttgctcgatagtatataagtttccagggccgggcaatgttcctacctaaagtcagaagaaaggtgatcagagggactcacatgaaatgaagtcgcaattgtaaaaggaacccagaacagcccttataacaacaygaactatcctaagccccgtgttaaggctgggatttcctacgtcctgaagaaagctgtcttgttttttttgtttgtttttttttttttgagagagtctcactctgtcactgaggctggagtgcagtggcactgtgtcggctcactgcaacctccatctcttgggttcaagcaattctcctgcctcagcctcccgagtagctgggattacaggtgtccaccgccacgccc

SEQ ID NO: 532068 - DNA, 574 bp, Homo sapiens
actctgtttttcagaaaacttgtattcatctctaatcctagattaattagaaaagtgcccagttctcagggaatactgaccattaacctttatatgcaaagtgttaagttttctacaggataattaacatactgtatcatacatgaaccaaaaataattcatacattctaggccactcagatacagttgataaagtctatgcagtgatgyggttgataaagtctctgcagtggctaaaaattatagatactgaagtgaaaaaatcatttccactcttatttctataggacaagataacatagtatgaaaaatatagctcctaatacaaataagcagaagaaaaacaagacaaaaatattaccactataaaaaagaagaaaggcaaaaagtgaataccaaaacattttaatgttttcaaaaaggtattgggtttttaatatataaaacattaaggtcatagaaaatggtaataaaatagtatgaatataagagtgcaagtgtgagtcatgaaaggaaaagaaacgtaactgtggctactttaggactcagatcaaaatggcatggtaccaaatgg

SEQ ID NO: 532069 - DNA, 610 bp, Homo sapiens
atgacacgttcttgcttcatgactgtgttctctgagatgagatttgtgatgcatttttccataaatcaagggtggagcagcatgcaagcctggatatgcagacacttgacagatgcccattgactgactgagtgacacagccacatggtgttattgtggctggtgatggccagcacccagagatggtgtgacaagtctgaaaataacatgtggccaagaggagattaagtgctacgttcctagtcattctttttcatatttaagttatattagtacattcacatgcaaaaaaattcccccaaacacaaaaaggtatattcttccttaaggagggacttcctccctctttctccacaaacaccgcccagtggacatgcatgctgcaccctgatttggccactaagacacagcgyggacactgggcctcatcaggccccttggatcaaccacattcatctttttccctctcaatactcgctattataaagtatttttaaaacactggaaagtacacaggacataaagaataactgtgtactcgttacccatctaagcaaatcaatattttaccatgtttacttaagatattcctttaaataaaaaaacactt

SEQ ID NO: 532070 - DNA, 583 bp, Homo sapiens
tttaaaaataggaaaagttcacataaaatatgaatttctgacttgtctttaaaaatagggccatctgtccatatgggatgtgcacttgtgcatgaattccactgtccccagagctgcccccatgagtccccaccctcccaatcgcctgggccactccccccacttccccacctcactggaccttagagcactggagctgcaaccccttgtctacagcctgttgtcttcctttaagtcagcacatgttaaaacctacaagtcagagagagacacaaatagactaagataacgattaaagcaaaacccagagtaaaccatgacaccgcaaaggagcgtgttcccaggcgggaaccaaggctgcagcagggcctttccatgtgcactgactgctgcaaatttattgggtggacaggaaaaaaaccagggcgggttacctttacagaaaagaataatctggtatctcttaargatgtttatctgactcctgccttgggcactttcgtgctcaccagcacaaatgtccttagctgcccatcggatcctcactactcaactctcagattcttcttttaaccattctttc

SEQ ID NO: 532071 - DNA, 554 bp, Homo sapiens
caagcaaagatgctctgacatgtgccatagcacagatgaaacttgaggatgttacgctaagtgaaatacaccagccacaaaaggacaaatactgtatgactccagacagatgaggtccatagaggactcaaagtcacwgagacagaaagtagaatgggggctgccaggagttggggagatgggggagggggagtcagtgttgaatgaggacagggttttagtctgggaagaagaaaaagttctggagaaggaagacagtatagtgatggttgcacaagaaacaatgtaaatgcacttaatgccactgaactgtgcacctaagaatggttaagcggtaaatttcagattatggatattttaccacaacaaaattaaatgaattcttcattacaactaactttaaaacaataggaacaattcattttttattttggttccagaaagcgtgctctaatcaactcatttaggtagcacctgctagaacctggctctgctcgatcagatctttgcaggcctgaagctctgtccacagccaccaatcacccactgcgtgc

SEQ ID NO: 532072 - DNA, 554 bp, Homo sapiens
caagcaaagatgctctgacatgtgccatagcacagatgaaacttgaggatgttacgctaagtgaaatacaccagccacaaaaggacaaatactgtatgactccagacagatgaggtccatagaggactcaaagtcacagagacagaaagtagaatgggggctgccaggagttggggagatgggggagggggagtcagtgttgaatgaggacagggttttagtctgggaagaagaaaaagttctggagaaggaagacagtatagtgatggttgcrcaagaaacaatgtaaatgcacttaatgccactgaactgtgcacctaagaatggttaagcggtaaatttcagattatggatattttaccacaacaaaattaaatgaattcttcattacaactaactttaaaacaataggaacaattcattttttattttggttccagaaagcgtgctctaatcaactcatttaggtagcacctgctagaacctggctctgctcgatcagatctttgcaggcctgaagctctgtccacagccaccaatcacccactgcgtgc

SEQ ID NO: 532073 - DNA, 419 bp, Homo sapiens
ccgctctggagctccgtttcctaatctgaaaatgggggcgatcctgtcaccacctcccttatagggtggtgaggagggttaaatccattattatgggcaaagtccttagaacagtgcctggcatacagtatgcactcaatagatattatctctgattagtcttaataagatttctaaaaaatgagaatagagaaaatactagagaggaaattatcaaggaaataaaggatatagagggtattttaaacaaaggtacaagcactcttgtgattgggatggactgtatttacatatatcggcatgtcccatagttaagaatggcacgggcatgtrtgtgtgtgtgtgtgatttgttatctatggccatggtaaacctcagtggctggcttgagtcagcctggtccgggcctgctggtgcag

SEQ ID NO: 532074 - DNA, 551 bp, Homo sapiens
cccaagatcctagcatttctcttctgacctgcctgaagaggtggtatggctggcatccatgcgtgcgcttccatgcgtgtgattgggtcactagcacgcacacaataggaacctggtaaaagggatgattaaatgaattcacatacatgtgtttgaaatacactgtgcacacattccatttcagttcccctcaccgcctcgccttgagaccccagcagacatgacaccatcctgcaaaaacagrgttgagaactgccagcctggtgcatcaaaccttaaaaattcaaagctaaagttagaaatataaaaacatcaagagattaattctcctaccctaacttgacagaactgataaaggagggagaagtcagaagctgtacccgggaagcagtcggaccggggcggccccaaagccctctctctgcagacaccaggtggggcaggctggccctcacttcccatctctgactcccggccctgctgatgcatgaaactttatataagcgaaacctgagtccacccgctcagccctcccgctccccaaccagcag

SEQ ID NO: 532075 - DNA, 620 bp, Homo sapiens
gctgcagccctgtggatgccactttctgctctttatttctgagccaggagagatgatcatgattttgaaacttgcgatgtctttccagtattctctttgtatattttatatctttgctatgtgcttggagccaaggagttgtctcaaaacttaaatttccagagctatattgatttggattctttgtgttcgatatgagttctaaatttctcttcaaagaaacaatatgtcactatgttcaattctttgccttctacttttaaagttaacttcctcgtaaagcaacctgtttcgattacctgctccaccctgactcattccgatttcctgctctgccataacaatttttcccaccaaaccactcattccatcactctctttaaattagccagtcggaattagtatagcctgtgtggtctaaccctagccaatasgggaacgacacggcagcaggggctgtgtccgtcagggataaaaccccttcccctcccttgtccaagtatgtgctcaccattgctccatttgtaagggtgcacccttctacagaagtacattgccttgctgagaattaaaaagaaaatttgatattcgagtgctatttcttttgtggcaccgaaact

SEQ ID NO: 532076 - DNA, 620 bp, Homo sapiens
gctgcagccctgtggatgccactttctgctctttatttctgagccaggagagatgatcatgattttgaaacttgcgatgtctttccagtattctctttgtatattttatatctttgctatgtgcttggagccaaggagttgtctcaaaacttaaatttccagagctatattgatttggattctttgtgttcgatatgagttctaaatttctcttcaaagaaacaatatgtcactatgttcaattctttgccttctacttttaaagttaacttcctcgtaaagcaacctgtttcgattacctgctccaccctgactcattccgatttcctgctctgccataacaatttttcccaccaaaccactcattccatcactctctttaaattagccagtcggaattagtatagcctgtgtggtctaaccctagccaataggggaaygacacggcagcaggggctgtgtccgtcagggataaaaccccttcccctcccttgtccaagtatgtgctcaccattgctccatttgtaagggtgcacccttctacagaagtacattgccttgctgagaattaaaaagaaaatttgatattcgagtgctatttcttttgtggcaccgaaact

SEQ ID NO: 532077 - DNA, 453 bp, Homo sapiens
tttccagtccccttatttcactttcttcctctgggtgaatggctccctcctgcttcaccatctcctctccaaaatgagcctgcctctttgcatgccttcaaatcccccacaagttaacatgtggatgaaaacagtttcttcctaggtggccgggttcagtcttctcttaggtggctctgagacttgaacttgcattaaacacagctttgaagcaaagactcttgagtgggaaaggccaggaacaaaacactgcatgactgcggagctcccactcttgccccctgacttcactgtgtgtggagctgggtggcagkaggacacttcagaagcaaatctgagtggtggaggcaaacaaaggcagggccgccataaaaaaccctagacgtctgagaacacaagtatgaacagcggagtagcactcgggactgcagggacaggagctgccattctcac

SEQ ID NO: 532078 - DNA, 678 bp, Homo sapiens
ctgggaacgtgtacataaggtgatccaaatttttcactgttctgcttgtgtccatatatgactgagagtgcttcaagtattgatttttgggttacacataatttttagccaagtagctgagttcataaatacagactctttgaatgatgattgactgtatttgtagaggttacttgccaaaaaagagtgtgtttcaagcataaaaatagactatatgaggatacaactttttgggtgaagtggaatgaattaaaggagaaagaattaatgtctgacttgttcagaaactttttagatggagaaatgggtattatgtttctattacacttagattctattggatatattttttataaaggatgcaatggtttaatttaaaaatgtcatcagaatgtcagaaattacatcctttacaactatttaaaactatgaagaaaaaaattaggtattacctatatatgtgataattaatgaaaatcattttaaagagcaaaactgattacgaagcagctttgcttttgccattccactgtttaaatgttcagtttctatggaaacatgtcakcacttgcttgaatgaattcttcaactatagaaagaaaaaaacttcatttcatcccttttggcattgctgaacacttggttttgatgtataattttaaaacacctgatctccat

SEQ ID NO: 532079 - DNA, 460 bp, Homo sapiens
tacaaaaattatatgggcgtggtaatgcgtgcctgtagtcctagctactagggaggctgaagtgggaggatggcttgagctcaggaggtcgaggctgcagtgagccatgatcatgccactgaactcaagcctgggcaacagaacgagatcctgtctcaaaagaaaaaaaaaaaaaaagcacttagtccctgccaggagctgtctgttttttatgtattatcttmtccgattcttataacaactacttgaagtagagattatttcttccatcacgtagatgaaaaaactgaggctaagagagagtaaataacttttcctagggcccacaactaaaagtggggaggctggatttgaatccaggtctaattttgaggtttgtgcttttaatacaagaccaattcataacctttggtacatggaattctgggggctatcttcgcattataccattgctgctgtt

SEQ ID NO: 532080 - DNA, 625 bp, Homo sapiens
tttctcaagtattcactgaatactaccttatatacacatatacattamatttgaaaaagatttgacgatccccagataaacttcatttttgttgatcttttggaagaggtcctctgaagagaagaatatgtggttctggctcatgaatcatgtaatgaacccggcctagacgccattggacataagtctcctccactcctcttcagacatcagatgagtttcaggtgcttgtttggaaagttctctgggtaacataacatgccggtacttgtagtgctcgtcgaagtacttgtccgagtagtagatggcttgtgggccatcctgctggcacactgcaggaaatgaaatgagagagcgcgaagaggggggtgcagcaggcaacatgtccccatccggccaaggtaacgactcaccagagactaactggatcccatatctttgcggatccccacagacgcatagcagatgaagcaatcagacaggatttttatgctcagggagctagtatgagacctgtccccagtggagatgggcacgggtccaggagaggtgtttcagcactgtgctccctccccttccccaatgcctgtccacatgggagaatgtaaaggcagaaaagctaacc

SEQ ID NO: 532081 - DNA, 523 bp, Homo sapiens
gaagtgcccaacctgtagtattcaattatgtttgttaggttgatccaaaataaatattaaatttggaggggacttgttaaaccataagtgcacatttttgtgatataaaayagtgtggcatattttattaaatatatgaaacatctttagtatcatcctgatcttccatgtagatggaagaatctcacagacgtaaaagaaccctatcacaaaagaatacatactgtatgatttcacttataaaaagctccagaaacaggcaaaattctatggtgctagacttagaatagtagttacctctggggagtagaaggtgatattaggggggcttcagagattctggtgatattctatttcatgactgagccggacacttataatttgtatactttcctgtattaagttatacttaaattataaaaagcttaaaatatggagcagcttatgtattgaattttcttatatatcattgtttaagcttagaagtagtagtacatgattactttaaatatgactcaaacag

SEQ ID NO: 532082 - DNA, 438 bp, Homo sapiens
aatgcagaaaatcaaagacaaaaaaatcttgaaagaagccggagagaagaaaacatctcacctataaagaaacaataagaattactacaggaattaaatatttcacttctctgtcttctttcctgcttcctttatcaagcaggaaagaagrgagagaagtgaaatatttaacgtaatgaaagaaaaagaccaccaatctagaattctgtatacagtggatttaatcttcgcaagtgaaggagggagtgatggcaacaagatggtgaactagaagcccttggcagtcgttcctccagaaaggcagccaaaacaagaaataaccaactacatttttatgaaaataattaaaggagagtgctggagcacatcaaagctgcagcagaaaccctgtagaatacagaaacccaggatggccacatagagaacaaaaggaaacag

SEQ ID NO: 532083 - DNA, 681 bp, Homo sapiens
gattaattgaataaatatttggcttcctatgggactcagagatcctggagctccagtgttgcacaatgtaataatctccctgaacrctccctttccttactgtaaaatgctagagcatctaaagaggagatcatcaccaagatgggcagagagaaatgagcatttgaaagaagttgtagagtaagatggcagactcaaaatctaggaaatctcatattcaaaacatttgaaggctgaagcaggagaatggcatgaacccgggaggcagagcttgcagtgagccgagacactgcactccaggctgggcgacagagggagactacgccgcataaaaaacaaaaaacaaacaaacaaaaaaaacatttgaaaggaaagacaggttccttctttctgtagccaataataattttttgaaagccagataaatcaaaatcaaacatattccataaaatattccaatgattaatggaaatagtatatattcttaaatttaactaaaatgaaatatttaattgaaatttaaccagaaatcaaaaccagatcaaatctaagaagcaaaaagttgccaaagatgagatccagaaaaattaggctttttttatttcttggagaaaattgtctggatcatggtggtgacatgtattactaatctactttttataaaacagccattggaaagcg

SEQ ID NO: 532084 - DNA, 681 bp, Homo sapiens
gattaattgaataaatatttggcttcctatgggactcagagatcctggagctccagtgttgcacaatgtaataatctccctgaacgctccctttccttactgtaaaatgctagagcatctaaagaggagatcatcaccaagatgggcagagagaaatgagcatttgaaagaagttgtagagtaagatggcagactcaaaatctaggaaatctcatattcaaaacatttgaaggctgaagcaggagaatggcatgaacccgggaggcagagcttgcagtgagccgagacactgcactccaggctgggcgacagagggagactacgccgcataaaaaacaaaaaacaaacaaacaaamaaaacatttgaaaggaaagacaggttccttctttctgtagccaataataattttttgaaagccagataaatcaaaatcaaacatattccataaaatattccaatgattaatggaaatagtatatattcttaaatttaactaaaatgaaatatttaattgaaatttaaccagaaatcaaaaccagatcaaatctaagaagcaaaaagttgccaaagatgagatccagaaaaattaggctttttttatttcttggagaaaattgtctggatcatggtggtgacatgtattactaatctactttttataaaacagccattggaaagcg

SEQ ID NO: 532085 - DNA, 605 bp, Homo sapiens
ctgaaaactaaagaaggccctctgcagatctctgaggctttctttcagcgcaattttttcccgtctgggactsggccctggcaaactctatttatcttggcttatccaggctcccaactctgttttctacatctcagggatatcactgggctccagttgtgtttccattccccggtccatggcattcaaattctccagacaataaactgagacaaatataggactcaacacattttttttttctctgtcaggtatgactccaacttgtctgatgtccaatgtattgaaaactttattatattttttacagtctttttgttgttgttttacacaggaggacaaatacaattccttttactccatcttgtctggaagcagaatccatgttaaattttctgttgccccaatcatgacatgaagctatcttgtttatatttctataattaactctacaaatatccccatattatttttatgttatgtcagataactttttcatgcattattaggatgaatttcttcatattcttttgctgactagcagggctaaaaaatttttccagctatttcaagcagttggagcaatcttctttttttattctgtc

SEQ ID NO: 532086 - DNA, 605 bp, Homo sapiens
ctgaaaactaaagaaggccctctgcagatctctgaggctttctttcagcgcaattttttcccgtctgggactcggccctggcaaactctatttatcttggcttatccaggctcccaactctgttttctrcatctcagggatatcactgggctccagttgtgtttccattccccggtccatggcattcaaattctccagacaataaactgagacaaatataggactcaacacattttttttttctctgtcaggtatgactccaacttgtctgatgtccaatgtattgaaaactttattatattttttacagtctttttgttgttgttttacacaggaggacaaatacaattccttttactccatcttgtctggaagcagaatccatgttaaattttctgttgccccaatcatgacatgaagctatcttgtttatatttctataattaactctacaaatatccccatattatttttatgttatgtcagataactttttcatgcattattaggatgaatttcttcatattcttttgctgactagcagggctaaaaaatttttccagctatttcaagcagttggagcaatcttctttttttattctgtc

SEQ ID NO: 532087 - DNA, 604 bp, Homo sapiens
tgaaaactaaagaaggccctctgcagatctctgaggctttctttcagcgcaattttttcccgtctgggactcggccctggcaaactctatttatcttggcttatccaggctcccaactctgttttctacatctcakggatatcactgggctccagttgtgtttccattccccggtccatggcattcaaattctccagacaataaactgagacaaatataggactcaacacattttttttttctctgtcaggtatgactccaacttgtctgatgtccaatgtattgaaaactttattatattttttacagtctttttgttgttgttttacacaggaggacaaatacaattccttttactccatcttgtctggaagcagaatccatgttaaattttctgttgccccaatcatgacatgaagctatcttgtttatatttctataattaactctacaaatatccccatattatttttatgttatgtcagataactttttcatgcattattaggatgaatttcttcatattcttttgctgactagcagggctaaaaaatttttccagctatttcaagcagttggagcaatcttctttttttattctgtc

SEQ ID NO: 532088 - DNA, 605 bp, Homo sapiens
ctgaaaactaaagaaggccctctgcagatctctgaggctttctttcagcgcaattttttcccgtctgggactcggccctggcaaactctatttatcttggcttatccaggctcccaactctgttttctacatctcagggatatcactgggctccagttgtgtttccattccccggtccatggcattcaaattctccagacaataaactgagacaaatataggactcaacacwttttttttttctctgtcaggtatgactccaacttgtctgatgtccaatgtattgaaaactttattatattttttacagtctttttgttgttgttttacacaggaggacaaatacaattccttttactccatcttgtctggaagcagaatccatgttaaattttctgttgccccaatcatgacatgaagctatcttgtttatatttctataattaactctacaaatatccccatattatttttatgttatgtcagataactttttcatgcattattaggatgaatttcttcatattcttttgctgactagcagggctaaaaaatttttccagctatttcaagcagttggagcaatcttctttttttattctgtc

SEQ ID NO: 532089 - DNA, 605 bp, Homo sapiens
ctgaaaactaaagaaggccctctgcagatctctgaggctttctttcagcgcaattttttcccgtctgggactcggccctggcaaactctatttatcttggcttatccaggctcccaactctgttttctacatctcagggatatcactgggctccagttgtgtttccattccccggtccatggcattcaaattctccagacaataaactgagacaaatataggactcaacacattttttttttctctgtcaggtatgactccawcttgtctgatgtccaatgtattgaaaactttattatattttttacagtctttttgttgttgttttacacaggaggacaaatacaattccttttactccatcttgtctggaagcagaatccatgttaaattttctgttgccccaatcatgacatgaagctatcttgtttatatttctataattaactctacaaatatccccatattatttttatgttatgtcagataactttttcatgcattattaggatgaatttcttcatattcttttgctgactagcagggctaaaaaatttttccagctatttcaagcagttggagcaatcttctttttttattctgtc

SEQ ID NO: 532090 - DNA, 589 bp, Homo sapiens
ctggttaacaaatggtttgtcaattcctgaaactcatttcttaattcaaaacaaaagcttcagggtgtgtccaaaataaactgttacgaattgacctacttttttttttttgagacggagtttcatttttgttgcccagactggagggcaataagcatggtctcggcttactgcaacctccgcctcccgggttcaagcaattctcctgcctcagcctcccaagtagctgggatttcaggcatgcaccaccacgcccagctaatttttgtatttttagtagagasggggtttcaccatgttggccaggctggtcttgaacttctgacctcaggtgatccacctgccttggcctgacctactcttaagactcaagtgaacaaatatattaaattttgcaatatacatgaagaatccttgggacagccaagaatttttcttcaaggaaggaaaaaggagatgtaaaaaacaaatcccaacggaatccaccaagattaacagttcatatacctatgtttgactaaactacatctcagtggattactgtaacatttcctcccttcagcttccccattaattttccttccttgcc

SEQ ID NO: 532091 - DNA, 564 bp, Homo sapiens
atatttctgaagtacataaagggataaagaaaaggatgcaggctggaagtggtggctcatgcctgtagtcccagcactttgggaggccgaggagggaggatcacgaggtcaggagatcgagactgtgaaaccccgtctctactgaaaatacaaaaaactagctgggtgtggtggcacacacctgtagtccagctacttgggaggctgaggcaggagaatcacytgaacacgggaggcggaggttgcagtgagccgagatcacgccactgcactccagcctgggtgacagagagagattccatctcaaaaaaaaaaaaaaaaaaaaagaaaaggatgcaatataaatgaacatcttctacgtgttataatagctagctgtccctttagattaatttcactgatgccttttgtggtatgcaagttaacactggtaaaatttagtttgtgactcatccctagttactattggcaataataataggattaatttatatttatctagtgcttttcggtttataaagtactttctcatattctacttcatttattcagttgatagtaaca

SEQ ID NO: 532092 - DNA, 538 bp, Homo sapiens
gaatgaaataaaagcacagtgccttacatgtagtatttaggtaggtacttaatggtttgaattcttatttcttttatcatactactcaaaactgcaaaattaatataagatataatcccgtaactttagattattaaagtaaggtttgaaaatattcaacatgtgatagaaaaattttctaaaggttatcattgcttcataattctaattgctttagtccaagtccaaacattatcgaaaaggttcttcagagtctcactcaagaaaaaaaaaaaatcactctgtagttactctaagaagtaagagtatcttcctgtgcaatgttgctatattttagaatttaaaaaaaattctcatatatatcatcgatatttcaaacctgatttggtccaaagaaaaaaagtcaggttaatttttagctttgtcaaggcttagattagaaagattttacaaggaatwaaaaataaaaacttgtttctaaaataagctcatctttgtttttcaggctatttgcttaagctattttatcagcctcctt

SEQ ID NO: 532093 - DNA, 555 bp, Homo sapiens
tgggattataggagcctgccaccatgcccagctagttttttacttttagtagagatggggtttccttatgttggccaggctggtctsaagctcctaatctcaggtgatctgcccgcctcagcctcccaaagtgctgggattataggcatgagacaccgcacccagccaacaaaagttttgtttgttttgagatggagtcttgctctgttgcccaggctggagtgcagtggcagtcttggctcactgcaacctccacctccctggttcaagcaattctcctgccttggcctccccagtagctgggattacaggcctgccaccacgccttgctagttttcgtatttttagtagagatgggtttcgccttgttggccaggccggtctcgaactcctgacctcaagtgacccacttgcctcggcctctctaagagctgggattacaggcgtgagccaccaagtcccagcccttccatcaacaaatgttttgacacaggatctaattatgagacactctgttgatgaaatgtgtagatctctaaaaatcacattcaaaaa

SEQ ID NO: 532094 - DNA, 473 bp, Homo sapiens
tggccttacttcactttcacttttgaagaatatatttacttgatatagaatccttagttaacagtttctatttcttttttattgctttaagtatgcttttttttggtcttatggcttctatgatttctaataatatgtaggaaatygtctgtctcataactttttaagtatatgatctttctctctagatgctatcgatctttaaaaatttattttttatttttcagaagcttgactatgacatgcagtctttttaaaattccctttgagatttgtttgccttcttggaactttgaatttacttcaacagatataataaaattttgattatcatttcttcaatgtacttccctaacccttattcctatactctctcactctctctttctctctcttcattcatttaggaaattcaattacacacacacacacacacacacacacacacacaccacacagacataacttcttga

SEQ ID NO: 532095 - DNA, 466 bp, Homo sapiens
gcttacttctggccctgagcaatgtcttctggttatccaactgtgtagtaataccaatatcattttcaatatgggccaactttggtcaaaggctggaaaacattggtacagatcaggatttctcgacctcagcactactgatatttattatgagggactggcctgaacatcgtaggatgcttagtagtatccctcacctttacccactagatgctaggagtgccactcatgctctacctgtgacaaccaaagatgtctccagatattgacaaatgtctcttgggggggcaagactgctcctggtaagaacagctagacaatatttactatcatttctaattcaaaaatatagacgttctaacacatttaagaggaaggtcttcaaagtgtctaaaaacctaattaatcayttcaacaaaatcaatcaacaaataatgcattttatactcaccaactctactgtaaa

SEQ ID NO: 532096 - DNA, 638 bp, Homo sapiens
agaaagtaatatttcagagtacacttggtcagatcatatgccttgtccacccctcatggatgttataatgttatgtatagttagtcttatttgagcaatcctgtggggtatgtaaatatgtatctaaattttactggcaaggagattatagaataatgttctcttggtacttcagtttaactgaacagacctttatcaagcatttactatttgtgaggcaaagcagatggtgctgaggattcagagaacagaatattgtacctgccctcaatttgctcaccatttgckggaaaagacaaaccaaagaggaactgataaaatattaaatgataaaatattgatgataaaatattacatgagaagtcttgaatgaacaaagtgctatggagaagcagagctgattgctggttttgcaaggatcaggaagactcctgcggtgaggtgagacatccatgtgggctaaggagaatggtcatggggtctcacagcggaagggggaaataacagatctaagcaaaaagaacacaatactcctccccagtaaggaaaataatgagtgaaaataaactacaacagtcaagggcaaaagtccaagaagaaaagtagaaaggagtgacgggatacagaacacaagaata

SEQ ID NO: 532097 - DNA, 422 bp, Homo sapiens
accaaaccaatgttatttcttaaatgtatttgattgaagcctcatgactccctaaaawgtagaaaacaaggctgcaccctgaccacgttgggcacatgttctcaggatctcctgagggctgtgtcatgagccatggtcactcatatttggctcagaataaatctcatcaaatattttacagaacttgactctttttaccaacaggtcacatgaatatgaattgattgatttctgaaaaagatttctgtctttatgtttgcagcttcagtgtgaagtacagtcttggcaatcttcctgatggttctgggtcttgttatgggcatctacttagcccattgaagggagccaaagtagcccaggtcctgaatgagtcctcattctcacccatatgggtgtcaccagggtatagaaccaagtggtgc

SEQ ID NO: 532098 - DNA, 451 bp, Homo sapiens
tttgtgaatcaaatttatttttacacagattaytccatgtaatatctgcaaatgttttaactatttattgtaggtaagtagttatcatcttttttagaagggaaactgaggcacagtgaaatacacaccccccacacacactgagtacactaactcagaggtaggtatgatagacagaagacctgtttgtatttcaaggaattatttgagtgcgagtaacaaaaaaaaaatctaactggtttaaaccaaaaggaaataattgactgatgtaaactgaaagttctggaaatagggctggtttctggtagtgggactcaaattatattatcagaattcagttcctctctacttctagactctctgtcttctgttctgactttattctcagattttgtgcaggggcaggatggctgccagcaagttcagggctatcatttcccaggtttgactg

SEQ ID NO: 532099 - DNA, 586 bp, Homo sapiens
atctttgagccttctataatatattaaaaaccaagcaaatgatctaatttatcaatatcartaataatattacaattgcaaatggccttataattttcaaacattggatatattataggctggatgtggtggctcatgcctggaatcccaacactttgggagcctgaggcaggaggattgcttcagcccaggagtttgagaccagcctgggcaacatagtgagacccccatttctaaaaataaaaaaaaggatatattaatatactatataacattttgtgaaataagtttttttcataccttcataagaacaagggatgattttaccaggcctggctcattataaattcatacactaattctataataaagcctgatttagaaacagccagacacatggcagacccacggaagaaaagtagctgttgaagtcagggccagaagctgaccatttcaggttcatagtctctcacttctatttcacttcttttgttacctaatttttcaattagcagtaagaggcactaatatgcagccaggcagagtggctcgtgcctttaatcccagcattttggaagactgaagc

SEQ ID NO: 532100 - DNA, 586 bp, Homo sapiens
atctttgagccttctataatatattaaaaaccaagcaaatgatctaatttatcaatatcagtaataatattacaattgcaaatggccttataattttcaaacattggatatattatrggctggatgtggtggctcatgcctggaatcccaacactttgggagcctgaggcaggaggattgcttcagcccaggagtttgagaccagcctgggcaacatagtgagacccccatttctaaaaataaaaaaaaggatatattaatatactatataacattttgtgaaataagtttttttcataccttcataagaacaagggatgattttaccaggcctggctcattataaattcatacactaattctataataaagcctgatttagaaacagccagacacatggcagacccacggaagaaaagtagctgttgaagtcagggccagaagctgaccatttcaggttcatagtctctcacttctatttcacttcttttgttacctaatttttcaattagcagtaagaggcactaatatgcagccaggcagagtggctcgtgcctttaatcccagcattttggaagactgaagc

SEQ ID NO: 532101 - DNA, 586 bp, Homo sapiens
atctttgagccttctataatatattaaaaaccaagcaaatgatctaatttatcaatatcagtaataatattacaattgcaaatggccttataattttcaaacattggatatattataggctggatgtggtggctcatgcctggaatcccaacactttgggagcctgaggcaggaggattgcttsagcccaggagtttgagaccagcctgggcaacatagtgagacccccatttctaaaaataaaaaaaaggatatattaatatactatataacattttgtgaaataagtttttttcataccttcataagaacaagggatgattttaccaggcctggctcattataaattcatacactaattctataataaagcctgatttagaaacagccagacacatggcagacccacggaagaaaagtagctgttgaagtcagggccagaagctgaccatttcaggttcatagtctctcacttctatttcacttcttttgttacctaatttttcaattagcagtaagaggcactaatatgcagccaggcagagtggctcgtgcctttaatcccagcattttggaagactgaagc

SEQ ID NO: 532102 - DNA, 586 bp, Homo sapiens
atctttgagccttctataatatattaaaaaccaagcaaatgatctaatttatcaatatcagtaataatattacaattgcaaatggccttataattttcaaacattggatatattataggctggatgtggtggctcatgcctggaatcccaacactttgggagcctgaggcaggaggattgcttcagcccaggagtttgagaccagcctgggcaacatagtgagacccccatttctaaaaataaaaaaawggatatattaatatactatataacattttgtgaaataagtttttttcataccttcataagaacaagggatgattttaccaggcctggctcattataaattcatacactaattctataataaagcctgatttagaaacagccagacacatggcagacccacggaagaaaagtagctgttgaagtcagggccagaagctgaccatttcaggttcatagtctctcacttctatttcacttcttttgttacctaatttttcaattagcagtaagaggcactaatatgcagccaggcagagtggctcgtgcctttaatcccagcattttggaagactgaagc

SEQ ID NO: 532103 - DNA, 628 bp, Homo sapiens
ctgagttcatttggctagaaatcccaaaacacatcaaggaacactccaggcccttgagcacagtgctattacactgctattacagctacagacatggaatcttgacttagtgaaagtgtgtaaactggggataatggggaaccggacaacaactcccaaggccaagtgtaaaactgctgtgtcataacctctgcacacctgtaggtgatcggtggttcagaaacattgtcaggatagagctctgctggccgtagaaccttcaggaaataaacacatgccaagtgtgaatcagcaccattccccaaaccaggaagaccctgttctcatgcaccatgtcagtcttttaaacaccagtattcattcagcacacacgtttgctagcttacagcgggccaggccaggtcccgggagacagaaaagtcatacagaatgggtgaccattctggctctgccacttcctaactgcatgaccctgcaggttatgtaacccctctgggcctcagcatcctcacctgtaacatgasggtaataatgctaccacctcagaagctcattatgaggatatgtgagttactgtttgtaatgtgcataggagaatgcctggcccacagagccatgttaagtgtta

SEQ ID NO: 532104 - DNA, 555 bp, Homo sapiens
ggcatcagtcttaacgacagactttttttcatgtttcctgttggtagcacaaggcttaaacttagtacccacagttctaatttgcagatacccactgatgtcaagcattctgaaaactagatttttttctatgtaaatatttaaaaggtaataaaatagaaaaaaaggaagactgtcctctctgaccaatagatactgcttttaaaataataatgacctctgcttagctgctacttcagttcacwagagtccgtctctcataggcctgctctaggttaaagccctggacacaaaggctcctgatttgaattatgactgactgctctgtggccctaagcaagttacttcccctctgaaagctctggtttcgccatgtgttaaaatagaaaaaatggtacacatctcaaggtgtcattctgaagattaaataagataatgaagtaaaatgttcagaagagtgaagtggtcaataacagtatgcagctattattatcattttctgctatgtggtaggaattattattataattgttttagagatcaggtcacctaggc

SEQ ID NO: 532105 - DNA, 555 bp, Homo sapiens
ggcatcagtcttaacgacagactttttttcatgtttcctgttggtagcacaaggcttaaacttagtacccacagttctaatttgcagatacccactgatgtcaagcattctgaaaactagatttttttctatgtaaatatttaaaaggtaataaaatagaaaaaaaggaagactgtcctctctgaccaatagatactgcttttaaaataataatgacctctgcttagctgctacttcagttcacaagagtccgtctctcataggcctgctctaggttamagccctggacacaaaggctcctgatttgaattatgactgactgctctgtggccctaagcaagttacttcccctctgaaagctctggtttcgccatgtgttaaaatagaaaaaatggtacacatctcaaggtgtcattctgaagattaaataagataatgaagtaaaatgttcagaagagtgaagtggtcaataacagtatgcagctattattatcattttctgctatgtggtaggaattattattataattgttttagagatcaggtcacctaggc

SEQ ID NO: 532106 - DNA, 555 bp, Homo sapiens
ggcatcagtcttaacgacagactttttttcatgtttcctgttggtagcacaaggcttaaacttagtacccacagttctaatttgcagatacccactgatgtcaagcattctgaaaactagatttttttctatgtaaatatttaaaaggtaataaaatagaaaaaaaggaagactgtcctctctgaccaatagatactgcttttaaaataataatgacctctgcttagctgctacttcagttcacaagagtccgtctctcataggcctgctctaggttaaagccctggacacaaaggctcctgatttgaattatgactgactgctctgtggccctaagcaagttacttcccctctgaaagctctggtttcgccatgtgttaaaatagaaaaaatggtacacatctcaaggtgtcattytgaagattaaataagataatgaagtaaaatgttcagaagagtgaagtggtcaataacagtatgcagctattattatcattttctgctatgtggtaggaattattattataattgttttagagatcaggtcacctaggc

SEQ ID NO: 532107 - DNA, 555 bp, Homo sapiens
ggcatcagtcttaacgacagactttttttcatgtttcctgttggtagcacaaggcttaaacttagtacccacagttctaatttgcagatacccactgatgtcaagcattctgaaaactagatttttttctatgtaaatatttaaaaggtaataaaatagaaaaaaaggaagactgtcctctctgaccaatagatactgcttttaaaataataatgacctctgcttagctgctacttcagttcacaagagtccgtctctcataggcctgctctaggttaaagccctggacacaaaggctcctgatttgaattatgactgactgctctgtggccctaagcaagttacttcccctctgaaagctctggtttcgccatgtgttaaaatagaaaaaatggtacacatctcaaggtgtcattctgaagattaaataagataatgaagtaaaatgttcagaagagtgaagtggtcaataacagtatgcagctattattatcattttctgctatgtggtaggaattattattataatygttttagagatcaggtcacctaggc

SEQ ID NO: 532108 - DNA, 509 bp, Homo sapiens
ccaaaaaggttggggaccactgatctaacatatgagggttcacgtttggaggaatcaatctgctcggttgcattgatcctatacccaagggcatctctgggcacctactcttgggagaaaaatgctttcaggaagcaaataattaggtaagagatgctaaagaggtgaggagagaaaattggaaccagatgacaacatcttaagatactggtctctctcctctttcccaaaagagaaacctcgttgttgcacctcttcagggcacaggcatctgtgggcacacgtccccacttctggaaggaagctccttcagaacaaaagccatacccagaaaccaccactgrtcccccaaagccccagacactgccatatccccctgtttgttcaacagaacaatattcacccctctgtggccccaacttagataaaaccatgaaggaaaaaagaaatgctagccttctggctttcttcttccccaaatcccttctcatccactgcttccagactgt

SEQ ID NO: 532109 - DNA, 489 bp, Homo sapiens
gtttaaaatgtcagtctcctgctcagcagaggaaatatataattacaggtttctagataagaactcttttctcttgctgttctgaatctatatttaatcatttaacgttattctcacctgtcattctatttgacaaaatatttagagaagtctttagaatacaaaaattagattttcattctaatagaatagaaagagcaaacaccactctcattgcaaatgcttgaaagtaattaaacttgtatagtcggatggagaatggaagtctygtttcttggcccattctgggaagagagggtgaacacatcactgagaagcaatgcaatatatggcacgtttatcataaatgaaaatgtgtttcaagcacatgacattcatatttgattcaaaagaaaaaaaattttttttccaaaagagcaagttgttaagtctgctctctgaaccccacctgaactcattgctcattacagaaactgtgacgtaaagata

SEQ ID NO: 532110 - DNA, 646 bp, Homo sapiens
ctgactatttaggcattcgagaaagtattttaaaggggggtggggggcacttccttactcctttcaattttttcataaatataagtttagtggcttcatttttaaaatcttgcttgcttgtagtataatatgaaggcttgtgacttatttatttatttatttacttatttatttatgacagagtctctctctatcacccaggctagagtgcagtggcacgatstcagctcactgcaccctccgcctcccgggtgcaagcaatcctcgtgcttcagtctcctgagtagctgggattataggtgtgcacctccatgcccagctaatttttgcatttttagtacagcctgggtttcaccatgtttcccaggctggtctcaaactcctgacctcaggtaatctccccaccttggcctcccaaagtgctgggattacaggcgtgagccaccgcacctggccacttgtttttttatttttgtttgtattcatccatctcttacatttaacatgatctcttttttttttcaacaggcttaataattctaagatggcggattagtaaactatggccaggagtgtcctttattgtctctgaacagggtaagagtggttttgtgatactactaatacctctttgttctaaggctac

SEQ ID NO: 532111 - DNA, 570 bp, Homo sapiens
actcctttcaattttttcataaatataagtttagtggcttcatttttaaaatcttgcttgcttgtagtataatatgaaggcttgtgacttatttatttatttatttacttatttatttatgacagagtctctctctatcacccaggctagagtgcagtggcacgatctcagctcactgcaccctccgcctcccgggtkcaagcaatcctcgtgcttcagtctcctgagtagctgggattataggtgtgcacctccatgcccagctaatttttgcatttttagtacagcctgggtttcaccatgtttcccaggctggtctcaaactcctgacctcaggtaatctccccaccttggcctcccaaagtgctgggattacaggcgtgagccaccgcacctggccacttgtttttttatttttgtttgtattcatccatctcttacatttaacatgatctcttttttttttcaacaggcttaataattctaagatggcggattagtaaactatggccaggagtgtcctttattgtctctgaacagggtaagagtggttttgtgatactactaata

SEQ ID NO: 532112 - DNA, 646 bp, Homo sapiens
ctgactatttaggcattcgagaaagtattttaaaggggggtggggggcacttccttactcctttcaattttttcataaatataagtttagtggcttcatttttaaaatcttgcttgcttgtagtataatatgaaggcttgtgacttatttatttatttatttacttatttatttatgacagagtctctctctatcacccaggctagagtgcagtggcacgatctcagctcactgcaccctccgcctcccgggtgcaagcaatcctcgtgcttcagtctcctgagtagctgggattataggtgtgcacctccatgcccagctaatttttgcatttttagtacagcctgggtttcaccatgtttcccaggctggtctcaaactcctgacctcaggtaatctccccaccttggcctcccaaagtgctgggattacaggcgtgagccaccgcacctggccrcttgtttttttatttttgtttgtattcatccatctcttacatttaacatgatctcttttttttttcaacaggcttaataattctaagatggcggattagtaaactatggccaggagtgtcctttattgtctctgaacagggtaagagtggttttgtgatactactaatacctctttgttctaaggctac

SEQ ID NO: 532113 - DNA, 536 bp, Homo sapiens
tttggaagataaaatattatattttcctttccaacaacttgtaagtayatgcataaaagaagtatcaagggattcaaagaaacagcaaagcttctttagccatatttttacacgcaacatgtctccccacctctcatttttagctttagatttaattatttccagctcagttttacagaggggtagagggtggaacttgagggttggccgtggaggagtttgtaaagctatactctttaaaaatgtgtttaaaagtaaaacatcaaccacaccactccctctctccatcctgtcattgttttcaagtcacccactcctctgcccagtttgctaaaggcagggggagatgtgtgaaggttatgttctgccatgtggttcagagaagcaaaattttcctgcagctctaaatcagttcacaatgaaccagaactcagcaatgcgctctcactctctgctcattctgctacctgacattcttgagaggaaccagatggccctcatgtcaacctggcctgccaggtctggtattgagattt

SEQ ID NO: 532114 - DNA, 536 bp, Homo sapiens
tttggaagataaaatattatattttcctttccaacaacttgtaagtacatgcataaaagaagtatcaagggattcaaagaaacagcaaagcttctttagccatatttttacacgcaacatgtctccccacctctcatttttagctttagatttaattatttccagctcagttttacagaggggtagagggtggaacttgagggttggccgtggaggagtttgtaaagctatactctttaaaaatgtgtttaaaagtaaaacatcaaccacaccactccctctctccatcctgtcattgttttcaagtcacccactcctctgcccagtttgctaaaggcagggggagakgtgtgaaggttatgttctgccatgtggttcagagaagcaaaattttcctgcagctctaaatcagttcacaatgaaccagaactcagcaatgcgctctcactctctgctcattctgctacctgacattcttgagaggaaccagatggccctcatgtcaacctggcctgccaggtctggtattgagattt

SEQ ID NO: 532115 - DNA, 259 bp, Homo sapiens
accacaatgaaatatcacctcacacctgttataatggctgctataaaaatatwaaaatgtataaaaaatataaaagatgaatgtttgtttgtcctcaccacaactcacattgagacttggccctcaacgtggcaatgttgggaggtggcgcctttaagatgattaagtctttaagaggaattaatatatttttctgaagactggcttaattctagcaggaatagattagttcccccaaaataggttgttttaaagtgag

SEQ ID NO: 532116 - DNA, 259 bp, Homo sapiens
accacaatgaaatatcacctcacacctgttataatggctgctataaaaatataaaaatgtataaaaaatataaaagatgaatgttkgtttgtcctcaccacaactcacattgagacttggccctcaacgtggcaatgttgggaggtggcgcctttaagatgattaagtctttaagaggaattaatatatttttctgaagactggcttaattctagcaggaatagattagttcccccaaaataggttgttttaaagtgag

SEQ ID NO: 532117 - DNA, 623 bp, Homo sapiens
ctggcaatgtctggagacatttttggttgtcacaatcggggaatgaattactagtggcatctaataggtagaggctattagagaccagggatactgctgaacatcctacaatgctcaggatagccccacatataaagaattgtctgacccaaaatgtcagtagggccatggttttgaaaacctagttcaaagggtttctaagagaagagaacagaacmaaagcctgagccctcaggtgcaccaatattaaagatggtggagagaaggggagaaattaacaatggaggtgaggcaggatgaccggtgagaaagaatcacaaccaagagaatgtggaatccgtgtagccacgagaagaactgtaccaaacaacggggaaaaataaagtgtcaaatgctgctgctagatcaaataaaaagatacccaagtagcaaccactgggcttagcaatcagaggtcactggtgacattaaactaagaagttttggtagagcagtgtgaggtgaaagcgacttctgaatgtttggcaacatatgatacattttctaatctagttattgccaacttttgaattcaaaattaaactaaaaatcacatatggctataaccatggcatagttaatca

SEQ ID NO: 532118 - DNA, 569 bp, Homo sapiens
ttggtaaaagggacaaaatgaactaatttaggcaaaggtgccaattgttaggcttggcatatagaagacacaaagcaaatggtaactattacttgttccgtggtaaaaatgcttaagttttgtttatatttgactggatcaaaagtgaaatgatccacatatgatcttttacttattacatctgtttgatgctgtcctgaagaataccttataaataaaaggttagatttgttagtgagtattgaagtaaatcagtacatcttttctataaaatgcaacagcacccaactattctcagtacagcatacgcactatcgtaagtatagcatgtgttttgttgagttaactttttaagcacagttctttcaaactggaagccagtgttggccaagaaaatgcagcttcaaaatggcaacaggataaggatacattcttatatgaggcggtggcagatcaagctgaacaacaaagtcatcccaacaatgactatggraatgaaaccttcactctgcctttattaagcttgtgcacttgtgcacaagcacctcagcttgtaggccacagcaagt

SEQ ID NO: 532119 - DNA, 503 bp, Homo sapiens
gccagccaggagccacgctkggacacctccctcttccccctccttgtggggcaccccacaatgaccactgctgtgacgcctccactggggcgtggggctctgggtcctgcccgcactcagccctgaggtgtcgctcccgtccactgcggccctgctgggctgtgcaccttgtgcctggtaggtgtgatgggtggctctggccacgtggtcccatggtccaggacccggttgcacatgaaccttctgccaccctgctcagaagccccaggagccacgtggagattctctcactgggcttgctgcagcctccacagagccgcccctcctgccacagaggtctccaccttagggtccgcctgctcccttgtgtcagcagcagacagccggcacactgcagggtcccttgaggggttggcggcctctgtgtgggacctgtctgtaggccagagaagttcctgggggtgggggggcctcgctacctgcagaaccctggagggcgcctg

SEQ ID NO: 532120 - DNA, 635 bp, Homo sapiens
ctgcttcacctccatgtctgcagggcaagaccagagtagagcttcagaggcccggccagggcatggcgtgggctgagcgggatgctcccagcacacatccaaccccagggctgggcgagagggggtggctgctcccgcaggaatcccaggcttcagcccccaggatgggccccttccccctagaacctccctctccagaggcagccaggacgggagttcagagagactgccggaggccgggggaaaaggtgaggtgggcaggcaccgcagggaagggcaggcggcagccaggcactcacccccgtactggtagacggtattggggtgcggctgtgtgtagaagcaggagcagatgagcgacagcaccgacagctccttcatcttctccttgtaggctgtgggcacaaggctgggctgagcaagcaccactggggcctgcccacctgggcccccgttttccctccccatggctgcctctatcatgtctctgtgagacacggagctgcccagcacgctctcttgtgtgtctccacaccgccggccccttcgtctctccagctctctcgcttccagacgtcggcactgtctccgtggtgtgtcccctgccytctgtctctctcgccctctgcctctcc

SEQ ID NO: 532121 - DNA, 588 bp, Homo sapiens
accaataggatagggcagaagcttcccatcttgggtgctctctggatcgctcactctgggagaagctggctgccatgtcatgaggacactcagagagtctatggacagacccatgtggtgaggaactgaagtctccagccaatagctaatagcttaggcatcctgctggtagccagaccgcctcacgggtgagcttggaaacagatcatccccagcctacccttcacagkactgcagccccaggggccagcttaactataaactcatgagagaccctgagacaaaaacactcaactaagctcttcttgcattcctgacccacagaactgtgacgtaataaatgcttgctgttttaagctgctacattttagggtgccttgttatatagtcatagacaaccaatacactgggttaacatgaagtccagaaacgtttaaaatatattagagttacccattctttactactattttgttttttctcaaagcatctgtcacatcacatctttagcctgcttagagaacgacatctgacccaacctgggccattaggatcctctcttctgggtattagcacttgggacacaga

SEQ ID NO: 532122 - DNA, 455 bp, Homo sapiens
aaaaacaaaaacaaaagtaattggttacctcagaggggtaggtttggaagatgtggggtatggacggggctgattaagttttttttttttttaatatatccctgtattgcttcattttgtgcacaatctttaatacttttataatacaaaaaagagaaattttaaaaatgtgtttgctctatctccaatgtctagaacagtgtttggcacatatttggcattcaataaatgttggttgcataaataaacaaatggattttgttaacatttgttgagtacctgcagcgtggtaggcattggacagcaggtactgcctcgtatttgtgtggtctataaaccatttgagttaattggattctggtatatcagagagcaaactacatgccttcaaacataacaaacggagacaaagttacagctactcctytagctaaagacactacccctgctctctg

SEQ ID NO: 532123 - DNA, 596 bp, Homo sapiens
cactccaacatggcagactgtgtgacacgtacacgtgggttccagtgagccctattagacctgccccttgtcaacaaggaatataattgaagtgggactcaaaggctcctcaaggatgatgcctgtttttttttttttttttttttttttgagatggagtttcgctcttgttgcccaggctggagtacaatggygcaatctcagctcaccgcaacctccacctcccggattcaagtgattctcctgcctcagcctctcgagtagctgagattacaggcatgcaccaccatgcccagctaattttttgtatttttagtagagacagggtttctccatgttggtcaggctgatctcgaactcctgacctcaggtgatcctcccgtctcggcctcccaaagtgctgggattacagggatgtctgactgttaatgccagggcagcacagtactactgtcacagtgtattatctctgatgctcccctgaaaggaaccatactaaggttaatgcaacttcccttaaagtacccagaagtttaaaaggcacaaggcagaggggatattcatttgaagaactcagctttctctccaaacaatga

SEQ ID NO: 532124 - DNA, 447 bp, Homo sapiens
tgaacaggtggtgtttccttaaaggcctattagcaatcacctgttattgcaggtggctggagctccaaatcctaccaatttctaaaggtttaaatccttccataaaatgtccaacagcgtacatactcccttagctattgccaagatccctatgaggcagcttcaattaatccccayaagtttccctattccagaacccctggcctgctcatgatcacagactctgccgccagaaaagaagacctgtttctcccagcctgggcagcatggcaataccccgtctctacaaaaaaatacaaaaattagccaggtgtggtggcacatgcctgtagtcccagctacttgggagactgaggtgggagaatcacttgagccccaggaggtggaggttgcagtgagtcaagatcgcaccactacactccagcctgggcaacagagtgagaccct

SEQ ID NO: 532125 - DNA, 554 bp, Homo sapiens
gggtgcattaccacacctgactactttttgtatttttaatagagacggggtttcaccatgttggccaggctggtctcgaactcctgatgtcaggcgatccgcccacctcggcctcccaaagtgctgggattacaggcgtgagccaccgcgcccggcccagctctatatctttcattctagagttgaggggatccgtcagaaagaaattctgattattccttaaagaactcmagtgatctgatagaccacacaaggccagaaatcaggtaacctcaaatagtgctgtccaatagaattttctgcaatgacggaaatgttctaaacctgaactgtccaataaattacccaccacgtgacaatcgagcatctaaaatgtagctagtacaacagagaaactacattttttacttaatagttaaataactccacgtggctggggggctaccataatatccaccacagtcctggaaacttgccctgccctgatccatctcaagtccctcaggcctgaagttaagctcatcatactgtaactccacagtgcttatgtattt

SEQ ID NO: 532126 - DNA, 579 bp, Homo sapiens
acctaaagcatgaggcagagaagaggctggagatacaggcagggttcagaacaggcagagccctggctgagaagctcaaactttagaactttcaatggattttgcaagccagtagacaatgaatgtttgctgaatgaattagagaaaagaatggatgaatgcatggacagatctttaaagattaagcaggaatttgatacagacttgtttccaaagaccatctgggggtggaggggagtaatgtgaagaaaagatatgggggaacaggcctagaagcagggaaatcagttagaaggccatgatattgcaggtaaaaggacaacagtagagatggagaagactgcacagatttgagagatgtttagggggtaaaactatcaggacttagtgatgaatgtgataagagttaagtccaggaaagacactgagttcagtttcagtcatctgaatttgaagtgtctgtgggacttgcaggcagagctgtccaggaggatagtcagatgtgagggtaaagctcagacaggtctaagctgacaatttcaatttggsggcatgtaggaggtagttaaaaccaagcca

SEQ ID NO: 532127 - DNA, 569 bp, Homo sapiens
ctggaagggatggaatgtaccttggttgtctgatcccttgttttattgctattcccggtggtgttggtccacacaggtgtgacttctcttattgcccatatcagaactggaaagaggtaagctgccctggaagcctaaacaccatgctaccagcagaaggtaaggaagcggagtgtctgttcagcrggtctgaaggtgactctaagctctgtgaaggcagagcttgctgtacccacagtgcctagcaccattccacaggcacccaataagtgctgttgagtttctaaaggtggtttattgtttcatggccaaacttgtctcccttcttcaagggtcttggctgagtctctacatagaagctctagtgatctctgcattacagcattcagagtttttgcctggacaaccagagatggtgaagctctgcaggcctggctgggttttagagtcaggactggctttgggagtacagggaagcctgcagacagcatcagagaagccagagactagacccaagctgatctgaacatcaatctgaagggctgggacagaggcaaactcaggtttga

SEQ ID NO: 532128 - DNA, 606 bp, Homo sapiens
aagggatggaatgtaccttggttgtctgatcccttgttttattgctattcccggtggtgttggtccacacaggtgtgacttctcttattgcccatatcagaactggaaagaggtaagctgccctggaagcctaaacaccatgctaccagcagaaggtaaggaagcggagtgtctgttcagcaggtctgaaggtgactctaagctctgtgaaggcagagcttgctgtacccacagtgcctagcaccattccacaggcacccaataagtgctgttgagtttctaaaggtggtttattgtttcatggccaaacttgtctcccttcttcaagggtcttggctgagtctctacatagaagctctagtgatctctgcattacagcattcagagtttttgcctggacaaccagagatggtgaagctctgcaggcctggctgggttttrgagtcaggactggctttgggagtacagggaagcctgcagacagcatcagagaagccagagactagacccaagctgatctgaacatcaatctgaagggctgggacagaggcaaactcaggtttgaagcacagagatggaacaagtagacttagaagatagggcagg

SEQ ID NO: 532129 - DNA, 606 bp, Homo sapiens
aagggatggaatgtaccttggttgtctgatcccttgttttattgctattcccggtggtgttggtccacacaggtgtgacttctcttattgcccatatcagaactggaaagaggtaagctgccctggaagcctaaacaccatgctaccagcagaaggtaaggaagcggagtgtctgttcagcaggtctgaaggtgactctaagctctgtgaaggcagagcttgctgtacccacagtgcctagcaccattccacaggcacccaataagtgctgttgagtttctaaaggtggtttattgtttcatggccaaacttgtctcccttcttcaagggtcttggctgagtctctacatagaagctctagtgatctctgcattacagcattcagagtttttgcctggacaaccagagatggtgaagctctgcaggcctggctgggttttagagtcaggactggctttgggagtacagggaagcctgcagacagcatcagagaagccagagactagacccaagctgatytgaacatcaatctgaagggctgggacagaggcaaactcaggtttgaagcacagagatggaacaagtagacttagaagatagggcagg

SEQ ID NO: 532130 - DNA, 591 bp, Homo sapiens
ccttacccagatagggactgattggagaggtggaagggaacaaggtgaaaggtaggggtcctggtaagagaaagcaggggggcctgagaacacagaggaaagtggttgagaaatgttctctcatatgctctttaagaaaagcaaatgcccctttttttttgtcccagaaagcatgtctctttatctagaattaggccatgtgcccactcctgaaacagtagctatgaccaagggatkagattttgcccaatacctcaggcctggcttgcatgtgccattcctagggccaggagtggagtcagaatcctcaaatgacatgctacacatgaggagggtgtccacactcaagtaaaattgggatggataccaagagaaggggttacgttcccttctcacaatgcctctgttcaagtactacgggcttttagaatttgccatactgtacccccaccccagcctacctcaccctggtctctctgaggaggggccttttacttctctgaatgacctgtggtactgattttctgcatttttcaaattttcaatcatcctacttgttaatttactttctgcagatgctgtcatctccct

SEQ ID NO: 532131 - DNA, 402 bp, Homo sapiens
atctagaattaggccatgtgcccactcctgaaacagtagctatgaccaagggatgagattttgcccaatacctcaggcctggcttgcatgtgccattcctagggccaggagtggagtcagaatcctcaaatgacatgctacacatgaggagggtgtccacactcaagtaaaattgggatggataccaagagaaggggttacgttcccttctcacaatgcctctgttcaagtactacgggcttttagartttgccatactgtacccccaccccagcctacctcaccctggtctctctgaggaggggccttttacttctctgaatgacctgtggtactgattttctgcatttttcaaattttcaatcatcctacttgttaatttactttctgcagatgctgtca

SEQ ID NO: 532132 - DNA, 591 bp, Homo sapiens
cctcagggctgtttgcttgtgtggcatcccagcacacttcctgcctgcagaacctccctgtgaaagtctcggatcctttgtggtatggttccaggaatctgatgtttcccagcagtcttcttgaagatgatcaaagcacctcactaaaaatgcaaataagacttttttagaacataaactatattctgaactgaaattattacatgaaaatgaaaccaaagaattctgagyatatgtttctctgccgtagaaaggattaagctgtttcttgtccggattcttctctcattgacttctaacaagcctctactcttgagtctctttcattactggggatgtaaatgttccttacatttccacattaaaaatcctatgttaacataagctatgtgtacagcccttcaggagacacactcagcgatctttaaagcaagggacacaggtgaccagggcagagagtggggagcaggatgacatggaatggaaatggacatccatcacccaaattcctctattctcgaagctgttctttgatctctttcaattaagtgtaataacccaaggaaagctgcttctagtgagctctgaatc

SEQ ID NO: 532133 - DNA, 591 bp, Homo sapiens
cctcagggctgtttgcttgtgtggcatcccagcacacttcctgcctgcagaacctccctgtgaaagtctcggatcctttgtggtatggttccaggaatctgatgtttcccagcagtcttcttgaagatgatcaaagcacctcactaaaaatgcaaataagacttttttagaacataaactatattctgaactgaaattattacatgaaaatgaaaccaaagaattctgagcatatgtttctctgccgtagaaaggattaagctgtttcttgtccggattcttctctcattgacttctaacaagcctctactcttgagtytctttcattactggggatgtaaatgttccttacatttccacattaaaaatcctatgttaacataagctatgtgtacagcccttcaggagacacactcagcgatctttaaagcaagggacacaggtgaccagggcagagagtggggagcaggatgacatggaatggaaatggacatccatcacccaaattcctctattctcgaagctgttctttgatctctttcaattaagtgtaataacccaaggaaagctgcttctagtgagctctgaatc

SEQ ID NO: 532134 - DNA, 586 bp, Homo sapiens
aagatacagaaataaaggaaaaattataatatggaaatcagacaatggagccccccccaattatccagttatgtggataattaaaatggagaccctcagaaaattgaaccaaagagtaaaattaaactcaaagatgtagtagaaattgttgggaagtaaagaaaacttgaataggtagatcagaacatatgtgttgatgaggttattgaactttgaggttaaaaatatacrtatgtgtttatgatcatggggaaaaaacagtcatctcagaaagaaaaatatcaagttagtcttagactttgcagagcactcagtgccaaaaagagaggaatgatgtccagacttggacctccaagggaggaataaccactgagaattttatatgaaatcaaaaaggcgttgtcaaaaatacagggattcaggaaaatgagaatgcactaacccttcttgaaaaatcacctaatgacaaaatctagtccaacaagatgtaaatgaatataaaggactcataatgaggaaaccgcattatgactggctctcaaccctggctgcacattagaaccatcaaagaactttgcaaaagaca

SEQ ID NO: 532135 - DNA, 625 bp, Homo sapiens
catgttcgtgggtctggagtctcaggcatagctcatttacatagttggaacaccattcatcaccctcataattaactcaagtcaattacaccattctgaaatatctcctcttctaggcatgttgcatcattaccacctacttttaataaaattatactcattctcactttagttgagtgactgtaactaatggtggtttctttctctcttttctcactattctaaccaattagagtcactgtgattttctttactcggcctaagagaaattaccatcagtgttattgcttgtttgacattttggttttccatttgttaaattttattagcaatattggaaatgtgaattactatatctttgcagccaggacgttcttttgaggagttcacacatcactggtggcactatrtacagccattgtaaacctttcagcgtctacacttcgatgggggctgcccaggcactaccataaggcaattgggaagaaatcatggctaatgcagaaaataccactgggagcatcaaagaaatgtgaagctggcgatggcccagggatcccccagcctgaatggcttcttcctggaggtccctgattttcagagtcataaaaattgaagccactgt

SEQ ID NO: 532136 - DNA, 630 bp, Homo sapiens
tgaaaagccaccaagttttgggagtgagaggtaactgggagcaaccaactactattccctaaatagaaggagtaaaaaaagggtaggatcaaagaaattatgtcaggacctccttgtcagagaactcagggagctctgagatggaagggcaaggaagagagggaagcaatttacttacatagtttcagtgttgttcccatgcaaactcacatccctgtattcatttagaaccagaggagcattaatatgcacacctatgctgataaagggatacacattccamtccaaacacacatgcccacaggcacaagagcctgctaaaatggtagggcctgctggtactctggcatagcctgccatataatcatggattatcatagacaatcatggatttgaactcaagaagatgagatgacacagctcccttcccttgaccctcacatcaatatatagtagtccctatggactagtaaagccctctgcacagacacacgcaggcaaaaagatgggaagggaatgagatctccacatttgtgatatattttccctttccatcatggacagttggaagctgagatgagatcaagttctgtgtgcaacaggaaagatgggcagtggaggtggtggcag

SEQ ID NO: 532137 - DNA, 512 bp, Homo sapiens
aagctttgacgtgataaatacttgggacttgagaccttttctcggaaggtacattatcgccattcaaattgcccaggaagtcttgtgcaatgatacacattttagcatctctttcaatgcctgctcttatgtctgataatatgaagaaagctatacctaacataacaaggtgcttcctcttctatccctggctcctcccaagggacatgaagagatgctagaagaatacaagggggkaaagaaccttggatctgagtcagaacagaaaaaaaaacaacatggagaggaagaaaccctgaaaacaagcctaaggacctcagcacccactacaaaaaaaaaaaagagtctggagaggggactggactgcagctttcttaacactaggccccaaatagcacaatcacttctgctactaagtcactactggccacctatctgcattggcagggggtgggggaggttgtgggggggtaggaatgttgagctatgtgcccaggaagcagagaaaatgg

SEQ ID NO: 532138 - DNA, 403 bp, Homo sapiens
gcagcacagccacaggcttytgtctggattcttgtgtttcaaagaagcctttgcaacagtgatggagatagaaaccaggcatcaaaataaacggaatctagagccagaacttcacaaaagaatttgtatcaaaagattcaagctcaatttttcaaaaataacaatacacatccaatcacattactgtattagaataatgttttctagtgaaagtaaaataagtttttatatcattagatataatgcatttttaaataatgcttatttcatctccaatttatcccttttaatttctatttttgcatatgttataatgaacacagtgttataatgtaatggtatacttaaaatattttaaggatatatatatataaacccatgataaatataaacaaacatactg

SEQ ID NO: 532139 - DNA, 561 bp, Homo sapiens
ttgtattttttagtagagacagggtttcaccgtgttagccaggatggtctcgatctcctgacctcctgatctgcctgcctcatcctcccaaagtgctgggattacaggtgtgagccaccgcgcccagcccggatgtttctttaataagggggtggaatgctcattaggtattctggaaaaggaggggatttcagggactcctccccsctcctgttattgcctcctttctcccttatttgggtttacctggaagagtcatggacatgtcaccctgaccagggttttggtcattttctctgccttattttgggctttctctaccctgtggattatttgcctagcccctgcttcaggggttctttgggtttgtccatactcctgcaactacccgtgctattcctatctccttagaggaggagagattgacgatatcgaagagaaattactctgctctgtggatctcattggcacaggttcctgctgaagtctgaggggaaaaggggattctggaaggcggagaaatggatggatcctgtggagaggccagacagcttccgagca

SEQ ID NO: 532140 - DNA, 550 bp, Homo sapiens
ttgtattttttagtagagacagggtttcaccgtgttagccaggatggtctcgatctcctgacctcctgatctgcctgcctcatcctcccaaagtgctgggattacaggtgtgagccaccgcgcccagcccggatgtttctttaataagggggtggaatgctcattaggtattctggaaaaggaggggatttcagggactcctccccgctcctgttattgcctcctttctcccttatttgggtttacctggaagagtcatggacatgtcaccctgaccagggttttggtcattttctctgccttattttgggctttctctaccctgtrgattatttgcctagcccctgcttcaggggttctttgggtttgtccatactcctgcaactacccgtgctattcctatctccttagaggaggagagattgacgatatcgaagagaaattactctgctctgtggatctcattggcacaggttcctgctgaagtctgaggggaaaaggggattctggaaggcggagaaatggatggatcctgtggagaggccagaca

SEQ ID NO: 532141 - DNA, 561 bp, Homo sapiens
ttgtattttttagtagagacagggtttcaccgtgttagccaggatggtctcgatctcctgacctcctgatctgcctgcctcatcctcccaaagtgctgggattacaggtgtgagccaccgcgcccagcccggatgtttctttaataagggggtggaatgctcattaggtattctggaaaaggaggggatttcagggactcctccccgctcctgttattgcctcctttctcccttatttgggtttacctggaagagtcatggacatgtcaccctgaccagggttttggtcattttctctgccttattttgggctttctctaccctgtggattatttgcctagcccctgcttcaggggttctttgggtttgtccatactcctgcaactacccgtgctattcctatctccttagaggaggagagattgacgatatcgaagagaaattactctgctctgtggatctcattggcacaggttcctgctgaagtctgaggggaaaaggggattctggaaggcggrgaaatggatggatcctgtggagaggccagacagcttccgagca

SEQ ID NO: 532142 - DNA, 496 bp, Homo sapiens
tgcttcacatgttggctgagctaagagggcccatctccatcccagcctttgtcagggagagaaggggcttyccagggcagacattatctattcttcaccaggatacccagggtcaagacttctcccacttctgaactcagggtccagcactctcccacccaaacttccactattttgtgacacatgaagttattcggctgtggcacttcctggagcctgcatggagatgttcagccctgtgacatctctgcaaaccttctccctatagttgcataaagtttgaggtggacagtaagtagtggaaagatgggttgaaccttatttcagagtgggatcttcataggtttttctcatcttgtttttagaattttttgttgtttgtgtaaagatggtattacggaaacataaggttcagtgaaggaactcaggatgaaggtgggcttacagcaccgctgtcagcctccctccatgtcctgttgcttctagaaaccaagcc

SEQ ID NO: 532143 - DNA, 496 bp, Homo sapiens
tgcttcacatgttggctgagctaagagggcccatctccatcccagcctttgtcagggagagaaggggctttccagggcagacattatctattcttcaccaggatacccagggtcaagacttctcccacttctgaactcagggtccagcactctcccacccaaacttccactattttgtgacacatgaagttattyggctgtggcacttcctggagcctgcatggagatgttcagccctgtgacatctctgcaaaccttctccctatagttgcataaagtttgaggtggacagtaagtagtggaaagatgggttgaaccttatttcagagtgggatcttcataggtttttctcatcttgtttttagaattttttgttgtttgtgtaaagatggtattacggaaacataaggttcagtgaaggaactcaggatgaaggtgggcttacagcaccgctgtcagcctccctccatgtcctgttgcttctagaaaccaagcc

SEQ ID NO: 532144 - DNA, 625 bp, Homo sapiens
ggccctgaaacatggacttcattggttcagagatttggttattcagcaattatgggttatttgacataagcatggagamgtatatttcaaattatgtcttctattttcagtaatattcaatgattcttagacgtggtcttttgttcctagacatgtacatgagccatcttaaatattccagactagtggagactagtgcaaccaatgtctggttgcattaggacctagattaattttctgacctttacaactgcaaggtctctgcagaaagtaagtcagggagcatcatgcgctatagaggagcatagactgctgggaacaccactcctcgagcttggctgcacattggaagcacctgtgatgtctgagtctcactcaagaggatttaattgattaggtatgggattcagcttggatacaaggattttcttgaaatcccagataactgtaacgtgacaaaatttgagaactactggatgagagtgtattcttgtctaaacagagtaacgccagcgcaaaggacaagttactccttcctctctctcttcgcttcttccccttccgtctctccttctctttttccttccctttctttcctccttcctataaagatttagcatttatt

SEQ ID NO: 532145 - DNA, 625 bp, Homo sapiens
ggccctgaaacatggacttcattggttcagagatttggttattcagcaattatgggttatttgacataagcatggagacgtatatttcaaattatgtcttctattttcagtaatattcaatgattcttagacgtggtcttttgttcctagacatgtacatgagccatcttaaatattccagactagtggagactagtgcaaccaatgtctggttgcattaggacctagattaattttctgacctttacaactgcaaggtctctgcagaaagtaagtcagggagcatcatgcsctatagaggagcatagactgctgggaacaccactcctcgagcttggctgcacattggaagcacctgtgatgtctgagtctcactcaagaggatttaattgattaggtatgggattcagcttggatacaaggattttcttgaaatcccagataactgtaacgtgacaaaatttgagaactactggatgagagtgtattcttgtctaaacagagtaacgccagcgcaaaggacaagttactccttcctctctctcttcgcttcttccccttccgtctctccttctctttttccttccctttctttcctccttcctataaagatttagcatttatt

SEQ ID NO: 532146 - DNA, 603 bp, Homo sapiens
agtcagggccctgaaacatggacttcattggttcagagatttggttattcagcaattatgggttatttgacataagcatggagacgtatatttcaaattatgtcttctattttcagtaatattcaatgattcttagacgtggtcttttgttcctagacatgtacatgagccatcttaaatattccagactagtggagactagtgcaaccaatgtctggttgcattaggacctagattaattttctgacctttacaactgcaaggtctctgcagaaagtaagtcagggagcatcatgcgctatagaggagcatagactgctgggaacaccactcctcgagcttggctgcacattggaagcacctgtgatgtctgagtctcactcaagaggatttaattgattaggtatgggattcagcttggatacaaggattttcttgaaatcccagataactgtaacgtgacaaaatttgagaactactggwtgagagtgtattcttgtctaaacagagtaacgccagcgcaaaggacaagttactccttcctctctctcttcgcttcttccccttccgtctctccttctctttttccttccctttctttcc

SEQ ID NO: 532147 - DNA, 625 bp, Homo sapiens
ggccctgaaacatggacttcattggttcagagatttggttattcagcaattatgggttatttgacataagcatggagacgtatatttcaaattatgtcttctattttcagtaatattcaatgattcttagacgtggtcttttgttcctagacatgtacatgagccatcttaaatattccagactagtggagactagtgcaaccaatgtctggttgcattaggacctagattaattttctgacctttacaactgcaaggtctctgcagaaagtaagtcagggagcatcatgcgctatagaggagcatagactgctgggaacaccactcctcgagcttggctgcacattggaagcacctgtgatgtctgagtctcactcaagaggatttaattgattaggtatgggattcagcttggatacaaggattttcttgaaatcccagataactgtaacgtgacaaaatttgagaactactggatgagagtgtattcttgtctaaacagagtaacgccagcgcaaaggacaagttactccttcctctctctcttcgcttcttcyccttccgtctctccttctctttttccttccctttctttcctccttcctataaagatttagcatttatt

SEQ ID NO: 532148 - DNA, 251 bp, Homo sapiens
ccccgcgcccgctgcgtacgcgaaggacacagccgagcgcgggtgcccgctgggggcacctcggagggtcaccgcgtcggggccaccgtgcygcaccaccgtccacgcggcgtctgctgagcagaaacgggcaaaggagaggcatcactggacggcagaggccagcagcaagaggcaaagcagacctgtcttttatgtgaattaacgtttaattgaaatttacattactgcatgtttgccgcgatttgagg

SEQ ID NO: 532149 - DNA, 251 bp, Homo sapiens
ccccgcgcccgctgcgtacgcgaaggacacagccgagcgcgggtgcccgctgggggcacctcggagggtcaccgcgtcggggccaccgtgctgcaccaccgtccacgcggmgtctgctgagcagaaacgggcaaaggagaggcatcactggacggcagaggccagcagcaagaggcaaagcagacctgtcttttatgtgaattaacgtttaattgaaatttacattactgcatgtttgccgcgatttgagg

SEQ ID NO: 532150 - DNA, 251 bp, Homo sapiens
ccccgcgcccgctgcgtacgcgaaggacacagccgagcgcgggtgcccgctgggggcacctcggagggtcaccgcgtcggggccaccgtgctgcaccaccgtccacgcggcgtctgctgagcagaaacgggcaaaggagaggcatcactggrcggcagaggccagcagcaagaggcaaagcagacctgtcttttatgtgaattaacgtttaattgaaatttacattactgcatgtttgccgcgatttgagg

SEQ ID NO: 532151 - DNA, 494 bp, Homo sapiens
ttattttttaaaaaatcttgagttctaaattctcccactcagtcataaagacaagtatgaataaattactatttggtagtataatgaaggttataaggaacattttaaagtaattcttcagaactgttttagactatgctgttaggaaattgtagtctctctcaaatttaacaggcattttaccaagcatatttttataatttggagatgaagattttttccaggagcagtaacgtagactctaataacatgagagcaagcatgagaacagtatgtaaagccaaagtcaccatctctcctcctaccccctcttggtgattattcttaatttcagagtcaaaaatgactgccatctttgcagttgagaagcctaaaagacattcctgactcttctgtcttcctcacattcatgtctwcttaatcaagtcaattttatctctagaatttatctgtattaaccaccatcaactccctgggcacagtgacaccatcat

SEQ ID NO: 532152 - DNA, 620 bp, Homo sapiens
atggtggggcagaggtggggataggttaatgggtacaaaaaaagtagaaagaatgagtaaaacttactatatgatagcacaatagggtgactatagtcaataaaaacttaactgcatattttaaaatacagagtgtaatcaggttgtttgtaacacaaaggataaatgttgaggggatggataccccattctccatgatgtgcttatttcacagtgcatgcctgtatcaaaacatttcatgtactccataaatatatacacctagtatgtacacaaaaattaaaaaataaaaaagatttcccatcaaatattctttcagagaagatgtgaacaaagatccagaattattggtcagtctaggcaaacagtatcaaacagcctaatatgattttctcctctgctaaataatactgggaaggcaggaaggtgggcttctctatggattgaagttaagagagagaagtgccaggagttcagtccacgcatgacaacttactagtactgcctacttgaagagattagctcttacaaccttatctttgtctcatctataaaactgagggagcaggttaaaaaaatcttayatgttaatacatgacttatcctactccatgtctcta

SEQ ID NO: 532153 - DNA, 472 bp, Homo sapiens
atgaacaagtgagagctttaatctgtgtagctcctaagttagaatagtttcaaaagcaatatggaaaaataaacaacagtgataaaacagtaagtaagcaaactaaaggaaagacttccagagctatcacctttaaataaatggagtgcaagaacagatgagccagaccrggttataaacaaggagcctgtgatgagagagccccagaagtgagaacagcagcgaggaaaaccgggagtgggctcctggaagcctggccgcgggggaggtgcgcagtgctgcttccaatcagcgggtatcctgcgatctggttttgagtggaccctggaggacttctgtcccaattacaagctctctaactccaccgagaagtgaaactgaaggaatggataaaaatgtctaatgatctcactaatagtgttgataaaatatagctgtcacatatgccaatcctctgcaatgtgaatggttc

SEQ ID NO: 532154 - DNA, 584 bp, Homo sapiens
tgatacacacaagtgtagtgagatctttctagtgagtttatctcagcattagatagagttcaagtttatccctaacaatgcttttcatctttgtctgacataatacagctrtatctgctttcttttgatttgtatttactcggtaaatattttctattcttttagtttcaacttcactgagtgcttatattttatcttttgtaaataagctatagcttctttaaaaatccaatatgataaaatctaatgtctggtttttaaatgaacagagttactcatatttattatgattatttgtacacttgtatgcatttaaaccatcttattttatgcttttttttgtggttacttttaaagactctaagataatcacacaaaagtcctatttaaattcttaagtaaaataatattacagttacatgtgtcatcattatattagcaaaacaacttgtggatttttgcagacagctgaattatatgttatatgtatattttagagaatatattggtctatttgaacatagtccactatacatttatacacatatattgacttgcagcatagttcaatattttaaatcatt

SEQ ID NO: 532155 - DNA, 584 bp, Homo sapiens
tgatacacacaagtgtagtgagatctttctagtgagtttatctcagcattagatagagttcaagtttatccctaacaatgcttttcatctttgtctgacataatacagctgtatctgctttcttttgatttgtatttactyggtaaatattttctattcttttagtttcaacttcactgagtgcttatattttatcttttgtaaataagctatagcttctttaaaaatccaatatgataaaatctaatgtctggtttttaaatgaacagagttactcatatttattatgattatttgtacacttgtatgcatttaaaccatcttattttatgcttttttttgtggttacttttaaagactctaagataatcacacaaaagtcctatttaaattcttaagtaaaataatattacagttacatgtgtcatcattatattagcaaaacaacttgtggatttttgcagacagctgaattatatgttatatgtatattttagagaatatattggtctatttgaacatagtccactatacatttatacacatatattgacttgcagcatagttcaatattttaaatcatt

SEQ ID NO: 532156 - DNA, 584 bp, Homo sapiens
tgatacacacaagtgtagtgagatctttctagtgagtttatctcagcattagatagagttcaagtttatccctaacaatgcttttcatctttgtctgacataatacagctgtatctgctttcttttgatttgtatttactcggtaaatattttctattcttttagtttcaacttcactgagtgcttatattttatcttttgtaaataagctatagcttctttaaaaatccaatatgataaaatctaatrtctggtttttaaatgaacagagttactcatatttattatgattatttgtacacttgtatgcatttaaaccatcttattttatgcttttttttgtggttacttttaaagactctaagataatcacacaaaagtcctatttaaattcttaagtaaaataatattacagttacatgtgtcatcattatattagcaaaacaacttgtggatttttgcagacagctgaattatatgttatatgtatattttagagaatatattggtctatttgaacatagtccactatacatttatacacatatattgacttgcagcatagttcaatattttaaatcatt

SEQ ID NO: 532157 - DNA, 584 bp, Homo sapiens
tgatacacacaagtgtagtgagatctttctagtgagtttatctcagcattagatagagttcaagtttatccctaacaatgcttttcatctttgtctgacataatacagctgtatctgctttcttttgatttgtatttactcggtaaatattttctattcttttagtttcaacttcactgagtgcttatattttatcttttgtaaataagctatagcttctttaaaaatccaatatgataaaatctaatgtctggtttttaaatgaacagagttactcatatttattatgattatttgtacactwgtatgcatttaaaccatcttattttatgcttttttttgtggttacttttaaagactctaagataatcacacaaaagtcctatttaaattcttaagtaaaataatattacagttacatgtgtcatcattatattagcaaaacaacttgtggatttttgcagacagctgaattatatgttatatgtatattttagagaatatattggtctatttgaacatagtccactatacatttatacacatatattgacttgcagcatagttcaatattttaaatcatt

SEQ ID NO: 532158 - DNA, 615 bp, Homo sapiens
tgccaaaagaggcaggcagaactcaaacctaagactggcaggcaggaagatgcatctaaccgtacagctcctctaagtattttataaatgaacaaaattagtggatctgataataataacaagcaacatttattgagtgcctattatgtgtgagacactcttcctattatcttacatgtaacaattcatttagacagtataaggacctatgagtaagtaccagtatttgaaagagaattataaaaatgctgcagagcgtttaagcagcacttacttgctcaatgccacatggctggtaagagcagagttagagttcaggttcttgactgcctaatcttcaaataatgtttttttttttttatatccaagcttttgaaaatggaacagcaagaatcttcaagatatattcttttcgttattcatacatagtatttgtacatatttgtggggtatatgtgatatttcatacatgtacacaatgtgtaatgattaaatcagaatttagaatactcatcactttggacacttattatttctttatgttgggaacatttcaaatctagttattttaaratgtaaatgaacaaaatcaatgaatctaataataataaaaag

SEQ ID NO: 532159 - DNA, 356 bp, Homo sapiens
tacagtacttataatagaagaagggccactgcattactattcttggcctgtctctgcttccttgtctccatttaacacatatgaagccacccaatcttactttgctaacactagcagtaaagcttttaaaatgcgattttaatatacctaactccttttctctctcgtttcagaatttaagaggaaggggtttattctttttttctttctctgaaatttattattgccctccctgttgwctcatcctttgctttcacccaccaattggtagacctaagttcctcaaaaatgtcatagtttggacaattgacctaatttttaacctcatgaacaatctgttttaaagtagttatatt

SEQ ID NO: 532160 - DNA, 356 bp, Homo sapiens
tacagtacttataatagaagaagggccactgcattactattcttggcctgtctctgcttccttgtctccatttaacacatatgaagccacccaatcttactttgctaacactagcagtaaagcttttaaaatgcgattttaatatacctaactccttttctctctcgtttcagaatttaagaggaaggggtttattctttttttctttctctgaaatttattattgccctccctgttgactcatcctttrctttcacccaccaattggtagacctaagttcctcaaaaatgtcatagtttggacaattgacctaatttttaacctcatgaacaatctgttttaaagtagttatatt

SEQ ID NO: 532161 - DNA, 621 bp, Homo sapiens
ctggcaagtcaggtgactcagggtcttttgtcatctcagtcctcatcctctaatgccatggactctcctcatttctccagaagtgtttccatttccacacctttaataattcctttactttagttaacctttccaggtgtgctctccctgagctctgagccttagttcattggtttagctctgatttagttcatgtctgtagcctgacaatgacttgttctttcttaaatttgtgctacacaggtggaaatctaaagtatggtgcatatttgattaaaagaatagtactatgtagaattttaaatggatagaaatatatagggtttatgaatacatttactggggcraacaacatgttttacaaatacactcatgtttatgatagtgtatcctcaagaagacaaaactagaatataacgtatatactcctttacaaggagcataagtaaagcggggcccaatttcattgtaatgttgccatgagcaaatggggcattacagtgaaggagacaaatggaaactgaagagaaagactctgtcattacataggcaggactctactaggaaaggattgactggtctataaatcagctctggttcttatggcccgaaatattccca

SEQ ID NO: 532162 - DNA, 592 bp, Homo sapiens
attgaattgcagtgacatattarttacaaatcaggtgaccataaatatggcctgtattttggctctatgctcttctactgatccacttattttttatctttgtcccagacagactagcttagtattactcttctggatttgttcttttctttaaaacttgtctagcctaggtcttttgtactccagtgtaaatttcagaattttcttgttaatttccatagaaaaatctgttacaattttattgagattttttgagaaatcaacatcttaacaatattgaaacctccaatccattaacattgtatatcctgtcttcttcaatctgtgagaagcttattctttgccctttgaatgttggtcatatagtggtcattggccaggacataaagaagcgggctgatgcctatccttgtttttctatagcctcatctctatagacaacattctgtccacaagtgaagaacaaagccagaagcaaacaggtggaatcctcaggagagtctttttgtaataaggagaaagatctcatatttgatttttacttctgacaggctctctggtcccatcccacctattcccctaccctaccagc

SEQ ID NO: 532163 - DNA, 536 bp, Homo sapiens
tatccctaacttcatacacccatagaggtgagggagtctgatttcctatgtaaagtatggagggtaaaaatagagcctaggatcagggctcaaaatcttttccaagaacagaaaaagcaatgtttatatattaaaaaatagtgtgtgcatgcgtgcatgtgtgtgtgtgatttacatacatatatacgcttaggcctttaggacaaagatgtttctcatgcaattgataaatatccattttgattgacacctctaaagtttactaggaaaattagacttctattgcaaaattaatagtatggagtgatgtttcttcttaggtcatatgaagaataaaaaaataataaaaagggaaataagtgtagaggaatgcagaaaatgaaaactatttgtttcctrttaaaagccatgcatagtgaatgtcttgagagaacctaggttccaaattacactcagaccccagctccaccaggccagcagctccctcatttcccagtggcctgccttcactctctagtggtggtcctagttgtgtg

SEQ ID NO: 532164 - DNA, 633 bp, Homo sapiens
cataccaaatatgctgagcctggcccagttccatgacgttcagaatcatgagcaataaacctaacaaactttgatgatggtgtgtagtgcagcaatattacatgtgcatatatataaaatatatattataatatcttatacattatataatttataatataaaatatataatattataatatcttatacattatataatttataatataaaatatataattatatatatatgttttggtgcaaaaagtattgtggggggttttgccattagaagtaatggcaaaaatcacaattacttttgcagcctcctaacatatacattagaatagacagaccacaggctggcacaatgtggaaagcaccgtaagatcacaggtacagagaaaagagtaaaccatgccatgaacttacatcactaaattttatacttgaaattacatttaacaatgatgcagatatagttttgagcaaagrtagcttcttgagatatttctgcatacagattcaattacatttggttaggaaaatcagcatcttgaactaataacaaaactggaatttcttcaccactaatttaagaagagagataaaaatagtgttgagttgatttttatataataataatgtgaagaa

SEQ ID NO: 532165 - DNA, 440 bp, Homo sapiens
tgtcaactttcctccttcactccagtagggcccaataatcagcaattaagtaactgatacgtgagaatgtgtaagcattattttcttagtctaaatgtaattattgaactttgaaacacattaaattcctttgcttcatttgtctaacaatttccaagtataaaacttaatattttcttcctacctgaatagcttgctaggaagtcccttattgtcaacaatatagtcaagcatatttgtatttacttttcagtaaagaaaaattgtatgctttctttactaaccttattaattcagtaagtaaggggtatccatactgtcatttagaaacaccaaaacactgtagaaagagcatgatctttggaataccaatgtggaaaaaaaaaatccgagtttttctaccttctacttatrgagtttgggcagttgtcttaattatt

SEQ ID NO: 532166 - DNA, 266 bp, Homo sapiens
tttctctactgtgttgtctcttttctattttgttgacctctcctcttatcttgaatattgccttattctgggtttactttactcttattctgctaacttctttctctagaatcttgagtcattatcttagacttttcttcttttagatacctctcttycccacccaacattcaatagttactcagtgaaagtccaaaatacaccatagttattacctcaccattcctgccctgctgccactcttcagccagaccactgacttactc

SEQ ID NO: 532167 - DNA, 628 bp, Homo sapiens
ctgctaaagaccctcatgataaaagtaagtaaatttgagaataaaataaagatttatcaaataaaccactgacttagcattgggatatgaatcattaaaggctacagttaagtgaatataggaacattagaagttaaaaactcatcaacgaattttcttttttttttttgacctttgaactttttattggcctcctgctccccaaagagaacctgcttctgctggcttaatgtctcagaactttggtgtccttggtttcagacaccactttacaatccactatccagcgggtggcagtctttcggatggtttgtatggagttagttgctgctgtccagggcatcaccaaggttaaaatcctcgccgtcttccagcaggcggcggtaggtggcgatctcagcccccaaattgacctcgatgttcrgcagggcctcttactcctgcgcctggcgctacccctctgcgcgggtctgtgccagccagctccgactccaggtgcagcaggatcctgttgagctgctccttctgcagggcttagcgggcctccacctccctcgggctgttctcccaattggccttgttatttctcatcaagtccaggtcgatctccaaggactggactgtatgt

SEQ ID NO: 532168 - DNA, 469 bp, Homo sapiens
acattggtgtcatcaatgatcttgtggagcccatggatttctctctccacagaccggcgcatgactgtccctgtctcatacttgactctaaagtcatcagcagcaagaccagcattgtcaacctgcagaacaatgtgggcattgtccatagtatttgtgaagatctgagccctcaggtcctgaatggtaatggccccagtctctgacttagggtctcttcttctccaggtgcaccccaagtttgctctccaccctctggttcttggtctcgaggctcctcgctctgtccagatargaggccaggcggtcgttcaggatttgcatggtctccttctctttctggaagcctcccattcctgccagatccccccggccatcctcgtggccaggcccccgggtcccaagccaccctggaagctgctggagtgggacacggagatctgggaaccagtggccccagcacctgcat

SEQ ID NO: 532169 - DNA, 561 bp, Homo sapiens
tcgttacaccccggtattactctctctctctgtctgtctctgtctctctctctttcttttcttcattgcattcactcttgaagcactctcatttaaggatgtttgtctccactgctcttgtcaatgttactaataatcgtcacactgtcaaagccaattatcaaatrtcatttatcatcttagttaatatttaagcagtatttgatttgtttgataaatataacactcttccattagctgtatgtaaatcttttttggttctattcatattttctgtcttcttttttttgtttttcttgttcattccttccacctctccttaatctgtaaaggttagagcagttgttcttcagagccctctggtctctaaattgaaccccccaggtaggcttctccagacatattgctttacatattacataacatttgttaactccaaaatttatattttcagtgctgacttattttcacacctccaaatataagtagccagttgttcataagtcatgttaatttgatgacttgtaaacatctcaggacaatatatccaaaccaaaccct

SEQ ID NO: 532170 - DNA, 561 bp, Homo sapiens
tcgttacaccccggtattactctctctctctgtctgtctctgtctctctctctttcttttcttcattgcattcactcttgaagcactctcatttaaggatgtttgtctccactgctcttgtcaatgttactaataatcgtcacactgtcaaagccaattatcaaatatcatttatcatcttagttaatatttaagcagtatttgatttgtttgataaatataacactcttccattagctgtatgtaaatcttttttggtyctattcatattttctgtcttcttttttttgtttttcttgttcattccttccacctctccttaatctgtaaaggttagagcagttgttcttcagagccctctggtctctaaattgaaccccccaggtaggcttctccagacatattgctttacatattacataacatttgttaactccaaaatttatattttcagtgctgacttattttcacacctccaaatataagtagccagttgttcataagtcatgttaatttgatgacttgtaaacatctcaggacaatatatccaaaccaaaccct

SEQ ID NO: 532171 - DNA, 561 bp, Homo sapiens
tcgttacaccccggtattactctctctctctgtctgtctctgtctctctctctttcttttcttcattgcattcactcttgaagcactctcatttaaggatgtttgtctccactgctcttgtcaatgttactaataatcgtcacactgtcaaagccaattatcaaatatcatttatcatcttagttaatatttaagcagtatttgatttgtttgataaatataacactcttccattagctgtatgtaaatcttttttggttctattcatattttctgtcttcttttttttgtttttcttgttcattccttccacctctccttaatctgtaaaggttagagcagttgttcttcagagccctctggtctctaaattgaaccccccaggtaggcttctccagacatattgctttacatattacataacatttgttaactccaaaatttatattttcagtgctgacttattttcacacctccaaatataagtagccagttkttcataagtcatgttaatttgatgacttgtaaacatctcaggacaatatatccaaaccaaaccct

SEQ ID NO: 532172 - DNA, 557 bp, Homo sapiens
gctgctaggaaaagatgggttgataatgaactgatgataaactgccttttcagaaactcaataataaataatttattggaaataccaagactaattataggaaaaaaataaatttggaaccaaagtcagaatggaaaaactgaagagagacatgcagagaaagtactcaaattttgacatagtttttccaccatgaaaacatcttccattctcacttctgaaggaagaagtttcttccttaccattgtatttcctcttttcagtctgcaacataagacccagcttgaaactgtcttttcccctgtcttctactaaaagcacccagaatagtaaattctcttttttggtgggctcctcccrtagacttttctttcaataaagttgttttcagttcagatggaaccatcctcctctctatgaaattagttataatgagggctaactaggtgcaaggagggatgtttaatgggttgattccaggggatccaaggttaatgtgtaatattttcaattcttttttcaaacagtagctttaattttatatttttctgaaataa

SEQ ID NO: 532173 - DNA, 550 bp, Homo sapiens
tgtatatatcaatttttaaaatcgccagagtcagaacatgactgcttgcttgagttaaacaagtccctggaataaaactgtgctcagcataataacttcttcaggtttatttggatatgtcaggggttgacaagctaatttacagatttgaagagttggagggtttattatagacaatcttttacaaccacatctcattagtagttaggaaattgaagaccagggagattaaattactttctcagagatagaggtaattagtaatatagccaggcttctatcttctaatatcattctctattcactatacctcaagtgtatatatatatacaggctaagtgttgctttctctttttttaaattgtaaacctggtaggtcaactcctgcaggtggatgctgaccaggatggccctggggaagttctgtytttttatattgctccaagaaccactaggtcatgtctgtcctgttccatctccagggtagaagataattctcccaaaatgcttctgtattcctctgaaaaaaaaggagtgtgctgtaggaaag

SEQ ID NO: 532174 - DNA, 492 bp, Homo sapiens
cactcacaagcaacagtgtatgagagtcaaggaaagcctgagtttggctgcagtaacaaacaagggttcatttctcccatgcactacgtgtttgctaccggttrgctgtagctctgctccaccttgtctcccctccaggtcccaggctgatggagcagcctctgtctatttgggacattgtcagtcacaatagcaaagatgagggaagaccaaaccacatgctggctcctacagtttctgcttagaagtggggcatgtcacttctctccatttttctttggtgagaggaagtcatgtgaccaagtctgattaaaaccagggcagagcagggaggagcagcaaatatgcatgggttacgatggcacctaccacagtgagccagaatttggggatgcactgaaagtctgcacttcatgtaaccaccaaagctcacacaggatttgatttttttggttcccggaggcatgaaatcatcaaagggagggaaaagtt

SEQ ID NO: 532175 - DNA, 624 bp, Homo sapiens
acgcacccatacatgctacaacatggatgaaccttaaaaacattttgttacatgaagaagccagacacaaaaggccacatgttatatgattccctttatattaaatgtccacaacaagcaaatccacagagatagaaagcagattagtagttgctgggggtggtgagagggaggaatgaggggtgactgcttaatagatggaaggtttccttttagggtaaggaaaaaattctggaactagacagcagcgatgagtgcatgatattatgaatgcgcttaacaccactgatttatacactttaaaatcattaaaatggtaagtttggcattaaagagaaaaagagtagacacaggaaataatgatatctaaggataagttaagatcaaggaaagtgcaaaccaaattataagagaatctgctgaccctgatgtttagaacattccctttgagcagtaagggtttccagacatagaattgattacattctcatctctacaggcctaatcacatcacttggttctgcagtgagtatttccayaatctaaaatatataaatgatatttttattgggcttaaaattttagaaataacctatggagaaatcatgaaagaccattatggta

SEQ ID NO: 532176 - DNA, 534 bp, Homo sapiens
tgattctgaaacattagacgttatagttgaagcactctgagctgrtatctctcctgggatacagagagcaacgaggccaacaaccatccccagagcaatgcccagcacgtgagaggtgtccataaatgtttgctgaatgagtgggcaaaaagtaacatatactagcaggacgattataataaaggtcatttcctgggtgcctactatgtgtcaggtatcttgctaggatgcttttaataaatggtctcattcaattttcaacacaattctccacacaacaggtgctgagagacatgttttacagagataggtatgggctcaaagggtgaagtggcctactgagggtcacatagctgggaacaagtgagtgggaacccggacctcggctggcctgggtgctgagcctcagtccttctatgtttcctgctgttccttcagaagaagagtgggtcaaagagctagcttcaacacccatccactctacccacaaggccagagtggagagggctgagctctgccctcctgtgcctacag

SEQ ID NO: 532177 - DNA, 628 bp, Homo sapiens
tgcctgtctgataattaaagcattcagatgaaatgctatatatctcagggacagtgactaataacaatgatttaagttacaggatctcaagcaaaggctgaaagtcaggggataaagtcagagatgttttattactaccaaccattctctcccaccttctctcatgggattctcaatccagaacaaaaatggttaggctaagtccaggctccttataattttatgtaccatcccactgctgttttgtattgcttagaattcatcaatgcactaaaaatggttgggcaaaacattctrtcagatttgcctggttgttcaaaatgtctactgcatatccactaaaacagatgcatgcattcattaaaaacatttaattgatgtccctgtcattaagtaattgatagcagaaagagtgagattagaacaaatatccatgatgcaatgtaaagagggataacttaaaaaatagaaaattatttctttagtagttacgagaaatagacagcattccagcttggaacaaaataggaagagggacatttggggaaggtttgatagaggagacggtggttgaatgggctttaaaataggggcagtatttggataaagagagtggaggcaagggcat

SEQ ID NO: 532178 - DNA, 628 bp, Homo sapiens
tgcctgtctgataattaaagcattcagatgaaatgctatatatctcagggacagtgactaataacaatgatttaagttacaggatctcaagcaaaggctgaaagtcaggggataaagtcagagatgttttattactaccaaccattctctcccaccttctctcatgggattctcaatccagaacaaaaatggttaggctaagtccaggctccttataattttatgtaccatcccactgctgttttgtattgcttagaattcatcaatgcactaaaaatggttgggcaaaacattctatcagatttgcctggttgttcaaaatgtctactgcatatccactaaaacagatgcatgcattcattaaaaacatttaattgatgtccctgtcattaagtaattgatagcagaaagartgagattagaacaaatatccatgatgcaatgtaaagagggataacttaaaaaatagaaaattatttctttagtagttacgagaaatagacagcattccagcttggaacaaaataggaagagggacatttggggaaggtttgatagaggagacggtggttgaatgggctttaaaataggggcagtatttggataaagagagtggaggcaagggcat

SEQ ID NO: 532179 - DNA, 628 bp, Homo sapiens
tgcctgtctgataattaaagcattcagatgaaatgctatatatctcagggacagtgactaataacaatgatttaagttacaggatctcaagcaaaggctgaaagtcaggggataaagtcagagatgttttattactaccaaccattctctcccaccttctctcatgggattctcaatccagaacaaaaatggttaggctaagtccaggctccttataattttatgtaccatcccactgctgttttgtattgcttagaattcatcaatgcactaaaaatggttgggcaaaacattctatcagatttgcctggttgttcaaaatgtctactgcatatccactaaaacagatgcatgcattcattaaaaacatttaattgatgtccctgtcattaagtaattgatagcagaaagagtgagattagaacaaatatccatgatgcaatgtaaagagggataacttaaaaaatagaaaattatttctttagtagttacgagaaatagacagcattcyagcttggaacaaaataggaagagggacatttggggaaggtttgatagaggagacggtggttgaatgggctttaaaataggggcagtatttggataaagagagtggaggcaagggcat

SEQ ID NO: 532180 - DNA, 598 bp, Homo sapiens
tttaatttttaatttaatatctttaaaaattctataatagaagaaacaatatcattcatgttagagttagttatcactggcttttagaaaataagatgtgatgcttcagctatgtctagacatgatatatgtggagaatgacacaatttgggctgaaaatgacttttttttctgtcccactggataatttgagagtatgtttctgttttaatttattcagtctatactttttattttccatttcatattatctagagagatacagtttctgagacaagggaaagcagaaacacacatagttattcaacatacattaacaccaacaaaataattgtgttaagttttatggaagatggaaatataaaaaggacacagcctctttgtcaatttggcaggcagaacactgttagtgccataagggaaggaaaaaatgccatgggagcttattcattcactaaccaaatatttattgattatatgttgccccgcaggcactatgataggagatatgtgatgtctaagacccagtcactgctgtgaaagatgagagaaatgcaaaaarcagaaaaaaaagtgctgttaaagtatgaaaattcac

SEQ ID NO: 532181 - DNA, 239 bp, Homo sapiens
ttgatatcacaaatgcaataaaaattacacatttttttttttttktgtgattcctctacaaagggtgtctagagttagctagaagaaagaaacacaagccaaactcaggaaggttgtaaggaggaagaatatatccagaaaaaaaatgaggcacaaaatttattggatatctttgaattttgaaagcaactagaaatgtgattcgactcgatttgttgcatggctcttcagactatcca

SEQ ID NO: 532182 - DNA, 535 bp, Homo sapiens
caaaaaacacctctaaacattaattctcctctgtatgcactcagaaagtaaagattgcacatgaaataaacagggatattaaataaaaaatacataagcagtcataaatgctaacttctatcctgttttaacatatccataaggtctgtttctgcataacaattaaccaacttatgttgttttagcaccaacttggcagataaaatgaagagcctctgtatgttaaaatgtaaatgttgttaatgaccaaataacaagggacaactattttttccagaataaaatttgaccagtagagagttaaacagagttgcaattayaatagcattttctttagaataaactaaaaacctatttggcaaaaagaaacgttataaacatcttactggaatctgataagataaggttacacagcaggtcaagtcactcctattgtctgcaacatcatttataatgaatgtctcttgtagaaaatctattaatgcaggcataatccctgtcctccattgtgagtgccataatgggattctatcca

SEQ ID NO: 532183 - DNA, 550 bp, Homo sapiens
cttaacaatatttatctcattttaattctttctttgagttggagacaaaaatttccataagacttcattagttgtttcaataataacaatgaagacattaataatatgaataataatatcacagtaaaaataggtagcattgatayagggcgtctatgccaggcacccatgctattaaatgcttttagaatgattatttctaggataggtaatatgatgggtatgagacttgtaactggttattctatcctagaatggaattaatatttttaaaatcccatgctataaagtacacaaatttaaactgtacaattgaaatggcttttagattctctacaaagctgttaaatatacacactcatatatatacatatacatacatatatatatatatatatatatatatatatatatatatacacacacacacgcacacacatacagggaataaaagggaaaaatataaaataggcttcaattttttccataaaatcatactggcatagccacaccaagtacaatatgctgtgacggagaggtttaaaaaatg

SEQ ID NO: 532184 - DNA, 550 bp, Homo sapiens
cttaacaatatttatctcattttaattctttctttgagttggagacaaaaatttccataagacttcattagttgtttcaataataacaatgaagacattaataatatgaataataatatcacagtaaaaataggtagcattgatacagggcgtctatgccaggcacccaygctattaaatgcttttagaatgattatttctaggataggtaatatgatgggtatgagacttgtaactggttattctatcctagaatggaattaatatttttaaaatcccatgctataaagtacacaaatttaaactgtacaattgaaatggcttttagattctctacaaagctgttaaatatacacactcatatatatacatatacatacatatatatatatatatatatatatatatatatatatatacacacacacacgcacacacatacagggaataaaagggaaaaatataaaataggcttcaattttttccataaaatcatactggcatagccacaccaagtacaatatgctgtgacggagaggtttaaaaaatg

SEQ ID NO: 532185 - DNA, 569 bp, Homo sapiens
ggaaaaatgaaaacactagagaatagaataaaaataaaaacatctccagactgggaaagtaatggcrtaagagatctaatgatgaatatttaaaccagttaaacatagaattgtaagtattgttgaaaaaatataatacacatttaaaaatctcctttcctttgtaaatgggtatagtggctgacctccaagatggctccccaaaaaccccacctcttagtctttatggcctcctgtggtttccttccatatcaaacaaggctgatttctataaccaaaaggatgtcgagaaaatcatcgcatgtgaattccaaagctaggttataaagctcattgcagcttccatctggctcccttggaatccgtggctctgaggggagccagctaccatgttgtgaggatgctcatgcagcaccacgaagaggaccaggtggtgaggaacaaagacttctggccaacagctagcaccatgttgccagtcaagtgagtgcacatcgtggaagcaggtcctctagcctcgtccagccctcagatgacggtagccctgatggcacctggactgcaacctc

SEQ ID NO: 532186 - DNA, 569 bp, Homo sapiens
ggaaaaatgaaaacactagagaatagaataaaaataaaaacatctccagactgggaaagtaatggcgtaagagatctaatgatgaatatttaaaccagttaaacatagaattgtaagtattgttgaaaaaatataatacacatttaaaaatctcctttcctttgtaaatgggtatagtggctgacctccaagatggctccccaaaaaccccacctcttagtctttatggcctcctgtggtttccttccatatcaaacaaggctgatttctataaccaaaaggatgtcgagaaaatcatcgcatgtgaattccaaagctaggttataaagctcattgcagcttccatctggctcccttggaatccgtggctctgaggggagccagctaccatgttgtgaggatgctcatgcagcaccacgaagaggaccaggtggtgaggaacaaagacttctggccaacagctagcaycatgttgccagtcaagtgagtgcacatcgtggaagcaggtcctctagcctcgtccagccctcagatgacggtagccctgatggcacctggactgcaacctc

SEQ ID NO: 532187 - DNA, 596 bp, Homo sapiens
gggctgtgctttgcatggtttccagctcctagttcctcatataaaacaacaaggagagtgctagacagaacttgatcctggatagtagaggtgtgccatcctttaatttggtaactgcataaaagacttccagtgttttcttgtcctcctctttaataatttactttactactttttcagttacaattcctactgtgtgttcttctacccgagtaatacatttaaaaaaacattttcaggtaaattattttaacagaagaagaagaaaaggactttctataaagcagtgaacttcacacaatgaaatatctccccctagttaaaatggctattacaaaaaaaaaaaaaaaaaatagatgctggagargatgccgagagaagggaactttgtaggaatgtaaattagtacaaccactatggaagacagtacggagattcctcaaaaaactacgaatagaactaccatttgatctggcaatcctaccactaggtatttatccaaatgaaaagtaaaacaggacatcaaaggaatacttgcattactatgcttattgcagcactattcacaatagccaagatatggcatcaacctatgt

SEQ ID NO: 532188 - DNA, 607 bp, Homo sapiens
tctactcccaaaaccataccacttccactgctactattctctgtgaaataggtgctccaaaccctgcctctctactttcttctgaatgatgtactctgtacatgcgtttgattggtggctcctagattatgttcagaactcaagtttcagaggaatttggaaaatgttttttttkccttacttttctaactctgtatgttggaagtactttggaatgaaattcaagtgagtaggccgggcatggtggctcacacctgtaatcccagcactttgggaggccaaggagggtggattgcttgaggccaggagttcaagaccagcctggccaacaaggtgaatccccatctctactaaaaatacaaggcacgtgcctgtgttcccagctactcaggaggctgagacaggagaattgcttgtttaacccgggaggcagaagttggcggtgagccaagatcacaccactgtactccagcctgggcaacagagcaagactctgtctcataaaaaataaaaaataaaaagttaagtgagtcaactcacagtatcctgcacaattttaatatgcaaagagtttttatgaaccagtaattatgaaccaattatcaaa

SEQ ID NO: 532189 - DNA, 536 bp, Homo sapiens
tgtccaacaaggaggcaaaagtgagcacacagacgggattcaaactctatcaaagagtggctggtagcttctgctgaagtcctttctcctctccagccttcaattaactccatctgttgattacatcactttatgaaagatgaagttggaggcttataaagaaaagtttgtcctgataggcacagtagtggtagctcctgggagagaaagaaaagcctgtatattctggctggtagaaaaacaaaaaatacagacttctcccttgaagccactgtcttaccagttaattctcactggatctttatttaccaygtaatcctttgtcacagttatgaaattaaaataggaattcatatgctttcttttcctgatatctaccttaaaatacttagccaagtgtttgttgcaggaaaacaaatatctggattatctcatcccctcacctaatctgattcatgcaaaagcaccatacacatatgcacatacacacacatgcacacacacacacgcacacctgcacacacctgcagcgtcat

SEQ ID NO: 532190 - DNA, 673 bp, Homo sapiens
aaatgagggagtgagacccaccagacctagctcagatcggcagaaccacacagttgacctgaaaactccagagaaagaataaatggttgatgttttgtgttgctaaacataaaggtgttctattatgcagcaatagctaactgaaggatttaggaaaaataatcaagttattatgggaacacaatggaaagtgagaataaaatggtctgtcataaagtcaaaaagccctctattcccagttctattgttaactgaccgatgcccttcagcaatttacgtaagcttttggattttggttttcataactgtggtttagataagataggggtatttttgattaaggatggaaaggtaaaaacatttttatttcaattccctcttgaaacataacaaaaaagagtaataaacagagggggaaaatcttcaaaagagaagagtatgcaagagagctaaaaacatgtccatgcaaaaatrtgtacacaaatgttcatggtgacatcactatttataatagccaaaaagtggaaacaactcaaatgtccatcaaaaaatgaatagatgaataaaatgtgacatattcacacaatggaggagtatttggtaataaaaatgaagtactgatatatgctacaatgtggatgatccttgaaaacattctgctaagtgaaaaaag

SEQ ID NO: 532191 - DNA, 613 bp, Homo sapiens
gattcttcaattacagtgctctcttgatatggaatacaaagggcaaccattacaaggtcctaaatgatacactccccacctgcaaatgcaaggtgtctactgtatcacttaggatcttgtagtggctgcctctttgtattacttgtcaccacactctattcctccaagaaacaataacaaaattaaacaaatgagtctacaaacttgtttcagctaacacctgtttcactaaatattctaaatagagccccctggtagtaaatacctattgactttgtccaacacacattactttgttaaatatctttgattttcagaacccatccatcctccaatctcagttcatgttgtttgagtgagactgaccaccgrgggtagatatgtgactctagccatcctcttgccacacaaagtgtttcttgtgtgggcatgtgacctaagttgggtgatgagaatcttacctaatccagtcgaaccattgcaaaacagagactgcttgtttctagggttgccaagtaggtaggtgttaggtctgaggctactgatgactatttttcttctacatgtaaagagcttgctttaggattaaatcaacattaaggaagcaaggaaa

SEQ ID NO: 532192 - DNA, 626 bp, Homo sapiens
tcctagaaatttctttgtattttggtatgcaaatttagagaatattatcaccctacatgcagctccatcttgtgcattagaatattaaaggtatttgtaagtccagyagttaaaacataataaatgcttattaaacttaattatcaaaatgtcctgcctccctccccaaaaatgcatgtgtcaattacctgcctggctagtgttctgtggaaaacagattgccagttagaattgtttgagttatacacagagcaactgcaaagctctgaaggttgccgttaaccttgcagtcatcacaaatatgtgtggcagttagaccattttttgtttgtttgttgaaagatgccactaaggaatgccatcacttgagggagtgatgcacatttttttctaagtcacagtaattcaccttgcatggtagtgacagagtaaggaaaataatatttcaaatagagcacagtcaatgctcctggcagaggtgtaggaaggaggatacctcttatcttcatgacaggttttctctttaagatgctaaactgaattgccttcttccaggatttttaatagacagatagctgatgtttcaggggaaattaaagtcaattggttttggatataccataact

SEQ ID NO: 532193 - DNA, 470 bp, Homo sapiens
tgagtctgaaaagagagtcagcaaaggggaatgggattatcattagttcttataggtttggaataggtgtacaaagtacattttcaagggcggggagaatgttacaaagtaccttcttaagggtgggggagaatattacaaagtaccttcttaaggatgggggataatatatcctatcagttagggtggggcaggaacaaatcacaatggtggaatgtcatcagttmaggctatttttacttcttttgtggatcttcagttgcttcaggctatctggacttgcaggtcacaggagatatgatgacttagcttggggtcagaggcctgacagcaaacatttgtggaatgtttacttagtctcaaacagagtgtacatgttttttagatatcatctcattaactccaggggaataggtgattttattatcccacttttataggtaaggaagtggaagattagggagactgag

SEQ ID NO: 532194 - DNA, 638 bp, Homo sapiens
taaaattcagttctttagtgtactagcttttcttgctgttatttactaagaagtttaagtaagagtagttaaccatttacttttattaaaaatgctaagaatctactgtgtgtcaggcacttgggatgtagaaatttattagataagcataatgttttaactctcattatttataatataatgtatgggacactaaaatataaactaactgtgttgggaatctatctcatggtctttcgcaaaatcttgatacgatccagtggtattttagtagagtcatttaaggggcagtgtaaagaaggtacttgaagagccagagtgaaatcacacagaaaagtaagagatcacagtggtataaatgcaaatagtgataggttggttccacaaggaaacaaattctgataaagagacacacgtggtttactgcagggcttgggtragggaagtcatcttgggcagagggagatgttgaactatgatgctgctaaatcagaggtttcaatgcattctacagggctgaaaatggcctgttagagatgtttcaagttaaaacaagaatgtttagcctttgtaccatacattgaccagtcacacgatatcggctgtgcctggggaggcgcttgaaattggatgagaca

SEQ ID NO: 532195 - DNA, 679 bp, Homo sapiens
agagcaactgctggggagaagctagcaccaggtaaaacttctgaaatcaaaagtaatgttgactgagttctgaaggaaagacttgcatggttgactgagttctgaaggaaagacttgcaagttatatactacagtagrgatggagagaggattgggagatatttagagacttgacttcttcctctacctgactctatttttactttatcttatgtaaaatggagacttactgagcacaagacaaatactcttccactaccctctcctttcacacgcatcatgtggattctgtgtgtgctaatcaaacctcacaagcatgtgaccacttacctcactatgtaccctccctcttccttttttcctccctcttttctttcctacctgcttttttcctctctaaatgctgaaatactgaagacttcaaagctctctttacaaaaagtggaggccacagatcctactgtgacttgtgtctctttttcctgggcccatcctcaaccatggtaaaataaacttctaaattgattgagacctgtctcaaatactttttgtttcacagtattcaacaatgtttagtgctacccagagcttgaggaaaatagaattaagaaaatccaattggaacttaacaatagggaagtgatttctgaccacagaatggagataggataaaaaaatt

SEQ ID NO: 532196 - DNA, 634 bp, Homo sapiens
gcagtctggtaaccacagacatcgtgttttatagatcaaaaaagaaaagaatagttctctctcttacttctcatcaccaccaaaagcccacctgtcctcctgtactctttatcctaaaatagaaactactttacctcaaaccttttctttctcagaggaatttgtacctcaaatagttggggaaaaaagaaatttatattagaaggctaaaaatgattaaaaacggattggggccaggtgtggtggctcacgcctgtaatcccagcactttgggaggccgaggtgggcagattgcgaggtcaggagaccaagaccatcctggctaacacggtgaaaccccgtctctactaaaaatacgaaaaaaattagccaggcgtggtggtgggcacctgtagtcccacctacttgggaggctgaggcaggaaaatggcctgaatctggaaggcggagcttgcagtgagmcaagatcacaccactgcactctgcctgggtgacaaggcgagatcccatctcaaaaaaaaaaaaaaaaaacctgattggctaactcttcctaaggcaacaataatactgctatattccaaatgtttgcatttcctcaaaattcatacattggaatattaacccccaagacgat

SEQ ID NO: 532197 - DNA, 606 bp, Homo sapiens
cagtgtttaaagcagcatttggtggtaatattacaaaatggattttaacatcagacatagtgagatggggagactggaataggtaatgagaagctagagattagggatccttggctttttctgagttcatccagatgtccccatttcaaatcagagtgcttagaagaatattgtaaacagattattcttaaagcctgttctagccctgagattatctctaaaaatattatatctagcatatactgtaggtccagtcactgtgataatttattaacattcattatattctcttaactgtatcgcatccctctgggacattttagaatttacaggtgagaaaagtggaggcttgtatgactattatgaggttaggtaagctggttgggtgatgaagtagaatttttattctagttgattttgacttcatagtctgttaatcactacatgtacygcacacaggaagtgtgtgtttctgtgtgcctacaaaacatagagtgctcttggagactgcaagaaacatgtgcccccaggcaaagaacagtatctgtgacaggtttgtgaacagaacacctaaagggaatatttaagattgtcaggttcctaacc

SEQ ID NO: 532198 - DNA, 609 bp, Homo sapiens
gcctaggtttggtcaaccatggctcgaggagcaaggtcatagtttggttgctggggaaaaggtgggcctctgaggccctctgaggaaggttcctgggtaagtcattggcttgtacactgggcagaccattcaaaagttataccctttaatcactattcccttcattcctgcaaatatacccacacgttctctcagctcataagtcttagctcattgtataatatggttgcaaatcctcccatcaccttgagggttaattttggggcacactcaggtttggcaaagaattctttatcaaaatactttaggtgtggttcgatagctccaggacaacagaaaagacactgcattttctatagaagcaataaattttggggggagtggttaactccaggccrttaatgtcatatttctctggtgattcattgttatagtccattaaagtgcaagatttgttattgctgcctactgaacaattttctattcttcattctagcagttttagaccaatagactggtatggacccaagacaatgctctcactgggctaggacaaaaatgagaaaaatgaggacaatgcaatatacatgtatgagtgaaaggtggcca

SEQ ID NO: 532199 - DNA, 609 bp, Homo sapiens
gcctaggtttggtcaaccatggctcgaggagcaaggtcatagtttggttgctggggaaaaggtgggcctctgaggccctctgaggaaggttcctgggtaagtcattggcttgtacactgggcagaccattcaaaagttataccctttaatcactattcccttcattcctgcaaatatacccacacgttctctcagctcataagtcttagctcattgtataatatggttgcaaatcctcccatcaccttgagggttaattttggggcacactcaggtttggcaaagaattctttatcaaaatactttaggtgtggttcgatagctccaggacaacagaaaagacactgcattttctatagaagcaataaattttggggggagtggttaactccaggccgttaatgtcatatttctctggtgattcattgttatagtccattaaagtgcaagatttgttattgctgcctactraacaattttctattcttcattctagcagttttagaccaatagactggtatggacccaagacaatgctctcactgggctaggacaaaaatgagaaaaatgaggacaatgcaatatacatgtatgagtgaaaggtggcca

SEQ ID NO: 532200 - DNA, 522 bp, Homo sapiens
aatgaggttggataagagaaaaataaaacattttatttcttacatatccacctttatgtattaggatgactcctatttygaggtatgttctttcaaaacctagtttacggagagtttttagtatgaatggatgctgaattttattgaaagccttttctgcattgatggagataatcctggaggttttcgtctttagttctgtttatgtgatgaatcacatttattgatttagatatgttgaaccaaccttacatccctgggataaagcctacttgattatggtggataagctttttgatatgctgctggattcagtgtgttagtattttgttgaggatttttgcatggatcttcatcaaggatattggcctgaagttttctttttttgttgtatctctgccagattttggtatcaggatgatgctgacctcatagaatgagttatggaggagcccccctccacctcaaattttgaatggtttcattaggaatgataaaaattcttttttgtacatctggtag

SEQ ID NO: 532201 - DNA, 522 bp, Homo sapiens
aatgaggttggataagagaaaaataaaacattttatttcttacatatccacctttatgtattaggatgactcctatttcgaggtatgttctttcaaaacctagtttacggagagtttttagtatgaatggatgctgaattttattgaaagccttttctgcatygatggagataatcctggaggttttcgtctttagttctgtttatgtgatgaatcacatttattgatttagatatgttgaaccaaccttacatccctgggataaagcctacttgattatggtggataagctttttgatatgctgctggattcagtgtgttagtattttgttgaggatttttgcatggatcttcatcaaggatattggcctgaagttttctttttttgttgtatctctgccagattttggtatcaggatgatgctgacctcatagaatgagttatggaggagcccccctccacctcaaattttgaatggtttcattaggaatgataaaaattcttttttgtacatctggtag

SEQ ID NO: 532202 - DNA, 522 bp, Homo sapiens
aatgaggttggataagagaaaaataaaacattttatttcttacatatccacctttatgtattaggatgactcctatttcgaggtatgttctttcaaaacctagtttacggagagtttttagtatgaatggatgctgaattttattgaaagccttttctgcattgatggagataatcctggaggttttcgtctttagttctgtttwtgtgatgaatcacatttattgatttagatatgttgaaccaaccttacatccctgggataaagcctacttgattatggtggataagctttttgatatgctgctggattcagtgtgttagtattttgttgaggatttttgcatggatcttcatcaaggatattggcctgaagttttctttttttgttgtatctctgccagattttggtatcaggatgatgctgacctcatagaatgagttatggaggagcccccctccacctcaaattttgaatggtttcattaggaatgataaaaattcttttttgtacatctggtag

SEQ ID NO: 532203 - DNA, 530 bp, Homo sapiens
aatcatgaatcgttccaggtagcttagcacttactaaatcagaagttcccaaataaatgattctcctatacatggtaagctrtcctgaacctgaccaatatttatccagttcttagaaataagaaaactcatagactttctgtaaagcatgacatatgctggggttggactcattggtaaatcagtgacaaaataaatcctcatgtacagggaaaaatgaaagtgactgtgagtaggggcagcctgaatgcaaaatgcctttgcatatcaaggtaggatgggcaaactaccatagtgggcaagagtagggcaggtctcacagtgaggatgaagttgcccaaggctggctccacaatagcagatctggaggaaaaacatgaccatagactggcgcagaagctgtgcccaaagtcagattacagacccttgactgtatcttctcctgcctcatttctcatcatgctcagtccagccacgctccaaggaggagcgcttctttggtatagccccacatctatcatccctcccag

SEQ ID NO: 532204 - DNA, 530 bp, Homo sapiens
aatcatgaatcgttccaggtagcttagcacttactaaatcagaagttcccaaataaatgattctcctatacatggtaagctatcctgaacctgaccaatatttatccagttcttagaaataagaaaactcatagactttctgtaaagcatgacatatgctggggttggactcattggtaaatcagtgacamaataaatcctcatgtacagggaaaaatgaaagtgactgtgagtaggggcagcctgaatgcaaaatgcctttgcatatcaaggtaggatgggcaaactaccatagtgggcaagagtagggcaggtctcacagtgaggatgaagttgcccaaggctggctccacaatagcagatctggaggaaaaacatgaccatagactggcgcagaagctgtgcccaaagtcagattacagacccttgactgtatcttctcctgcctcatttctcatcatgctcagtccagccacgctccaaggaggagcgcttctttggtatagccccacatctatcatccctcccag

SEQ ID NO: 532205 - DNA, 530 bp, Homo sapiens
aatcatgaatcgttccaggtagcttagcacttactaaatcagaagttcccaaataaatgattctcctatacatggtaagctatcctgaacctgaccaatatttatccagttcttagaaataagaaaactcatagactttctgtaaagcatgacatatgctggggttggactcattggtaaatcagtgacaaaataaatcctcatgtacagggaaaaatgaaagtgactgtgagtaggggcagcctgaatgcaaaatgcctttgcatatcaaggtaggatgggcaaactaccatagtgggcaagagtagggcaggtctcacagtgaggatgaagttgcccraggctggctccacaatagcagatctggaggaaaaacatgaccatagactggcgcagaagctgtgcccaaagtcagattacagacccttgactgtatcttctcctgcctcatttctcatcatgctcagtccagccacgctccaaggaggagcgcttctttggtatagccccacatctatcatccctcccag

SEQ ID NO: 532206 - DNA, 653 bp, Homo sapiens
ctgagccacacagccacagatgtaccacctaccccgagcccttatgtaacgtgaaataggaagtgatatttatcgtaataatctgaggttgttggccatgaagcatcacttagtgaaagctcactaaatcccaccaccttgactgagagaaagtttgcccagtggagcagcctagaaagtcagcctctgtggtcataaagcagggttgtgggaggtggagagtgggcctggaggggtgcacagaggcatccagccaaaaggccaggggtttccttttttaggctactgccctcagcagtcatgtctctctgagggccaggaatctagactgaattgaagctggcgacataatccctgggtcactcatgtctttctagagtgacactgcctcctggaggaaatccctgatggtgcctcatttttatttcttttttttttttacatcctccgtgtccagtacctgctcataggagacacagtaaagatataggtgttgaccaagtgcacrtggaaaacacattgttgttctgcatcagtgattttaattaaaaaatacgcctctgaaagaaagaaagctcactggtttgtagtcctttaaacaaagtaatgtgatatttagttgaggtttaagttattgcaccacgtctctagta

SEQ ID NO: 532207 - DNA, 603 bp, Homo sapiens
tcttaagttaaatgctggtgtgatgtctcctcttcattctccttggcctagcctaggtcttgtgagaatgacctctctgtatcatttgtcatcacattcagtggcaacagcaggagctaaatttattttttggttatcttttcatccctcaaattgtcacacctatttttcaagttccccaaaaatggtaattctatgataatccttagtaaccattagcataaaattaaaacatttaccttaggttcttctactatgcctgctagaaatttagactatttattacagctctcttttcaagcaagaacaaaatctgccttttggacccatgtaaggcactatattttaatacctttgaatgctactattattttggggaaactggaaaggacatcrgactggatatcaagagacctgctttctaggccaatctttgtcccttgctaggacagaggagagccatcattcttcattttatgtacatttttcaaaagtagggaatttttgataatttgtagttatgacagttaatattatgatgaaatatattgaaggagatatgtaaaatcaagtgtccatttactcaatactagattgtaacat

SEQ ID NO: 532208 - DNA, 575 bp, Homo sapiens
aaacaaactgtaactaattaatttgttgttagaatgctttcatttcccataatctgttttccacccactactatcaaatcctagagtttttaaaatcatattttaagatccaagtattgaaatatttagtactctaagacccaaagattcttatatttttccttgcaatatgtagtttttgttttaaaaatccttatttagaattaaaattataatttcttggtcactctgccactattcacttatatttttctacatatagagccagatgtattgcttattacttctcctctcccctcattttgaaatctctgtcctaacatttgtagtttagcagtgtttttctcacatgaagtatgtgattaatgttctctgaattcctgagtttctgcaaatatatatttttatcctgacagggctagacagtgaawttttgggtttcagctcacttttggaggtagcctatagaaataacgtaattcatttttagattttagtatgtattcaggaagtttgatgcctatctgattctttttcctttgtaagtgtggcagacacacttggttacccactca

SEQ ID NO: 532209 - DNA, 582 bp, Homo sapiens
ccaagctgtcagttcttggatgatttttttttctatttgtttttaagatattttcttcatcttggttattcygaaatttcagaagtggattttttttattaatcttgatatttattgaatctactgagacttgtgtttttcgccaattttgcaaagttctcatctattatctcttcaaatcttgctttccttctattttctcactgtagaaccccaactaaacaatccattggaaaatactgaccaggggcacattaaactaaattttttactttggggcttttggtccaaagtggtagagtgaattccagcaccaatatggacataggtaggtttgtggttggaaattctcaaaggagacatattaccatccctttcacacctgcctggccactccaccaagaatcaagctaaaacggtccctctgtggagcaacttttattttaggtcacacattttgggcatcttagggaattctttttttttttttttctttgcaataattcctattgtcacatctcactgtgctcaagccctggactttgtctcctatgctctgccttcctggcccattaaaactaa

SEQ ID NO: 532210 - DNA, 582 bp, Homo sapiens
ccaagctgtcagttcttggatgatttttttttctatttgtttttaagatattttcttcatcttggttattccgaaatttcagaagtggattttttttattaatcttgatatttattgaatctactgagacttgtgtttttcgccaattttgcaaagttctcatctattatctcttcaaatcttgctttccttctattttctcactgtagaaccccaamtaaacaatccattggaaaatactgaccaggggcacattaaactaaattttttactttggggcttttggtccaaagtggtagagtgaattccagcaccaatatggacataggtaggtttgtggttggaaattctcaaaggagacatattaccatccctttcacacctgcctggccactccaccaagaatcaagctaaaacggtccctctgtggagcaacttttattttaggtcacacattttgggcatcttagggaattctttttttttttttttctttgcaataattcctattgtcacatctcactgtgctcaagccctggactttgtctcctatgctctgccttcctggcccattaaaactaa

SEQ ID NO: 532211 - DNA, 583 bp, Homo sapiens
gagcaggtggtagagaaagaaggcaggatggaggcacgggtgcatggagaagagaggcctggaaagctcctttctttactatgctggccgcttgtttaatagaatgaagggagctaagaagaattcagcctcagtattgtggagcagtaactagaaaccagcccctatcattctaaattccctggtcatcctactttcaccatggaaaatgtggcaaatatgatggtgaagataaacaaagtgactatcaaagttgcgccatgtagtcactctatactgagaccactggctgacttcaggatctattttgtagtaattaaggaaactcttcaaaagccaaaaggtcaggatgtgattatctatgctccagacagccctaaagctgtgcagcagttttcctaaaattgctattgattttgttatttccccacgcactcccccccactcaaaaagtccctaaacataatttcctgtggcacagcccctaggccctctctggttcttttattctttaacatatggccttctcttgggatcatktatataaaaactactacattgagttacaggttacctgagctgg

SEQ ID NO: 532212 - DNA, 590 bp, Homo sapiens
ttctcttccttgtgattgtcttaataacattttcttttctctagcctactttactgtaaaaatacagtacataatacatataacatacaaaatatgtgttaatcaactgtttattggtaaggcttccrgtcaacaataggttattagtaggtgagtttctggtgagtcaaaaggtatactctgattttccactccatgggagtcagcacagttcaaaggtcaaccggaataatgaaaatgcaagggtctatggaggtgattttgtgtgttctctggcgatacccacatagaaatagcctggctaaactcagaaaagagcaagcaattgtatgatatatatgcaaatgtacatatatatttgtctatctatagacatgcatccagaatatgaaaatccctattatggttgatctttcttcaattttcaactgtgtgctttggcagtgggtaatcactgtaaaatattcagaaaaagcagaattaagaccaaatatgactgtcagagtagggactaattatctgattaattatttcatccactcatttactcagcatcacttttctgagcatttttctgtactatgctctat

SEQ ID NO: 532213 - DNA, 590 bp, Homo sapiens
ttctcttccttgtgattgtcttaataacattttcttttctctagcctactttactgtaaaaatacagtacataatacatataacatacaaaatatgtgttaatcaactgtttattggtaaggcttccagtcaacaataggttattagtaggtgagtttctggtgagtcaaaaggtatactctgattttccactccatgggagtcagcacagttcaaaggtcaaccggaataatgaaaatgcaagggtctatggaggtgattttgtgtgttctctggcgatacccacawagaaatagcctggctaaactcagaaaagagcaagcaattgtatgatatatatgcaaatgtacatatatatttgtctatctatagacatgcatccagaatatgaaaatccctattatggttgatctttcttcaattttcaactgtgtgctttggcagtgggtaatcactgtaaaatattcagaaaaagcagaattaagaccaaatatgactgtcagagtagggactaattatctgattaattatttcatccactcatttactcagcatcacttttctgagcatttttctgtactatgctctat

SEQ ID NO: 532214 - DNA, 590 bp, Homo sapiens
ttctcttccttgtgattgtcttaataacattttcttttctctagcctactttactgtaaaaatacagtacataatacatataacatacaaaatatgtgttaatcaactgtttattggtaaggcttccagtcaacaataggttattagtaggtgagtttctggtgagtcaaaaggtatactctgattttccactccatgggagtcagcacagttcaaaggtcaaccggaataatgaaaatgcaagggtctatggaggtgattttgtgtgttctctggcgatacccacatagaaatagcctggctaaactcagaaaagagcaagcaattgtatgatatatatgcaaatgtacatatatatttgtctatctatagacatgcatccagaatatgaaaatscctattatggttgatctttcttcaattttcaactgtgtgctttggcagtgggtaatcactgtaaaatattcagaaaaagcagaattaagaccaaatatgactgtcagagtagggactaattatctgattaattatttcatccactcatttactcagcatcacttttctgagcatttttctgtactatgctctat

SEQ ID NO: 532215 - DNA, 590 bp, Homo sapiens
ttctcttccttgtgattgtcttaataacattttcttttctctagcctactttactgtaaaaatacagtacataatacatataacatacaaaatatgtgttaatcaactgtttattggtaaggcttccagtcaacaataggttattagtaggtgagtttctggtgagtcaaaaggtatactctgattttccactccatgggagtcagcacagttcaaaggtcaaccggaataatgaaaatgcaagggtctatggaggtgattttgtgtgttctctggcgatacccacatagaaatagcctggctaaactcagaaaagagcaagcaattgtatgatatatatgcaaatgtacatatatatttgtctatctatagacatgcatccagaatatgaaaatccctattatggttgatctttcttcaattttcaactgtgtgctttggcagtgggtaatcactgtaaaatattcagaaaaagcagaattaagaccaaatatgactgtcagagtagggactaattatctgattaattawttcatccactcatttactcagcatcacttttctgagcatttttctgtactatgctctat

SEQ ID NO: 532216 - DNA, 628 bp, Homo sapiens
ggaaagtacatgaactgcctcgttaggcttaaccctgatggttagagaaaagctttgcatctccaggactggcattattttagaactgtaaccaacgtttagtagttttyccccccccttaatcaacctagatgagatgttctgcggttgggctggcaaaacggcagagcaaagctggaagggacgcttctgattttagtttggcaacggctgccttggggcctactgagaggatctgcagcagtgtcagtcacgccgaggcaaacgtggtgataacgccgaggcaaacatgtggtgatagcaggaggattctgcctgggcctcatgctcagttggcactctgccccatgttctggaagaaggagtgaatataccactacacacctccatccttttcctcatgtgccttcacaacatgtaattaaacacctctgactcacctcctaagctggacttcagtgagaagtgtacatccccagtggtatcttcattttcagatgcttagccaccatatgttgtttcatcactgcagacaaagccacaacttgaccacagcctactaaatctatatgtccagccataattccacgctgagtcccaggcttatatcttgaacttttggctgaac

SEQ ID NO: 532217 - DNA, 645 bp, Homo sapiens
tcattaatatgaataagatatggtcctgttcttaagtctaatactgtgggactttaggcaagtctcatagtctctctacatactttgcagagtgtgtattttaaaagataaaaactctgacatacttaatacaataagtggcaaaaagtagagactcaatttatgttccttcttttcctccatcccaggaacactgtaacatcaaatctgtcacattaattcacttacctctagagtgaggtttaatgaggtcttgttctatcattaactacaatgttccagtttagaactttgatttggctaacatctttctaaaaccatagtcagccttccctctccctcaacaggaacccatccccgcaaaacaagtttattcattctttktgatccctcaaatactgtaagttcctttgagagtaagaaccacaacattcatttatacatcacccacaacattcatttatacattgcccacaacactcagtgtaaaactgaacacaaattaggactccataaatgcttgtgaaactaaacaactgataatcaaaaatctttcattatatgccttctaggagttatgcagtataactgaaaatatttccagtatcctccaatctagcaacatgcttttttcctgaacaactg

SEQ ID NO: 532218 - DNA, 505 bp, Homo sapiens
ctcccattttacagataaagaaattacgatctagaaaggaaaaagtaattttatacacctatccaatgtcaaaactggaattcaaacccattactcatggatcccaaggcagtaatctttctatactatactagggagaaatttatgggagagtaaaattaaggcatctaagaatcttatacgctaattcatgactatttcttataggtaataatcatactaaatttgaatcaggcattatgacctaaaagatggatgtctcatgcactaggcttttactgagttcttgacrggaggaaaataggactgcctgttgtccaagtatgagggtggtataaagctaggtagaagtagtctctcctttctgatcttcactgacatttggtcaaaaagtcaggagttttaagcttgactcctacttttgcctggcagttttggaatgttttttagtaggctgacttttctcttccctgagattatgtaactttccatttactaaaacttc

SEQ ID NO: 532219 - DNA, 641 bp, Homo sapiens
ctgctttgtcattaagggaaatggtatttatagaccctctactacgtaagagcaatcacgtaaaagttgttacatatataattacatttaatattttcaacaattctatggcattattttggaacaaatcagagaatatttttataatcaagctgaatttcacctttccaattatgttatatttataaaaatatattgttttataattgrctattaaggctaagtatactttgttggctatcacagtaattcctaagtgttttctcccttcacccctcaatgactcatttgtgttccctgtcaaagaggccagtcttcccagattgaaaaatgttctttagtcaatatttgtttacagtaaagaattggctagaacttccaaacaaggtctcaaggtccatttctaagaaacatattaaattttggttttcatatttcccaaacttctggttatcccgaagctattctgtgcttcaaattaaattatatatgtaaatttgcatgataacatttaaaatatgatacaagtataacaccatgaaccgtcttatgatcacaaataacagagggaaagtgagttagggaggaaacaaaacaacaaaatatgagtgaaagagcaaaattgtacatattaatacata

SEQ ID NO: 532220 - DNA, 641 bp, Homo sapiens
ctgctttgtcattaagggaaatggtatttatagaccctctactacgtaagagcaatcacgtaaaagttgttacatatataattacatttaatattttcaacaattctatggcattattttggaacaaatcagagaatatttttataatcaagctgaatttcacctttccaattatgttatatttataaaaatatattgttttataattgactatyaaggctaagtatactttgttggctatcacagtaattcctaagtgttttctcccttcacccctcaatgactcatttgtgttccctgtcaaagaggccagtcttcccagattgaaaaatgttctttagtcaatatttgtttacagtaaagaattggctagaacttccaaacaaggtctcaaggtccatttctaagaaacatattaaattttggttttcatatttcccaaacttctggttatcccgaagctattctgtgcttcaaattaaattatatatgtaaatttgcatgataacatttaaaatatgatacaagtataacaccatgaaccgtcttatgatcacaaataacagagggaaagtgagttagggaggaaacaaaacaacaaaatatgagtgaaagagcaaaattgtacatattaatacata

SEQ ID NO: 532221 - DNA, 544 bp, Homo sapiens
attatttgtgtatgggtacactgaaagctcaaatttcaccactatgcaatatattcatgtaacacaactgcacttgtacacataatttcataaaaataaaaaaattaattccaaaaaaatttaaaaaaggaaatgtgaggccgggcgcagtggctcackcctgtaatccttgcactttgggaggctgaggcgggtgggtcacaatgtcaggagatggagacaaccctggctaacatggtgaaacatgtctctactaaaaatacaaaaaactagccgggcatggtggcacgcacctatagtcccagctactcgggaggctgaggcaggaaaatcgcttgaaaccaggaggtggaggttgcagtgagccgagatcgcaccactgcactccagcctgggagacacagagagactctgtcaaaaaaaaaaaaaaaacccaccaaaaaaaaaaaaaaaaaaaaaaggaaatgtgtagtttttaaggaatcttacaacttccagtcagtggtcactaggagattatgagattaggaatcatattgtcagc

SEQ ID NO: 532222 - DNA, 544 bp, Homo sapiens
attatttgtgtatgggtacactgaaagctcaaatttcaccactatgcaatatattcatgtaacacaactgcacttgtacacataatttcataaaaataaaaaaattaattccaaaaaaatttaaaaaaggaaatgtgaggccgggcgcagtggctcacgcctgtaatccttgcactttgggaggctgaggcgggtgggtcacaatgtcaggagatggagacaaccctggctaacatggtgaaacatgtctctaytaaaaatacaaaaaactagccgggcatggtggcacgcacctatagtcccagctactcgggaggctgaggcaggaaaatcgcttgaaaccaggaggtggaggttgcagtgagccgagatcgcaccactgcactccagcctgggagacacagagagactctgtcaaaaaaaaaaaaaaaacccaccaaaaaaaaaaaaaaaaaaaaaaggaaatgtgtagtttttaaggaatcttacaacttccagtcagtggtcactaggagattatgagattaggaatcatattgtcagc

SEQ ID NO: 532223 - DNA, 599 bp, Homo sapiens
caactagtaggagggtgacaggcagtgaagaatgaaatatcacctgtttgggtctaattatttgtgtatgggtacactgaaagctcaaatttcaccactatgcaatatattcatgtaacacaactgcacttgtacacataatttcataaaaataaaaaaattaattccaaaaaaatttaaaaaaggaaatgtgaggccgggcgcagtggctcacgcctgtaatccttgcactttgggaggctgaggcgggtgggtcacaatgtcaggagatggagacaaccctggctaacatggtgaaacatgtctctactaaaaatacaaaaaactagccgggcatggtggcacgcacctatagtcccagctactcgggaggctgaggcaggaaaatcgcttgaaaccaggaggtggaggttgyagtgagccgagatcgcaccactgcactccagcctgggagacacagagagactctgtcaaaaaaaaaaaaaaaacccaccaaaaaaaaaaaaaaaaaaaaaaggaaatgtgtagtttttaaggaatcttacaacttccagtcagtggtcactaggagattatgagattaggaatcatattgtcag

SEQ ID NO: 532224 - DNA, 544 bp, Homo sapiens
attatttgtgtatgggtacactgaaagctcaaatttcaccactatgcaatatattcatgtaacacaactgcacttgtacacataatttcataaaaataaaaaaattaattccaaaaaaatttaaaaaaggaaatgtgaggccgggcgcagtggctcacgcctgtaatccttgcactttgggaggctgaggcgggtgggtcacaatgtcaggagatggagacaaccctggctaacatggtgaaacatgtctctactaaaaatacaaaaaactagccgggcatggtggcacgcacctatagtcccagctactcgggaggctgaggcaggaaaatcgcttgaaaccaggaggtggaggttgcagtgagccgagatcgcaccactgcactccagcctgggagacacagagagactctgtcaaaaaaaaaaaaaaaacccmccaaaaaaaaaaaaaaaaaaaaaaggaaatgtgtagtttttaaggaatcttacaacttccagtcagtggtcactaggagattatgagattaggaatcatattgtcagc

SEQ ID NO: 532225 - DNA, 474 bp, Homo sapiens
agtacaagctgtgctgacaccttgaattttggagtttacgaagatgtcaaatggtgtatccttcaatgctcactgtatatgctaatacatttgggcakggggagtcactctgtgttattctaccccataaagtagctggcctgaaaattactctcccaaatagccaggagaacacctgttataaattatttttcagatacgaatcattttttcagatagttactatgtacagcacacaagctacagaaatagttaaaagtatgccatttacttcccaccttttgggaactcatatagttggaaagttgaggcctaaatacatgacaatacaagccacatgtgatatgcagagagcctacgtgtgacggatcagtgaagaaatgccactgcgagcgtccagttcacaggagggagcacagaggagctcctccacctccagcatcctggacttcaggctcttcgtgaaaggctggg

SEQ ID NO: 532226 - DNA, 474 bp, Homo sapiens
agtacaagctgtgctgacaccttgaattttggagtttacgaagatgtcaaatggtgtatccttcaatgctcactgtatatgctaatacatttgggcatggggagtcactctgtgttattctaccccataaagtagctggcctgaaaattactctcccaaatagccaggagaacacctgttataaattatttttcagatacgaatcattttttcagatagttactatgtacagcacacaagctacagaaatagttaaaagtatgccatttacttcccaccttttgggaactcatatagttggaaagttgaggcctaaatacatgacaatacaagccacatgtgatatgcagagagcctacgtgtgacggatcagtgaagaaatgccactgcgagcgtccagttcacaggagggagcacagaggagcycctccacctccagcatcctggacttcaggctcttcgtgaaaggctggg

SEQ ID NO: 532227 - DNA, 508 bp, Homo sapiens
ctcctgtgctggaaagggtgtcaagccagaaaggtcaatttgatctaaaacagaaagcgtcgggggtgctggagagagagaattcccaagagggagcgagggcggggaggccccggtgaaagactccagaggctctggagagttsgggaaggagacagcagcataagaaagcgctccttctggctccagcacaacctctggaatgttctccagagacagagccaggagttccgcattctctctcgtgatctcttcttgcagttggaccctggagcttttcaagaaagaagacacaacaataacgcccatccacgcctgctggtgtgctccctcctggcggcagccacggcttcagaaatgaattccacctaaccagtagtcattcgctttataacgcctgcggatctttgaactaggaggaaaatggggagcttttcatagcatcccctttgaaaaatcttctttgaggtctcaaatttaaacttccaaccctgaccatgacattata

SEQ ID NO: 532228 - DNA, 508 bp, Homo sapiens
ctcctgtgctggaaagggtgtcaagccagaaaggtcaatttgatctaaaacagaaagcgtcgggggtgctggagagagagaattcccaagagggagcgagggcggggaggccccggtgaaagactccagaggctctggagagttcgggaaggagacagcagcataagaaagcgctccttctggctccagcacaacctctggaatgttctccagagacagagccaggagttccgcattctctctcgtgatctcttcttgcagttggaccctggagcttttcaagaaagaagacacaacaayaacgcccatccacgcctgctggtgtgctccctcctggcggcagccacggcttcagaaatgaattccacctaaccagtagtcattcgctttataacgcctgcggatctttgaactaggaggaaaatggggagcttttcatagcatcccctttgaaaaatcttctttgaggtctcaaatttaaacttccaaccctgaccatgacattata

SEQ ID NO: 532229 - DNA, 508 bp, Homo sapiens
ctcctgtgctggaaagggtgtcaagccagaaaggtcaatttgatctaaaacagaaagcgtcgggggtgctggagagagagaattcccaagagggagcgagggcggggaggccccggtgaaagactccagaggctctggagagttcgggaaggagacagcagcataagaaagcgctccttctggctccagcacaacctctggaatgttctccagagacagagccaggagttccgcattctctctcgtgatctcttcttgcagttggaccctggagcttttcaagaaagaagacacaacaataacgcccatccacgcctgctggtgtgctccctcctggcggcagccacggcttcagaaatgaattccacctaaccagtagtcattcgctttataacgcctgcrgatctttgaactaggaggaaaatggggagcttttcatagcatcccctttgaaaaatcttctttgaggtctcaaatttaaacttccaaccctgaccatgacattata

SEQ ID NO: 532230 - DNA, 601 bp, Homo sapiens
atgtgagctagcagacagtccagctctttctctctttgctgtgaatctcccctttagggccagattttggaaccagactccgacaatgggaagttcttcatgtgacacatatgaagcattgagggcccaggaagtttaagttcatgaaaacctcagagggctgagcagcacatgtctgcttaggaggaagctgagctggccttgaaccaaccagaacttgatgaagggagatgagtccctttcttggaggacagcaatttctaatcatggcagcacaatctaaatttcatcttgaaatcttggaaagataccaacccatattcccaaaaagttagcttaaaattagagttgcctgtattactagaatatttataacctggatccattggctctggttctccgacctgcctggagtacagccgggcacttttagccatagaacgtggcrtggtctaccacctgtagccacggtgtctcaacttgcattttcttccctcaaccttggtttgggatccagtgccaagagtcaccctcaaaaaaaagacaagaggtgtttagaatagtcttagaagccacaactaaatctaaatttggttacttg

SEQ ID NO: 532231 - DNA, 133 bp, Homo sapiens
tgcaaaaataagacaaaacaaaaatctacasaggcgttcgaccagaccgctttggaaggtaaagtctcacaccgggaacgcaaagcaagttatttatctcccatgacgcctccgtctgcctgtcctgatgcgt

SEQ ID NO: 532232 - DNA, 264 bp, Homo sapiens
cactggctgaaatattaggacaaaaagaaaaagggtgggagccaggaattcacaggacagtgtgtctcagcagcttcaagggcccatctggaggtccgttgtgtcacggaggagcagatrccccacagcggccttgattctgcccttgcaatggggcagatcagacatcccagccacacatccactacaaataccgaggaatgctcaagcaaatcacaaaatccctgggaaatgagcacccaagttcatggaaggggctacaaa

SEQ ID NO: 532233 - DNA, 264 bp, Homo sapiens
cactggctgaaatattaggacaaaaagaaaaagggtgggagccaggaattcacaggacagtgtgtctcagcagcttcaagggcccatctggaggtccgttgtgtcacggaggagcagataccccacagcggccttgattctgccctkgcaatggggcagatcagacatcccagccacacatccactacaaataccgaggaatgctcaagcaaatcacaaaatccctgggaaatgagcacccaagttcatggaaggggctacaaa

SEQ ID NO: 532234 - DNA, 640 bp, Homo sapiens
gcagattaaaatgtgctgtcttccctaaaccttggaggaaacctcataaaggcatccttccttggttcttcttctcctgccaaataaaataaagagaaagaagctaaataatacagaaaagcttcaataatgtaacaagatatgaatacagttgctagccatttcctacataacaaagcaattaagtttcccaaggaacagggtcatcaataaaagagaagaccctgagagacaagaattttctccataaatcatcctaaatcttaactccaaatgattctcagaatcatttttaaccactgaaccttcatcagcccatgatcaaagactcactgaatccaacagctttacttaggacccactacaagaatttttaatatcctatgctaaatttcattaaaaggtagamtttagaagtctcagaaaatacactttaatacactttatattcccaaatacctcgaatgcaggtcccttccctgtctgagagcacaaaaggcatacaaatcaagtgctagcctggtttatccagagtataaccttcttaccaagcacattaagacaagaaatgggggaagcagttgagctgaaattacaggctgtcatgacacctcagtatcaaaactgaatacctggttcc

SEQ ID NO: 532235 - DNA, 534 bp, Homo sapiens
tttacatacaggacttaagactagagaagagaccagaggcaggatttgttggaagcctgtggaaacaaatcccaaacagttctgcttctcctctggttctctgtaggctgctgttgaaaaggaggctaccaaacaggtaaacgatacaaatagaccccagagccttggtttatgtctcacttgttttggaaacataatgagtcatagtttgtgttatttctgagtaaaatgtaaaaatayatagtaaattctgccctgaacctagaaattcctgaaacccttctagagatctggaaattggccccagtgtgtttatacagatataatctaattaaaatatttgaaaagtctttctttacctttccagaatcctggatatcccaagtaaatgagcctatttatgttctgcttttgattcacagatattacagagcaaaggcactgtgatataaaaccactgagcacacattttcctttctcatttttaaatgaaacttactaatttgtcatcaagcactacatttaaaaactcaa

SEQ ID NO: 532236 - DNA, 534 bp, Homo sapiens
tttacatacaggacttaagactagagaagagaccagaggcaggatttgttggaagcctgtggaaacaaatcccaaacagttctgcttctcctctggttctctgtaggctgctgttgaaaaggaggctaccaaacaggtaaacgatacaaatagaccccagagccttggtttatgtctcacttgttttggaaacataatgagtcatagtttgtgttatttctgagtaaaatgtaaaaatatayagtaaattctgccctgaacctagaaattcctgaaacccttctagagatctggaaattggccccagtgtgtttatacagatataatctaattaaaatatttgaaaagtctttctttacctttccagaatcctggatatcccaagtaaatgagcctatttatgttctgcttttgattcacagatattacagagcaaaggcactgtgatataaaaccactgagcacacattttcctttctcatttttaaatgaaacttactaatttgtcatcaagcactacatttaaaaactcaa

SEQ ID NO: 532237 - DNA, 534 bp, Homo sapiens
tttacatacaggacttaagactagagaagagaccagaggcaggatttgttggaagcctgtggaaacaaatcccaaacagttctgcttctcctctggttctctgtaggctgctgttgaaaaggaggctaccaaacaggtaaacgatacaaatagaccccagagccttggtttatgtctcacttgttttggaaacataatgagtcatagtttgtgttatttctgagtaaaatgtaaaaatatatagtaaattctgccctgaacctagaaattcctgaaacccttctagagatctggaaattggccccagtgtgtttatacagatataatctaattaaaatatttgaaaagtctttctttacctttccagaatcctggatatcccaagtaaatgagcctatttatgttctgcttttgattcacagatattacagagcaaaggcactgtgatataaaaccactgagcacacattttcctttctcatttttaaatkaaacttactaatttgtcatcaagcactacatttaaaaactcaa

SEQ ID NO: 532238 - DNA, 536 bp, Homo sapiens
ctgcacacaacaagctccatgcagagacccatagaaggcccagcccatctgcaactagcagatgaaggactggtgctcagggacacagtatctcctcccaccaccccaaggttatgtcacttctttcatgcagccagatgccatctagcggggtgaggaaaacagcaagaaatctgaaatactgagatagttgagaaacaggctctctctctctctcctgggtttttctccacccccagcacatgaaagaattgtaaggaaatttagatgattgataataaactataaaatataaaatctggattatcattatatattttatggtgatgggtagatttccatactcgccacaattactagcctttcctaaattaggacattttctggaatgttcttctaataaaaactaagtcattatcattatacttagattttataaccaagaattccaaagtcatattaccagtctactacgctttcccaatgaatccatcctktaagtctaatttctaaatacacttgttgtccacaaggtg

SEQ ID NO: 532239 - DNA, 533 bp, Homo sapiens
tgctgcggaagggttgtcccttatttctgaattaaatgagggagggcgggaaataatatgttgagatccagtaggaggtctatttagcaacagaaaaatacactggcaatgctcatttaaggaaatctgctacacacattatcttggttttggtgctgctgtggagttttggttgttaaaatcagagtttctcacacaggaactgaaaaaataatgactaattgcaacttgtgttacaacatattgttcccccaggtcagtgcatgttgagcaaaggtatgtggccaagttttatttgggctagaagaatccaagccctccacataatcaagagagaagccaccgtgtgacccaaatgaacgtaggagcaacaaacytacaaggcttcaccttcagctatttctctctctctttgcagaagaaggaagccagaaccaagttagaatcaacttgtctaccttgtacaatataaagacaatggtaattaagaacattattaaagaggagatatccaaagtgtcaggaaaaaaaaa

SEQ ID NO: 532240 - DNA, 533 bp, Homo sapiens
tgctgcggaagggttgtcccttatttctgaattaaatgagggagggcgggaaataatatgttgagatccagtaggaggtctatttagcaacagaaaaatacactggcaatgctcatttaaggaaatctgctacacacattatcttggttttggtgctgctgtggagttttggttgttaaaatcagagtttctcacacaggaactgaaaaaataatgactaattgcaacttgtgttacaacatattgttcccccaggtcagtgcatgttgagcaaaggtatgtggccaagttttatttgggctagaagaatccaagccctccacataatcaagagagaagccaccgtgtgacccaaatgaacgtaggagcaacaaacctacaaggcttcaccttcagctatttctctctctctttgcagaagaaggaagccagaaccaagttagaatcaacttgtctaccttgtrcaatataaagacaatggtaattaagaacattattaaagaggagatatccaaagtgtcaggaaaaaaaaa

SEQ ID NO: 532241 - DNA, 476 bp, Homo sapiens
tttagtgaacttgcttttttttcccctcaaktggaaaagggggcatctctataacatatgaggaataatgaactaatttctccttttttttaggagactgaagcttggctaatggtgacagtgatgtagaggcagaatcttcttactctgtgcctgatattttatgttcattacccttacaacaaccttaagagatatacacattttttccattttccatgggagctagaatagaaagaaactaagtaatttgctaaatttcatacaatagtacgtggagaatttttattcagatcagtctccaaattccaattttttacctgtatgactttttcgtcttcctgcgtagggcaatgcttggcacaaagctgtagctaaataaaaccttagcaggttatctaccttaacacttgatgtgttatcaggaagtaatttaagcaagctcaaaatgaacttgctgcttcactttgaattgt

SEQ ID NO: 532242 - DNA, 537 bp, Homo sapiens
gtgtgtgtgtgtgtgtgtacgggaatgttgcagtttgtctgcaacacaaggcacacatagaaagtaaagggacatggggcaggaatgcagactggaacatagcaccaaggcacccccatgccaggccaagggacccttacataagtatttcctactagaaagaaagaacatttctgagcagggaaatgctgtgaagctcaaaccctcctcccccaccaaaatccattgcctcgggctgctggtagttcccctggctaataaggatacctcatccgagccatttccacttccaggctttgtcacctgctraggccagaaaggcagtgaaagggtctggaagcattggtggcctagggagggtggcccctggtggccactcagctaaccaacatggtggcagaggcggcagcggaggccccactgcgctacgtgggtctgggttggaataacagagtaaatggtgggcagcaacttagcactggcattattggtgaggctgggacacaggctctccaagtcccgctgtggaggaggtgc

SEQ ID NO: 532243 - DNA, 618 bp, Homo sapiens
ctggcacactgagattggcgcttaattctgctgggccaactctgcaaaccagtgtaaaaatgcctcagttatgccacccaaggacaagggagctgggatatctgtatctctactccaatcagttcaggttaagggctactcccaggtgtctattaatttccaggtacttcccaacgttttgggggtggaaagcagaattcagtggccccaaaaaaagaaaagaaaggcctcagataattgagtgctgttgaagagagctagtgtgccctgaagcagcaacagggaggaaatatgggcagagcatcaatgttatctgctagtttcactttgagtatttaataaatagtctttcattcattcattcattcaacaaatgactacgtgacatctgtgtatggttcaggcactgggctgggtgctggggaagagtggtgagcaaaagcagacatggkattcacataaatatagcctatatcctagtggaaaaaagcagataataaacacatacatcagcaaataagatcattacagactgggataagcaatttaaaggaaagaaacagggtgttataataaagagtaattgacatagaaacaaactcaggaaagtcaaaaaag

SEQ ID NO: 532244 - DNA, 582 bp, Homo sapiens
ggtagctcagctattcctcatagacaagtaataatctccaggttggccactcccagattccctcgcttggaacacacattcaggtgcacctgtcatacagggtcattctaagkttatgcttaagttattgctttcaggtgcatttaccctgcagggaggtaagtttgagcaagagtatactgtgaggttgggagcttcaagctgaaatcaagttgatttccagaaaaaaaaaaattaaatgcagtatttcctggatttctgagttagttaactgtaattcctatcacttcaatatgataacctgtatcaagaccaatgaggcgtagtcgcaatgagcagacttgcagaggagaaaatggcacagacaaactaccctgagagctggatgagaacagaagaaaaaacactccccctgcttttgtgaagagggtagaaatagctttgactggttaagaatttgttttacttttaacagtgtacaattcagtcattattttctgcagtcttagagcctagcattgaatagacattaaatgattaattcattttaatttttagttactggtagaattgttcatttaa

SEQ ID NO: 532245 - DNA, 551 bp, Homo sapiens
tgaatacattaggtgcttactaggatttcttcctccgtgcaaggctcagaactctaatttttgcctacatagcctcttgagattactgaaggttttgcttcaaaatcaaggattttgacttccwttgaggaatcagcaaacatcttgagggaaaaagtagggataaatgaggctgaaaagggttcttttttcgctttcacacagattttttttcattaaatcttcactgcattagtatgtcttgaatgtcttcaagaagatggtttttatattttgtcagagttgatctacaacaaggcagcagcacatcattatcagaatgggaaatcctttatataagcttgaaaagactgtgtgttctacaattctggggtgcattgatgtatacgtgtgttagactatctattgatttttgtatttatgtcttattacagatttaattatgtctgcttaatcaatatgtgtccaaatctatcagtatgactattgatttgtcaatttccattatttgtcctatcgaactttgtcaattcagaaaccatgttattcag

SEQ ID NO: 532246 - DNA, 657 bp, Homo sapiens
cattaggtgcttactaggatttcttcctccgtgcaaggctcagaactctaatttttgcctacatagcctcttgagattactgaaggttttgcttcaaaatcaaggattttgacttcctttgaggaatcagcaaacatcttgagggaaaaagtagggataaatgaggctgaaaagggttcttttttcgctttcacacagattttttttcattaaatcttcactgcattagtatgtcttgaatgtcttcaagaagatggtttttatattttgtcagagttgatctacaacaaggcagcagcacatcattatcagaatgggaaatcctttatataagcttgaaaagactgtgtgttctacaattctggggtgcattgatgtatacgtgtgttagactrtctattgatttttgtatttatgtcttattacagatttaattatgtctgcttaatcaatatgtgtccaaatctatcagtatgactattgatttgtcaatttccattatttgtcctatcgaactttgtcaattcagaaaccatgttattcagtctacactgtactagaattattatattttcctggagaattaaatctttaaaggcttttatcattatttagtatcacacttttattgttaatggtatttgtgccttaaaaatc

SEQ ID NO: 532247 - DNA, 542 bp, Homo sapiens
acatcagagcatcaagatctagcagggctggggggcgcttcgaggtgggccggcttgaatgttgtgaacaggagcagatgttcccagcaacctcccaccccacccctttccttaaatagtccttatttatttatttggtgccagtaatatttttccattgtgcatgttgatatagaatacgttagtgctgctgaagctccagaaagttttagaaagaaaaatctgaacaatcttctactgaacatttagaaaaatcaaacccactgcctgccacaaagaaaaagagggacaaataccctttgcaaaggagaagtgctctgggctgctgtgcctattgggatgttgctatccccacctyatctcttgtagattgtggaaagctgtggactaacttgaggcacaaattgactccacgtgttttcccccgtggtgaactcttgctttctgatcacttcagggcaggaggagagaggcagtgcttggtgggcatgtggctttctgctagtggtggggggcggggtgtggggtggattctccagctg

SEQ ID NO: 532248 - DNA, 578 bp, Homo sapiens
tggttgaaattgaccttagatgtagcctcactcctgagatcctgggcagccattatatccccagagtcaaggaagtgcatgaagtaattcatttaacaaaaaaagagaaaataatgctgttttcatgggagttgctgcgtaaattcaaatgaacaaggaatgcctaaaactgaggacactctgtaaccattacgtcttttctgcacctcacccctcctggtgctctgcttcctccgcactctccatcccaggtctgatagtggccattgaactatattgagattttaaatcaaggtggaacttctttcaacagtggttgttttagggcttatttctaatagaaaaacagaagtccttaacaacctgatcaaggcatttcaaccttgatgggtgagaatttggggaaggggtgaatcaaagaaagagaggcacctcatctgcccagggaaaatgccagccaaactagcactgacttcacaacccaccctgcttcctccatgttgagtttccatcttgtgaaagagaaacagagacagagatrgagaagcaaagacaggcacacagagggccacagtcca

SEQ ID NO: 532249 - DNA, 623 bp, Homo sapiens
actgataaaatttcagtggggaggatttacagctcttcaaacattgtgaaatctttacatctcctgagttcaccacattgccttgcactacataggcactcaataatgagaataaataaatctaaaayttaacttaatttattaattgaaatagttttctgtttcctggggttaggcatggggtcaggtgggtgccaaggaagtggtgtcaggggagggaagaatttcctacagcatcctctgcaaatatcactggctgtcttcagagtcctccctcactattgcctaattttccctcagcaggtatccagagctgcctcttcagtcaaactgagtcctttggcacaaacttcctcaatttcctatgtccactctgcaaacttcctttctctgccctcagcctcctctgatcttatcactaatcctggaagacaaggcatctcttctccccagactgattttcccacctatgcacttgatccaatcctcttggcccttttcaggactgtgttcaaactgttgaatctaaagaaatcctctcttttgcttatgtccttggtggaatttggctctgttggccatgttttattccagccttggagtgtctttttgtgatgacacag

SEQ ID NO: 532250 - DNA, 623 bp, Homo sapiens
actgataaaatttcagtggggaggatttacagctcttcaaacattgtgaaatctttacatctcctgagttcaccacattgccttgcactacataggcactcaataatgagaataaataaatctaaaacttaacttaatttattaattgaaatagttttctgtttcmtggggttaggcatggggtcaggtgggtgccaaggaagtggtgtcaggggagggaagaatttcctacagcatcctctgcaaatatcactggctgtcttcagagtcctccctcactattgcctaattttccctcagcaggtatccagagctgcctcttcagtcaaactgagtcctttggcacaaacttcctcaatttcctatgtccactctgcaaacttcctttctctgccctcagcctcctctgatcttatcactaatcctggaagacaaggcatctcttctccccagactgattttcccacctatgcacttgatccaatcctcttggcccttttcaggactgtgttcaaactgttgaatctaaagaaatcctctcttttgcttatgtccttggtggaatttggctctgttggccatgttttattccagccttggagtgtctttttgtgatgacacag

SEQ ID NO: 532251 - DNA, 623 bp, Homo sapiens
actgataaaatttcagtggggaggatttacagctcttcaaacattgtgaaatctttacatctcctgagttcaccacattgccttgcactacataggcactcaataatgagaataaataaatctaaaacttaacttaatttattaattgaaatagttttctgtttcctggggttaggcatggggtcaggtgggtgccaaggaagtggtgtcaggggagggaagaatttcctacagcatcctctgcaaatatcactggctgtcttcagagtcctccctcactattgcctaattttccctcagcaggtatccagagctgcctcttcagtcaaactgagtccwttggcacaaacttcctcaatttcctatgtccactctgcaaacttcctttctctgccctcagcctcctctgatcttatcactaatcctggaagacaaggcatctcttctccccagactgattttcccacctatgcacttgatccaatcctcttggcccttttcaggactgtgttcaaactgttgaatctaaagaaatcctctcttttgcttatgtccttggtggaatttggctctgttggccatgttttattccagccttggagtgtctttttgtgatgacacag

SEQ ID NO: 532252 - DNA, 634 bp, Homo sapiens
ctggcaggaagatcagtgatccagcctgggtaggtcagagaaggccctgtggaagacaaaatgctcatgttgagtcctggagacctggcaggagtgggccagggraatacacagtaggcagtcactgaatatctggaatgaattttgaaatccatgcagaggaaacagcatattgagagaaccagagggtgaacagcacggcaaattttggaagagagtaagtagttcagccattcaacatttgacaaatatttattgagcatctagtatatgctagactcttctgtagggattggagatataatggtgaacaagatagtaaagctcctgtttttagagagcttggggagaactgtactaaactaaaaataagtaaacaagataatttcagacagatagaattataagtggatatgccagagtgattaggaataaagctaataatttaatggctattaaatattattaaaagccatgacttttacattaaaaatgattatttatttggaggattgaatgtctaattatattttagaggaacttttatgttatggcagaagagtccttttggctgtccctcaaattgccaaaagtaagattgatcttgcccatgggaatgagtgggggcataggc

SEQ ID NO: 532253 - DNA, 604 bp, Homo sapiens
acacacacacaaaatttttttktaagtattacttggtctctaaactaaagaatttaccatctattttgggagatgaaatccaaacataagcaatgacaacaattattatgtgcttaaatcaatgtccaagacaataattgaccccaaggcagggaaatcactgagagagtatagcagagaaggtgtcctctctgttcagatgagcctgaataatttgttcagtaggtttctgctactcatttataaactgcacatcttctgtagtcctggaaaatgtctaagaggagagaggaactaagatcagggccaccatttaattaggaagttctgggagtacctgacccagaagaaagatcagcatagctgaaaatcacccataggagaaacatctaggtaatcttatttctgttccacctgacatttcaacctctcttttcagctataagtatataagtacttatatgtaagtaaagaaatgtacccacatcatgttgttttttattcaatgcttaacatgtataatgctaacaacacagacttgatgtccaaaacatttctatgaacagctcattactggatgactgaaataatttttccaagccac

SEQ ID NO: 532254 - DNA, 604 bp, Homo sapiens
acacacacacaaaatttttttgtaagtattacttggtctctaaactaaagaatttaccatctattttgggagatgaaatccaaacataagcaatgacaacaattattatgtgcttaaatcaatgtccaagacaataattgaccccaaggcagggaaatcactgagagagtatagcagagaaggtgtcctctctgttcagatgagcctgaataatttgttcagtaggtttctgctactcatttataaactgcacatcttctgtagtcctggaaaatgtctaagaggagagaggaactaagatcagggccaccatttaattaggaagttctgggagtacctgacccagaagaaagatcagcatagctgaaaatcacccataggagaaacatctaggtaatcttatttctgttccacctgacatttcaacctctcttttcagctataagtatataagtacttatatgtaagtaaagaaatktacccacatcatgttgttttttattcaatgcttaacatgtataatgctaacaacacagacttgatgtccaaaacatttctatgaacagctcattactggatgactgaaataatttttccaagccac

SEQ ID NO: 532255 - DNA, 563 bp, Homo sapiens
taacactcaccgcgaaggtctgcagcttcactcatgagccagcaagaccacgaacccaccagaaggaaaaaactccgaacacatctgaacatcagaaggaacaaactccggacacaccacctttaagaactgtaacactcactgcgagggtccgcggcttcattcttgaagtcagtgagaccaagaacccaccaattccggatacataaatctgcatgtgtgagtgtggatattgtgtgagtgttagagtggagtacgtatttgtgtgtgtgtgtggaatggtggggagctttgtgtatgtttacgtgtgtgtatgtgtctgaccagggggcacctcgtctgttaagctgccctgacctccttctgccctcactcacaatgctctgtctctcctggtgtccctctgtgtgctgagcacagttctgtcagtgccccccgacttcctttattaaacctgactggcctcgctcctgtctccatccccacactgagcagagacctgggcccagtggcctcacctcctccagtctggcawgcgtcggggcacggcccatatgggggtt

SEQ ID NO: 532256 - DNA, 297 bp, Homo sapiens
ctctccaggtttcttttccagaccttgatgtttttgacctgccttctcctccctccgycccccaatgttgtactacaaggactcctgatggtcagcccctctttcttcctcattttaatttcgtgttttaaattattttaacatgtttcttatcatgtttctagttttcttatacagcttatacctatcactaaataacttaataaatcaatacagttttatcatcaaagtaagtccatactgcctaaagcttcctcctcccacctcttgcactgatgttgcttttggttgtaacgt

SEQ ID NO: 532257 - DNA, 633 bp, Homo sapiens
agctgtctgatataggaatcaaaaacgcagtattaaagaaaacattttggggagggaggctaggtaaytttgtaaacttaatatcatattaataagaatgatgaaacacaatactattccatgaaaattatgtattatgatagtaaaatatctagtgatagccatagttatctaagaagctttatgagatgcattctgtgcttctgcagagagcttgatggtaatctgtccatctgatgtatgtgctggttgatgcttctggggttacaggttgagatctttaagcttcataaagtgaggacaggctcagatgggaagcatggtccacagcttctgttccttctctatagctaaagagaagaaattgtaccagagccaaaggaggaaaaagattatatatcctctttcatgcttttcacccaatctcattctgtttttctaataaagcaatcatttaattccctgctgcagttggttttgtacatgtttcagagtcctcagttcattgtgttgtgatcatctgagatcctccaaattagagtttgaaactcttgcaatatagaagaaacaaatttgtccatagttgtatctaccatgtgatgagtacgtttgaaagttactgagatggagcac

SEQ ID NO: 532258 - DNA, 633 bp, Homo sapiens
agctgtctgatataggaatcaaaaacgcagtattaaagaaaacattttggggagggaggctaggtaactttgtaaacttaatatcatattaataagaatgatraaacacaatactattccatgaaaattatgtattatgatagtaaaatatctagtgatagccatagttatctaagaagctttatgagatgcattctgtgcttctgcagagagcttgatggtaatctgtccatctgatgtatgtgctggttgatgcttctggggttacaggttgagatctttaagcttcataaagtgaggacaggctcagatgggaagcatggtccacagcttctgttccttctctatagctaaagagaagaaattgtaccagagccaaaggaggaaaaagattatatatcctctttcatgcttttcacccaatctcattctgtttttctaataaagcaatcatttaattccctgctgcagttggttttgtacatgtttcagagtcctcagttcattgtgttgtgatcatctgagatcctccaaattagagtttgaaactcttgcaatatagaagaaacaaatttgtccatagttgtatctaccatgtgatgagtacgtttgaaagttactgagatggagcac

SEQ ID NO: 532259 - DNA, 453 bp, Homo sapiens
aaccaagcctctctcctttctccaagccaagtaagttagcactttttccttttcaaagggaacttcaggtcagagggagcaagaagactacaaaacacttaacacacacacacacacaaaaagaattgtaattaggataaatacctattttttttgtctttccatgtaggctgtttacaaaaccaaggtagtatttttcttttaataggtaaataattatgcaatctggtataatctggaatattttgatattgtttcctgaattgtatttgctccttccaaaattaatagaaagaagaaaggggaaaaaagcaattaaattcatattatgtacaaaactagtaaatgttgmaagttcagactggttaagtcataccctccatggaaaaagtaagagaaatcaaatgtaaaagtatatgagccttggctagagaggattggagatttttgtgt

SEQ ID NO: 532260 - DNA, 624 bp, Homo sapiens
aaaaattaaaagggttttttctttcccttcacaaataggcacatgcttacttatatggcaagtttagaaaatccacaatgcaaaagaaggtggaaggacaaggagaaaaagacgcagaaggacttcctcttccagccaagatgracttgccctcccaccatgaccaacgactgaagctggatagaatatttgagaaaactgttttcagggattggaacacaggcagaacaggactgtgatatttgagaacaggaaaacacaggaggcaaatctcacacacacttctgttttctgcccaatggcagtttctcgaccacacagagagaggtagagacctccaaaaatgaggcaatgtcactgtcactaagctgagagtcttgcagtgctaacgtgtttggagttcatagaataaggtactggagaagagggaactacatacaggtgaggcctcaaaagagaatgcaaaagttctctgcaggtctggggccaagggctggggggagtgcatacagcaggcaggctccacaaggcctctgcagagtggctggcacttctgagggctgactggagatgccagagagcacacaaatttgggacatagcagagtggagagaactcatcaag

SEQ ID NO: 532261 - DNA, 576 bp, Homo sapiens
aatgaaggtgattaagatggcatttgtccagggaatgaatctcctcacaacatacctaagaaagagatatatgtacagaaaacaaagcacagtaaaatacctcttcattactatgggagattttccccaaacacagagaaagctctacagagctgagcttaagccagaactctgttatttacttggtctaatgccaaaacaggccagagacccctttcacctacttctctttaatcccaaacccatgtctctgtttgatctaagaaagagccaaatgcccaggaggcgccatggtagagaaaagcagccagccagagagtgacctccgtgccaggggagtgtgtctaagctttgctttatttttcttatttgtctgtagttgtatgattggtagaagagagtagatatgaagtctactgacacaggattggtcttcaggaatgtcttaccaagmatttgggggaacagaggggtttcacaaataagagagcaatgatcagactttttctaaaaggagcagccataagctaccttaactctccaacttgcccattaatcttcacctagagttaggaa

SEQ ID NO: 532262 - DNA, 279 bp, Homo sapiens
tcctcagcattgactctgtgctatggaagggcttcctaagtttttgtggactgctatcccagtctgtcaccactatacaatcttcataattttccctttaaatggctgagagaaaattttgaacaaaagctacaaacatttttcagattcttgattctccagacttattacttgagggcagtgactaaattatattcagttctatatcagaaggttcttccatattgccagtttcatggtagatactcaataaaatragttgaatgactacataaattt

SEQ ID NO: 532263 - DNA, 557 bp, Homo sapiens
ctggttatttacagtatgtaagttttaatatcctgtaaaagggggataataatagcatccgtttgataaagatgttaaagatactaaatgacactgtccatgttaaataactttttgagatatattgagatgtttctgcacttccttgttctggccttcctgtagaaccagaggaatctattgccatgaaaagcaataaaactgtgatagtagaaattaaaagtgagtaggaacttatttaaaaatcatcattctccttttcaaygcaaaaataagaactagaaacttttaataagccaatagtctggagaaataatttatggaagataacatgggttttttaatcttaaagggttcttttacatattcaagggtcgagattggctgccttgaatcctactaaaatttcaatgtaagttttagagagggaggaaagagtcaaagaaaaaattgcactggaaaaagttaaataagtaaggaagatattattcaggctattgcaatacaggagagaggccagacctagtctgaactcagctcccctgatacaaagggcc

SEQ ID NO: 532264 - DNA, 557 bp, Homo sapiens
ctggttatttacagtatgtaagttttaatatcctgtaaaagggggataataatagcatccgtttgataaagatgttaaagatactaaatgacactgtccatgttaaataactttttgagatatattgagatgtttctgcacttccttgttctggccttcctgtagaaccagaggaatctattgccatgaaaagcaataaaactgtgatagtagaaattaaaagtgagtaggaacttatttaaaaatcatcattctccttttcaacgcaaaaataagaamtagaaacttttaataagccaatagtctggagaaataatttatggaagataacatgggttttttaatcttaaagggttcttttacatattcaagggtcgagattggctgccttgaatcctactaaaatttcaatgtaagttttagagagggaggaaagagtcaaagaaaaaattgcactggaaaaagttaaataagtaaggaagatattattcaggctattgcaatacaggagagaggccagacctagtctgaactcagctcccctgatacaaagggcc

SEQ ID NO: 532265 - DNA, 557 bp, Homo sapiens
ctggttatttacagtatgtaagttttaatatcctgtaaaagggggataataatagcatccgtttgataaagatgttaaagatactaaatgacactgtccatgttaaataactttttgagatatattgagatgtttctgcacttccttgttctggccttcctgtagaaccagaggaatctattgccatgaaaagcaataaaactgtgatagtagaaattaaaagtgagtaggaacttatttaaaaatcatcattctccttttcaacgcaaaaataagaactagaaacttttaataagscaatagtctggagaaataatttatggaagataacatgggttttttaatcttaaagggttcttttacatattcaagggtcgagattggctgccttgaatcctactaaaatttcaatgtaagttttagagagggaggaaagagtcaaagaaaaaattgcactggaaaaagttaaataagtaaggaagatattattcaggctattgcaatacaggagagaggccagacctagtctgaactcagctcccctgatacaaagggcc

SEQ ID NO: 532266 - DNA, 557 bp, Homo sapiens
ctggttatttacagtatgtaagttttaatatcctgtaaaagggggataataatagcatccgtttgataaagatgttaaagatactaaatgacactgtccatgttaaataactttttgagatatattgagatgtttctgcacttccttgttctggccttcctgtagaaccagaggaatctattgccatgaaaagcaataaaactgtgatagtagaaattaaaagtgagtaggaacttatttaaaaatcatcattctccttttcaacgcaaaaataagaactagaaacttttaataagccaatagtctggagaaataatttatggaagataacatgggttttttaatcttaaagggttcttttacatattcaagggtcgagattggctgccttgaatcctactaaaatttcaatgtaagttttagagagggaggaaagagtcaaagaaaaaattgcactggaaaaakttaaataagtaaggaagatattattcaggctattgcaatacaggagagaggccagacctagtctgaactcagctcccctgatacaaagggcc

SEQ ID NO: 532267 - DNA, 504 bp, Homo sapiens
gggtcgcatgtgcaccaaagccagcccccagcagggccrgcgcaggggttctgcggggccgtcctgtggctctgatatctatgagtcgtcggccagcaaaggcacaggcaccagcagaaaggagcagagatgcccagaacatgctgtcccccaatgccagccccaagcggggccagcttagggtgcggtgggcagagccatcctgcagctctgagatccacgaggaggaggtgggagtagcgccaggctccactgcgttggagctcgcacaatttgagcccaatttgattccggagccatgacttgcagcacattgaagaccagaagacgcccaaaggtagggaggcgacagataccgcttggcctcaggagctcctctggccgttgctgaaccaaggttcccccagagacatccacagcctggggctcctcccttcttcacctagttcctttcctaggcccaggccccaagcatgaggactggcactgcctggcgtctccatc

SEQ ID NO: 532268 - DNA, 504 bp, Homo sapiens
gggtcgcatgtgcaccaaagccagcccccagcagggccagcgcaggggttctgcggggccgtcctgtggctctgatatctatgagtcgtcggccagcaaaggcacaggcaccagcagaaaggagcagagaygcccagaacatgctgtcccccaatgccagccccaagcggggccagcttagggtgcggtgggcagagccatcctgcagctctgagatccacgaggaggaggtgggagtagcgccaggctccactgcgttggagctcgcacaatttgagcccaatttgattccggagccatgacttgcagcacattgaagaccagaagacgcccaaaggtagggaggcgacagataccgcttggcctcaggagctcctctggccgttgctgaaccaaggttcccccagagacatccacagcctggggctcctcccttcttcacctagttcctttcctaggcccaggccccaagcatgaggactggcactgcctggcgtctccatc

SEQ ID NO: 532269 - DNA, 504 bp, Homo sapiens
gggtcgcatgtgcaccaaagccagcccccagcagggccagcgcaggggttctgcggggccgtcctgtggctctgatatctatgagtcgtcggccagcaaaggcacaggcaccagcagaaaggagcagagatgcccagaacatgctgtcccccaatgccagccccaagcggggccagcttagggtgcggtgggcagagccatcctgcagctctgagatccacgaggaggaggtgggagtagcgccaggctccactgcgttggagctcgcacaatttgagcccaatttgattccggagccatgacttgcagcacattgaagaccagaagacgcccaaaggtagggaggcgacagataccrcttggcctcaggagctcctctggccgttgctgaaccaaggttcccccagagacatccacagcctggggctcctcccttcttcacctagttcctttcctaggcccaggccccaagcatgaggactggcactgcctggcgtctccatc

SEQ ID NO: 532270 - DNA, 584 bp, Homo sapiens
catgctagtatttcctacattcccatttactcagtgttccctacttcctaaaggagggaaaagcgccgtcgaacagttgtcaaattttcttcacaaacagcttggttttccttaatggatgaaatcacccttcgttgatggatccatttgcacaggaatttctagatcatctcagggctcacactctgggtcccacctcctgctctgctacaaacggttaggtatctttatgcatcagtatccagctggccatagcggccctgtgtcagaaattatatttcctctaattggctaaagggaccattttcttaatagtttctttcttttatagggccatgtgctatrttccatttatatacacattctggaacacagtattccagagcatgttaattgttcagagataatggacctaacaaatagaatggtgcggttaaggagaaatccagttgcatggaggtccttggtcttttgtgtggcttgaagaggttgaggatgctgatgtgttctttgggaagagattcacagttgacaggaaacatctgctttaatttgctccaacatcaacaagatcgatgtggtag

SEQ ID NO: 532271 - DNA, 584 bp, Homo sapiens
catgctagtatttcctacattcccatttactcagtgttccctacttcctaaaggagggaaaagcgccgtcgaacagttgtcaaattttcttcacaaacagcttggttttccttaatggatgaaatcacccttcgttgatggatccatttgcacaggaatttctagatcatctcagggctcacactctgggtcccacctcctgctctgctacaaacggttaggtatctttatgcatcagtatccagctggccatagcggccctgtgtcagaaattatatttcctctaattggctaaagggaccattttcttaatagtttctttcttttatagggccatgtgctatattccatttatatacacattctggaacacagtattccagagcatgttaattgttyagagataatggacctaacaaatagaatggtgcggttaaggagaaatccagttgcatggaggtccttggtcttttgtgtggcttgaagaggttgaggatgctgatgtgttctttgggaagagattcacagttgacaggaaacatctgctttaatttgctccaacatcaacaagatcgatgtggtag

SEQ ID NO: 532272 - DNA, 584 bp, Homo sapiens
catgctagtatttcctacattcccatttactcagtgttccctacttcctaaaggagggaaaagcgccgtcgaacagttgtcaaattttcttcacaaacagcttggttttccttaatggatgaaatcacccttcgttgatggatccatttgcacaggaatttctagatcatctcagggctcacactctgggtcccacctcctgctctgctacaaacggttaggtatctttatgcatcagtatccagctggccatagcggccctgtgtcagaaattatatttcctctaattggctaaagggaccattttcttaatagtttctttcttttatagggccatgtgctatattccatttatatacacattctggaacacagtattccagagcatgttaattgttcagagataatggacctaayaaatagaatggtgcggttaaggagaaatccagttgcatggaggtccttggtcttttgtgtggcttgaagaggttgaggatgctgatgtgttctttgggaagagattcacagttgacaggaaacatctgctttaatttgctccaacatcaacaagatcgatgtggtag

SEQ ID NO: 532273 - DNA, 590 bp, Homo sapiens
atataaaaatgaacctcatttattttcttgaggaaattttcagtcaaaatgtcggaagtgctggccattttctttcagccagaaataatgaaatagccaggacaaagaaatgagccatgacagcaactgtttagttttcaagcacaatgaaaagaaatatcatggaatcaagaattgaaggatttgaaaataaaataatttctttttcacagcctgttttgacatgccccaaaaaatgttcttaaagggagaaataacttcggggcaaaattatcttaactttgaggctttaaaactaagaattcagaaaggttgaagtgtgtgtcccatagatattcttgactagataacaagtttcctaaaactcttaagcacaccgccaacaacctcatgattcttagcccaaggcaaataaggactaaattcggagttttgtggttcggcatttatttaatgaaccaaacccagataagagtcacagaaaaattaatatttttataaaacacttttcctggcagaagcacagagacarttcaaaataagaagagtccttattctacaggcaagtcataggctgaaaataccatgca

SEQ ID NO: 532274 - DNA, 668 bp, Homo sapiens
ctggtcctgggcttttttagttggtacgctatttattactgcctcaatttcagaacttgttattgatctattcaggtattcaacttcttcctgaaaacccttaactgcttctagaattctgacaaagttggttcttactgtttctgctgttttcagtgttgtttctggaagaacaagagtttggagcttcctactccaccattttgcaggcctaagagttaattttcaagtgcwatcaacacaaattgtttatttgccagcatcagttaaaactgtcagggtcaacactttttctacctgctatagcacttttcttaccacattttgaggctccactaaatgattgcccacttctttgccagactttgctaacagtttttctgcaattttttgtgtatctgtccaaagcccaggcccaaagaaaatttcacctattttaggtttttcttgtaacagcaccataattatgatacattttggcatcttatggcatttgctgtataacttataatcctgaagctttgagacttaaaagaagcatttatttagtcacaatgctataggatggcatcttcttgggtttgatacaagtggattatttattgatttaagctagggacccttaattgtttgttgtcaactgccagtcctagtgggcctcaaaagga

SEQ ID NO: 532275 - DNA, 636 bp, Homo sapiens
ggtgataattgccgttaggtttttgtggtctatctaggtatatatatatttttttctatgataaattaggtctgtatgtgctcatagcaataaacgcatgtcagaaaaattcaggcagtacagaaaggaatagaatgatgaatctccccttccattccctkacctgggttctcaactctgtaacttaccactgtttacagtttctttggtatcctttaaagagatatatgtatatgaaatcacattctatctgtagctatatatctttattttccacaatgaaataatattctttgttctgtacttttccctgttttttttgcactaaatatctaagaaatcttttcataccagcacaaacagatattcctaattctttcaaaagcctatatgatacagctatgctataattaggtcacttaaccagtctgcattgattaaaatctaggttgtttcaagtttgtttagtttatgctgtcatcacattgcagtaataaacatcctgtgtctatatttttatatatttctctctctctctcattttctctctcatacacttcccacacccctggattttgctttgaaaattatatttctaatattttcccccactcagtaatatatgaccctcgtttg

SEQ ID NO: 532276 - DNA, 380 bp, Homo sapiens
tagctttgttctcatctctttttcttaagatttcacaccatttagaattcaaagatcccatgaaaggcatgctatcctaacaagttttgagaccccgaatttgcagtgttgtacacaaatgtcataccttctgagatgtctctttgaccctgacctcccatrtttcaaacagattaatgatttccccatatcactttgagtgtttccatctttttgaggggagaaatggcacaataccattctagtgctggtcacactctcatgggattgtttatttgccagtatcccccactagagtctaagaagagacagtgtttgggattcattcatgtcagtatccccaggtcccagcataggggttggtgcagaggaggaggtca

SEQ ID NO: 532277 - DNA, 563 bp, Homo sapiens
gcaaaacacacccacacacacacaatcagtccctaatcactgaagttatcccaagtcaaaaggaggcaaaatcacattaattgttagattgtaaaatggatcttaagggtttttttttttttcctaaattgaaacagcccacatggactgaaccacttttaaaaagaaattatataataacagaatttccagggcacctctgctaaggctgttcagagccttatctattctggccaaggtggtggctgacaatactctgtacatgggcaaggagagctaatgagtagaatttgcatggaatcactgaagctgattttggcatcccggccagccatctgtgctgatatcttactctctcctttcacacctctcctcactgtaccagagggacctctctaaaatgcacatctgatcatgycatcctctgtttacatattttgggtggttccctgctatctccagtatccattcagactccctggcagggtgggcaaacaaagtgcttctcagattggcttggatctaccactccagcctcctttaatgacacctcctcaccccat

SEQ ID NO: 532278 - DNA, 549 bp, Homo sapiens
ctggggctaggggaagggctttgagggtggaaggatgggatgggttccagaggtattcctctcttaaatgcaagtgcctagattaggtagactttgcttagtattgacaackgcacatgaaagttttgcaaagggaaacaggctaaatgcaccaagaaagcttcttcagagtgaagaatcttaatgcttgtaatttaaacatttgttcctggagttttgatttggtggatgtgatggttggttttatttgtcagtttggttgggctatagcacacagttatttaatcaaacagtaatctaggtgtggctgtgaaggtattttgtagatgtgattaacatctacaatcagttgactttaagtgaaagagattacttaaataatttgggtgagctgcacctgattagttgaaaggcctcaagaacaaacactgcagtttcctggaaaagaagaaactttgcctcaagactatagccatcgactcctgcctgagtttccagcctgctagtctgccctatggatttgaagtttgccaaccccaacaattgtgt

SEQ ID NO: 532279 - DNA, 619 bp, Homo sapiens
cctttgtcagatcttttgtataatggtatgatatagccactaatgaagaaatggtaaaagatttatttgctaccctaggaattcttgcagacttcaytgcaagtatacaatagcattcattggcttctcttgccagggtagtgttgacagaattgctcttgattatctattagccgagcaagatggtatctgtgcgattgctaatactgcatgttgtacccaggttaactcctccaggtaagttgaaactcagttacataaactaaaagaacaagtctatctggctacaagtctcacccatttctctggggtcattttatctatttagttggttgcctttgttcatggctcaaaagcatcatgcaaactggactcgtcatattatggctatttttgctctgtattttcctttttaaactgtatacttgttgtctgttaaatctttgcagaaatacaactcctgacaaaataatgttggcccagcaatttgagatgatagtcaatgcctatggaacagacaaaattaaatttaatgatgaaatccagatgagataagcctaagagcttctccttctggcctccttcttgctcaaatgtggctaaaagggtcttgagactg

SEQ ID NO: 532280 - DNA, 619 bp, Homo sapiens
cctttgtcagatcttttgtataatggtatgatatagccactaatgaagaaatggtaaaagatttatttgctaccctaggaattcttgcagacttcactgcaagtatacaatagcattcattggcttctcttgccagggtagtgttgacagaattgctcttgattatctattagcygagcaagatggtatctgtgcgattgctaatactgcatgttgtacccaggttaactcctccaggtaagttgaaactcagttacataaactaaaagaacaagtctatctggctacaagtctcacccatttctctggggtcattttatctatttagttggttgcctttgttcatggctcaaaagcatcatgcaaactggactcgtcatattatggctatttttgctctgtattttcctttttaaactgtatacttgttgtctgttaaatctttgcagaaatacaactcctgacaaaataatgttggcccagcaatttgagatgatagtcaatgcctatggaacagacaaaattaaatttaatgatgaaatccagatgagataagcctaagagcttctccttctggcctccttcttgctcaaatgtggctaaaagggtcttgagactg

SEQ ID NO: 532281 - DNA, 482 bp, Homo sapiens
ggattcacacctagtcctctttgatcaactcaagagtattccattcattcattcaggaaacatttattaaatagtttctcttttttttttttttttttgagacagagtctcgctctgtcacctcggctggagtgcagtggcatgatcttggctcactgcagcctccacctcccgggttcaagcaattcccctgcctcagcctcctgagtagttgggactacaggcatgtgccaccacgtctggctagtttttgtatttttagtagagacggggcttcaccatgttggccaggctggtcttgaactcctgggctcaagtgatcctcccgccttggcctcccaaagtgctgggattacaggcgtgagccaacacgcccggccaaatgctttctctatgtgagtccctgggcccacggaaaggaaccagagctggtgagggtggttgaggttgttatcyagggacagaggtagctttctgagggt

SEQ ID NO: 532282 - DNA, 600 bp, Homo sapiens
ctaaagacaaaaccaaacagcctatgaaaatgccrttcagttgatgagaaacaacacccaaatgttcagactgaagaccacatacccagggtaacctgggtgctttcagcatatattggcaacatggaaagactgttcggctgacttttgtaattcctcagggcctacattgtctgtattcccaaagacactacattctggggtctgctttggccccgttttccatgactaatcatttcagttctatacttagagcagatcaaaactgtgcttatcttaataaaacattatcgtggtttactggatctcttcctttacagcacgcatacaccagaaaatgtaatttagcctagacaaagattcaaggagccatccaattacaggcaaacacctggaaatttcacagaactaagatgcggcattcagtctttttaccacataagctctgcaaatatacctgctgcacactgagaaataaagagcacatactgaaagaactgtgtcttccctccattacgaaaatcatacttataatccattaaaaagctcaaaaggctgtacacaactatatgtgcagctatacacacagacacacaaagt

SEQ ID NO: 532283 - DNA, 600 bp, Homo sapiens
ctaaagacaaaaccaaacagcctatgaaaatgccattcagttgatgagaaacaacacccaaatgttcagactgaagaccacatacccagggtaacctgggtgctttcagcatatattggcaacatggaaagactgttcggctgacttttgtaattcctcagggcctacattgtctgtattcccaaagacactacattctggggtctgctttggccccgttttccatgactaatcatttcagttctatacttagagcagatcaaaactgtgcttatcttaataaaacattatcgtggtttactggatctcttcctttacagcacgcatacaccagaaaatgtaatttagcctagacaaagattcaaggagccatccaattacaggcaaacacctggaaatttcacagaastaagatgcggcattcagtctttttaccacataagctctgcaaatatacctgctgcacactgagaaataaagagcacatactgaaagaactgtgtcttccctccattacgaaaatcatacttataatccattaaaaagctcaaaaggctgtacacaactatatgtgcagctatacacacagacacacaaagt

SEQ ID NO: 532284 - DNA, 600 bp, Homo sapiens
ctaaagacaaaaccaaacagcctatgaaaatgccattcagttgatgagaaacaacacccaaatgttcagactgaagaccacatacccagggtaacctgggtgctttcagcatatattggcaacatggaaagactgttcggctgacttttgtaattcctcagggcctacattgtctgtattcccaaagacactacattctggggtctgctttggccccgttttccatgactaatcatttcagttctatacttagagcagatcaaaactgtgcttatcttaataaaacattatcgtggtttactggatctcttcctttacagcacgcatacaccagaaaatgtaatttagcctagacaaagattcaaggagccatccaattacaggcaaacacctggaaatttcacagaactaagatgyggcattcagtctttttaccacataagctctgcaaatatacctgctgcacactgagaaataaagagcacatactgaaagaactgtgtcttccctccattacgaaaatcatacttataatccattaaaaagctcaaaaggctgtacacaactatatgtgcagctatacacacagacacacaaagt

SEQ ID NO: 532285 - DNA, 310 bp, Homo sapiens
atcacaagcaaactgccacggaaaaacaaagctgtctgctggccgccagccaggcttgcactgccgcccctgcagccagtccaggctcccccactgaaccccactccgggcctacaggcccttccctgacatgtggacccccggccctgggcagccgctgggccccggccagctcaggggaggacacctccctgcttctccagcctcctctgacgcccccatccaatgctgggaggatggaaaggttgaagctctgtaggcccagtgccygcctcggggagggaggtactgatgagcaaggggactcgcc

SEQ ID NO: 532286 - DNA, 511 bp, Homo sapiens
ggtttcagaatcactgaccagcttgccactgtgtgaggacatccctacttaactcacaagcacccaccaagtctatgcagaaaacctctgagagaatctcctttgtgaagtctgataggccctggcctcctggttcctctttttttttttttttttttttttttgagacagagtcttgctctgttgcccaggctggaatgcagtgrtgcaatcttagctcattgcaaactccgcctcctgggttcaagcgattctcctgctttagcctcccaaatagctgggattacagacatccgccaccacgcccagctaatttttgtatttttagtagagacggggtttcgccatgttggccaggctggtctgggattacaggcttgagccagccctggttcctccatttaatggagtccagtaaaaaaatgatgtttgctcagagtcacgaatcacagaatattggagccagaaggcactttaggggtcatggaattcaagcccctctgtttacctg

SEQ ID NO: 532287 - DNA, 272 bp, Homo sapiens
gaaattaaactgccaatctggaatctatacttaacagtaatatccttcacagaggaagaataaaaaagataattttcagaagaataaaaatggagagaattcgccactagcaattttttccctggcatacaatttaaatgccagttagaagtttcttgataaatgaaagagtaaatgyagttccctaggcaaaagaaacatgatcccaggtggaagcatggagattaagggaaaaaaaatgaaaagtatgaaagggtcaatatatgaattgt

SEQ ID NO: 532288 - DNA, 642 bp, Homo sapiens
ctgtggacttttctcctggtgttgtacagcagttcaaattagcacaagaatcataaaccctatatttgaacagctatataatattatatatttattttcccatttgatgttgcattactttttctaccaatcttcttacaataaattcataaatatcttaattatrgcaaatgtgcagttcttaaagatgagaatcatcaaacatgtttctattacagagatatattcttcaaaaagtcatctaaaatagaaacccaactgggagacaccttaaaaggttatctgccacaacagaagctttgcttaaaatactgttctctttgtatttgtgttaataattgatttgtctttgaaattaaattaggaatctactatatctagtggtcttgaaatcaaagccccctccccattccttatcttcactgctgtgttcaaaaagactagactccagggacctgtccaaagctgggttaaatataggatgtctgagagacacccttctttcatagttcgagggtaagcatgtagctgtatgtgtgtggaggggcgggtggaggaggttagctgtatcagggtaggcataatactatattttaaatccctccttctgttataaatgtaagctgaaaatagtctctgctc

SEQ ID NO: 532289 - DNA, 513 bp, Homo sapiens
tggacttttctcctggtgttgtacagcagttcaaattagcacaagaatcataaaccctatatttgaacagctatataatattatatatttattttcccatttgatgttgcattactttttctaccaatcttcttacaataaattcataaatatcttaattatagcaaatgtgmagttcttaaagatgagaatcatcaaacatgtttctattacagagatatattcttcaaaaagtcatctaaaatagaaacccaactgggagacaccttaaaaggttatctgccacaacagaagctttgcttaaaatactgttctctttgtatttgtgttaataattgatttgtctttgaaattaaattaggaatctactatatctagtggtcttgaaatcaaagccccctccccattccttatcttcactgctgtgttcaaaaagactagactccagggacctgtccaaagctgggttaaatataggatgtctgagagacacccttctttcatagttcgagg

SEQ ID NO: 532290 - DNA, 513 bp, Homo sapiens
tggacttttctcctggtgttgtacagcagttcaaattagcacaagaatcataaaccctatatttgaacagctatataatattatatatttattttcccatttgatgttgcattactttttctaccaatcttcttacaataaattcataaatatcttaattatagcaaatgtgcagttcttaaagatgagaatcatcaaacatrtttctattacagagatatattcttcaaaaagtcatctaaaatagaaacccaactgggagacaccttaaaaggttatctgccacaacagaagctttgcttaaaatactgttctctttgtatttgtgttaataattgatttgtctttgaaattaaattaggaatctactatatctagtggtcttgaaatcaaagccccctccccattccttatcttcactgctgtgttcaaaaagactagactccagggacctgtccaaagctgggttaaatataggatgtctgagagacacccttctttcatagttcgagg

SEQ ID NO: 532291 - DNA, 655 bp, Homo sapiens
tgtggacttttctcctggtgttgtacagcagttcaaattagcacaagaatcataaaccctatatttgaacagctatataatattatatatttattttcccatttgatgttgcattactttttctaccaatcttcttacaataaattcataaatatcttaattatagcaaatgtgcagttcttaaagatgagaatcatcaaacatgtttctattacagagatatattcttcaaaaagtcatctaaaatagaaacccaactgggagacaccttaaaaggttatctgccacaacagaagctttgcttaaaatactgttctctttgtatttgtgttartaattgatttgtctttgaaattaaattaggaatctactatatctagtggtcttgaaatcaaagccccctccccattccttatcttcactgctgtgttcaaaaagactagactccagggacctgtccaaagctgggttaaatataggatgtctgagagacacccttctttcatagttcgagggtaagcatgtagctgtatgtgtgtggaggggcgggtggaggaggttagctgtatcagggtaggcataatactatattttaaatccctccttctgttataaatgtaagctgaaaatagtctctgctcccagcggcagcaat

SEQ ID NO: 532292 - DNA, 513 bp, Homo sapiens
tggacttttctcctggtgttgtacagcagttcaaattagcacaagaatcataaaccctatatttgaacagctatataatattatatatttattttcccatttgatgttgcattactttttctaccaatcttcttacaataaattcataaatatcttaattatagcaaatgtgcagttcttaaagatgagaatcatcaaacatgtttctattacagagatatattcttcaaaaagtcatctaaaatagaaacccaactgggagacaccttaaaaggttatctgccacaacagaagctttgcttaaaatactgttctctttgtatttgtgttaataattgatttgtctttgaaattaaattaggaatctactatatctagtggtcttgaaatcaaagccccctccccattccttatcttcactgctgtgttcaaaaagactagactccagggacstgtccaaagctgggttaaatataggatgtctgagagacacccttctttcatagttcgagg

SEQ ID NO: 532293 - DNA, 513 bp, Homo sapiens
tggacttttctcctggtgttgtacagcagttcaaattagcacaagaatcataaaccctatatttgaacagctatataatattatatatttattttcccatttgatgttgcattactttttctaccaatcttcttacaataaattcataaatatcttaattatagcaaatgtgcagttcttaaagatgagaatcatcaaacatgtttctattacagagatatattcttcaaaaagtcatctaaaatagaaacccaactgggagacaccttaaaaggttatctgccacaacagaagctttgcttaaaatactgttctctttgtatttgtgttaataattgatttgtctttgaaattaaattaggaatctactatatctagtggtcttgaaatcaaagccccctccccattccttatcttcactgctgtgttcaaaaagactagactccagggacctgtccaaagctgggttaaatataggatgyctgagagacacccttctttcatagttcgagg

SEQ ID NO: 532294 - DNA, 447 bp, Homo sapiens
tccctgtgtgaggaccctgtgtraggaccctgtgaaagccctacagaatctctgtgtggaatgtttgagggaattctatgtgagaggtttctgggcaatgagtgtggagcaacctgaggcctgtgtgaggaatctatacaaggtctctgtggagagtgggaggtctccaggcaaggtctctgtgtgaggaggactctgagagaggtctctgtgaggcagtggggggtgccgtgtgccatttctggggctggaggccggaggttgcagtgagctgcatgagtctctgcatgaggtccctgttttatgactctgtgtgaagtctctgaggtctttgtggggtctctgtgtgagatctccctgtgagaaccatggaaggtctctgacatttgcgggaggtctctgtgggactgagtgaagtctctcagcgtggcctctgtggggttctct

SEQ ID NO: 532295 - DNA, 556 bp, Homo sapiens
acacggtggctcatacctgtaatcccagcactttgggaggccaacgcggacagatcacgaggtcaggagatggagaccatcctggctaacacggtgaaaccccatctctactaaaaatacaaaaaaaaaaaaaaatagccaggagatttacaatagcagcaaaatatcaaatacttagggataaatttgagcaacraaacatgtaagacccttctaccctggtttgatagagaggagtggaagagaaggcttgccaaagggcaacaggaacattttggggtgacagatattaattcttgacttttaatgatagtttcctgtgttttacacgtgtcaaatactatcacactgtacaccttaaatatgtgcagttaattgtatgccaattatacctcacttctcttaggaatgagaaattggcaatacatgttaaacccactctgttactttcttttccagggcctcagacagagacagaggggtgtgacaatcacagctgtgatagctaaacttgcccaaaaatctgtttaaactcagtaaaaatgaataaatgaaa

SEQ ID NO: 532296 - DNA, 631 bp, Homo sapiens
aacctgctatgtaaaattgccagcaagaaaaaaaagtgcaagaataaggtctatgactgaagtggctcggtgtcatgattccctactctagcattctcagaaggatcccatccgttagacrtgcagaaactgcagcccatccaaatgtgatctgtttaatcaataatcaacagttcatattgaagacagtatttttgctatatgtgcttgtcataatgaaggacggtgtacaaagaacaagttgaaccagatgaacactttaattttgatgccaaaatcaatcactttttgtcataacaccaggcatagataatggttgatccagtgcacactgtctgtattaccccataatttcctgcagcagacatgttgtaatttgacatactccttgatcattaacacattgcagtagtcagatatacttgtcaagattaagctaaatgtcagtagaagactcagtgaaggcttgaaaatcttgcagcttgctctcagagacactgccaactgaaatgataaatgtcattgggctgtggtactattctcatcgacgtatcaataaataaagggatgctggcgaaaaaatgttcttccagatacctgcccactctgaacctagagttcttttcatcac

SEQ ID NO: 532297 - DNA, 471 bp, Homo sapiens
gggtggcgggcgcctgtagtcccagctactccggaggctcaagcaggagaatgkcatgaacatgggagaggaggtggcttgcagtgagccgagaccgcgccactgcactccagcctgggcaacagagcgactccatctcaaaaaagaaaaaaataattattcccaggtttttttctaaaaatgttgagaagctatctttatccgttaaaatatatttttatgtttgttctccgggattaagtttcaatttcatttttttcccttatggagatcagtggtcccagtgttgcttattgtaaaatatactatcttcacttaacaacaatgaaagctgtgttacaaaatctgtttcccagtattagtgcaaaatatatttctctttatgattgtactcagattaactagtttgcaggactgtgtccagagttggttccttccggtgggttcgtggtctccctgacttcaagaatg

SEQ ID NO: 532298 - DNA, 430 bp, Homo sapiens
agcaggagaatgtcatgaacatgggagaggaggtggcttgcagtkagccgagaccgcgccactgcactccagcctgggcaacagagcgactccatctcaaaaaagaaaaaaataattattcccaggtttttttctaaaaatgttgagaagctatctttatccgttaaaatatatttttatgtttgttctccgggattaagtttcaatttcatttttttcccttatggagatcagtggtcccagtgttgcttattgtaaaatatactatcttcacttaacaacaatgaaagctgtgttacaaaatctgtttcccagtattagtgcaaaatatatttctctttatgattgtactcagattaactagtttgcaggactgtgtccagagttggttccttccggtgggttcgtggtctccctgacttcaagaatg

SEQ ID NO: 532299 - DNA, 430 bp, Homo sapiens
agcaggagaatgtcatgaacatgggagaggaggtggcttgcagtgagccragaccgcgccactgcactccagcctgggcaacagagcgactccatctcaaaaaagaaaaaaataattattcccaggtttttttctaaaaatgttgagaagctatctttatccgttaaaatatatttttatgtttgttctccgggattaagtttcaatttcatttttttcccttatggagatcagtggtcccagtgttgcttattgtaaaatatactatcttcacttaacaacaatgaaagctgtgttacaaaatctgtttcccagtattagtgcaaaatatatttctctttatgattgtactcagattaactagtttgcaggactgtgtccagagttggttccttccggtgggttcgtggtctccctgacttcaagaatg

SEQ ID NO: 532300 - DNA, 469 bp, Homo sapiens
tcaaacccaatgacagcccattacaatggaggccatagcaatggaggtctctacatgcaamaaaaatggtgggacagtttcctgacaacagtccaactttattccaaggataagcatgtcatgaaattattggatggcagattatgcttatctatggtcttcctttttctccttggtctcatcccaataacttacagatcctttaaaggcaaaggccaaatattcagctaagttaggcatactttagatgccaatatcaattttagctatatgggagattctacttaagatattgaggacgatcatgtgtgtacagggcaaaaaagatgggacaaagagataaggggatgggaaatcgcaccctccctccgcaccacagaccatgacctggggcaggtcctctaacaccaagcccacccaggccccatctaacagtatgccgcattctacatgacctcagagttctttc

SEQ ID NO: 532301 - DNA, 502 bp, Homo sapiens
ttatctaatacttgaaacgatattttgtttttcttattatttatgtttttctaagttgggatagcctaattttaatttttttcattgatcaagagaacctagtgaaaatgcttctgtttaaaatgatatttctttaaagaaaattagttgtcttctttgcagattgtctttttgagagtaaatgaatagatatcatattatctgcccatatatatttagatctatggccctggattttctttcttataaatatcttgttcattaataaatgggaatgttttttaatgtgcctattgttaggaaaataattttaaagtataatagtggataaactgataccaaatgctttatatgtattatkttatttaaccaggaaaatgtcaaataattagccacagttacatggcaagcagtaggaacttttagatagcacagccgggtgtatgtaaagtttatgacacaccgtgttctaactgctgtttatattgaaaatatatgatta

SEQ ID NO: 532302 - DNA, 604 bp, Homo sapiens
aagcatttttatgctaatggccatagcaatgattataaagcagagtgcatacagaatgcaccatggagatgctaaataatatttayggagcatatgggccttgcaaagcagaagtaaaaatgttcttttcttcaaattctgttttccaaattactttggacattaaggaaagtgttgaagtttcattttaactgtggaccaaaaaccctgaccaaaaagagtgctgggatatgtgtgctgtcattttattcaccacaatgttaaatagaactgtgacatgctagactgattctggataaattgtcttttactggcttgataaaaggatgctctgaaggaaaaattgtgagacaaggaataactttcagaaaagtctgaataaagaagtttctctaattcttaatagagtcagtataattccaagggctaaacaaatgctacttttatgcaaatttattgcttcaaatgttattgtaataatgtggcacatcaattgatattttgaggatctggaaactttttttaatttgaaaaatgtatagctatatccttggtcatcccttatgcctcaaaatggtaaacattcatgggttccctggtaagt

SEQ ID NO: 532303 - DNA, 604 bp, Homo sapiens
aagcatttttatgctaatggccatagcaatgattataaagcagagtgcatacagaatgcaccatggagatgctaaataatatttatggagcatatgggccttgcaaagcagaagtaaaaatgttcttttcttcaaattctgttttccaaattactttggacattaaggaaagtgttgaagtttcattttaactgtggaccaaaaaccctgaccaaaaagagtgctgggatatgtgtgctgtcattttawtcaccacaatgttaaatagaactgtgacatgctagactgattctggataaattgtcttttactggcttgataaaaggatgctctgaaggaaaaattgtgagacaaggaataactttcagaaaagtctgaataaagaagtttctctaattcttaatagagtcagtataattccaagggctaaacaaatgctacttttatgcaaatttattgcttcaaatgttattgtaataatgtggcacatcaattgatattttgaggatctggaaactttttttaatttgaaaaatgtatagctatatccttggtcatcccttatgcctcaaaatggtaaacattcatgggttccctggtaagt

SEQ ID NO: 532304 - DNA, 577 bp, Homo sapiens
tttactttaattggcatggatgcaattacataatattaggaccagaactaccacagaaagtttgtagctggatccatagtttgtaattctgatatgaaggcaatagaaaaaagaatttctatgaccccaccagtgtattaataacagaacagctgtaaccmtcaattcctagacatagtcttctggtgactagaaatcctggtaccagggttctggttataggtttgtacaaaaccataggactttgggggtcttgtttttttctcacctgcgatttaaactacaatttctctagcacacaatttaggttaatataccctgaatccaagaaaaattaatattaaaatatgcatatagcattttttgctaactcaattttactttcgaacacaaatcattcaacccaaataaataatattcatgagtaacgaaatgctaacatgggttactaggatgaataaattgttatttgcatgtcactgaattagttttcaatttataatcagtggttcaattgaaaatgacactcaattttaatattaacataaataatatcagcgcttaccagagacaatga

SEQ ID NO: 532305 - DNA, 577 bp, Homo sapiens
tttactttaattggcatggatgcaattacataatattaggaccagaactaccacagaaagtttgtagctggatccatagtttgtaattctgatatgaaggcaatagaaaaaagaatttctatgaccccaccagtgtattaataacagaacagctgtaaccatcaattcctagacataktcttctggtgactagaaatcctggtaccagggttctggttataggtttgtacaaaaccataggactttgggggtcttgtttttttctcacctgcgatttaaactacaatttctctagcacacaatttaggttaatataccctgaatccaagaaaaattaatattaaaatatgcatatagcattttttgctaactcaattttactttcgaacacaaatcattcaacccaaataaataatattcatgagtaacgaaatgctaacatgggttactaggatgaataaattgttatttgcatgtcactgaattagttttcaatttataatcagtggttcaattgaaaatgacactcaattttaatattaacataaataatatcagcgcttaccagagacaatga

SEQ ID NO: 532306 - DNA, 577 bp, Homo sapiens
tttactttaattggcatggatgcaattacataatattaggaccagaactaccacagaaagtttgtagctggatccatagtttgtaattctgatatgaaggcaatagaaaaaagaatttctatgaccccaccagtgtattaataacagaacagctgtaaccatcaattcctagacatagtcttctggtgactagaaatcctggtaccagggttctggttataggtttgtacaaaaccataggactttgggggtcttgtttttttctcacctgcgatttaaactacaatttctctagcacacaatttaggttaatataccctgaatccaagaaaaattaatattaaaataygcatatagcattttttgctaactcaattttactttcgaacacaaatcattcaacccaaataaataatattcatgagtaacgaaatgctaacatgggttactaggatgaataaattgttatttgcatgtcactgaattagttttcaatttataatcagtggttcaattgaaaatgacactcaattttaatattaacataaataatatcagcgcttaccagagacaatga

SEQ ID NO: 532307 - DNA, 540 bp, Homo sapiens
cagcacttatcaatgaactatgaaatagtattaaatagaattaattagaagttttaatgaatcatgtctgtcctcatttattatacaatgtaattttcaaggmgtgattaattacaagttacagatgagtgaatggttaatgtagtttgttaaccttactaagaagcgactgtacacagcaagctgcttctcctctgtttattagcacgtggttatgtaccaccatcagtttaagtgaatgaaaaggttttagtaactttccaattaatgtgcactgtaagctaataatttactccctgattttctttcctgtgcatcatgtgaacactgttgggattcaaaggtagaatttcgccattttcattttggtgtgtttctatatagctattattttgcagctatgatgtccacctgcgctgcagttattttaagtagatcccatttaatacaaggtggcttgtttgaaatgaatctccctgcatatttccttgaagaatataccaatttaccatatcattactgtcattatctaaaaagtgg

SEQ ID NO: 532308 - DNA, 465 bp, Homo sapiens
aaaggcctgttggtgcgggaaattctatttggggagggaccaagatcagactgtgggyatgacctgtgtaagactcagatgcaaacactatagaaagcctgaacacatgaggggcctgtaggaaaatcccagcagcgctacataacctaacctcagtagtcacaattccctgccccaactgtgttctcttctacattgtctgctcaacaaacttctactcatcctttatagtccagctcaaatatctcctctttcagaatggctttcaggactctcaccccaacccaggcaggaagaggctcctcccacctggactctgccagcactctgctcatgccttttttttaaatcccagctctaccaattatgagctgtccttgtaagtaaaatggggataatgtcagtacctatctcatagtgtcattgtgagggttgagttaatgcaagtagaacctctctggcaat

SEQ ID NO: 532309 - DNA, 577 bp, Homo sapiens
atgtgagcactctggaaacacagggtatctgccataagtgtccaggatagacttttggctctctgtgctgcaattgtacaaacctttatcttaccaccgaaaatattataaaaatttatcttaatttatccttcatcacaatttaaatcctaaaataagggtaaacactttaatcatatgtattcatgtttaccattgcaattccggaaaatagcatagcatcaggcacctgtaaggctgaataaactttgattatcctggttatttctgccatcatcttcattctcaattttcmattcactgtaattgtctgttacctgcagcttcctatggtggaagagaggcatactcagtatgctatttcagtggaagactgagaacagagattttacagatgtcagaactggactcaacttgtgtccaaattccatatgtatgcagaaggtcctaaactgtgaccactatagaatagtgtcttagtctgggctgctctaacaaaagtaccatagactgagtggcttatttctcacagttccagagcaatcaaggtgctgacagatccaatgtctggtgaggg

SEQ ID NO: 532310 - DNA, 618 bp, Homo sapiens
ctggcatttgatcatctttgatggggctcttgtttttaagagtacctgcatgacctaagttttgggcagaagttcactctccttcccagatcatagacagaagacctgggttcaagycacgactctgctacagacctgcctgtgatttcaggctaaccgctgagggtcacagagatataggtgcctcttctctaaaacgaaggtgagcattcccttgctctaaaacggactgtgatgctcagatgaaatcattactcattcaccaatacgacaagtaatcttgagtgcttttaacgtgccaggcttgttgtaggtccagggagggaggagtaaagacagatccctctgcccttgcatggttgacattcttttgtaggggaaagagataaataaacagaaaaataaacaaggtaatttcagagattgatgagagcttgggaacaaatgcatagctgtgcaaagccctgcccctactggtggtcagggtaaatggcattgagttgagatctgaaccaggaggaggaaagatctgggacagaacattctagaacaagggcagtaggcttcagtcctaaagttaatgtgtaaaggcattgtttagagcatacagtgtggcca

SEQ ID NO: 532311 - DNA, 618 bp, Homo sapiens
ctggcatttgatcatctttgatggggctcttgtttttaagagtacctgcatgacctaagttttgggcagaagttcactctccttcccagatcatagacagaagacctgggttcaagtcacgactctgctacagacctgcctgtgatttcaggctaaccgctgagggtcacagagatataggtgcctcttctctaaaacgaaggtgagcattcccttgctctaaaacggactgtgatgctcagatgaaatcattactcattcaccaatacgacaagtaatcttgagtgcttttaacgtgccaggcttgttgtaggtccagggagggaggagtaaagacagatccctctgcccttgcatggttgacattcttttgtaggggaaagagataaataaacagaaaaataaacaaggtaatttcagagattgatgagagcttgggaacaaatgcatagctgtgcaaagccctgcccctactggtggtyagggtaaatggcattgagttgagatctgaaccaggaggaggaaagatctgggacagaacattctagaacaagggcagtaggcttcagtcctaaagttaatgtgtaaaggcattgtttagagcatacagtgtggcca

SEQ ID NO: 532312 - DNA, 567 bp, Homo sapiens
tgttctgcatccagcctccaaggaatccgtctgtctggcccatcaccagccttatgctagagttggccgctgcctgggtggtgagattagaggacacaaggatgtgcttgatccaaatatctcccacaccagtctgtcacggtgcctgacagccccccatcagagagatgagagagagacagagagagaaagtaastaagccttggggttgacacatatcactccctttgtttgttcttcaaatgcttgtccctgggtaagcccccatgcctttccaagcctcaaccttctctctgtaaaatgggcctggaatacagggttgaatggataaaatgagatcaagaacatggaggaatctggcacacagcacgtggccagtaaagtcctgcttttcagagatgtccattaaatcccccagatctcttgggcctgcaaaaacctagagtactaaggcctggactccctgaccatagcctactgtgctgtggcgtcccctctgcctagaggtgccaactcataggctgccctgaaccagtcagatttgctttcttggggtcttggaatgaa

SEQ ID NO: 532313 - DNA, 567 bp, Homo sapiens
tgttctgcatccagcctccaaggaatccgtctgtctggcccatcaccagccttatgctagagttggccgctgcctgggtggtgagattagaggacacaaggatgtgcttgatccaaatatctcccacaccagtctgtcacggtgcctgacagccccccatcagagagatgagagagagacagagagagaaagtaactaagccttggggttgacacatatcactccctttgtttgttcttcaaatrcttgtccctgggtaagcccccatgcctttccaagcctcaaccttctctctgtaaaatgggcctggaatacagggttgaatggataaaatgagatcaagaacatggaggaatctggcacacagcacgtggccagtaaagtcctgcttttcagagatgtccattaaatcccccagatctcttgggcctgcaaaaacctagagtactaaggcctggactccctgaccatagcctactgtgctgtggcgtcccctctgcctagaggtgccaactcataggctgccctgaaccagtcagatttgctttcttggggtcttggaatgaa

SEQ ID NO: 532314 - DNA, 636 bp, Homo sapiens
tggctgttatggggacatgtggaggctcaggtcacacatggggaactgggcttttctcccactttgtacctctggtcctataggccaggactggctctgcctagaagtggctgcagccacaaacatgtcaggcagccctctccatcccaaaagtgtgtcttattattaaagctcatacatcacacactgaagcaaatacccggcatgggggaattggaatcattcagcgtggacccagatccatcaccttctaaatcaggtagatcagcccgtgaatcaaacgcatcacctctggatccattggactcccagtcagattagatgcatcacctattgaatcaaatgcaactctgattgaatcagaaaatgcacctcacctagtaaatcatctaaatattacccacattacaggtttggaatggctgcctcaccaatacatttgaacagacgacatgttaaagctgccrtaacatttaaacaattacctgcagaaacgaactcaatacatccgtcacttgggctggcagatcagcgtttccagagcagaagtcgccgcccagatgcatgggctttcctttcccctccttctcccagccaccctccttccccaccggcatcctttctcctccagagacc

SEQ ID NO: 532315 - DNA, 636 bp, Homo sapiens
tggctgttatggggacatgtggaggctcaggtcacacatggggaactgggcttttctcccactttgtacctctggtcctataggccaggactggctctgcctagaagtggctgcagccacaaacatgtcaggcagccctctccatcccaaaagtgtgtcttattattaaagctcatacatcacacactgaagcaaatacccggcatgggggaattggaatcattcagcgtggacccagatccatcaccttctaaatcaggtagatcagcccgtgaatcaaacgcatcacctctggatccattggactcccagtcagattagatgcatcacctattgaatcaaatgcaactctgattgaatcagaaaatgcacctcacctagtaaatcatctaaatattacccacattacaggtttggaatggctgcctcaccaatacatttgaacagacgacatgttaaagctgccgtaacatttaaacaattacctgcagaaacgaactcaatacatccgtcacttgggctggcrgatcagcgtttccagagcagaagtcgccgcccagatgcatgggctttcctttcccctccttctcccagccaccctccttccccaccggcatcctttctcctccagagacc

SEQ ID NO: 532316 - DNA, 664 bp, Homo sapiens
tgctccagtctcagggcctcgtgtatgtgcttcccatgtcccatcacccagccaaagtccactcacacatgaggtttctgcttaaggatcacttcctcctaagcagagtcctcctgttagcatcctgactttttcctgcagagtagtaatcaaaattcactarctgcagaattagcttttccactctgccttctcaactaaaacataagcaggggcatctctgagggcagagtcacgtcctcaccgtttacggttagagcctcagcagcgagcacgctggtttgtacacaggtagtgggattatttttaattgtagtaaaaaacacataacataaaatttgccattttaaccatttattaatatacagttgagtaatgtaaactacattctcattgtccaacagagctctagaacttttacatcttgcaaaactgaaacactacccattaaacaattcctcaactccccctcccccagcccctagcaaccaccattctactctttgtttctatgagtctgactactttagatacctcatataagtggaatcctatagtgcttgtcttttagtgactgctttaactcacttaacatggtgtcctctaggttaatccatgatacaacatgtgacaggatttccttctttctcaaggctgagtaggt

SEQ ID NO: 532317 - DNA, 486 bp, Homo sapiens
cttggaacaattttttgttgttaagagacagagtcttgttctgtcacccaggctggaatgcagtagcatgattatagcttactaaagccttgaattcctgggctcaagcgatcctcccgcctcagcctcccaaggagctggaactacaggcatgtgccaccccaccaggctaattttttttttttaactttttttgtagagacagggtcttgttttatttcccaagctggtctcaaactcctagcctcaagtgatccttctgccttggcctcccacagcactgggattacaggcrtgagccaccacactaggcttggaacaattcttaagttcactctgacctctccctttcttatcacttcatgggagtttagttagtgctgtgatctttccacagaaggagctcatgcagaagaatatcatttcaacaaacatcatttcaagactgccggacttcctaggttacaacacctactgatggctcta

SEQ ID NO: 532318 - DNA, 649 bp, Homo sapiens
aattcattcagaataacaaataaaaaaatagggggaaataaagtaatgaccaacaaatgacttacttggaacattatctaaattctagagaaacggacatgaaaactttgtgtcaaaacgtaaagaactcaatattccaagaattatgcaacgttctctgcagaagtttcagactttctttcaaaaaccattttttgytggagtcattgttttgaagaaaatattttactaataataaaagacctatctacctggtgagaaagctttctgctaaatgctttacaaacatatttatgctttgaaacatctctgtaaggcacatattatcaagttcattttgtagtcaaagaaaatgaggctcggagaaattaaataacttcccttaataagcataaaatgcaaaaatcatacagtggttaatcaacagtcctggagttagacaaacctgaatttggattctggctcaaccgcctaacaaccatgtgtaaatccaattctagtttatgtgagataaattcttgacatcacaccatgatgcttatatagcctcaactacaaaaagcagcctttaggtaaacagcctcacattccggtgtctcacatttgcccacggactttactataatcatcaggactttattcaactgtt

SEQ ID NO: 532319 - DNA, 312 bp, Homo sapiens
gtttctgttttatatccaaatcgtccaggatgcaatgggcaacacgtgaagctatttcctgatgcttaattgtgccttggtgtcccactattctcaacttgccatgtttcaaataaatagttaaaataggtgtgattaaaaaaaaaaaaaaaactcaggcagcccactcactcaccatatctttcatttgaatctgaggtttttctacaatactatggatcacataaagacatctgagcaagtcacaggatgaagcygaagttcttctcacatttcttattcaagtatacaaaatcaacccacatttttctc

SEQ ID NO: 532320 - DNA, 617 bp, Homo sapiens
tggctcacaaatggccagcctcgataagtgcacaggaatgaaaaaacacatcattcagcctctagcccacactggttggaggctgggagagaggtgagaaaggggcaaatgggtggaattttcacccaaggaacaaccatagcaagaaaaacgraattgaatggcgccaaattgaaaagaaaaaaaaagtccccagaatattaacacagagaaattaagagaaagtgctggtcttaaagacagacccttccaaatccccaatttcattaagtgtgagcagtgatacagatccccagtacagaagagcaacaaaggacccttctctgttccagaagatggtggaagcttgtgaacccaaggactaaccctgtgtcccagccacctggcaccttctattctcacctaaagcacccggcccttgtacaaattacctaacagtttctatagggcatggtaagagtcagctctataaacccagcaatatgagtgaaaagtcagacagccaaattcagacttggtgtcattctcaggccactttccacaacactgccagacagattactgaaggctgaaatggcttactttcaaccatccaaagactaagtgggcggggttta

SEQ ID NO: 532321 - DNA, 581 bp, Homo sapiens
agttaattagagaatctccttaatcttactctttatttgccacaaatctgaggatgaaagtcttgtcttatgacatttcccctacaacattttcattacgggttcccagaaaaagtgttaaacatgattctcaattatgctctagtgacagaaacatctagggggaaaaaaaaagcttaattatgaatcctaatactgtatttatattcatagaataccagtgttagaaagaacctcagaataatggtccaaatgtccatatttggggaacggcctaactcttgcctcagtggctaygaatatttgaacacttctgggaccatgaaccacatgggcccactaggactcccctcctcccgtggctttcatgacatttcaaactcctgtaatgctctctgctacatcaaaagaacagtttatccctacatcaatgcttctcaaactttaaaggtgcgtatgaatcacctgaacatctagccaaaataaagtctatttcagcaggtctagggtgagcgctagagttcttcatttctaagaagcttctgcgtggagccaacgctgctggtccttggaccactctt

SEQ ID NO: 532322 - DNA, 581 bp, Homo sapiens
gactaatcctcttcatgactttcatcatcatagtcactctcctctttcttcaaacataacttctcttgggttttctcatagctaaagtcaaagttatttccatcaaagtaaatctgccaaccccaaaactctcagtcaactgtcaccactgtgcaatatgatagccactggtcacacgaggctatttcaatttaaattacttacagtaaataaaatttaagtctatttcctmgtacacactagcactctttcaagtgatcaatagccatatgcagctaatggctgccatgctggacagtgtaggtatcaaacatttcatcatcatgaaaacttgtactggacattgcaggtttacatcctctagtatcattctcccatctgttcttttctccacagccaaacacttctttaaacaacaatttacactcactgtcaaatttctctttttttctttcttctttttaggcaaggtcttgctctgtcacctaggcgaaagtgcagtggtgcaatcacagctcattgctgccttgacctactgggctcaagtgatcctcccacctcagcacccctctcccctcctc

SEQ ID NO: 532323 - DNA, 644 bp, Homo sapiens
gttcaatttctctacattgtggttaacacttaaaaaacaaaacaaaacaaaacaaaaaactggggtcaggcacggtggctcacgcctgtaatcccagcactttgggaggctgaggcaggcggataacctgaggtcaggatttcaagaccagcctggccaacacggcgaaatcccatctccattaaaaatacaaaaaattagctgggcctggtggtgggcacctgtaatcccagctacttgggaggctgaggcaggagaatggctcgaacccgggaggcagaggttgcagtgagccgagattgtgccattgcactccagcctgggcaacaagagcgaaactctgtctcaaaaayaaacaaacaaacaaacaaaaaccaaaaaaaaccccaaaactggaatgcttcacagaatttgcatgtcatccttgtgcagggaccacactaatcttctctgtattgtttcagttttagtgtatgtgctgccaacatgagcatagtccttatttttattttagccctcttacagtgggtacttttaaagcatttgatagcaaatgattttttcttccaaggcaaatatgtttaatatgtaagtctagaaaggaaaagcaaaacaaaaatgagctgggcttcaaattcttccag

SEQ ID NO: 532324 - DNA, 630 bp, Homo sapiens
atttgaatcttggaatagggtaatgagaggacaggataaaatgagtggtcttttctagatctactgctggtctcagataagatgttcaagtatggccaggcgcagtggcttacacctgtaatcccagcactttgggaggccaaggcaggtggatcacctgaggtcaggagttcaagaccagcctggccaaagtggtaaaatcctgtctctattaacaaaaattagccaggtgtggtggcacatgcctgtaatcccagctacttgggaggtgaggcaggagaattgcttgaacctgggaggcggaggttgctgtgagccatgattgtgcaattgcactccagcctggaccacaagaacaaaactccatctccaaaaaaaaaaaaaaaggaaaaagaaaaagatgttcaagtatcttcaagtatcttctcttcccttgctttctttttctttwtttaaatctttttttctttttttatttattcacttttacttttcttcttttcttccctttgtttctgacatttccgacctggccctccagacttcccattgattctttgagttcctggatatcattttgctacatttcaaagtctattgctgttgcttgcaacccaagaatcctaactg

SEQ ID NO: 532325 - DNA, 575 bp, Homo sapiens
ttggttgctgtgtttcctcctcacttgggcatttaaaaaatattttaacacgaattgtccgcggaattttcatgttgggctcgggtagcttcttagttttctcggtaaaaaggcgttttactacctctggtgtgaaggctgggaaatggcaagtgggaagttggttgataaaattaggagtttggctgtctttattactactttttttttttttttgctctccccatctctcattttatgaacatcgacccagttcgtcatggtttaaataaactgcttgtcttgtacctgccttaacaaaactagccatgggtcgttgggagacttagttgcttcctaggcagtttgagggcatctagggtggaaaagttaaccgagagagcgagcatctacctcactggcaggatctgggattcccaaatggaatgacacggaagctatgagattctctcgaagtcgaaacttttttccccctcccgaatgcgaagacttcctttttgcaatatttgagcagggcttcaaaaccaacctgtttttgttattaagcctgtasggtaaagaaacaggaaggagag

SEQ ID NO: 532326 - DNA, 603 bp, Homo sapiens
atttagctttcccattgtagagttggtgattcccagatgatatatgactacagagatgcaagtagaagcattcttcagcctcctccaatgagagatacaacctagacccagaatggagaggctgagggcagccagggagcctaagaagcctattcagaattcctgcatttggagcctaggaatttatttaatgtcattgttattttatacacttggcatttgtttatatgcaaatagtgcataccagttatgaatctcagtccacaaactattttttctatttcctatagcttaacttgatttctcagagttttccttgtgcagactgttaggcaacaaaacaaacaaataagaaatcagaccttcccaaggtacctctccatgagtgataccaagattatgaggctttatacaatgccaaggtaccaaatagtgggtgtgagtgatcctctggtgtttggtcttgtgtccactcaggtttctgctgagatagccaatccctgtctacatgttgcttgagtctgatgactctctgctgctcggttatttctcttggtctgtrtgaacctcttgcagtgctgtctatggaccccttgccctctc

SEQ ID NO: 532327 - DNA, 654 bp, Homo sapiens
cctgtaatcccagcactttgggaggccgaggagagcagattatgaggtcaggagttcgagaccagcctgaccaacatggtgaaaccccatctctactaaaaatacaaaaattagccaggtgcagtggcatgcgcctgtaatcccagytactcaggaggctgaggcaggagaattgcttgaatctgggaggtggaggttgcagtaagccaagatcgcaccactgcattccagcccgggcaacagagccagactctgtctcaaaaataaaaaaataaaaataaaagagatagacttgggtatgtgtaaatgttgatctgatcagaaaagaccagttgagcagcaggagctgaagttcaagaaaagaatctaactgacaaaatgttgcacccaggaaggtagaagaaataggatgaggagcaaaaagaggagctatgtatgaatgcaggaaagtttctcatttcaggcaggaacttgaaagtctgtctcatgttagctggagaagatggtagcgcctaggaaaggtagggtgttgtttttacttatttatttaggatgcggggcaaggaattttacttatttactatacaccgtgctttttgctcaggactttacaaaacattagctcaatttattttcacaaagctgatccataga

SEQ ID NO: 532328 - DNA, 654 bp, Homo sapiens
cctgtaatcccagcactttgggaggccgaggagagcagattatgaggtcaggagttcgagaccagcctgaccaacatggtgaaaccccatctctactaaaaatacaaaaattagccaggtgcagtggcatgcgcctgtaatcccagttactcaggaggctgaggcaggagaattgcttgaatctgggaggtggaggtygcagtaagccaagatcgcaccactgcattccagcccgggcaacagagccagactctgtctcaaaaataaaaaaataaaaataaaagagatagacttgggtatgtgtaaatgttgatctgatcagaaaagaccagttgagcagcaggagctgaagttcaagaaaagaatctaactgacaaaatgttgcacccaggaaggtagaagaaataggatgaggagcaaaaagaggagctatgtatgaatgcaggaaagtttctcatttcaggcaggaacttgaaagtctgtctcatgttagctggagaagatggtagcgcctaggaaaggtagggtgttgtttttacttatttatttaggatgcggggcaaggaattttacttatttactatacaccgtgctttttgctcaggactttacaaaacattagctcaatttattttcacaaagctgatccataga

SEQ ID NO: 532329 - DNA, 654 bp, Homo sapiens
cctgtaatcccagcactttgggaggccgaggagagcagattatgaggtcaggagttcgagaccagcctgaccaacatggtgaaaccccatctctactaaaaatacaaaaattagccaggtgcagtggcatgcgcctgtaatcccagttactcaggaggctgaggcaggagaattgcttgaatctgggaggtggaggttgcagtaagccaagatcgcaccactgcattccagcccgggcaacagagccagactctgtctcaaaaataaaaaaataaaaataaaagagatagacttgggtatgtgtaaatgttgatctgatcagaaaagaccagttgagcagcaggagctgaagttcaagaaaagaatctaactgacaaaatgttgcacccaggaaggtagaagaaataggatgaggagcaaaaagaggagctatgtatgaatrcaggaaagtttctcatttcaggcaggaacttgaaagtctgtctcatgttagctggagaagatggtagcgcctaggaaaggtagggtgttgtttttacttatttatttaggatgcggggcaaggaattttacttatttactatacaccgtgctttttgctcaggactttacaaaacattagctcaatttattttcacaaagctgatccataga

SEQ ID NO: 532330 - DNA, 594 bp, Homo sapiens
ggcagaggcggctgaggcttgggcagccaggtcccggtaagcaggcgacttcaggaagcgtgggtaggagtccttctccatcagggtacgtgtcttcccctgagccgcatcaaagcatgtggctgtggcagtctgcaggttcatcctcgtcagctcgygggtctcatggtcaatgttgacctgcgggaaggaggacacacacagggtgagttggggaagagggtgggcatggctgagggagggccaacggcaggctgggcattggaaagagcatcggatgctgcatcaggaagtgggggctcctgagttgatcactagcttttcagctctgggcttgtacccacatctgatccagtgtctgtcctccaatctctcagaattaacatgaggatctatcaagaatgtatacaaacgcaatcccctttcaccctttcttctacagcaaccctgcttcaagtcactatcagctctcctgggatttgcaccaaggcctcctacctggtctctctgctaccttaccccccacccctgtggtttgttctctacccagtcgctacagtgagcctttaaaaacccaactcagtttggtagctc

SEQ ID NO: 532331 - DNA, 617 bp, Homo sapiens
gataattttaatgtttgtttatttgattgtttggggtcttctgcttggttgctgtgtgaccagctccagtcattatatttttatawctcaaccattatctcaaaaggggctaatttttaaaaactaaaagtttctctgtgggtatcctgttctcagagatagataacagctctgcaaatgcagaagagcttttaactgtactatccattaacccagcattccctgggcctggtgggataggtcagggagaccctccatgccctgtgcaaacagcaaaacaaggctaaacaccaaataaatgcctggggtgaggtgctcattcacccagctgtgtggtcacacataagaagtgagaggaaaggtgagggaaccctgccttcaccttcaccttaaaactggaataaatctaactttttatgttcaaaaagtatcaaaggacagagggaggcaagaaggaagggagaaataagggaaggaagggagggaggaagggaggaaggaaagaaagagagagaatgaaggagatgaagggagcaccaactcagagttcaggacttaatgttccactaaaagctaaacaaataaaaaaagtttgcatgaatcttgtgagaaataaa

SEQ ID NO: 532332 - DNA, 554 bp, Homo sapiens
tgtctaaataagctcctagaatattttaggctcttagtaaacatttatttaatattttatttatagtgttatggctttctagtttgtttctttcatatgattttgaatacactgaaaattttattttgacggtattagatctatcaaaatttctcactaacatttgttctgtttcttttgtgcataaaaaatatttttccatggagagttctactttgtgattcgattttaaaaattagctacttaattctcctgaaactcattttgttaaataacataacttgttttttttyctccagttcagcttactaaataagccatcctttctccactgatctatatgctaacatattttaaattcttttcacacaaaagggtctcctggctatttatggtactccatttcctcccatcgtatgtgttcaagatgaagctattttctttgcacttgggtgttttattgtgcaaaaaatcataaggacttcaaaacagccactttcatcactctgagacctgtggagatgaggagttttccagagtttctgggaagctag

SEQ ID NO: 532333 - DNA, 627 bp, Homo sapiens
gtggtctactattcaattttacacaccgtcaggggactgggctctgacttctgtcctcatcaagygagatgaccaaaaggaaaggctgattatgttgattttatctttagagcaaaagcaaattactcttccatagttcctattttctctttagtttttccctggtaattcctattcctaactagtgtgagtgtgtgtaaatgcacacacacatgcatatagacagttgcacacacacaaaagagctggttttacagaaatgctacattaaatatatacaccaactatggagtatattttttaaaaagaacatttccatttccagcagtttcatctttcatatcattaagaaagtaggtatcaggaagtactgtatctttaaagatctgagctactttctcatggagataagaaaaagaatctacatatttccagtgtctatgcccttctaattattatgcagttccacattcctgggctagttctgggtcattgggtgtttgatggagccatctcatgacacacctatgagaatatttattgatgtttatcatagatgcccgtaaaaaccattgaagatttaatatgtgttggacattggctacatgctttcccaccttttaactc

SEQ ID NO: 532334 - DNA, 635 bp, Homo sapiens
taatacaggggttgcagtttatagggattcaaactgccttttcttcagggattccatgccagatggggaaagaggaagcacatctgggtggttccaggaggaaaggacacaaaaagtcatgataggagagagaatagcctgagaatactaatattgaaggattgtagtgttaaaatagtgtgaaagtagaggacatattaggcaagcttcctggaaatggaggaggctgactgatattgatccagaatccaaacctcaggaccgacaatcagaaggacttctagaagcacagaggcagggtgtctttcacagagttggacattgtttccaagctcttgacaccagggatgaacacttgtgtgtttgtatgtgtgtgtgtttgggtgtgtgtgtgtttgcatgtgtgtgtctgtaatttatgactccatttgtataggcaatggcaagaacagaaactctttgaggtccatttgcagaagtgagcttaaaggtttatttgtactrgagcagtctgcatttttaaagtataagctacatggagtcattttgctatgtttgctgaaggaggggcatggtaaaattctttgggagaatagatggggagagagtgagggtatcaggaagaaggagggtga

SEQ ID NO: 532335 - DNA, 570 bp, Homo sapiens
acttccatgttttttcacttaatatctccatcactcatcactcccctgcccagcacgtgrgccaagtggcaggacagcatcctgggactcagatctaacactgtgaggaactgaagccaggtgtccaaggcagcaagtcaaaaggctgatcttaaccagactcatgaaaagaagctgagtgaccatgggctgtactttacaggaggaagggtctcaacatctgtttcaagcattttatccaactattgattctaagggcaggaaagttttgcttcatagggatgtgttcttctccctagagaagaacaagtctgcagagcttcccaaccttcccaacgtctggattacacagaaaattagaacatgtgtctggcttagtggagagaaaggcaaagctaccatagccagaggtgaccctcttggagctccattcactcagcatctgggggaatcagttcctcagagcagcttttcatgtatcacctactcatgtcctgtcctagcctcatgaagaaaattactctgaggccctgacctttggaggacatttgaaatctcagaagagaagag

SEQ ID NO: 532336 - DNA, 570 bp, Homo sapiens
acttccatgttttttcacttaatatctccatcactcatcactcccctgcccagcacgtgagccaagtggcaggacagcatcctgggactcagatctaacactgtgaggaactgaagccaggtgtccaaggcagcaagycaaaaggctgatcttaaccagactcatgaaaagaagctgagtgaccatgggctgtactttacaggaggaagggtctcaacatctgtttcaagcattttatccaactattgattctaagggcaggaaagttttgcttcatagggatgtgttcttctccctagagaagaacaagtctgcagagcttcccaaccttcccaacgtctggattacacagaaaattagaacatgtgtctggcttagtggagagaaaggcaaagctaccatagccagaggtgaccctcttggagctccattcactcagcatctgggggaatcagttcctcagagcagcttttcatgtatcacctactcatgtcctgtcctagcctcatgaagaaaattactctgaggccctgacctttggaggacatttgaaatctcagaagagaagag

SEQ ID NO: 532337 - DNA, 570 bp, Homo sapiens
acttccatgttttttcacttaatatctccatcactcatcactcccctgcccagcacgtgagccaagtggcaggacagcatcctgggactcagatctaacactgtgaggaactgaagccaggtgtccaaggcagcaagtcaaaaggctgatcttaaccagactcatgaaaagaagctgagtgaccatgggctgtactttacaggaggaagggtctcaacatctgtttcaagcattttatccaactattgattctaagggcaggaaagttttgcttcatagggatgtgttcttctccctagagaagaacaagtctgcagagcttcccaaccttcccaacgtctggattacacagaaaattagaacatgtgtctggcttagtggagagaaaggcaaagctaccatagccagaggtgaccctcttggagctccattcactcagcatctgggggaatcagttcctcagagcagcttttcatgtatcacctactcatgtcctstcctagcctcatgaagaaaattactctgaggccctgacctttggaggacatttgaaatctcagaagagaagag

SEQ ID NO: 532338 - DNA, 570 bp, Homo sapiens
acttccatgttttttcacttaatatctccatcactcatcactcccctgcccagcacgtgagccaagtggcaggacagcatcctgggactcagatctaacactgtgaggaactgaagccaggtgtccaaggcagcaagtcaaaaggctgatcttaaccagactcatgaaaagaagctgagtgaccatgggctgtactttacaggaggaagggtctcaacatctgtttcaagcattttatccaactattgattctaagggcaggaaagttttgcttcatagggatgtgttcttctccctagagaagaacaagtctgcagagcttcccaaccttcccaacgtctggattacacagaaaattagaacatgtgtctggcttagtggagagaaaggcaaagctaccatagccagaggtgaccctcttggagctccattcactcagcatctgggggaatcagttcctcagagcagcttttcatgtatcacctactcatgtcctgtcctagcctcatgaagaaaattwctctgaggccctgacctttggaggacatttgaaatctcagaagagaagag

SEQ ID NO: 532339 - DNA, 533 bp, Homo sapiens
tgggtgttgcaggacataccaaggggtcctctggaaaatattttgcaatgaaacctccagataaaagagcctggcttgaagtatttgccagtttccatggtgtaaatatgcccaacacagcagttttgaagttaccaacatgaagtcactgaacacagaattggaaaagatgtgcacagttagctttccccacctatatgagctccggtaggcctcagagcctcaacagattcgaggcagrctgagtcccattcctgctcagtatggcagaacacaagcacacaactctttctccagcctacctccatcctccccatccctctgccttgctcatacccctctggtatcccaggttgccactcaccctggtcacacgcaggagcacagacacgtccctggggagtcagagcagatgagatgctgaagctggatgtgtcttttatagggcccaggcttggctctggaaagagcaggaggtggctcttgcacaaccaggcacacgctgggtcattcctgacattctcctgcctctt

SEQ ID NO: 532340 - DNA, 533 bp, Homo sapiens
tgggtgttgcaggacataccaaggggtcctctggaaaatattttgcaatgaaacctccagataaaagagcctggcttgaagtatttgccagtttccatggtgtaaatatgcccaacacagcagttttgaagttaccaacatgaagtcactgaacacagaattggaaaagatgtgcacagttagctttccccacctatatgagctccggtaggcctcagagcctcaacagattcgaggcaggctgagtcccattcctsctcagtatggcagaacacaagcacacaactctttctccagcctacctccatcctccccatccctctgccttgctcatacccctctggtatcccaggttgccactcaccctggtcacacgcaggagcacagacacgtccctggggagtcagagcagatgagatgctgaagctggatgtgtcttttatagggcccaggcttggctctggaaagagcaggaggtggctcttgcacaaccaggcacacgctgggtcattcctgacattctcctgcctctt

SEQ ID NO: 532341 - DNA, 533 bp, Homo sapiens
tgggtgttgcaggacataccaaggggtcctctggaaaatattttgcaatgaaacctccagataaaagagcctggcttgaagtatttgccagtttccatggtgtaaatatgcccaacacagcagttttgaagttaccaacatgaagtcactgaacacagaattggaaaagatgtgcacagttagctttccccacctatatgagctccggtaggcctcagagcctcaacagattcgaggcaggctgagtcccattcctgctcagtatggcagaacacaagcacacaactctttctccagcctacctccatcctccccatccctctgccttgctcatacccctctggtatcccaggttgccactcaccctggtcacacgcaggagcacagacacgtccctggggagtcagagcagatgagatgctgaagctggatgtgtcttttatagggcccaggcttggctctggaaagagcaggaggtggctcttgcacaaccaggcacrcgctgggtcattcctgacattctcctgcctctt

SEQ ID NO: 532342 - DNA, 533 bp, Homo sapiens
tgggtgttgcaggacataccaaggggtcctctggaaaatattttgcaatgaaacctccagataaaagagcctggcttgaagtatttgccagtttccatggtgtaaatatgcccaacacagcagttttgaagttaccaacatgaagtcactgaacacagaattggaaaagatgtgcacagttagctttccccacctatatgagctccggtaggcctcagagcctcaacagattcgaggcaggctgagtcccattcctgctcagtatggcagaacacaagcacacaactctttctccagcctacctccatcctccccatccctctgccttgctcatacccctctggtatcccaggttgccactcaccctggtcacacgcaggagcacagacacgtccctggggagtcagagcagatgagatgctgaagctggatgtgtcttttatagggcccaggcttggctctggaaagagcaggaggtggctcttgcacaaccaggcacaygctgggtcattcctgacattctcctgcctctt

SEQ ID NO: 532343 - DNA, 601 bp, Homo sapiens
gttcgggactaggggctgggcagggtascaatggtgcctctgtgaaatgcccagttccatgccagacccaaactgtctgtgtgacaggccctgctccatgccctactcaaacttatgtgaagtaccaagttccatgccagactcaaacctacgtgaagtgcccagctccctgccagaggacctatgtgaaatacccaacaccctgccaaacctatgtgaagtgcccagctccctgccagacaacctatgtaaaatgcccaactccctgccaaacctacgtgaagtgcccagctccctgccagatgacctacatcaaaagtccagctccctgccagacccagacgtgctatgtccagggtgcttctccttgccagagctattatgttcaagctcctgcaagtggctcaacctcccagtactgtgtcactgacccatgctctgctccctgttccaccagctactgctgtctggctccccggaccttcggggtgagtcccctgagacgctggattcagcggccccagaactgcaacacaggatcatctggctgctgtgagaattcgggaagctctggatgctgtggttctgggggctgtggctg

SEQ ID NO: 532344 - DNA, 580 bp, Homo sapiens
aagaattcatgaagaaggattgttagaaagagaacttagagaaaatgatggagttctgtataatttattttactaccttccgtagacagtagaaagtatactttgtagaaagtcccaggagacccagtagagagcctctcaaaaacaacaaacaacaaacaatgtacagttgcaggcatttgctttccgcttctagctgctcatgatgacagagcatgaaagcagtggaatcatcctragatgtgttgatttaggagaccaaaggtgtttaagacacaagtggttgctagagagggaaatcaaatctgaattttgttataccatattcgctcaaagaattctttgcctttaaggctaaggggactataactacagacttaaaagactgttgatgtacctcttgtcgtgggagtggaggtgcagaaataaggtggagggtcacatgagtttgttaactctaaatgagtagatgttccttcctgctgggggaggaggggttactaaagacctccacagaagagtcagtgttagaatacctgacctggccctgatggagagtagttgacaggcaagagagaac

SEQ ID NO: 532345 - DNA, 435 bp, Homo sapiens
ggtcttctgaatccaagtacagcgcacagtggtcgctacatcgtgccctcaggaaaacccaggtctgaaaagtgaacacttctttgaggattgggagcctgactcagcccactagggaagaatcaggccgcctccgccaatttcatctcctttctttgccatttctgaggagagcaaagctgaggtcagggctttctacaggcaaggaggaagggacwgtcatggacacgccccctgcccactgtaaagggagaatttgagttcttgggctctccagacctagattgtggatggaatagccaggctggcacaaagccagcatactaataggcgctgtcataagagaagctagccccacagtatccttcctggagacaagaagaggtgagaaaagaaagaagtgcggacaagtaaaaactccaaagggtttactga

SEQ ID NO: 532346 - DNA, 424 bp, Homo sapiens
tttctccctgttttctggctctaaccaccacagggtctggcaccccgatcatggtttctccatcagaggggctcataagcccgaaaaaaagagcacaacctctaggactgaggcagaagaatgcaagagaaaatggcctcatcatgttttctgtttggctgctgcaccccaatatatgggcctgtgccttaccacaaaaatgtaaaacagtgttttgctttctggtatattttgccaattattatttagaggcactaagtggtactaacaggtctgaaaagagataatgtgtctggcaaagtcccaaaactaatcttttatttaattcaactaaaaaaatgttactgagcaccttaacacttcagggaactatgytacttgatgtgaaatgtagaaaaggcagggacctgatattcagtaggca

SEQ ID NO: 532347 - DNA, 613 bp, Homo sapiens
tcactaaatccacattgcagagattttgatggcgcaaggatggggtggctgctgaaggaagcrccaaagaggacaagcatggaatcctgagcctcaacccaggcaggcgcctacccattctgacacagagcatcggaaacagttggaagcaaagcccacatccatacagcatatgcccagggtccatagacttgaaaactcacacggaccccaggctctgtcccacagcacactgacttgcaaacccatgaaatggtccatgcccactcccagctccccactactagagtgaggcatcttgcctggaccacctggctctgcccatctcaaacctgcctgcctatgcagtggttctccaattttagcacacattcaaatcacccacagggcttgctgaaccaaaggttgccggccccacctccagagtatctggttcagtaggtctgggatggtgccaagaatgtgcatttctaacaagttcccaggtgatgccgatgctggtggtcccacactgagaattgctgctctttggcaccaggcaaaggcacctctccagaaagacttcccccagcactccagcccggctggcttctctccccagtcttactgcaca

SEQ ID NO: 532348 - DNA, 634 bp, Homo sapiens
gttgtagaggagagcaaagggctgtaaaagattagtcaagaaggtagggtgagtgagattgcaagttttgagaagcctggtttcaaatccagatctgcctcttgtgagtgtgtaaccttggtcaaattgcttaacctctttaagcaattgattttgtatatacaaataaatatatatgtgtatatgtatgtttatatatgtgtatatattttatatatgtacattttatatatacagtacttgctaagtactaaaaaattgtatatatatacatttattcacacacacgtaacatatgtcatatatatatatayacacacacacacacacacacagcctctcaaggagctttcagtctagcccatataaggttatattaatatgttctaatttaaaagttgggtggtagttacatgggtggtcattttattattcatcttttaattacacatgtatggcatataatcttttgaatgtattatttcacaataaaaaatgataatacaaatctaaatgaagttcatcactaaaatatgtcatctcattatcgccccagctcatccatgttaccatcttgaaaaatgaggtcatgacccattgggaacttggcagagaacttggccctgttggatgt

SEQ ID NO: 532349 - DNA, 587 bp, Homo sapiens
ttgctcccttatctttagttcttttgacccgtgcctcacctaccaacaagagctaaaactgtcttgatgactttgaatagcaacaacaaaaaaatgagcagaatatttagcatacataataataaaaactctgaatttcaataatgtaaaatgatgcattgcttttaacaatgaaaaactagaaacaattaaacagtagaggtcaagcatggtggctcacacttgtaattccagcacttcgggaggctgaggcagaagaatcccttgaggctaggagttcaagactagcctgggtgggccaggggcagtggctcaggcctgtaatcccagcactttgggatgccaaggcaggcagatcacctgaggtcaggagttcaagaccagcttggccaacttggtgaaaccccatcactataaaaatacaaaagtagccaggtgtggtggcatayacctgtagtcccagctactcgggaggctgggacaggagaatcgcttgaacctggaaggaggccgcagtgagccaagctcatgcctcagcgagacagaacgagactctgtctccaaaaaaaaaaaaaaaaaaaaaaaaa

SEQ ID NO: 532350 - DNA, 632 bp, Homo sapiens
ctggggtgtttgagaatacatactctcatcctagcctcacggacaaaccctgcaaggcaggtaaactcatctccctgttgcacagggggaatgacaggctcgatgagttacagggcttgtcacccctaggaagtgacaaagccagggtttaactccaagtcagcctaatccacctttcttgccctgtgtcctagtctttgcaatgtccctggaggtgaccttgcccagctctccgttgactggggggttgtgttctccagccttggccaataggaaactctttgccgacagcaaggctagaagccaggactttgcggaggcccttggtgagcactgattgattaagaaatgtgctttcagacactgcgggcccaaaggtgactgtttcccaggccgttcagctctctgtccacagtgtctcttgyggtcagtcacctatgtgctggccacatctgaatggctcagcattatcccctcaaagtcctaccttccaagctttgcttgcacaattccctcctcccacagggtacttcccacatcttctacctcctgtccttcaaggccagctcaaaggttgcttgcagtgaaaggcccttccaggttccaccctgtgagaattcaattcaccacct

SEQ ID NO: 532351 - DNA, 607 bp, Homo sapiens
acacaaagtccagtgtgtcagaggtcgtcctgggtggctctcctccaggtggtaaygcgaggagccaggccacttttgtattgtgagtctcccatcttaaggcttcaggaagatggggatagggaagaatccagagggaaggcacactggacttttaaccaccttcacttgcaagtgacacatattatttctacccatattccactggccagaaatagtcaatggccagcctaactacagaggaggctgggaaacataaggagcatatggatgccatggacacttgtcaattggggtccttcaggaaggagatgccaagatagacttgtaagcataagagatcttggaagccatccctgtgaaagataaaagaataggtagggaaatgctctgtccatgatgctgttctgacacctgtggaaggagacggggaaggaaggagagtcgggtaggaagagctccagagccaagattatccattacatgagtttcctatcagacccaatgagccaggctctagaatccccacccaactcagtgattggctgaggtctgccttgggagattttgctcttagcttgaaggctgtggcaggtcttaaaggtgt

SEQ ID NO: 532352 - DNA, 607 bp, Homo sapiens
acacaaagtccagtgtgtcagaggtcgtcctgggtggctctcctccaggtggtaacgcgaggagccaggccacttttgtattgtgagtctcccatcttaaggcttcaggaagatggggatagggaagaatccagagggaaggcacactggacttttaaccaccttcacttgcaagtgacacatattatttctacccatattccactggccagaaatagtcaatggccagcctaactacagaggaggctgggaaacataaggagcatatggatgccatggacacttgtcaattggggtccttcaggaaggagatgccaagatagacttgtaagcataagagatcttggaagccatccctgtgaaagataaaagaataggtagggaaatgctctgtccrtgatgctgttctgacacctgtggaaggagacggggaaggaaggagagtcgggtaggaagagctccagagccaagattatccattacatgagtttcctatcagacccaatgagccaggctctagaatccccacccaactcagtgattggctgaggtctgccttgggagattttgctcttagcttgaaggctgtggcaggtcttaaaggtgt

SEQ ID NO: 532353 - DNA, 607 bp, Homo sapiens
acacaaagtccagtgtgtcagaggtcgtcctgggtggctctcctccaggtggtaacgcgaggagccaggccacttttgtattgtgagtctcccatcttaaggcttcaggaagatggggatagggaagaatccagagggaaggcacactggacttttaaccaccttcacttgcaagtgacacatattatttctacccatattccactggccagaaatagtcaatggccagcctaactacagaggaggctgggaaacataaggagcatatggatgccatggacacttgtcaattggggtccttcaggaaggagatgccaagatagacttgtaagcataagagatcttggaagccatccctgtgaaagataaaagaataggtagggaaatgctctgtccatgatgctgttctgacacctgtggaaggagacggggaaggaaggagagtcgggtaggaagagctccagagccaagattatccattacakgagtttcctatcagacccaatgagccaggctctagaatccccacccaactcagtgattggctgaggtctgccttgggagattttgctcttagcttgaaggctgtggcaggtcttaaaggtgt

SEQ ID NO: 532354 - DNA, 516 bp, Homo sapiens
ctggacactgtagaaagacactgggcatcggtcaacctgtgtgtgcatgctgacactgcctgtcccctgagccccagagtccttgtccgtgagatggggatgatactctgtgagagagttattttgagggttgacctggaacattcrtgtaaagcattgagcacagggatccacactgactagattttatactaagttttactgttatcattttattataatgcatatgaaaatgtgaaatgctgtgtagcagcataaaaactcgttcttatttcagtgggggactgtgtgtttgaggccaatgaagaagttgtgatctgtgtctgagcttcactgaatgggatttttaagttaaggggtgtttttaagccccatccatttctggaaggatttgaggtgcgctgagagctcagtggtgaaccatccactggcccttggggctggtgtctccagtgaagtctttataactctgctttataatcactactggttattgttcactgccccgccaggcta

SEQ ID NO: 532355 - DNA, 445 bp, Homo sapiens
ctgttctctctgtccccacatccccctgttsttgctcttcaccatagcatgcaccacccatgagaaaagtggagagtgggcgcctagcacaggcctggtagctagaccactgggcttgagtccctgctttgccacggactagcaggatgacctcacccaagatgtggtatcaagcctttctgtgcctcagtttctcatctgtaaatggggacagtaataggatctacctcattggtgttgtaaagagcaagtgggtcatccatgtacaggctggctgatagcactgtgtattagctttcatcctcctcatcctatcctcccagccacactgagcttcatgacagggacctctccatccttgctacctagtgtccattgggcacagtggtagtcactgctggaaggaaggaaggaaggaagggaaagagggagggaaggagggaag

SEQ ID NO: 532356 - DNA, 522 bp, Homo sapiens
ctgcatcacccctttggcttataggaagcttgtggttctctaagaaccctaggtttgttttctatggggttattgttgctgatgcttcaaaagaacagcaagccacatctctctaacattacttatcagycgtttaatttggaggcctctgaataggattgaaacatttcacctttgaccatgtcctgatgttgcagcctgttgaaggcatccttgtgtggtgagtctcttatcactcatattcaccatccctctcagttaatgccattgtcattgcacaataggattttctttctcatcctatagcattagtcaaaatgttaaataggagaatgccaaagacacaccctgtgactgcccacactgggggtcatctgccgcctctggttctacaattaaacctactgaaaattgctcccaacttccacattctgcagtcctcatttctctgtcttgcactcctgaaaatcatgaaaagccttgctaaagcccggctgaaaccctgatacatgctacctctta

SEQ ID NO: 532357 - DNA, 640 bp, Homo sapiens
gttgctggaatgtagcctgtatttttagcaaaattttgttatctaaattcattgttgcctttttttgcctagcaaatctctgcttctttttgtagaattagatatttcacatatttgcacctagtgcgaattaattttgattaaagccttccaaatkttcatgttacttgaaaaatgatttcaacatttctttatttatttactgttttataaaattcctccaattattatgtacatagaaatgaataattaggctttggaaagcactgtattgtaaggtatgcactctctcatatgtacacacacacacatatacacacactcatgtcactgtgtgccaatgccataatacctactgaaaatagataaaaattatgtattttagtgtgaatgttggtagaggaataaatatttaatcaacaactttatgggcaagcagaatatagaataataaaagaaggggaaatttggatataaatatttttgaacctttttacagtttgttactattaagtttaaaagtaggctttatgaagctaagccaaataatatcttcatattccagcccttcctcactctccgcctttcccattctcaaagttaattctccattcataccaaaccaaatttatgttttttg

SEQ ID NO: 532358 - DNA, 605 bp, Homo sapiens
tacaaaaacaaataatcttcatttgaagcaagstctccaatttttcaccaggatagtgaatgagcaaagctacatatatcctgcagagttgctagacacacaaagcaaaggatataggtattacactaattaacaacaatgggacaaatcattaaacatcaagtagaacattcagccaagatgatgaacaaattatctgtaagctaagattaatttgttactgaagaaaaaaattaataaatttagtgtgatgaagtgtacagtgtttataaagtctatagcaatgtacagccatatcctaggctattaaatgttataagtattagtagtagcagtattggtagtattatcctcttttcaattttaaccacagagcttacatatgtataatgataacatgataaataggaatcagtttttacattggttttgatggttcacactgtctcaactcatggtatcttgttagcaaaagtgcctctattgtccagttaggcctgattttagtctggcatacaattaaatctaatatgtggatgcacataaacagtttgattagatttttggggaagtaggtttctgcagacatgagccactgcttgaat

SEQ ID NO: 532359 - DNA, 605 bp, Homo sapiens
tacaaaaacaaataatcttcatttgaagcaagctctccaatttttcaccaggatagtgaatgagcaaagctacatatatcctgcagagttgctagacacacaaagcaaaggatataggtattacactaattaacaacaatgggacaaatcattaaacatcaagtagaacattcagccaagatgatgaacaaattatctgtaagctaagattaatttgttactgaagaaaaaaattaataaatttagtgtgatgaagtgtacagtgtttataaagtctatagyaatgtacagccatatcctaggctattaaatgttataagtattagtagtagcagtattggtagtattatcctcttttcaattttaaccacagagcttacatatgtataatgataacatgataaataggaatcagtttttacattggttttgatggttcacactgtctcaactcatggtatcttgttagcaaaagtgcctctattgtccagttaggcctgattttagtctggcatacaattaaatctaatatgtggatgcacataaacagtttgattagatttttggggaagtaggtttctgcagacatgagccactgcttgaat

SEQ ID NO: 532360 - DNA, 490 bp, Homo sapiens
tcctttaaaacaattatttgacatggaaaactgtgaaaacatgtcatcaccatatggacacattaattttccaataactgaccccmaaaatacagaagtctataaattgcatgacaaagaattcaaaataattgttttaaagaatttctgaatttgaagtaaaaggttgctaaagagcaacatgaaagcacagaaaagtatgaaactcattgattaaggtaaatatataaaaaatacaggacactaatagtgtaatagtggtgtgtagctcttttttatggctagtatgaaggttaaaatacaaaagtaataataattatagttacaataatttgttagtagatacacaatattaaaaatatataaaaatgtgacatcaaatatataacatatggtgggctgagtaaaagtatagagttttgaatatgatcaaagttatcagtttaaaatagtttgctccaactacaagatattatatataagcttcatg

SEQ ID NO: 532361 - DNA, 390 bp, Homo sapiens
cttgtgtgtgtgtctgtgtgtgtttataggtttatgcttttcaatcaagaatgtggaaaatagcatatatatgttgaaagctagaatttcctagtagcaaaactatagttacagaaagcttctaacaagctgataaagttttgttttgaacaaactgatatagtacagaaatattaaagaagtatctatttttaatgcatgctttatgtaaatcattccactgaatttaatctatcataaatacttctattaatttcactcttgagttgttatgagggtcaatatcttttgtggaattattatggtatgatgattatgactttgyttgctactttttctacttatacacaatactgtgcctggacattcaaattaaagtgaataacttgg

SEQ ID NO: 532362 - DNA, 647 bp, Homo sapiens
aaagaatgtgacttaattttgtaaatatgttggaaatctgagatttacagttgagactctgttgagaccacagcctccactgacatcagaattacagttggtgagagcctgagcagagcacccagtttagctgtacccaggctcctgatgcatggaaattgtgagataataaatgcatgattttagggtgctaagtttatggtaatgctatagagcaatgaaaaacctaatgcaaacattaatgcttagtacaagacaatgctatttagaagattttagaaagactatttaactactatagtattgaatggaaatggctgatgccagaaaactctacttgctctcctatctgctcacttgttagtaacttaataacctaagaccatttccagaacacayctctcatttcaatctctggttaaattagtgttggaacctgtcctcttttttaaaaaatcttgctttggcctctgggaaagtcattagtaaaataactgattcaattttttaaatttaaaaatgtatatttcttttcttaagagtaataatcagaaagtaatttaagagaatctcaaatcttatctttgtcctaagtgttatgtaaatgtgttttaaaatgctctgttgacaaatgccatatatgaaaa

SEQ ID NO: 532363 - DNA, 582 bp, Homo sapiens
tctcttcatacttctgtatattccttttctttattctcttagagtccttggcttacaccttaaacactgacttatttccacctcaacccacttctctattgctcattcttagtatctttccctgagcctacacatcgattatcacaactttaaattttctcataattattcagaaattattcgttggatactacccagtactagatattatcccaggcactatggatattattaacaaaatatctgttaaagtatatctgtctacctacttgtctatctaccatctatcttttatcaactatagattgttaactgaaaaaaaaaaagaattgacacagaaatcaaaggaaatgcattgatttgcaaaacaaagaaggtacactgagttttagcagtcytgaatagtgtcctgtaaggtagatacaggagagattgtttgtagcggattttcacaaaaagttgtttttggagtcagtttattgactgggcaaaaatctgaaattgtaaaccctttcagattggttacttaattagggtattcccagctaagacatactgatggccagtggatgctgatttcag

SEQ ID NO: 532364 - DNA, 423 bp, Homo sapiens
atgtaaaaacatgcagtatcaaattttgatgctccactggtctcaaatttggccaatgggaaactatcaagctggttcctgtgtccttttaccaccaccctattagcctttaagtgcttctttgctatctgacaaagaattcccagggttacttttctttccctgccagaggctttcctattgtaaaagttaaacacatgactactgcagttttcacatgagaagtataaggaattgtatttataacaaacccccaagctgaagtttaagcagtcaattaacatttactctatactctctctgtrtggggctataccaaatgctaaggaggtttatgcagatgagtatttccacatcttaagaagtttatcttcagcctggaccacagggccagaccctgtctctaccaaaaaaaaaaaaaaa

SEQ ID NO: 532365 - DNA, 649 bp, Homo sapiens
ctgtggggatgggggatcattactggccagcagattaaagttctggctccctacttgaccttagttgataatactcttacagggtactgcggtgccttgtttttgccttgtaagaatggaagtctaggctccctatttggcacttactggtgtggctggtggtggaacaacaaatttttatgtaacatttagctgcagtagagtggttattctctcattttttttcttttttgccaggctgcccctttcctgctcttttggctagagagagcaagcttgtgttttgtcttctttttctgtctgcttctatcagtctttcgaagttaccatttattttcagctccatgtctgggatatatgaggcaaaaagaaacccagggaacttactaccatgtctttccttgggactcaatgtccctaagcaatctggtttcttttctacrtgtttcagagtcctcttactgttgttttacatataatccccaggtgtccaatgtttcaattgtacttagtagttgaaatagggaaaagtatatctactccatcttcctggaggcagaagtccaaaattgtgttttaaaaaagttcctcataagcagatgctgtcattcccttgggatatctgggctccccaaatatctcctatggt

SEQ ID NO: 532366 - DNA, 547 bp, Homo sapiens
aagtccagggcacaggtaggattctctatgtgtactattgaaatcaccaagaattaaggcagatgtagtgttggagaaagtgaaagcatgccaagagctaaaatactcaggagatcaggggtctgtggatgactgcaaaaaggagggactagtaagtggtctggtctgatggcatgagatcaaaacgagggtgttttagtggagaaaagaagaatggcctggaaatggcaatggaaaaaaaaggccacctaccccactttcaaatctagcagtatgagggtttaacagccaccacttaagaaagcaacaagggaaagggtattgttcctagaggagaactgaatttcagttagagcaagaaagagaaagaaattttcagagactagactaagattatagggaaaacagtttaggcaaagagaaggggacattgatataaaaatattgggttctttgggtggtggcaggggaatattayctgtgtgtcttaggctatgcttcacatcgtacagttttcttagagatttgaaaaaggagagctgcagag

SEQ ID NO: 532367 - DNA, 588 bp, Homo sapiens
ctatcacggctgtggtgaatgmcgctgcaatgagcatggaagtgcagacagctttttgacaaactgattttcctttgctttgggtctactgtacacccagtagagcaattgctggatcagaagcctggatttgaatctcgtcttcctgattccaaagcccttctctccccaagacccttcactccttctcctacctccctgtgtgagcagagcctccttgaatgagggaggggcacgttctcctggcaacaggcacacaacaggacaccgtctcttccagaccctttgtccctttgtcttaggggccatccaaacagggacttgtccctgtagatcttgtttatttttgcagcaatccaagggatttggttttgacagtacagcccctgaatattcacacagcaacctggatgcatcccagcaatgttgtgagagagccacattccagctaggggtgaggttatggtcacaaggtggacatccatgggtaggaagcctagcaggcacgggtctcctgcagggatctgtgtgatcaccatctgccctgccagccacactgcccttcagccagaaacaatgggaacacca

SEQ ID NO: 532368 - DNA, 588 bp, Homo sapiens
ctatcacggctgtggtgaatgccgctgcaatgagcatggaagtgcagacagctttttgacaaactgattttcctttgctttgggtctactgtacacccagtagagcrattgctggatcagaagcctggatttgaatctcgtcttcctgattccaaagcccttctctccccaagacccttcactccttctcctacctccctgtgtgagcagagcctccttgaatgagggaggggcacgttctcctggcaacaggcacacaacaggacaccgtctcttccagaccctttgtccctttgtcttaggggccatccaaacagggacttgtccctgtagatcttgtttatttttgcagcaatccaagggatttggttttgacagtacagcccctgaatattcacacagcaacctggatgcatcccagcaatgttgtgagagagccacattccagctaggggtgaggttatggtcacaaggtggacatccatgggtaggaagcctagcaggcacgggtctcctgcagggatctgtgtgatcaccatctgccctgccagccacactgcccttcagccagaaacaatgggaacacca

SEQ ID NO: 532369 - DNA, 648 bp, Homo sapiens
ctggctcagatgcactgcattaattttacgtatcaactaagtaacaagaagcttctactttaccattcataagcttttcatgccacacaggccctaggaggttggctcctgcacacctgtttaaccatatcgtaggccagtctcctccctactcactgtgctgtagccatcttgcttccattcttgtcccttcacttagaaagctctctcttgcctcagggtctctgcatttgctcttccctctgctcagcacacctttctctggccttttcttgccttgttccttctcactccagacttagccaaaacaccaccctcgtaaagggtgattgcctgattacttcgtaaagacctgtcccttcacctgttcccctccaactcctaggtgcttcccgtcactctgaatattttctttatagcctktagcatgacctatggcaatcctgctttcttgttttgtttttactgtctaccttcactcagcaccccagtatataaatgctttgaggacaggaatcatctctgggttatttctgctgtattccaatgcctagaagggtatatagatagatgcacaaaaaatactcattgaatgaatgacttcattttcctgagccaattgaattgctcttctataaagcacattta

SEQ ID NO: 532370 - DNA, 648 bp, Homo sapiens
ctggctcagatgcactgcattaattttacgtatcaactaagtaacaagaagcttctactttaccattcataagcttttcatgccacacaggccctaggaggttggctcctgcacacctgtttaaccatatcgtaggccagtctcctccctactcactgtgctgtagccatcttgcttccattcttgtcccttcacttagaaagctctctcttgcctcagggtctctgcatttgctcttccctctgctcagcacacctttctctggccttttcttgccttgttccttctcactccagacttagccaaaacaccaccctcgtaaagggtgattgcctgattacttcgtaaagacctgtcccttcacctgttcccctccaactcctaggtgcttcccgtcactctgaatattttctttatagcctttagcatgacctayggcaatcctgctttcttgttttgtttttactgtctaccttcactcagcaccccagtatataaatgctttgaggacaggaatcatctctgggttatttctgctgtattccaatgcctagaagggtatatagatagatgcacaaaaaatactcattgaatgaatgacttcattttcctgagccaattgaattgctcttctataaagcacattta

SEQ ID NO: 532371 - DNA, 415 bp, Homo sapiens
agtttctaaggcagcatttaacagaagactccatcctagtctggaagtcagaaaggtttcaacaacaacaaaatgacatttgaggtaagattcaaaagatgagtgtggggaagaattttccagacagaaaacccaaatgtgggaagactctgaggcaggttgaagtatygcatattccagcatcaagaataaggtcatccttgctgaagtccagagagaaacaaggctagaggtggggaatctgaatggattaataatagattccaggctgtgtggagccttccaatcctaaaatcttttacatctgctattcacacccacccccagctttaacttcctatttggattggataaatcctagtcaccttcagatctcaactctagctgggaagacttccctgatgcacacattaaa

SEQ ID NO: 532372 - DNA, 464 bp, Homo sapiens
acaactttagctaaataacttaatgaagttgtacaataatagctttttcagtagaatattttaaagaagttgaagaacttaaagaagttgtacaataatagcttttgcagtacaatattttatagagccttttatgagggattcctaatcattgcttcattgatatttactctaartcatggaaaaagagccctagcaaatgataatcatccagaactgtgaaagcccccggtgatgttatctttaacctataatgtaggttaagactggaccaactttctgtttttgtctatggagcaagaaaaattccattaaagttccaagcccaccatgggatcttcatcttccatctatcaaagcataagttgctcatatataagattggctgcaaagtcctccacaaataaaattatacccaataggtgtatacaatattggctgcaaagtcctccacaaataaaatt

SEQ ID NO: 532373 - DNA, 528 bp, Homo sapiens
catatacaaaggtgaagctaatatatartaatttccatacatgccaaatgatgcattttaaaaagaggaaaatatcaacttttttaccaccagatttaaaagctaaaattgtttacaataaattcctgtgaagatacatgttcccaaatattaatgtcaaattcagtcttcatcaaatatgaacatagatgtgcaattttttttcaaacaatggcaatgtttcaactcgccatcactaaataggttatttcattgttttggaagtagggtggatttattctactcagttttcacgttcttattgtgttcagctcttccttaggatcagtgttttcctagcgaaatagttgtacttaggcagcttctaggtacagactaatgatagctagtcctcatatagtgctttctgtgtgccaggcactttgaagcctgttatacatattattacaggttattctccgaacaacccacaagataagtattgctattatccccatttaacacagaaaggtcaggtgacttgcccaa

SEQ ID NO: 532374 - DNA, 549 bp, Homo sapiens
ttcctttttctatgcacaactccctctggagtttttaaccctgtaccatgaaaattcctgatgagcaaaaacttgaaagcaaggtatgggaaagagttacaaatactctggtccaagctaaaatcacttgtggggatgatgcaacctcaatttaacagaaactacaacatcttccccttagtatgacaataaacttccagagaaaaatgcaagaaacaagaatgcctagagctgagagggagagttgggttaggagtgatggctaaggagtgcatggtttctttttgaggttattaaaatgttctaagagtgactgtggtgatgaatatataactctgaatatcctaatgaatatataactgtgaatttactaaaagtcactgaatttgtacacttcaagtggcaaattatatggtatgtgaattatatctcaaagctgatttwaaaaaaaaaaaaaaaagaaaaagaaagaaagaaagaaagaaaagcaaatatcctttaagaggtacttgaaacttacctccttctccagatccagatccattatct

SEQ ID NO: 532375 - DNA, 637 bp, Homo sapiens
tgtttttaacggctcctcttttcctaatttctacctcttgtccagctcactctttttttcaagatgtagtcttgctctgtcacccaactgacagagtccactggagtccagtggtgcaatcttggctcactgcaatctccacctcctaagcaattctcttacctcagcctcccgagtagctgggattacaggcactcatcactgcgcccaccaccatgcccagctaactttttatattttcagtagagaaagtgttatcrtattggccaggctggtctcaaactcctgacctcaggtgatccacccgcctcggcctcccaaagtgctgggattacaggcgtgagccactgtgcctggcctcagctcactcttattagtgggtttagtcatgtgaaagttttcaatgttgaagaaactctccactactctgtccgcttccctgctctctctcattctctatcatcccctctgtatttcttaattctctactgcagtcactacttccaccattgcctcaatcccaccctttctacccactaagaaagaaaatacatctagaaaatgcatttagacctgctaagtgtcggaaaaagtaaattttgttcctttcatttaaaaaaatgatttgtggcattgg

SEQ ID NO: 532376 - DNA, 561 bp, Homo sapiens
tggaggcacctatccaaagtgacgagagttgtgtccaaacacagaaacacagattttgtgtttctattgtttgaaagttggaagaataaggagtacctcgcaaagaggctgggagctcagcaggtgatgcctatagctaacggggcatttgtggggccagggagcgtacttagacccaggtgaggctagraagggccaggaatagactctgagctgacagtcccgacctcgtggagcctgactctccttccaccccgttggcttcccaggattgactcaaaggggcccacgggactcttctgagaaaatggccttagaaatccgaggcagcttagctttattacggctatttggatcaagggacccacagcagctcttctggctgaggcaagaactgaggtgagagttggttgtgggagaagacctagggcttcctcctgagccaccaccctgctgtcccttaagcacctggcatttgcttgggattctgggggaggggagatcctttggaagggctcatatccaagtagttagaagtagaggaagaaaagagagccccgc

SEQ ID NO: 532377 - DNA, 512 bp, Homo sapiens
cacctatccaaagtgacgagagttgtgtccaaacacagaaacacagattttgtgtttctattgtttgaaagttggaagaataaggagtacctcgcaaagaggctgggagctcagcaggtgatgcctatagctaacggggcatttgtggggccagggagcgtacttagacccaggtgaggctaggaagggccaggaatagactctgagctgacagtccygacctcgtggagcctgactctccttccaccccgttggcttcccaggattgactcaaaggggcccacgggactcttctgagaaaatggccttagaaatccgaggcagcttagctttattacggctatttggatcaagggacccacagcagctcttctggctgaggcaagaactgaggtgagagttggttgtgggagaagacctagggcttcctcctgagccaccaccctgctgtcccttaagcacctggcatttgcttgggattctgggggaggggagatcctttggaagggctc

SEQ ID NO: 532378 - DNA, 456 bp, Homo sapiens
cactgtggcagggaacaagacaggccttgtgctgtgggcatgtggcctctagtctagccagtgaataatcacatgatgaaacataactaaagcagaacaggtgtgatgaaggagagccacacagggccgggagaccaggcaacagagagctctggggggactgtgggaagactaggagttgctagatgatgggcacgggggaagcattccaggcagggaagagcacgcgcgaaggtcctgtggaaggaggggcctggcacacttgaccactccaagaaagtgccagtttcttttaagtgtcggcaaccttgggctgggaaaggaacttctggttcgcaaaggtcccctgagcatttccgtgcgatgcagtctcaggagggaggtggctgataaccttcccacrggcagctcctgggttttgtgggctgggagaggagacccaggagggatttgagc

SEQ ID NO: 532379 - DNA, 617 bp, Homo sapiens
atcagctcccatctgtttgctgctggctccccacacctatcccgcgctcatcgctcttgtccttcacactgcgacaccatcaccgtcaccaccaccaccatgcttgcagagcaactccggatagaygtagacgttgctcaagtccactgtggtctgaacttagcttcctctcccccctgcctctcctccctccggtccctcatctgcactcttatcttgcttatcatttatgccctaaactgggaattgctcatcgtttgtgccctcaactgggaatcctttatcccctaaactgggactcttttttttttttattttgaggtggagtctcgctctgtcgcccagtggcacgatctcggctcactgcaacctccgcctcccgggttcaagcgattcttgtgcctcaccctcccaagtagctgggaccacacaggcatgcgccaccatgcctggctaattttcgtatttttagtaaagacggggttggctaggctggtcttgaaccgctaacctcaagtgatctgcctgcctcagcctcctaaagtgctgggactacaggtgtgagccaccatgcccagcctggactctcttttctgtacctccaaccttcacttagt

SEQ ID NO: 532380 - DNA, 617 bp, Homo sapiens
atcagctcccatctgtttgctgctggctccccacacctatcccgcgctcatcgctcttgtccttcacactgcgacaccatcaccgtcaccaccaccaccatgcttgcagagcaactccggatagatgtagacgttgctcaagtccactgtggtctgaacttagcttcctctcccccctgcctctcctccctccggtccctcatctgcactcttatcttgcttatcatttatgccctaaactgggaattgctcatcgtttgtgccctcaactgggaatcctttatcccctaaactgggactcttttttttttttattttgaggtggagtctcgctctgtcgcccagtggcacgatctyggctcactgcaacctccgcctcccgggttcaagcgattcttgtgcctcaccctcccaagtagctgggaccacacaggcatgcgccaccatgcctggctaattttcgtatttttagtaaagacggggttggctaggctggtcttgaaccgctaacctcaagtgatctgcctgcctcagcctcctaaagtgctgggactacaggtgtgagccaccatgcccagcctggactctcttttctgtacctccaaccttcacttagt

SEQ ID NO: 532381 - DNA, 585 bp, Homo sapiens
aaaacattggtcagttgaaaagaataattcattcacttttaaaagataaagtcatgactgaagtacaatttagaactcaaggagatttcgtaactccccagagtatccaagtaataaatgattctggctgggtatggtggcatgtgcctgtagttccagctactcaggaggctaaggtgggaggatcccttgagcccaggagttgtgggctgtggtttgctatgtcattcaggtgtctacaatacagtttacttcctgggtgcaggggaccaccagattgtctaatgaggggtgaaccggctcaagtcagaaactcccattaaaacaggttaaaactcccgtgctgatcaggagtgggattgcacctgtgaatagccaccacacttcagcctgggcaacatagtgaaaccccatctgtaaaaatcataaaaagtaaatgactctgtagggattattaattatataatttttaaattygattatgaaaattttcagtaacatgaaaaataaggaatccacatattttacatttgcttttttatcctttctttttcttcttctttgttgtatttaaagtgaatccca

SEQ ID NO: 532382 - DNA, 484 bp, Homo sapiens
agaaggcaaggaggagcaagtcatgtcttacatggatggcagcaagcaaagagagagagcttgtgcaggggaactaatctttttaaaaccatcagatctcatgagacttattcactatcacgacaacagcatgggaaagaastgcccccatgattctgcccccatgattctgttacctcccactaggtccctcccacaacacgtgggaattcaagatgagatttgggtggagacacagccaaaccacatcatgaagtaacagaatatttgcctacctgtagcttatgcaaataggaatttgaatcacataataggaagcccagaggcaggtggctgctaccatttgtcataagctcaaggcagcatctctgattctcccggcttttttctcataatcacaagatgactgccatagctcgaccatagtgttaaaggcaggagaaagcaggatagggtggtgtcagcagatatctgctcacatctc

SEQ ID NO: 532383 - DNA, 617 bp, Homo sapiens
tggaaaggacaaactctaggccacagtgctggaggcgagtggcccatggaggggcaggcttctcctctggcttctcccsctcaatgctgaggctgagccccggaaaggaaaagatgcgggccagccctgcctcacctcccaccagggagtgtggcaatcaaggcctggtgcccgttccttactctgccacctctcctcctgctagtacacaagacatgccatgcgtccagccaatcatttttttatctactgagctgttagtcattagataaatatttgctaaatgtatacaaatggacagatccatgctagttataaggggactgacaatgaatcaaatacattctctgcccttgtagagcttacatcctggcgtggcagggagagaataaatacaggtgaagtatccttaatctgaaaatctgaaacccaaaatgctccaaaatctgacttttggagtgccaacaagatgctcaaaggaaatattcattggagtatttcgaattttcagatttgggatgctcacctgatacaatgcaaatattctgaaattaaaaagaaatctgaaatccacaacaattctggtcctaagcatttcagataaggagtactcaacc

SEQ ID NO: 532384 - DNA, 477 bp, Homo sapiens
ttctgactccatgggttgaattgtgacatatgtcttgcatttattgtgatgcccttggtggtaacatgggacgcttcacagtcatcagaggccacactaaccttggcactggatgccctgggcattggatgagaattttgtactcactgttgctgagggcagcctccgaacccaccgcgtatatttattgcttcttttcattctcatctcctgctggactcagggtgtccaaagacacctcagggaaagacgctccaggctgatgacaatgggcgtggatggtccaggagaggtggtcaccgccagggtagaggtgaaaagctagatttgtaccatttccaagactatggagttgctggaaacagttgctgtgaattcactgggacagtaaggtagtagccacaggcttcttagctcrgaagttgtggcaaacagtaagcatggtggggaggtttacctacgtgtggagatcagttc

SEQ ID NO: 532385 - DNA, 593 bp, Homo sapiens
tccaggctcttgactccttgaattccttcccatatgagtcagaaaatagtgaaagtacacactcaagaagggagagtgtgcaagggggttgggagctgcttcctttatgggtttctttaaccaaggggtgcaatatccaagaagattcctggaaaaaggtggaactttcttgaaactgtggtgccacccatttttacatgaaatatgggtgttctggaactgtcatggtgcctgtgggtgtgtaatttagcatctcagagagttgcctggttaatgagcgtatagtgaggtcctagaagaaacctaggtcgaatccagcaccaygttggtttcagttggtcttagccagcttggcccacactctgatttttttagagtcttatgacccctagcttcttatgacccttattttaacagtttccttttgctggtcatgtgaaatggctgcctagaattttctattctcctgtgaccatctgtattattcctgtctcaccactaggtgtatctgtcttgcaaagatgtttagtttatttataaacatatttaaatacaaaatattacattaaatatttgttgttttgatttgatta

SEQ ID NO: 532386 - DNA, 433 bp, Homo sapiens
gacacagggtgctgtttgttgcccttgagccccaagctaaggggctctcaggctggcgaagggctcaccacccggggcgcgctcccagagccgcctgaaagagacccccccgtgttgtcactgcccctcacccgcagcaccggcagccttagcagtacggtttggggtgccttctcctccactgtctcatcccacttctccgaaggtgggcagggccacgcyctggggccagcgtcacgccctgggaccagcggctccttgtgagccttctccccgcttccgaggggctagaggagggacgccatctctggaggctgaggcgccgacttcctgtatcatgaacctcgcctttgggataattttgcttgtattacaacaaaaagcctgagcaacggggaacaatctgtgccttttgaagatggcaaagggcttt

SEQ ID NO: 532387 - DNA, 499 bp, Homo sapiens
tggcctggagtgtcatgacaagcaacacaaacttggctgcccaccataaaggatggtatttgtgatgagaggatttgaaggacagtcccttacaaagagaagcagttgtgtgytggcaaagatccccctagatctctactacattcctcatctggtctggctttctcatcttagtgatatagaaattgagatagaatgccattaaatcacttcccatagtcatggcttgatgaatgtgggaaaaagatataatttatcatccaaactgggtaactactaatcggcacagtggctcatgcctgtgatctcagcactttgagaggccagggcaagtggatcgcttgagtccaggagttcaagaccagcctgggtaacatggcaagaccccgtctttataaaaaaatgagcccggtgtgtggtgcgcacctgtagtcccagctactcaggaagctgaggtgggaggattgtttgagtctgggcggtcaaggctgcagtgagc

SEQ ID NO: 532388 - DNA, 499 bp, Homo sapiens
tggcctggagtgtcatgacaagcaacacaaacttggctgcccaccataaaggatggtatttgtgatgagaggatttgaaggacagtcccttacaaagagaagcagttgtgtgctggcaaagatccccctagatctctactacattcctcatctggtctggctttctcatcttagtgatatagaaattgagatagaatgccattaaatcacttcccatagtcatggcttgatgaatgtgggaaaaagatataatttatcatccaaactgggtaactactaatyggcacagtggctcatgcctgtgatctcagcactttgagaggccagggcaagtggatcgcttgagtccaggagttcaagaccagcctgggtaacatggcaagaccccgtctttataaaaaaatgagcccggtgtgtggtgcgcacctgtagtcccagctactcaggaagctgaggtgggaggattgtttgagtctgggcggtcaaggctgcagtgagc

SEQ ID NO: 532389 - DNA, 499 bp, Homo sapiens
tggcctggagtgtcatgacaagcaacacaaacttggctgcccaccataaaggatggtatttgtgatgagaggatttgaaggacagtcccttacaaagagaagcagttgtgtgctggcaaagatccccctagatctctactacattcctcatctggtctggctttctcatcttagtgatatagaaattgagatagaatgccattaaatcacttcccatagtcatggcttgatgaatgtgggaaaaagatataatttatcatccaaactgggtaactactaatcggcacagtggctcatgcctgtgatctcagcactttgagaggccagggcaagtggatcgcttgagtccaggagttcaagaccagcctgggtaacatggcaagaccccgtctttataaaaaaatgagcccggtgtgtggtgcgcacctgtagtcccagctactcaggaagctgaggtgrgaggattgtttgagtctgggcggtcaaggctgcagtgagc

SEQ ID NO: 532390 - DNA, 608 bp, Homo sapiens
attgtagagatactatcacatgttgtgtatatttattaaaggatgtaaaaataaaaacgtgttgacatgttgtactgttgtgtgttctaatgttggagattccaaatgtaaaaacagcaatatttaatcataaaatttttctttttcttctttttttgagatggagtcttgctctgttgcccagtctggagtgcagtggcacgatctcagctcactgcaatctctgcctcccaggttcaagtgattcctgtgcctcagcctcccgagtagctgggattacaagcatgtgccaccatgctccactaatttttgtatttttagtagagacgaggtttcaccttgttggctaggctggtctcaaactcctgacctcaagtgatctgcscaccttggcctcccaaagtgctgttattacaggtgtgagccactgcgcctgacctacaatttttcttctgtaattaattactcctttggtatggaattggaactctgatatgaaatgtcagtggcaggatgtggattttatactacaatgtgcaacagaaacatcacccttaaaactggaagcaatattcaatattctttttcttcattttataatggaagac

SEQ ID NO: 532391 - DNA, 466 bp, Homo sapiens
catcaagagactgttctctctccaattattctagtctgatgttcattcagggatactggaataaagcctggtgccaaaagaagtagtttacttatctactcatctctgatttttatttagaaatgggagggcatctaggttatttgaaaaaagaactacagccacttgactgacacactgtgtaagtggaggggaagagaaatatctttccttcccatcttaggttaatggctgaggcctttataacaacaaaagacagattaggccaggcgcggtggttcaggcctgtaatcccagcactttgggaggccaaggtgggcagatcacgaggtcaggagattgagaccatcccggccaacatggtaaaactctgtctctactaaaaatacaaaaattagctggatgtggtggcgtgtrcctgtaatcccagctagtcaggaggctgaggcaggatagtggcttgaac

SEQ ID NO: 532392 - DNA, 642 bp, Homo sapiens
agtgatctaatgccctcatctctcttatcctcaggacccagaatggtatattccacataaaagatgctttgtttatcaaatgaatcaaaaagcacgcctgaggcatttatttttactcctttacttctgtaggccaggtcaaggtgggtctaattcacttttatcatcagcacttaagaaactggatggaagaccacaacaccttgttttttgcaaaaattttccatctcctcaatcaggccaggaagcatgtatcttctggacaggactttatctctctactcagcttagtacactgccttatattagtccatttgtcccatgttttcatcactgaataaacttgttaaatgacttttggtctggatctcacacctatattacttcatttccttctgtgagcactctataatgataacatcatttttatatcctagggcatgtagttccgagccccacagaaagtaatcaccattcagtaagccaatagttcattcctatctgtatagaactgtaggcttygtaaatctacacatagatctctgttgtaggttcaataatgataataaatgtttgtgcccccagttgttatctctaaggataagagtaatcaatgatcattcagcagatatagcttatata

SEQ ID NO: 532393 - DNA, 640 bp, Homo sapiens
cacacatgaggatctgcagggagagggatttgggctggtagcaggaagccatgagggtttgagtagagtaccctgtagacaaaataactttgcatctttttttttttttttttttgagacagagtctcactttgttgcccaggctggagtgcagtggcgtgatctcagctcactgcaagctccacctcccgggttcacaccattctcctgcctcagcctctggggtagttgggactacaggcgcccgctaccacgcccagctaattttttgtatttttagttgagacagggtttcaccatgttaaccaggatggtctcggtctcctgacctcgtgatccacccgcctcggcctcccaaagtgctgggattacaggtgtgagccaccrcgcccggccaactttgcatctttgaacaaagggagacaatgtaacagtaaacaatgaaggcgtcaggcggctaaagagacctggtgaagcagcaatggatggcattccagaaaaaatcactgggtgacttccttagctctgaccttggttagtactaaaaataaaataaaagtaaaagtaaaattaaagggtcaaagcctcagagggagagagtggcacgcatggaaggacactgactgtacccacactccct

SEQ ID NO: 532394 - DNA, 640 bp, Homo sapiens
cacacatgaggatctgcagggagagggatttgggctggtagcaggaagccatgagggtttgagtagagtaccctgtagacaaaataactttgcatctttttttttttttttttttgagacagagtctcactttgttgcccaggctggagtgcagtggcgtgatctcagctcactgcaagctccacctcccgggttcacaccattctcctgcctcagcctctggggtagttgggactacaggcgcccgctaccacgcccagctaattttttgtatttttagttgagacagggtttcaccatgttaaccaggatggtctcggtctcctgacctcgtgatccacccgcctcggcctcccaaagtgctgggattacaggtgtgagccaccgcgcccggccaactttgcatctttgaacaaagggagacaatgtaacastaaacaatgaaggcgtcaggcggctaaagagacctggtgaagcagcaatggatggcattccagaaaaaatcactgggtgacttccttagctctgaccttggttagtactaaaaataaaataaaagtaaaagtaaaattaaagggtcaaagcctcagagggagagagtggcacgcatggaaggacactgactgtacccacactccct

SEQ ID NO: 532395 - DNA, 653 bp, Homo sapiens
tttccttctccctgtggtcttttcccagttcctccggcagcccctgtgagacaagtcagaaatggcttctctggggacccacagagacgayggggctttaccctttgcttcctctacccctgtatttcgctcagctctctaaattgtctgagctccaggtaaggtcaaatccttctcctgtgatctagaccttcaggttccccaagggtgtgtgttcaggggtggacaatacccctttcacacttttcacagtttgggcattcacagtatgtgggctattttctgggtcatgcaggagcaatatactttcttcagagggtctgtggattatcttggctttcctgttatatccttgcagcagttcttggagcaaaagttcacaatgcgagtctccacatcctgctctgtccatccaagtgggagctgcaagttagtcctgcctcctatccaccattttttcctattttgtattttaaattaaaactcattagaatgtaaactccatgagggcaataattttaatccagttttttcactgctaaatacctcaaaactgttacatgtgctgccattatcatggacgttctaaacatttctcatgaatgaatgttgatatagcacagtgctgatctcaccacctgccacaaagtaaa

SEQ ID NO: 532396 - DNA, 653 bp, Homo sapiens
tttccttctccctgtggtcttttcccagttcctccggcagcccctgtgagacaagtcagaaatggcttctctggggacccacagagacgatggggctttaccctttgcttcctctacccctgtatttcgctcagctctctaaattgtctgagctccaggtaaggtcaaatccttctcctgtgatctagaccttcaggttccccaagggtgtgtgttcaggggtggacaatacccctttcacacttttcacagtttgggcattcacagtatgtgggctattttctgggtcatgcaggagcaatrtactttcttcagagggtctgtggattatcttggctttcctgttatatccttgcagcagttcttggagcaaaagttcacaatgcgagtctccacatcctgctctgtccatccaagtgggagctgcaagttagtcctgcctcctatccaccattttttcctattttgtattttaaattaaaactcattagaatgtaaactccatgagggcaataattttaatccagttttttcactgctaaatacctcaaaactgttacatgtgctgccattatcatggacgttctaaacatttctcatgaatgaatgttgatatagcacagtgctgatctcaccacctgccacaaagtaaa

SEQ ID NO: 532397 - DNA, 579 bp, Homo sapiens
cttgcttaagcccaggagctcctggtggcagtgagctatatttcagcactgcactgaagcttggataactgaggaagactctgtgtctaggaagaaaaaaaaaagtactgttctacgaagttatgcaaagcttccctgaaaaagtggtctgctaaattttatcatgactgttggatgtttaaagtcatttgcagatcaattatgataaaaggactscttgagttgtcacaaaagtaccttaaaaatttaagtaagaaaaataagtactagttgaagtgtctctaaaaacttttagtttgtattgtcacctgattacaaatttatgtttttagatttgtttttccattttcagcttgacatttactcatttcagagaaaccctgtggttttcctcatgtggaaaatggaagaattgcccaatattactatacttttaaaagcttttactttccaatgagcatagacaaaaaattgtcatttttctgcttggctggttataccactgaaagtggaagacaagaagagcaaaccacgtgtacaacagaaggctggtctccagagccaaggtgcttcagtaag

SEQ ID NO: 532398 - DNA, 671 bp, Homo sapiens
atacttataaatctatatataaattattttatccaattgagaatcatgtttattgcaattatttttaatttatttttatttatagtgtttttaagtatatataagtgtatgttttaagtcttgagctctttcaaccttttgttagtagtttccacctttcaagtaattcttaggagtcgattcccattcaaattcagatacagatacatattcacatagaattttgctattggtctcatatttttataaatgtttttgatattaagtttttgatgctttggttgatattgcattgagtggagatatagtaatctctaaggacaaagmctagattaaaatatttatggcaaagctggtaatgaaacaagctcataaggaaataacaacatttaaggaaatacatcattctatatctggaacaactgcctcaagagagttaggtttggtcctaatgaatcaaagcaaataccaaatgaagattaatcattgttatcagggcaagagaaaggggctttgtatatcttggtaactattgaaactggaaaggctatcagtacaaattcacaacagtatgataaagcatagaattttctctgtaggaattattattccagacattaagagtctctctaacctctccatactctcttccctgctctaatcactccagt

SEQ ID NO: 532399 - DNA, 671 bp, Homo sapiens
atacttataaatctatatataaattattttatccaattgagaatcatgtttattgcaattatttttaatttatttttatttatagtgtttttaagtatatataagtgtatgttttaagtcttgagctctttcaaccttttgttagtagtttccacctttcaagtaattcttaggagtcgattcccattcaaattcagatacagatacatattcacatagaattttgctattggtctcatatttttataaatgtttttgatattaagtttttgatgctttggttgatattgcattgagtggagatatagtaatctctaaggacaaagactagattaaaatatttatggcaaagctggtaatgaaacaagctcataaggaaataacaacatttaaggaaatacatcattctatatctggaacaactgcctcaagagagttaggtttggtcctaatgaatcaaagcaaataccaaatgaagattaatcattgttatcagggcaagagaaaggggctttgtatatcttggtaactattgaaactggaaaggctatcagtacaaattcacaacagtatgataaagcrtagaattttctctgtaggaattattattccagacattaagagtctctctaacctctccatactctcttccctgctctaatcactccagt

SEQ ID NO: 532400 - DNA, 530 bp, Homo sapiens
aagtaatctcaaacctatatcaattgtgaaaataaggaacatgactaaattgcaacataatacttattagattgtaaggttctatgaattgaacatttaaaaagtaaatttctaaggagaaattcctcattcttaaaccttacagaaattagtccctctccctgcaaccattttcttctttaggaagtctttcttggaaccatctcatacttccttgcaatttacacacaaaccctctgcttctgtgcttccttaatttcctragcatagcataatcacaggactgaacgcaacttgaggacaggaattatccctttcctccctgtgtacacagtgcctagaaaaatgcacatcacatagtaggtaccttatcagtcaaataaatatatctagaaaaattgccttctctgttcccttagatttgtcaagaggtagaaagagccactcttggtgacttacttgcctctcacataggctcataaatcagatacccaatatgtacaattctgattctagactagaggctcaac

SEQ ID NO: 532401 - DNA, 529 bp, Homo sapiens
tgactcttagagtttccactcagaaataacttgcatcacttatatgcacattgcatttgcttaagcatcacagagccaggcctgatatcgagatggagaacagtcttactttgtgctcaaactgagagaacaaactgctgtgaaactctattttctaacagctatcacaatcaactcttctggtcacaaatatatcattgactttttcttctgccagcaaattatacttactcccttcctaagttctatccaatcacaacactgagctgaacttctatatgtggttccttgtggtctacaaacctgtgaagcaaaatgaaaagttatctgtctcccatactgctgatatgcaacttcagaaaaggaaagaaattcaaaaaggaaagaaagagttctacattcacttgtttaaagcaattctgaaatcccattagatagttattgcaagggtactctaccctggaggtgggaaatgttctatcatgagtrcttgatttacctgatggaattgtctcttttgtcctacctt

SEQ ID NO: 532402 - DNA, 590 bp, Homo sapiens
agttcattacacgtgtggataactaaagtttatataaggaggaagctgaagaagacaattgaagatagtctttaggagattttttttttttggtataattcttctcctcctacctctcacaataatttaggtaaaagaggtttcttcccctttaatgccaagctatgctagtggggattcaaggtgataatttagagaacttttcaaatgtctctaaccttgaaagacwtagtcattggtatttaggacttcatgatttaaatagaaagggctactcctgtctggtgggctaaagacatactgtagtgactttatcaagggaaagttccgcttacagcgaatttataccacacaaaagggatctggctttaggttatcctaaaatgaattttgctaaagatgaatgcctgaaaggataaagaatcctccaaagactggtgggacgtaagatccagagcctaagaaatagtcatttgtgaccattcagaggagacactggtgtacgttgaggggaattcagtagtaagtttttagtgaaggcaaaaaaaaaaaaaagaaaacacttgactaaagtaagtgatgacaatagt

SEQ ID NO: 532403 - DNA, 506 bp, Homo sapiens
gacaggctttaggcagtagaatggctttctcatcctacagtagagggaacaatcacactaatccattttttcagcatcatattctttcttacattgtaagaatatttttcaagtatttatgtcaattatccgagaatatttagagttccatagacgaaaastatgcctcgtatttctttttactccaaaacaccttgaatagacaaaaataaaaaacaattctggtagtcttatagccactgtagatataaaagttttatatctgccaaccttaaatgcgaagtcactttatatctgaagtgactaatcagtgaaaccatatagttatggagattattttccaaaaatgactaacgaatggagaaaccttaacaagacttaccagattatagaaaatttagctttcaacatggaaaagggccaaagtgaaaatgatacggggagaataattattcctgtgtattaaagaaaatataagaatagggagccattttattattcataaa

SEQ ID NO: 532404 - DNA, 645 bp, Homo sapiens
acaggctttaggcagtagaatggctttctcatcctacagtagagggaacaatcacactaatccattttttcagcatcatattctttcttacattgtaagaatatttttcaagtatttatgtcaattatccgagaatatttagagttccatagacgaaaagtatgcctcgtatttctttttactccaaaacaccttgaatagacaaaaataaaaaacaattctggtagtcttatagccactgtagatataaaagttttatatctgccaaccttaaatgcgaagtcactttatatctgaagtgactaatcagtgaaaccatatagttatggagattattttccaaaaatgactaacgaatggagaaaccttaacaagacttaccagattatagaaaatttagctttcaacatggaaaagggccaaagtgaaaatgatacggggagaataattattcctgtgtattaaagaaaatataagaatagggagccrttttattattcataaaaacttaatgccaaatgtgaaaaaaaaaacctatttttttttcattcctggaatgttttttgattgttaaaaagcatcaagaagtatgaaaataatatgtaaaaagagaaaacttttaaaaatattttagagcatttacta

SEQ ID NO: 532405 - DNA, 634 bp, Homo sapiens
atcttcatctgtttttcttgagatcagatttcaactgaaaatacagaatcaattggggtgcttccaaaattcttatttggtgatttataaaaagatggaatgcatggtgaaaataggaatttatattctgtaatcttgctagttcccaagttccataatgcccaaatattctattgcttttctgtaatgagtttgttctactgatctgactactgagatagcagataatgttcagaatcggtgtttttgaacacaatcacaagtattagaaataagtgactgaatttatagcgacttgatattgatacaggagtgctgggaagggaagagtgtggtccctttaaattatatggaaagggagaggagggcgtggtcccctggctagggctccacccccacagaccttggcaaggaaaggcttttcctgcccaaatgttgcattacccaacaccaccctggcctgccacaccctcatcctgtgcctgtaaaaacccgagaccccagcaggcagacacacaggtggctggacattgagcatatcagtggaggaacacataggcggctggatgtggagaggaacgcacmaacaggtacccgcatgtcagcaggccaacgaccaacagaatgacatgga

SEQ ID NO: 532406 - DNA, 602 bp, Homo sapiens
tttggggtacttactgtgtattatggtgagatgaacagaacattatgtttctctaacgacagtagctttaatgatttttctcatacaatattttagattaatttttttgtgtattttttgagatggaatctcgctctgttgcccaggctggagtacagtggtgcattctctgctcactgcaacttccgcctcctggcttcaagcaattctcctgcctcagcctgccaagtagctgtgattacaggtgcgtgcctccatgcctggctaatttttgtattttagtagagacrgggtttcactatgttggctaggctggtctcgaactcctgaccttgtgatctgcccctcttggcctcccaaagtgctgggattccaggtgtgagccacagcgcctggcgattaatatgtttcttacaatttagtaaatgattacaagctgcatttattcaagcacatcaattagatttcatattgggcattgtttctgtaagggtggcacttttctgtgattactgagttcccaaagtcagtttctattttaatgaaatataacaatgttaacagcaaataaaatatatatatatttttttgagatggagtct

SEQ ID NO: 532407 - DNA, 639 bp, Homo sapiens
ccaattccactgttgtaattactgtaactatatagtatagttggagcaagttcccatcttgttcttttttgagagcatttcaactattagccctttgcacttccatgtaaattttagactcagtttgtcaggttccattttaaagaaagttaagattttgattgagattgaattgaatctatagattgttgacgttattacaatattgaatcatccaatctgtgaatatggtattatttaggtctttcattgttttcaacwttttttttaaaatagcagatttactgagatatgattcatacactgtgaagtttaccatcttaaattgtacagtgcagtggtttttagtatattcagagttgttgtgcatccaataccacattcttatttgagaatattttcatcaccctacaaagaagccctgtcccctttatagttactctatattttcttccctcctcccagctcctggaaatcccgaatctactttctgtctctatagatttacctattacaggtttttcatatgagtagaatcatgcaatatgtggccttctgtctttcatgtggtaatggcaatacgtttcagaacttcattgttacttatggttaaataatgttccatcatatgggcacata

SEQ ID NO: 532408 - DNA, 563 bp, Homo sapiens
ttaacctggaccgaccccacagcagggacatgggccacctgggaggagggcgggtccacactctccacactccctagccgtgctcctccttcctcaggagcggtctcaacatttcaggtatgggggcgggagtgttgctggttggacaccaggatgagatggaggaggaagccaataaagtacagaaacaaaaatataaagggtcaggtgcggtggttcacacctgtaatcccagcactttgggaggccgaggtgagcagatcacttgagctcaggagtttgagaccagcctggtcaaatggtgaaacccgtctctactaaaaatacaaaaattagctggccatggtggtgggtgactgtaatcccagctactcgggagaccgaggcaggagagtcacttgaactcaggaggctgaggttgcagtgagtcaggattgtgccactgcactccagcctgggcaacagagtgagactctgtctcaaaaattaaaataaaaaataaaggaatgagtttcaagrcaaggaggaaacactgcaaaatattttcagttatcattgtaaga

SEQ ID NO: 532409 - DNA, 548 bp, Homo sapiens
ggcccccaaaagtgtccatgacctaatccctggaacttgtgaacgcgttgggtcacatggctggggaatgaarggtatggaaggaatgaaagctactaactgcttgccttgagatgggggtgatcctggacaagctgggtgggcccaaaataaccacaagggtcctcatcagagaaaaagggagaggagtcagggtcagagccagatgacctgggactcaatcacagaagggctgtgagccaaggaacacaggtggctggaaagggcagccaggcattctccctgagagccctgctcccaccctgattccagcctgggggctgcagattctgaatttctgacctccagaactgcaagacgctacatgtgtgctggtttaaagcactgtttgtggtaacatgttatagcagcaagagagaattaacacaacccccacatccaggtgacagcctctctcctttgtccctcccatatctcctcttggtctgaggatagacacgccacctgcccccacaagaaggtgaaggcagccagccacgttgccatca

SEQ ID NO: 532410 - DNA, 548 bp, Homo sapiens
ggcccccaaaagtgtccatgacctaatccctggaacttgtgaacgcgttgggtcacatggctggggaatgaaaggtatggaaggaatgaaagctrctaactgcttgccttgagatgggggtgatcctggacaagctgggtgggcccaaaataaccacaagggtcctcatcagagaaaaagggagaggagtcagggtcagagccagatgacctgggactcaatcacagaagggctgtgagccaaggaacacaggtggctggaaagggcagccaggcattctccctgagagccctgctcccaccctgattccagcctgggggctgcagattctgaatttctgacctccagaactgcaagacgctacatgtgtgctggtttaaagcactgtttgtggtaacatgttatagcagcaagagagaattaacacaacccccacatccaggtgacagcctctctcctttgtccctcccatatctcctcttggtctgaggatagacacgccacctgcccccacaagaaggtgaaggcagccagccacgttgccatca

SEQ ID NO: 532411 - DNA, 566 bp, Homo sapiens
ttgaggtactcatcactgggattattgaaattgtcttctaggtgttttcttgccatcagttttgaatcgtttcaagctmatcttcaacataatcttccaaaaatgtagatctgatcattttactcatgggtttatcaccaggggaaggtatctgagttaccagtggcgaatctgtacaggtctacaggaatctcaattcttgcctcctcagaagaaagaattcgactgaggggcataaggcagaaaaagagaccgaggcaaatttcagagcaggagtggaagtttattttaaaagcctttagaacaggaaagaaaggaaagtatgcttggaagagacccaagcagacactgaggtcaagtgcagtgtttaaccttgatcctaggactttagaagctggcccctttcccatgattcttcctttagggtgggttgcctgcaagcccagtaccctccttatccttgggaagtgagcacacacagtgtgtttagtatgttgtatgcatgcctatctgagactttttccctttttctggtggagtgcccctggaaactcatactctgccat

SEQ ID NO: 532412 - DNA, 566 bp, Homo sapiens
ttgaggtactcatcactgggattattgaaattgtcttctaggtgttttcttgccatcagttttgaatcgtttcaagctcatcttcaacataatcttccaaaaatgtagatctgatcattttactcatgggtttrtcaccaggggaaggtatctgagttaccagtggcgaatctgtacaggtctacaggaatctcaattcttgcctcctcagaagaaagaattcgactgaggggcataaggcagaaaaagagaccgaggcaaatttcagagcaggagtggaagtttattttaaaagcctttagaacaggaaagaaaggaaagtatgcttggaagagacccaagcagacactgaggtcaagtgcagtgtttaaccttgatcctaggactttagaagctggcccctttcccatgattcttcctttagggtgggttgcctgcaagcccagtaccctccttatccttgggaagtgagcacacacagtgtgtttagtatgttgtatgcatgcctatctgagactttttccctttttctggtggagtgcccctggaaactcatactctgccat

SEQ ID NO: 532413 - DNA, 554 bp, Homo sapiens
  misc_feature (1)...(554): n = A,T,C or G
ccaaaagtacaataattgnaggtcacagtaatgaccctgattccaggataaggtcaaaatcaattcagtatgctgtatttcatcacaatggattttaaaacatgtaatactaataacataaggttttcttctcaagtttgaaaactttaaaatctcagcttttaaagggtaggcttgaggccatgcgtggtggctcatgcctgtaatcccagaactttgggaggccaaggcaggcaaatcacccgatgtcaggagtttgagatcagcctgggcaacatagcaaaaccccatctctactaaaaatactaaaattagccgggcataatggcacatgcctgcaatcccagctactcaggaggctgagatgggagaaccgcttaaacctaggaggcggaagttgcagtgggccggtatcacaccattgcactctgggctgggycatctgaagagcaagactcagtctcattaaaagaaaaaaaaaagaaaaaaaaagcaaggtaggcttgagtcataatctctctctattcaacaccaccagacaaataaaatgttac

SEQ ID NO: 532414 - DNA, 470 bp, Homo sapiens
cataaatggaaatgtacagacctatmttttttaaagcacggatttagttagtttctcccttaaaccaaagaacacctaacaattacccttaggaaatgtcgttatatgagcactttacagatactttaataaacatcatggaaaaaacagctccaaaattcctgacgtaggatgcagggtttatgtccaagtttgggttacccagactggaccattaagtacgtatgtgtcatgtgcacaacccccatcttgtttaatagtcaccctcacaaattcatattcaacctaaggcgtggacacacagcaatccattcttcatgcaggcgcatcttgacgacagagattaaattttgcaaacaagagtgacctcccctccctgccccaccagcccagtaacatgtgttagagacgtgcattcctcctggagagtggggctggtggggagttggggcaccggcaggggtgagcag

SEQ ID NO: 532415 - DNA, 634 bp, Homo sapiens
gggaagacagaaatatgggtaacgttgcataaagtgtatgcacataagggataagcatgatggtagccgatgactggctcagaactcccatgtcaatctgagggtgtgattacactggcctcrggtcaccaggctccctaccacttcctactggtgatttgataatggcgatggttattctttatgggctgtagaacacattgacatcttcagatctctttgatgcctacatcaaagagatgtagaaagtctcttagactatgataaattatttaaaactgttaaagcaggcttggaatatctcaaattccccttaagtgggggatgagtttttgtctatcaatccagttgtcagtttcattcactttttcagttttgggaagaatatttgtatataaaacttaatcaagatttatgaaacaacaactctaatgctttttaacttagaaattacttgtttaacccagtagactcagaacacgttaagatatcaaaatcttaattttattaaacttcatcaatacacttttaaagtaagtaaaaagctatcagaatgcgagaggatagaacaaagatccatttaatgtttggtcttctctctctatactttgacaattcctacaatttttttcag

SEQ ID NO: 532416 - DNA, 608 bp, Homo sapiens
tgggagccccaggtttcccccactccatgtccaaagctgtctacttcttttcatcaggaccctgggtccctatacacggagaggagaggagggggagatatcaaagcaagacaggatggctgtttctctttctcacaacactgagaatactccaaaacttgtcttttctctctcttctggctttatgtggaaagtatgtttcctcaccaagacctctatacccttgttctcaaacaamttttaagcctaagaaaacaaattgtgtgttctctggggatgtgagcatcattcatttgcctgaattcccatctaagtttcatcccttcccttctatcaagtcagctaccatcaagctacgaacctgctccgtcgcttttaaacctagacacttacatgttcagggctgttgtcacatcattgacttcggcctttcccaaaagtcaataacagaaacaaatgacaaatgactgaattttagcaactgtgattcagagatcattttagagtctactttcccaggtctcatcttacctgactttcacaacagtcctgtaagttagagaatgcagtagtaattggaaactgaagcccagaggggctaattcatc

SEQ ID NO: 532417 - DNA, 437 bp, Homo sapiens
tcttaattgaggcctagaagttgtttgtccactgcttttaagtcactcttttctcaccctccaggatttccttatacatgtgtgcatatgagtaatcagacaaatactctagggaacttctctgaaaaggtctatctctctgtaacacccttctctttgacactcaacctcacaagttctagttctcttgtctttcccaaatgttgatctctgtgtcctcaattcagtgtgactggtggttctatctgggttagctmcccaggcctacagcccagaaacctcctgaggcataagcttggcaattataaaatatatctcatttatttcccttctctcaggaatcagagtcctctctccattgtctgaaaatcattttatcttacagcttttcctgttttctagttgtttagggtggaagagcaactctcatagtaata

SEQ ID NO: 532418 - DNA, 579 bp, Homo sapiens
atgaaaaatcaaagactgacactttagtaagtttctagtagactattgaacaggggcttgtcaatgtcatctcaaaaattttcaaaaaaattctttctttttatatcatctaccaccaacataaaggcamaaaacctagcaggtctgtctgtatttcaaaggcaatatatgctatatttgggtttgttccttcaaccattttataaaataactcataattctgtagttttaactgaggtcagttttgagtgggtctcagaacagaacaaggctttgcaaccagtctaatttgttattaaagtttcccatttgggcagtatcatccaatagattcaatagtgcttgaagttccctatccctggtacttgcttataaatgcagattggaacttctggttggtcctaatgcaatcacagcacaatgcagttccctagagttttggaaaaaagttatgttctcttatgcagaaaaatattctcctttagagaaacagttcctggcttgctactgaaccctactgtggactgaatttctaaaaatggaaaacatatgacccaacgtgcttgtaatttagcaggt

SEQ ID NO: 532419 - DNA, 633 bp, Homo sapiens
agcacattccaaagtgatagatagatagatagatagatagatagatagatagatagacagataggtaatagaaatatatatcatttgaactacattactcttgttttcacttttgctgcctttaaaatgtctatgcattgccactagaaattaattttctaaaattcaagtttagatttgtgtattaagataacagtttaaacacacatatttaaattttcttccacaaaaaactcaatagaaataaaagagtcaggactagatgaactgttagatgacctaagaactgaaaagtgtaaagatatagtaatgaacattaaaatatctataagtttacctaaaaaccttcatgatagctatgtcagtactctgaaatattatataccactttcttttttctagaaaagaaaataatttctgtttatatcaaaagcaccagttgattctgtttattggatagtccaggaatgaacaaaaatatatattgaaaatttaacagcaaaaaacaaaaatcaaamttaagttaaaccaaagcattatatatcctggggaaaagagttcccacaattgacctccaaagttaaaacacttcctcaggtatgagtacatgagatccgactgagggaaatactt

SEQ ID NO: 532420 - DNA, 667 bp, Homo sapiens
agtattgttttttcattaactgaagatattgccaaaattataaggagtgtaaaaataatcacctaagggaagcccaggtgatacttttaggtatgtatcacctgaagtccattttaaccataggccatcacatcatgaatataaacctcagtctacttaaatctctgaatttcaatttctrcatctacacaatagagttagtacccattgtagagtcactgtttgccctgaagaaagaatttcatgggagactctgatctgcccagagtgggagaggctttgggaacagtgggtgggtggtttcacgttttgtggctacaaaggatttagaacatgatgatgaagtaaaggagcaaatgtaaaagtgcccaacactggcaaatttctgttattatatgacgtagtaagatgatacaattgaatctaatcatctcttgacaactgagcgaagtaatgggttagaacagtgtttctcaacattttttttttactattattcttgcaggagaaaaaaattaagtaatgacatttaatttttttctaacaaaaaaatgaaatactagagaatacgatgtcaggtagttttgactgtcatctcacttgagttaaagtggcttttattaaaaaaacaaggaataatggatgctggtgaagatgtagagaaagt

SEQ ID NO: 532421 - DNA, 667 bp, Homo sapiens
agtattgttttttcattaactgaagatattgccaaaattataaggagtgtaaaaataatcacctaagggaagcccaggtgatacttttaggtatgtatcacctgaagtccattttaaccataggccatcacatcatgaatataaacctcagtctacttaaatctctgaatttcaatttctgcatctacacaatagagttagtacccattgtagagtcactgtttgccctgaagaaagaatttcatgggagactctgatctgcccagagtgggagaggctttgggaacagtgggtgggtggtttcacgttttgtggctacaaaggatttagaacatgatgatgaagtaaaggagcaaawgtaaaagtgcccaacactggcaaatttctgttattatatgacgtagtaagatgatacaattgaatctaatcatctcttgacaactgagcgaagtaatgggttagaacagtgtttctcaacattttttttttactattattcttgcaggagaaaaaaattaagtaatgacatttaatttttttctaacaaaaaaatgaaatactagagaatacgatgtcaggtagttttgactgtcatctcacttgagttaaagtggcttttattaaaaaaacaaggaataatggatgctggtgaagatgtagagaaagt

SEQ ID NO: 532422 - DNA, 655 bp, Homo sapiens
attctatctccttcctttccttctcttctacgtcttcttggtaaggagatcttaaaggggttttgtaccagaagcctttggtcaaatgtagtaacttatgaaaactaactatattaataaataaatgcttaatatagttgtacacttgctctggtacaattgaatggtggtagttagaaggaagggcagagctgcagtgccctgtagaatacaatttaaactacacacattataggaaattgtcctattaatttattctcttttcagaatgttttgttttactttatttgtctcttctgcaatcaaacatgcacatttcttcttatcttgggagaaaatactgtttctattcaggttatttccctcctttgtaacaactgcattatttttccaatgtgtaaaaggtatttattctattcattcttctttgaatctctgaataatgtatccaccctcaacttcccatatctcttttcttaaggtatactagcgactttctcaytgaaatttaatggcctccctctgtcttcattgccactaacttccaaaggtcaattgcccaatgtttgaaattcctttttttgcctatttgacaccacactatcctggttttcctcactgattattcaattttttatatcccaagtgtaaacat

SEQ ID NO: 532423 - DNA, 649 bp, Homo sapiens
aaaggattccttgctatctgagagtgaaaagtagagggtaaggggtcaactagacaatgagagtgggaaagaaagaagatggttgcattcatagagtttgaggatttttctagtaatttagtataaaggaatgaaagtcaagaaataggaattcagctgacctccgtgtggctggcttggggtagaaacactctccatgtttttttgcaacttctgtgtaatccartgttcttattcagaatctaattgctgagttgcccccactgtttctgttttcctagctggaaaaatagataatctgctctgaggatcagagggcaactagaaaattctctgtggcctacagaatgtgaggctgcatgaagcaaaacaatgaaatattgtaaatgtgggaggcaagcaaaattaaatagaaaaatagttactctaacttgggtatagcaatagcagtaattccaagcataagcaaaaaggaactccaaagaccaattctttctatttttctctcttgtgtatgagaaatattataacaatgatagcaataataatgatggcagctaccgcatggtattttgtttccaacacctgtacaagctagaggctagcagggaaaaacacaattaagaactctggagtgagactacttagg

SEQ ID NO: 532424 - DNA, 570 bp, Homo sapiens
ctggtcctatggcctctttctaacaagatgtggacaaaactccatgtgtttgcactcactgttcttctactgagcaagacatatatggacccaacaatactgcatagtacagtatagcacagtatagcatagcatagcatagcatagcrtagcatagcatagcatagcatagcatagcatagcatagcatatagctttggagacagatggatctaaatctgaatctaagttctgctatttattagctgcataactttttccaagtcacctcatctttctaggccttggtttcttcacctgtaaaatggtaccaatcatacctccaagagttgttgttataaggattcaacaaaggaatagaaagctctcagagtttaatcatggaacacctaccattactattaatgattacaacaacaaacccagccataggggttgaagaagaacaaaagtaagtggatgttagttggtgttttaaaatattattttctgatgttcttcaaaagtcagaaacttagctctcattttacgtaaaaatatttacctcattttttacctcttagaagttgc

SEQ ID NO: 532425 - DNA, 697 bp, Homo sapiens
atttaaagcccctatgcagaataatatcacatctggaattccatgttagtggtagtgcaataatactttaggcagtgtttgtttgtttaatagttagcaacagtgctttaatgactagggtcctattgagaggaaaaataggaargaacaaagggagggaaagaaagacataatataaacccataaactgtacctaatcagagtgaattactgttttcactccagtgtaacatgattctaccttaaagtggtttttgaatgataagcttacagtctgagcaggctagtattattcaaaagcagaactcaggatggattgcaaaatataccatctaccatcttaaaaacatataatctctctctctatgtatatgtatatctctatatatatagataagcagcagaagactaatttgctaattctaacatcaggatgattgatttacgtaccgaggaaggggatggtagaggtcataaggcatgatctgcttgtatccgtcactgttaggaacaataatgccaaccctctgagtagaaggtacacacaataaaataaacactaaatgattacattatacaaatttttaatacaaatgcaaaataacattaataaattgtatctataaaacaacactaaaacagttttatatctttatgccaggatatgctttaggatggggcaagttctttgaaaggg

SEQ ID NO: 532426 - DNA, 497 bp, Homo sapiens
gaataaaagggagagtgtacaaaattcaagacgttgaactttgctttggaccgatttagaaattatgtttttgtttgaacaaggaactttaaacctggattcagcaaaactatagctatatttgtyttctatgacatgggtcatggtgaagactcataaagtgactctgtagcacctgtgaaaacagaaagctatcaaaacaatggtgctctgtccagtcctgctaatacatattcgtgtacataggctcagctctctctggggttcatgccatggccctagcctttcactacactgttgctgggagaaagcaagcttgcctgaagttaacttcctattgcttactttttttttttcttaagcaaagtgtgaatcataaagaataatgaaaaagaatgtaatttcgggactttaagaagttctccccatgtttaggtctcgatgtgggtgtgtgtacatgtatgcacgcattcagacatgcatctgaatatgtgggg

SEQ ID NO: 532427 - DNA, 408 bp, Homo sapiens
cccaaaagtgccagcattccaggcataagccactgtgcccaacctacctagctcagggttatgattaatgctgcccacaacccttgagtagggcagtagatcagagatgcttctctggaaacaacaggtataatgttgtctaaagaacgaagaaggtggcaaagatttgtcaggaaggagatactgagtggcaaagcagactgtagccttcttgaaggaytgtcccagtggtcagatggaggaggaggacaggaaaccaatgaccagagctgaacttaatattgtggtggtggggagcgaggcaggattgggcagggatctgcaactctcaagagtgaaagaaagatgaggaaccagttctctgtctctgcatcctaaacctagctgtgtgatgggcaaaataatgtg

SEQ ID NO: 532428 - DNA, 472 bp, Homo sapiens
aataaagtaaaaaatttgttgttggttattgtaagtagaggactaattgtatttcaatcctacccaagatttacaggctgcccrgtatcacaaaggctttctttttttttcctttttttttttttttttgagatggagttttgttcttgtcacccaagctggagtacaatggtgcaatctttgtaacctccgcctcctggattcaagcaattttcctgcctcagcctcccgagtagctgggatcacagatgcctgccaccacgcccagccaatttttgtagttttagtagagatggggtttcaccatcttggccaggctggtcttgaactcctgacttcaagtgatccacccaccacaaaggctttcttaagcatattagcttgtagtgcatatctatagctttcactatgtgtctttctttctttagtattcaatgatatgtatcactatttcaaaactgtctatctagtc

SEQ ID NO: 532429 - DNA, 472 bp, Homo sapiens
aataaagtaaaaaatttgttgttggttattgtaagtagaggactaattgtatttcaatcctacccaagatttacaggctgcccagtatcacaaaggctttctttttttttcctttttttttttttttttgagatggagttttgttcttgtcacccaagctggagtacaatggtgcaatctttgtaacctccgcctcctggattcaagcrattttcctgcctcagcctcccgagtagctgggatcacagatgcctgccaccacgcccagccaatttttgtagttttagtagagatggggtttcaccatcttggccaggctggtcttgaactcctgacttcaagtgatccacccaccacaaaggctttcttaagcatattagcttgtagtgcatatctatagctttcactatgtgtctttctttctttagtattcaatgatatgtatcactatttcaaaactgtctatctagtc

SEQ ID NO: 532430 - DNA, 614 bp, Homo sapiens
taacctccgcctcctggattcaagcaattttcctgcctcagcctcccgagtagctgggatcacagatgcctgccaccacgcccagccaatttttgtagttttagtagagatggggtttcaccatcttggccaggctggtcttgaactcctgacttcaagtgatccacccaccacaaaggctttcttaagcatattagcttgtagtgcatatctatagctttcactatgtgtctttctttctttagtattcaatgatatgtatcactatttcaaaactgtctatctagtcttttatcttccaaatgacattataagctaggagagggaagatactatataggatggtcaatctgcctcatgtatcaatcatctgctaaaygaaggaaatatatatatatataattttataaacttaataaattcccattattttggacatgggatttctctccagactccttgtattgttacctcttataataaaagcaagttttgtatcctaaattgtgtgcaaggttatgttcaaggctatctagaacaaaatatgaaggcatcatctttgcctaatactctaactgatgcaagcagaaatcgcaaagtttctgttcccttag

SEQ ID NO: 532431 - DNA, 611 bp, Homo sapiens
atggtgatctttctttctcctgtggctactaatgaagacattttattaaacatatttcagtgtctagagaatttcagtcttgcatactgcctgttctcttgctatcagctctgtaaagtgaaggaagaaacccctactgcaggcctgatgcctaaaatctgcacgacatactaagtctctgagccaacttggattggatgctatgatcctagtttatttttttttttggcaggggggagggggctgggtcggggggcagttctctccctccctttagtaaatctgaaagaagaataaagaaaaatcatcagtgttaagtgtgcttgctcaactcaaaaataagacaagkggctgcgtatctttgtacacatatatgtatataagagagggtacaaaaagcatacatttaagatatgaaagcagaaattgataacccactagtggtatctaaacaatgaaaacactattaatttggtaagtttcagggtgctattttgcctttctttaaatttttcttggagcttcttacttttttgttacctgagattaaaatattgcaaaataagcaacactgtgcagtgattctggatgaggatgaggtcagaccactg

SEQ ID NO: 532432 - DNA, 611 bp, Homo sapiens
atggtgatctttctttctcctgtggctactaatgaagacattttattaaacatatttcagtgtctagagaatttcagtcttgcatactgcctgttctcttgctatcagctctgtaaagtgaaggaagaaacccctactgcaggcctgatgcctaaaatctgcacgacatactaagtctctgagccaacttggattggatgctatgatcctagtttatttttttttttggcaggggggagggggctgggtcggggggcagttctctccctccctttagtaaatctgaaagaagaataaagaaaaatcatcagtgttaagtgtgcttgctcaactcaaaaataagacaagtggctgcgtatctttgtacacatatatgtatataagagagggtacaaaaagcatacatttaagatatgaaagcagaaattgataacccactagtggtatctaaacaatgaaaacactattaatttggtaagtttcagggtgctattttgcctttctttaaatttttcttggagcttcttacttttttrttacctgagattaaaatattgcaaaataagcaacactgtgcagtgattctggatgaggatgaggtcagaccactg

SEQ ID NO: 532433 - DNA, 486 bp, Homo sapiens
gaatctatgtgatgtggaaccctaaaccacaaaagaggcagcatgacattgtggtgcaaccaacaactcaacctggatgtgatggcttgaatatatcactctcagtacgagttcagttctcttgtgagttatataatccaacctattttatatacttgttctaaggatttgaggygatagcttatataaaaagatccagttcattgcctagcacataacaactctgaccactatcctggaatttctgagacaactctattttcaaatcttctatttcatagtctccagaattatcagaccctgtgtgttgattattttaggggggggatatgtagtcactgtgcaaatagcaggtattttctcattatatatgtgaaatgcatctgaagctataaagggtgccttagggatctgggaacctgtagactccaagtcccacagctctggagacagggtcaagtttgcaaaagctcagatctatttcag

SEQ ID NO: 532434 - DNA, 527 bp, Homo sapiens
acagctggaagccacaaaaccttttgtcttagggcaagtgaatggaggttgtatctcagttggcaggaagggagaaaataaatactgtgagccacaattattctgaagagtgggaaattacattaggaaattatagactgcagcagyggatggttctcacttaccaaacttgaggccgagaagaggcaataaataagaaaactgggggggaaggaattgtggtgtttatgaagtacggtgtgtggatcaagtcctgtcaggtgttttacagagttcgtgaagcctgtaaaacaaactctgcaactgaacaggtgacaaaaccaaagcaactgcctatatcacctatctagaaaatgacagaattgggatttagtctctttaaaaaatgtcattcctattacactaggtcacctaatataccaggggactttcaagcaaacagtgtgtatcctcaagaggtcaggcagcaccacatgtactaatcagctactcatgcgagcgctctgtttagagaaatggtttttgag

SEQ ID NO: 532435 - DNA, 527 bp, Homo sapiens
acagctggaagccacaaaaccttttgtcttagggcaagtgaatggaggttgtatctcagttggcaggaagggagaaaataaatactgtgagccacaattattctgaagagtgggaaattacattaggaaattatagactgcagcagcggatggttctcacttaccaaacttgaggccgagaagaggcaataaataagaaaactkggggggaaggaattgtggtgtttatgaagtacggtgtgtggatcaagtcctgtcaggtgttttacagagttcgtgaagcctgtaaaacaaactctgcaactgaacaggtgacaaaaccaaagcaactgcctatatcacctatctagaaaatgacagaattgggatttagtctctttaaaaaatgtcattcctattacactaggtcacctaatataccaggggactttcaagcaaacagtgtgtatcctcaagaggtcaggcagcaccacatgtactaatcagctactcatgcgagcgctctgtttagagaaatggtttttgag

SEQ ID NO: 532436 - DNA, 527 bp, Homo sapiens
acagctggaagccacaaaaccttttgtcttagggcaagtgaatggaggttgtatctcagttggcaggaagggagaaaataaatactgtgagccacaattattctgaagagtgggaaattacattaggaaattatagactgcagcagcggatggttctcacttaccaaacttgaggccgagaagaggcaataaataagaaaactgggggggaaggaattgtggtgtttatgaagtacggtgtgtggatcaagtcctgtcaggtgttttacagagttcrtgaagcctgtaaaacaaactctgcaactgaacaggtgacaaaaccaaagcaactgcctatatcacctatctagaaaatgacagaattgggatttagtctctttaaaaaatgtcattcctattacactaggtcacctaatataccaggggactttcaagcaaacagtgtgtatcctcaagaggtcaggcagcaccacatgtactaatcagctactcatgcgagcgctctgtttagagaaatggtttttgag

SEQ ID NO: 532437 - DNA, 527 bp, Homo sapiens
acagctggaagccacaaaaccttttgtcttagggcaagtgaatggaggttgtatctcagttggcaggaagggagaaaataaatactgtgagccacaattattctgaagagtgggaaattacattaggaaattatagactgcagcagcggatggttctcacttaccaaacttgaggccgagaagaggcaataaataagaaaactgggggggaaggaattgtggtgtttatgaagtacggtgtgtggatcaagtcctgtcaggtgttttacagagttcgtgaagcctgtaaaacaaactctgcaactgaacaggtgacaaaaccaragcaactgcctatatcacctatctagaaaatgacagaattgggatttagtctctttaaaaaatgtcattcctattacactaggtcacctaatataccaggggactttcaagcaaacagtgtgtatcctcaagaggtcaggcagcaccacatgtactaatcagctactcatgcgagcgctctgtttagagaaatggtttttgag

SEQ ID NO: 532438 - DNA, 572 bp, Homo sapiens
tttttcctcgagaaaaagcagttggattttggtgaagtgacttaagcttggccaataggattctcctacaagaaactctgaatcgggaaccaatgataaaagaaagcaagcaggacaatatagaattttcctctgcagtgctgacaacatctgatgaccactgagtggtagtagtggtagttagtatccagtggcaggcagtagcttcccactcacaaggctgttcggcagtgaccttatagtgcttctagccactattggatctggccattagccaaggcagaacctcagcccactgtcaacttaggtgctaatgactgtccctcaataccttcctcttttcctttatatagtcaatttctgtggattacaataaaaaatatgttcagagagcatgtcaaacagcagtactgcaaggaayatatttggggagaaaatagcttaggaagacatgttatatatttcaattaataccaatggccacgtcctttctactatctctcaccaaggcccagattctttccataaccagtctctttgtctgtttcctggtggtttaaggaaggaggatc

SEQ ID NO: 532439 - DNA, 637 bp, Homo sapiens
gtgggcaagtggaatttagccctgctggggcactcggggaagctaggggagaagatgcccctcagagttatcccactcaaggtgaggggaactggggtaataatctgccagctcctgccagtcttggttgagaatggccagaggaggccaggcatggtggctcatgcctgtaatcccagcactttgggaggccgaggcaggtggatcacctgagatcaggagttcaagaccagcctggccaacatagtgaaaccccgtctttactaaaaatacaaaaaattagccgggcatggtggcaggcgcctgtcatcccagctactcaggaggctgaggcaggagaattgcttgaacctgggaggcagaagttgcagtgagccaagattgcgccattgcactccagcctgggcaataagagcgaaacttcgtctcaaaaaaaaagagactagccagagggtgttaattccttgtaccactgggctgccttaggcaaggagatgtcagtgatggcaacttagcagctgcacgctaagctaatatgtcctgaaatggaaagygctgatagcatgggcagggcacccatggtccctactaaagacactaactagattttatctggcatgtcagctgcaattgattg

SEQ ID NO: 532440 - DNA, 376 bp, Homo sapiens
tggtagccatcctctgagctattcaggaggaggccagagggatttttcacttgtataccaactcttggtcagtagcaaatggtcttactgcctggattggcagtaaacaaaacaaatgattaactgggaataaagaggtttggggaaaacaatactaggaatactaggaagatatctaaatcctggkgcacaccaccattatcactgttttccatattgatgctcatgcatctctgctttctcttagaagactgtttaatcacaggcagatcaacaggccaaaattgccaccacaactgcaaacttgaatgcggatgaatggattacaacacgttcaagccttgcagtgagaggcattacagtgtatgatggtata

SEQ ID NO: 532441 - DNA, 376 bp, Homo sapiens
tggtagccatcctctgagctattcaggaggaggccagagggatttttcacttgtataccaactcttggtcagtagcaaatggtcttactgcctggattggcagtaaacaaaacaaatgattaactgggaataaagaggtttggggaaaacaatactaggaatactaggaagatatctaaatcctggggcacaccaccattatcactgttttccatattgatgctcatgcatctctgctttctcttagaagactgtttaatcacaggcagatcaacaggccaaaattgccaccayaactgcaaacttgaatgcggatgaatggattacaacacgttcaagccttgcagtgagaggcattacagtgtatgatggtata

SEQ ID NO: 532442 - DNA, 592 bp, Homo sapiens
attagatggtgcccacctatattaagggtgggtctccctttcccagcccactgactcaaatgctaatctcctttggcgatactctcacagacacacccaggatcaatactttgcatccttcaatccaatcaagttgacactctgtattaaccatcacaggccccatccaggaacctgggccttatccttggctctttcctctaccaaccccctggggcagttgatcacacctgcaatgtgtcagatccattgctaagcacctcatatgcaatgattttattttagtgtcacaatcttaagggggaagaaagaaagagtgaaactatggctgattctagctatggcacttattggtgaggaaatttaagcagagctctctaagcctcagctttcctcccattttgtgccatgtggagcaggttcccctatcctcatccctctccttgtccccagttcatgagagatgcttcttttatgttctccactccctttyctcacactatattgcaatgttgccatgttctcattttgcatcctatggatgtggcacaaaaaaagatagattattcttctcccatggaaaataaaagca

SEQ ID NO: 532443 - DNA, 619 bp, Homo sapiens
ggttgcagagaggctgataaggtcagcagagaccattttaagtagcttcaggggcaatgggaaccaatttctcattttmtctaccctctctctgatcagagataagctttatgggaccattgtatagtatggtgtttgcaggatgtacccatcagatattctaaacccaaacaggaaagagatattccagcttggagaaggttagaaaggggaaattcacagttatgctctttctaaaggagaatgccccgttacagtaaccagaaggtctcccatgtttctaagcctaggaaatgagtttagggaactttccaagccatctccctgaggtagggattattttgtttctgtatttgtgcatcttttatgtatttttaaccttctcaggaaaaccaaccattcactcccctggacagtgtggctgcaggtggggacaaatgaggccctgaattgatcacaaccctagaacactctgttaatgattagcaaccccgaggcaatttattgtggtggaatgccatccgcttagtcccttttatagagcctcatccagagcagcttctcattaatatgagggctgctgtgaaaatagctggatggttatcgatcccctttatta

SEQ ID NO: 532444 - DNA, 619 bp, Homo sapiens
ggttgcagagaggctgataaggtcagcagagaccattttaagtagcttcaggggcaatgggaaccaatttctcattttatctaccctctctctgatcagagataagctttatgggaccattgtatagtatggtgtttgcaggatgtacccatcagatattctaaacccaaacaggaaagagatattccagcttggagaaggttagaaaggggaaattcacagttatgctctttctaaaggagaatgccccgttacagtaaccrgaaggtctcccatgtttctaagcctaggaaatgagtttagggaactttccaagccatctccctgaggtagggattattttgtttctgtatttgtgcatcttttatgtatttttaaccttctcaggaaaaccaaccattcactcccctggacagtgtggctgcaggtggggacaaatgaggccctgaattgatcacaaccctagaacactctgttaatgattagcaaccccgaggcaatttattgtggtggaatgccatccgcttagtcccttttatagagcctcatccagagcagcttctcattaatatgagggctgctgtgaaaatagctggatggttatcgatcccctttatta

SEQ ID NO: 532445 - DNA, 616 bp, Homo sapiens
aattgcttcatgaagctttatcattataaacaggcaaggatggccatagatggcttggtgtgcagcatgaactgtggctcaggaagctacctacctgttccctcatagatcctcttcaacccaccttcaccaacctatctccattcattcttttccagattataayttacagccttgcacataccacctctcatgattctgggaacttgcaagtttcttctctctatccagaatgctcagataatttcctactaatccctagtaccaaatcaaacattctgtttctgagatggttcccctaacttgcttaggtcattagtctcaatctcatttatgattcaacacaatatattcccaactccattaaagtccttgtcagagtgtgctagcaacattctaatacttgtccatcatttgaattgtccatcattcaaatacaagtctagaagctccttgatggtaaggatgatatcacattcacctgtgtgtcccctcagtgcacagtatatatagattttaagtagatgttgattgggtaaaagcataagtaagcgaatgaataaatgaatgaatgagaaaagcaggaattgctatagaactagaagtcaggaactat

SEQ ID NO: 532446 - DNA, 533 bp, Homo sapiens
taattgcttcatgaagctttatcattataaacaggcaaggatggccatagatggcttggtgtgcagcatgaactgtggctcaggaagctacctacctgttccctcatagatcctcttcaacccaccttcaccaacctatctccattcattcttttccagattataatttacagccttgcacataccacctctcatgattctgggaacttgcaagtttcttctctctatccagaatgctcagataatttcctactaatccctagtaccaaatcaaacattctgtttctgagatggttcccctaacttgcttaggtcattagtctcaatctcatttatgattcaacacaatatattcccaactccattaaagtccttgtcagagtgtgctagcaacattctaatacttgtccatcatttgaattgtccatcattcaaatacaagtctagaagctccytgatggtaaggatgatatcacattcacctgtgtgtcccctcagtgcacagtatatatagattttaagtagatgttgat

SEQ ID NO: 532447 - DNA, 550 bp, Homo sapiens
acacacgcgcgcacacacacacacacgcatgcacacacacaccttctctatcactgccacgccatctggaatctgwctgttccttctagcagacatcgattaggggctgccaagccactgtagacataaaatgtcccctcctctgactcccaggaacgcaagacggcagcacctgccttctgtttttgatatcatacgtgcataaacagattacgtggcccagagtgagggagtgcatactaatgggagtagagatgcagtcccagggccacggccacggaagggcacagcccaagccccacccacatggggcgacacagccctgtccctcctggcccagtccctccccactcagcaggtgagggctggggcaggcaacactcaagagcccatctggttatgattttaggggatggggctcaggcaggggtctaacctgcccctgcctgcagagcagaatcctgggtcaggaaaggacccagggtgggttgcgggagcctctcagagcagagcatctgacagcccagcatccagggtaaaggttcctcca

SEQ ID NO: 532448 - DNA, 550 bp, Homo sapiens
acacacgcgcgcacacacacacacacgcatgcacacacacaccttctctatcactgccacgccatctggaatctgactgttccttctagcagacatcgattaggggctgccaagccactgtagacataaaatgtcccctcctctgactcccaggaacgcaagacggcagcacctgcctyctgtttttgatatcatacgtgcataaacagattacgtggcccagagtgagggagtgcatactaatgggagtagagatgcagtcccagggccacggccacggaagggcacagcccaagccccacccacatggggcgacacagccctgtccctcctggcccagtccctccccactcagcaggtgagggctggggcaggcaacactcaagagcccatctggttatgattttaggggatggggctcaggcaggggtctaacctgcccctgcctgcagagcagaatcctgggtcaggaaaggacccagggtgggttgcgggagcctctcagagcagagcatctgacagcccagcatccagggtaaaggttcctcca

SEQ ID NO: 532449 - DNA, 377 bp, Homo sapiens
cccacttcctgcccttgacagacacaccgtcgccctgacagcccctcacgtgatggtcagagcactgcctggccctatgtctggcgtgtaaactgggcaagccacctggcctcgctggggtactgttctcctctgaaccaagscccattcagtcctgccttcaccctccaaatagctattgagcaccgtggatgtgtggggtgccctgccagtctgccctagggattaatcctcttgttaagagtggcctcagaatttgtggggctcagtgcaaaatgaaaatgtagggcctcttgctcacaaagtaataaaaactcaagatagcaacagcagagcagcatgcaccaagcacaggccatttctgagcgccagccctg

SEQ ID NO: 532450 - DNA, 482 bp, Homo sapiens
tacctctcttcttaaaaaaggtatagtaggccaggcatagtggctcacgcctgtaatcccagcactctgggaagccaaggcaggcggattgcttgagtccaggagttcaagaccagcctgggcaacatagcaaaacctcatctctactaaaaatacaaaaaaattagctgcgagtggtggcacacacctgtagtcccaggtactcaggaggctgcagtaggagaatctcctgagcccaggaggttgaggctgcagtgagctgagatcatgccactgcactccagcttgggcatccagagtgagaccctgtctcaaacaaaacaacaacaacaacaaaagtgtagtrtccaccaggggtggtggctcacacttgcaatctcatcactttgggaggccgaggtgggaagatcacttgaggccaggtgtttgagaccagcctgggcaacataacgagaccttgtctctacaaaataattttaaaa

SEQ ID NO: 532451 - DNA, 369 bp, Homo sapiens
ctgcctgctgcagagtagccctgcctgggcagtctccaggcactgagcaggccatctgtggccaggctgagagaatgactggctcgcttaccagcgtgcatgggacaaggagctttggagcctcaaggggttgttgctggcctgggctagagggaaaggtgaccatcygtctgtcctcctgtctttctattagcgcctccatgtgagtgatggtgccttggttcactagccttcccccaccaccccaccatgccacctggtggtcttggggcctgtgctgtcactccagcccctggggaggagaggacccagcccggagagttggggcaagggctccacatggcccaagggcaacagatgctcgcaggg

SEQ ID NO: 532452 - DNA, 636 bp, Homo sapiens
tccctctggctgcttggatggaggatcgtaatgtgaacagaaaacactaattgagtacttactgtgtttcagacagwgtgttgataatcccacttaatcccctgacaaccccaagtaggtagacatatgatgaagatgacggccttgaggaccagagaggttaagtgatttgcctgagatcacacagccagatgatggcaaagccagaattcaaacccaggctgtgggctccagagcctagctcttaagctcttaagcactgggctcctaagaatggggatgaggggttgagggaggctcctccacaggggctactctgggggcctggaagtgggtcacagaggggtcagaggctatgtggctacctccccatcccagtccagagcagtgtttgagtcattagactgggaaccagccctggtgagccagccaagggccttgggccccatccggtcctgctgcctgccacagccaaactcttgtcatgtgaatggatttggggatggagctgcctccatgagtccttgcatctgtgggtgaaggcactgccctggctatagtgtccctgggtttgacgtcctgcatctgcaccaagacctcaggtgaccctgtctccttctgggcctcagagtaact

SEQ ID NO: 532453 - DNA, 513 bp, Homo sapiens
atgatgaagatgacggccttgaggaccagagaggttaagtgatttgcctgagatcacacagccagatgatggcaaagccagaattcaaacccaggctgtgggctccagagcctagctcttaagctcttaagcactgggctcctaagaatggggatgaggggttgagggaggctcctccacaggggctactctgggggcctggaagtgggtcacagaggggtcagaggctatgtggctacctccccatcccagtccagagcagtgtttgagtcattagactgggaaccagccctggtgagccagccaagggccttgggccccatccggtcctgctgcctgccacagccaaactcttgtcatgtgaatggatttggggatggagctgcctccatgagtccttgcatctgtgggtgaaggcactgccctggctatagtgtccctgggtttgacgtcctgcatctgcaccaagacctcaggtgascctgtctccttctgggcctcagagtaacttgc

SEQ ID NO: 532454 - DNA, 489 bp, Homo sapiens
gggggaggatggatcaggagatggccctgtacctgtgttggggattattgttaagcccgtggcagtcttcacctccctgctgaggattaatttatccaattttgcacaagcttatgagtgcagaagaggcagacggaaacagagttctggccaagagcctggaacagggcctcggggtctctttcctatgcctggaccccgtcatgtctgctctttgtctgtcggaccccagatgtctgccaagccccgtcagaggctgcttcccagaaagcccttctgggtgtcaycttgccccgagcagtgcgttctcagagttctcccgccctgatgtccctcccagcatgcccagcccagccacaacagggccttgcttctagtcatgtgtctggctgtttgctgggtccaggccagccctggtagggcacaatgggggcccgctctgccaccccatacctctccccaggatatctcatgccccagttctctccc

SEQ ID NO: 532455 - DNA, 565 bp, Homo sapiens
ctgtcccttgtcgcctgaatctctggctgtctctggccaccccagtccttctccctgccatgggttgttgctgtgggggttgcaggaagggaaaggcctgggtgcctctcgttcccattggggctttcagaagcacatgcagggattgatgggcagatggctaattggagaagtgaccccaggcagtgccgctgtggagtaaggaagcggagccaacaatggcatcttctcaagtcggttttcctttggaagcagtgtagggcaggcctcagtgttgtctcctggccaaggctggtgctggtgatagttatgtccacccgctttcccctgtccttggcaggggctgcacccaggggcatgccggcacttcccagtggccctaggtgtggccccagcccacccaggaaaaagcccttagcttggagaggagggggggccctgctccccaccccactcacctcctcctctccacagtggaccccctggcccaggtgwctcagctattccgggaacatctcttagagcgagcactgaactgtgtgacccagcccaaccccagccctgg

SEQ ID NO: 532456 - DNA, 351 bp, Homo sapiens
atgatggctccgcagacagcattccacattgtaatttatgcttctatcttccctcactgctctgggcactcctcaagcaggtgcctggggaatgcctcatttccatgtccctggcattgcccagcagaggtctaggcagacagaaggataaaagaattgctggggcaagagaggagggaaactgaagagtgagatggggcctgggtttgggsagctgtgcccagggagggtccccctggactgcttggatgggctccaatgccctcctgttcctgggcgggctcgtacctgcatcgctggcacacgggtagtggtaggtgtggaggcatcctttgtggcagcacccaatgg

SEQ ID NO: 532457 - DNA, 447 bp, Homo sapiens
aaaacctggacaccattatcatcagtgtatccttccaaacccagcaccatgattgtgaagaaaagtcaaagaagacaagttctrttctgttttgtttttgtttttgtgatattttgctgttgagaatggggttgtattgtccctaaatccttaaaagtcagcacagacacaccaagaaaaccagtgtataattaatgtccacagcaaaatttaggcccacccctgtggttatatcatcatatatccaggactgacaataacccaagccatcttttgaaaagctgttaaactttttaaaaggattttgaagtattattcagatatctttttgctcagagaccccgagacacagccctagactgatcactccttcccatgagatcctgatgggagagaaatggactgaaaaatgaaaggaaattagggggtgttttctactcagcagaa

SEQ ID NO: 532458 - DNA, 447 bp, Homo sapiens
aaaacctggacaccattatcatcagtgtatccttccaaacccagcaccatgattgtgaagaaaagtcaaagaagacaagttctattctgttttgtttttgtttttgtgatattttgctgttgagaatggggttgtattgtccctaaatccttaaaagtcagcacagacacaccaagaaaaccagtgtataattaatgtccacagcaaaatttaggcccacccctgtggttatatcatcatatatccaggactgacaataacccaagccatcttttgaaaagctgttaaactttttaaaaggattttgaagtattattcagatatctttttgctcagagaccccgagacacagccctagacygatcactccttcccatgagatcctgatgggagagaaatggactgaaaaatgaaaggaaattagggggtgttttctactcagcagaa

SEQ ID NO: 532459 - DNA, 597 bp, Homo sapiens
ccacgcctggctaatttttcatatttttagtagagacggggtttcactgtgttagccaggatggtctcgacctccagacctcgtgatccatctgcctcggcctcccgaagtgctgggattacagatrtgagccaccacgcccggcctctttatttattttttattgtaaaatacacataacaagaatttatcattttaactgttttaagtgtacagttcagaggcatgaagcacgttcacatggttgtgcagtcatcactactttctatttccaaaatgttttcatcatcccaaactgagctctgtatgctttaaacactggggagggagcttcctattcccggtcttcaacccctaaccaccattttgctttgtctctgaatttacccattctgggcacctcatagacgtggactcacaccgcatgtgccctttgatgaggggctgatttcactcagcacagcttccttaggcccatctgtgttggggcgtgtgtcagccacgctgcttctgcatccatctgtccaccttcttctctccgtagcccctaccccatcctagttcaggagttgtggttttccttgtgtcttccagaaa

SEQ ID NO: 532460 - DNA, 495 bp, Homo sapiens
gctgcttacgagaggccagcagcrccgtgagccaggcccacttagggaagattcttggctcatccatgtgactcaccttcctcatacgtaacatggggacaatggggatatatgtcacagggctgctgtttatcttgccggatgatctaatgcacatggatgaagaagggaatgtgggaaatacatgctctcagtcttaacagaagggaaaactgaagcccgcagtgggttggaagaggtggagaaaatgcaagaaacacagacagctttgtgattgcaactttgttccaggtcctggttgtgtctttaattccatattaattgttttgtctttagtacttaactcctatctggaagaactcctcattagcccatctgccctggcatggcccacttctgaggggtttccttggcctgtttccctgatgtgtatcatgtgacccctccagttgcctggacaagggtgggcatgtcaccagggagcagccagtggcc

SEQ ID NO: 532461 - DNA, 619 bp, Homo sapiens
agctgcatttctatacactaaaaatgaacaattggaaaagaaaattaagaaaacaattccatttacaatagcaccaaaaagaataaaatacttaggaattaactgagggagtgaaagacttatacactgaaaactaccaaaatatagctaaaaaattaaagaagacacgattaaatgaaaagacattcagtgtcttttcactggattggaagactaatgcagttaagatcaatgcaattcctatcaaaatcccaaatgatattttttgtagamatagaaaaatttattataaaattcatatgaaatcccaaaggaccctgaatagtcaaaacaactcgaaagagcagaacaaagttgcaggtttcacagacattttttccaccactgtgtgaccttgggcaagttactgaatctctctgttcccaagtttcctcatctgtagatgaggataacaacatcacccacatcatagggcttttatgaatatcaaatgaataaggatatggaaaatgcctacaacacagactgaaacatagtaagtactatatacagaatagcagctattattaattttttattaacattactccctggatggctgggggagcctagagaattt

SEQ ID NO: 532462 - DNA, 676 bp, Homo sapiens
atggacgaatacaatatccctgccattaagtgacccatgattgtacatagttcctttttagcttaagagagaaggccaaacaaacaagaagttcttacaatgcttcaaatgcacaaataatttaaacaagttcttgtaaatgtttttctcctgaatcaaaggaatttacagagaaaaggaatttatggtgggtttaaataactttaactttgctctgatttcagcttttaaaaatcttgctaagggaagatttttagacaaagctggaatttcccttgaaggaactctttccctttatttccacattgtggggtggggcctgcatgctcctatgagggatctgctaagggagtctctaatgttagccattatactcctttgtatccttttttttttttttccaattagtcacttaaattttttatttgctgtctgtaagaagtctttttaaagagacaataaaaaattttgaaatcttcttagaagcttctgcacatcaatagacacctctagatagcctaatttgggagccctaatttttaaatgtacttcttaaagtgtgktgttgttcatatggaacattctagatgatagccattatattttaaaactatctttgctgtaatttgcctattggcttaaaaatgtgcatgagaaagggccacaatgtttgaac

SEQ ID NO: 532463 - DNA, 642 bp, Homo sapiens
aactactggctaagcagattctgtgtgctgccctagggtcttaattacttcaagtgctcatattgaaccataaacatgattacctttttgttacgtttccctgtggactttgagccccctagattaaaaggataattacgtaacttggatttctcgaacactggcaaagacaaataatctggagatacgttatctgacctggctaatagactaacagtacaacagttcactatattgtcataatctgacaatttattattttagtattctcctcttttggttgcctcattataaagtctgctttgattttgcctcttcagatgagcccggccctcaaatatacctccttagaggcctgctctctgaacacattggaagtccctatcttagtgtgtccagaattggttccttccagtgagttcttggtctcactgacttcaagaatgaagccayggaccctcgcagtgagtgttaagttcttaaagattgtgtgtctcgagtttgttccttcagatgttcagatgtgtccggagtttcttccttccggtgggttcgcagtctcgctgacttcaggaaggaagccacagaccttcgcagttaatgttacagctcttaaaggtggcgcctctggagtcgtttgtt

SEQ ID NO: 532464 - DNA, 520 bp, Homo sapiens
gtttctcctttcatctttgttttcctgtattttccaaatgttctctgtaaaataaaaagctcttagcactaaaacagtatatatgtattccactgcagcttaattgtattcagttaacataattgaagagattaaataagaaatgtagaaataagtaagacatagatcttaaggatctctctggttaactgtaagtgaaagactatctcaccacaatgcttgatgtaaacggtctgattggtgagtgacaacrtcatcaattattgcagcttgcaaagggattgatttttaaatttttacttattaattatatacttgcttatttgttttctcatttacttgctttcttatttgcttattatttactcactttcctattgctttaaaagaggattctaattagatattatctaagtgattaggccgagttcttacattttgttggtttaaattactttaagatatatgtttgaaatcacatgtttactcttcaaatgtgtgccatttgcagtgtgtgtgt

SEQ ID NO: 532465 - DNA, 524 bp, Homo sapiens
ggataagaggcacagaattgcagccatggtcttcttcaccaaggtaagaactacctccaccccacagaagccaggagctggcctaggacagacatgtatatcttcctctaaataaaacttgcttttgtgcaggacattgctcattgtctggattgttgtatgactctaaccagccattgactctgggacttggtatagtcatctagaaaatgaggggttcagactagagaatatggaaatccatagtatttaagacaagaagtttccwggggagatcccgtggaatttttcttgccctcctgaaaccttttatctccttgaagagaacagatgccaagcatttgttcctactctggtagggacacacttgggatgacccaggttacggttagcaggtgtaagtcttatatagttccttcagttcaccagcatatggttccagtggtcatttatcctctgagatcagggtagttgtgggttggtaacagggccactgagggcagaagtgcctcctgctttgggga

SEQ ID NO: 532466 - DNA, 582 bp, Homo sapiens
ggacctcccatcttctatgcacatagaaactgggaaccaataaagtatttttacattaaggtatgtaggccaggtgtggtgcctcacgcctgtaaccccagcactttgggaggccaagacgggtggattacttgaggccaggagtttgaaaccagcctggccaacaaggcgaaaccccatctctactaaaaatacaaaaattagccrggcatggtggtgcacgcctgtagtcccagctacccgggaggctgagggtggaaaattgcttgaatctgggaggcggaggttgcagtgagccaaaatcacaccactgccttccagcctgggcaacagagagagactccatcacaaaaaaaaaaaaaaaaagaataaacatatgaaagaaagtttagctattgtattagtctattctcatactgttataaagaaatacctgagactgggtaatttataaagaaaagaggtttaattggctcacagttctgcaggctgtacaggaagcatagcagcctctgcttctggggaggcctcaggaagcttccagtcatggcagaaggcaaagggggatggaggcatctcaca

SEQ ID NO: 532467 - DNA, 135 bp, Homo sapiens
tggtaagaccacttgctgactgcagagagatgattacagaaatatactggttttgatgcaaagttaagggcacagtgattacagaaatayacctggttgaggtatatatatacaaagaaatatacctggttgagg

SEQ ID NO: 532468 - DNA, 564 bp, Homo sapiens
cgtggaaagagggagagggagagggagctaaaatatattcttatcaaataattgtactactacyaagtttagtttgtgtgaaccccataaaatgtaatatatgagtgcatgaggaaatcccaaagatttcacactctttttacattaaaaaaaaattgtttttgagacagagtcttgctctgctgcccaggctagagtgcagtggtgtgatcatagctcaaaatgtagcctccggctcctgggctcaagagatcctcccaccccagcctcccaaagtgctagaattacaggaatgcaccacttaggccctggcagaagtaaaatttctgggtcgtaaggtatgtatatgtttaattttagcagctactgctagtcggctttccacagtattacttttatcgaaataatcagattggaggccagtgccatgcctgtaatcctagcactctgggaggctgaggtgggaggatcacttgagcctaggagtctgagaccactctgggcaatatctctacataaaattaaaaaattagcctgatgtggtggttggtgcctgtcattcca

SEQ ID NO: 532469 - DNA, 639 bp, Homo sapiens
tttgagccaaatattgaccaacttaatgcattatccttttgtgagagaatttctgttttaatgaagggagtgttttacagagtagaatataaagactaagattaaatctaggttgttttaaagaccaacagaattggggccaatacagtgtgaatgacaagaagacagacccattctgaacgtgtaaaaggcctttcyagcaaactgagatgttcaaaaaaatgggaagcagtgctttaagaagtgataagacgtccatcactctacagtgggtatttttgtcttggtgaacttttgactggttgaattctacaattatgcatcagagtatcagaagtacataccaggcaaactactaggatgcctttcagaggtcattaaaaatggtgtagatattcacttgatctgaagaagagggaatggcattgggatttctaaaatttattcttttatcagaaaagtcttagtatcagggactgcctggtactggatgatacaataacgaataactgaaacacatccctgccctcaaagggcttacagtcatgagggaaagagacagcaacaggcaactgcaatataattcaagtggagggtttttaggatgttggtggaacctaggctggaaacctaccacag

SEQ ID NO: 532470 - DNA, 639 bp, Homo sapiens
tttgagccaaatattgaccaacttaatgcattatccttttgtgagagaatttctgttttaatgaagggagtgttttacagagtagaatataaagactaagattaaatctaggttgttttaaagaccaacagaattggggccaatacagtgtgaatgacaagaagacagacccattctgaacgtgtaaaaggcctttctagcaaactgagatgttcaaaaaaatgggaagcagtgctttaagaagtgataagacgtccatcactctacagtgggtatttttgtcttggtgaacttttgactggttgaattctacaattatgcatcagagtatcagaagtacataccaggcaaactactaggatgcctttcagaggtcattaaaaatggtgtagatattcacttgatctgaagragagggaatggcattgggatttctaaaatttattcttttatcagaaaagtcttagtatcagggactgcctggtactggatgatacaataacgaataactgaaacacatccctgccctcaaagggcttacagtcatgagggaaagagacagcaacaggcaactgcaatataattcaagtggagggtttttaggatgttggtggaacctaggctggaaacctaccacag

SEQ ID NO: 532471 - DNA, 652 bp, Homo sapiens
agtatttaaaaacttccaatgtccaatttttatgaggtttcagtgaaatgatactttcaaacactgctggaatcatcataaatcacaaaacagaacatgtgttttgggaagcaatttggcagcatgtagcagagcaaaaaacaaaaagttcatatcctttggcagagttgtccaacctcttaggattgatctgaatgaaaccatccaaaagctacccctcccaaagacgtctatttatttataattttcaaagttgctactactaattataatagaaaaaatattatttatgatagaaaaaagcagaaactatttaaatgttctactwcaggcgattggttaagcaaattacaggaattctcatgtggactattatttatatatttttgaagtcataaagtctaacaaacatgaaaatatgcttattatagagcattaaatgaagatggtgaatataaaataacatttaaataatgatcacaactatgggaaaatggatacaaaacaaaaatgctgaaaataattaaaccaaaatgctaacagtgatatattagccttatttttatctcaaatataataatgaaaaataaactttaacatggaatcggaacaaactaaaatgtatcttcagttgagaggggttctctgaagc

SEQ ID NO: 532472 - DNA, 652 bp, Homo sapiens
agtatttaaaaacttccaatgtccaatttttatgaggtttcagtgaaatgatactttcaaacactgctggaatcatcataaatcacaaaacagaacatgtgttttgggaagcaatttggcagcatgtagcagagcaaaaaacaaaaagttcatatcctttggcagagttgtccaacctcttaggattgatctgaatgaaaccatccaaaagctacccctcccaaagacgtctatttatttataattttcaaagttgctactactaattataatagaaaaaatattatttatgatagaaaaaagcagaaactatttaaatgttctactayaggcgattggttaagcaaattacaggaattctcatgtggactattatttatatatttttgaagtcataaagtctaacaaacatgaaaatatgcttattatagagcattaaatgaagatggtgaatataaaataacatttaaataatgatcacaactatgggaaaatggatacaaaacaaaaatgctgaaaataattaaaccaaaatgctaacagtgatatattagccttatttttatctcaaatataataatgaaaaataaactttaacatggaatcggaacaaactaaaatgtatcttcagttgagaggggttctctgaagc

SEQ ID NO: 532473 - DNA, 652 bp, Homo sapiens
agtatttaaaaacttccaatgtccaatttttatgaggtttcagtgaaatgatactttcaaacactgctggaatcatcataaatcacaaaacagaacatgtgttttgggaagcaatttggcagcatgtagcagagcaaaaaacaaaaagttcatatcctttggcagagttgtccaacctcttaggattgatctgaatgaaaccatccaaaagctacccctcccaaagacgtctatttatttataattttcaaagttgctactactaattataatagaaaaaatattatttatgatagaaaaaagcagaaactatttaaatgttctactacaggcgattggttaagcaaattacaggaattctcatgtggactattatttatatatttttgaagtcataaagtctaacaaacatgaaaatatgcttattatagagcattaaatgaagatggtgaatataaaataacatttaaataatgatcacaactatgggaaaatggatacaaaacaaaaatgcwgaaaataattaaaccaaaatgctaacagtgatatattagccttatttttatctcaaatataataatgaaaaataaactttaacatggaatcggaacaaactaaaatgtatcttcagttgagaggggttctctgaagc

SEQ ID NO: 532474 - DNA, 632 bp, Homo sapiens
tatagctaatgaatataactggaattagctaccaaattcatagccttgatttctaagctcatgttctctgtagttttctcccagccttttttttttccctagagaatggtgtttcctatttattgcctaatattaatgtaaagttgtaattaatcatttacatgtttcagaataagataattcttccctatcccaccctacctttttcaaaaagagagaaaaaatttacttttgattaataatttaaataggtgagtcaaggawtttctaaactagcataagtgtcgacatttagtgttagggttattgataattttcctaagataatgcctgcccactccctcacatatatataaaaggagaaaattgaagacatagtctcttaatagattcctaggttgagataaggacttatttgatgaataatattcccattgaggagggaaatatataaattcccataagcagcagaaatcttaagataattcttagggatcgtatggtgttaaattagtcataaagtcattagtcatttagccttgatgtggcatcttgaaggctcaccatttgcatgtttagtcactcattttcatagtctacactattatgcattacttttaatctgcttggtt

SEQ ID NO: 532475 - DNA, 662 bp, Homo sapiens
atcttgtaggcatttaaaaaattccatggaaatattaatctgccattgttttgcttggggttctagagaactttgttgttttctactgtattcgccctcatttctgtagaacatctaatttaacaaaattgattcattcagaagttgataagtaacgaagaggatttcagtgtattagacaaatagcttttatagatagaattgttctttctctcccttaataacttaatcacagaattgccacacattgaaattttcaactgtcaacaacaaattagaggaggaaaaaaacggtggaaggagtgaggagaggataaatgcgtcatggcatcaaaagaccagactttcctgcaaactctgattttacactcagcttttcaattcttttcaaatgttggtacttcttggctgatgatcatttagtaagacgacacagataaaataacacttctcatttttcaggcatgattaaattcaacaaaagcaatattcaaaacagagaagattaatacacaatagataattatgtgcactgaattctgtctcccagcataaaagaacttaatgaaaccttaagggatggtgcatctctgctgaacatttgtgccaattacagygcatgtgccctgatgaacttctagcactatgtaggctgctgaata

SEQ ID NO: 532476 - DNA, 638 bp, Homo sapiens
attacaaatttttaaaatgtaaataaataaaatccaggttcttcccagtaaaaatataggttaaaaatattaaagtaaattgtgttcatcacaaaagaagacaacattaattggtttgtataaaagtaaaaatggaagtctctcaccttcttcctcattggcccttcattgcctccactcttaatccctggctttccacagactcayggtcagcactatcatcaggtttacatctatgctttaagaacattttaaaacttagattatacaaaacctgctatatactccttataacttgattcattcactttaatatttatcaggatagcctgtcttagctgtatacacaggccatgaagtttcagtggcttagcgccacatgtgtatttctccactctctcaccatttgatgggatttagcaagggttcctccatatttctgtgatggcttctggaacatgtagactctgaagccagtgcagaagggcataagaaacacctaagaggtacactggctcttacccacccctctgctcccaagggacacaggtcacttccaatgacactttactgactggaactcattctatcactgagggcttcctacaaaggaggcagaaacaacgaggcaaccagct

SEQ ID NO: 532477 - DNA, 463 bp, Homo sapiens
gaatctacaaagaactcaaacaactctacaagaaacaaacccctttgtcatctttctaattgaacatgtttaatggtgtttttaaagtatatgtctgacaacttcaatatttccttcacttgtgttcctatttatatttttttgcytttatctctaattatttattaaattctagaaattgctatgaagatctgtagcccctctgaataatgttttcttcttccacaaagtcttcaccccatcttctggtaagcagctcagccaggggagccgattaccataatccagtcaaagatggagctcactcaagcctggtttccagttttataaggtttcatcttcctctttccatcccttctcctgttactggtgtcctaacttaaagctttgggtattacctatggtctttaagcccttgcttactctcaaactccactttgttttttttccacatcaggactat

SEQ ID NO: 532478 - DNA, 483 bp, Homo sapiens
ctgaacagaagaaatgcttattaacacatttttcatttgggctttactttccaatattgaagtacatacactttaatgaaggatcaagrtataatgcagcaaaaaccctatgagtttctatttcttctttaagtgaaattatcaaaccctggtcaaaaattaggaaatgttataaatctcaggaagattttcacaatttaaaagacaaagcatttaaggtcatgtctgtgtgacaccaaatcattgggtggaaatttcaaatgataatttggacacacacacacacacatacacacacacacaccacacactttatatatatatgttaataaaacacagacactaatgaaaaatctgtcagagtgatgtttctggtgtgaaaactagacttttgtacctttttgatagttaatctactccattaggaacaatattctgcaaaaacagaaggtaaaatttacatatggtatatttatacaggca

SEQ ID NO: 532479 - DNA, 483 bp, Homo sapiens
ctgaacagaagaaatgcttattaacacatttttcatttgggctttactttccaatattgaagtacatacactttaatgaaggatcaaggtataatgcagcaaaaaccctatgagtttctatttcttctttaagtgaaattatcaaaccctggtcaaaaattaggaaatgttataaatctcaggaagattttcacaatttaaaagacaaagcatttaaggtcatgtctgtgtgacaccaaatcattgggtggaaatttcaaatgataatttggacacacacacacacacatacacacacacacacmacacactttatatatatatgttaataaaacacagacactaatgaaaaatctgtcagagtgatgtttctggtgtgaaaactagacttttgtacctttttgatagttaatctactccattaggaacaatattctgcaaaaacagaaggtaaaatttacatatggtatatttatacaggca

SEQ ID NO: 532480 - DNA, 483 bp, Homo sapiens
ctgaacagaagaaatgcttattaacacatttttcatttgggctttactttccaatattgaagtacatacactttaatgaaggatcaaggtataatgcagcaaaaaccctatgagtttctatttcttctttaagtgaaattatcaaaccctggtcaaaaattaggaaatgttataaatctcaggaagattttcacaatttaaaagacaaagcatttaaggtcatgtctgtgtgacaccaaatcattgggtggaaatttcaaatgataatttggacacacacacacacacatacacacacacacaccacacactttatatatatatgttaataaaacacagacactaatgaaaaatctgtcagagtgatgtttctggtgtgaaaactagacttttgtacctttttgatagttaatckactccattaggaacaatattctgcaaaaacagaaggtaaaatttacatatggtatatttatacaggca

SEQ ID NO: 532481 - DNA, 609 bp, Homo sapiens
agcttacttcaggttgatggaaacattttctactattttctacaaggttccttactttttaaattttttttactgtatttttctgtgccttaaaaaaattctttgaattacttttaggaacagatgaagaaaaataaatataaatgacaagaagccaatattattgacctcatgggtactacacttgctaaaataatctcctctaatgaatgtcatgggcaaattagtgtatgagaaaaaaattctctgataattaaaaagaatgttattggttttcctcttcatcaatttggactgctacacaaaaaatgccatagactatgtggcttatacacaacagaaatttattgatcgcagttctggagcctgggaagtccaagatcagggcactagcagattccatgtctcgtgaaggcctgtgtcctcatagacagctatcttctcactataacctcacatggcagaagggtgaatgagctcctttggctgctttataagagcagtaatggcctaatcaccccccaaaaaccrtactcctaataccatcaccttggacgttaggattttcacatatgcattttggcgtaaacaaacctttagaccacggca

SEQ ID NO: 532482 - DNA, 643 bp, Homo sapiens
attctaaaacacttggttccatgccaatctgctcagttccttgtgtcaaagctggcagactgactacagagggtgttcagtctgtgtctccaaggtctctcatagttccctctttgaagtaaagctttcagctatttctatagctctagctatttctgtttatatttagaaccacacataatgaattccagaaagcagacaattcagttatattataataaaatttagctctactcgaataaaaacctactataaaattacactrcaacataacactgaaattgccaggcaatgattgtgcccattgcatcgggaagactgaggtatctaggaagaaacatagttacttctaggataaatgcttcccagtcagctttcccttaccattccaaaaccattactcggggcataattccattctctactatcaaacgtctcttggcagcaaaatctggcatcaaatttatcccgttgttggccgggcgcattggcttacacctgtaatcccagcattttgggaagccgaggtgggcagatcacttaaggtcaggagttcgagaccagcctggccaacgtggtgaaaccccgcctctacaaaaaatacaaaaaattagccaggcgtagcggcatatgtctgtaaccc

SEQ ID NO: 532483 - DNA, 567 bp, Homo sapiens
ggctaaccacagcccactgtcaaccaktaggggttaggaaggcatcctagacaaggactggtggtcgggcaacatagtttgaactgacactggagagacgtggaaagagcagcccacacagacaaaacagcctgaggagttcagagaagaggagtgggtcagagggattggtttgtctagtataggtggggaagtagcaagtggagtggttggcgggggccagatgggagggcctggaatgctgagctaaggatgcgggcattgtggagcctttggtttccaaatgggggtgacacagctcttttagaaagacaagtccctttcattcctgggctcagtgcgctcacctgtaaaatgagggagttgaagattattttcaaaatcattccagtgcatgtatcctgtgatttacagcattgcttcttaaagtttattgtgtatctgtgtcacctggggatctcagtaaaatgcatattctggccaggcagtgtggctcacacctgtagtcccagctatttgggaagctgaggtgggaggattgcttgagcccagcctgggcaacataat

SEQ ID NO: 532484 - DNA, 567 bp, Homo sapiens
ggctaaccacagcccactgtcaaccagtaggggttaggaaggcatcctagacaaggactggtggtcgggcaacatagtttgaactgacactggagagasgtggaaagagcagcccacacagacaaaacagcctgaggagttcagagaagaggagtgggtcagagggattggtttgtctagtataggtggggaagtagcaagtggagtggttggcgggggccagatgggagggcctggaatgctgagctaaggatgcgggcattgtggagcctttggtttccaaatgggggtgacacagctcttttagaaagacaagtccctttcattcctgggctcagtgcgctcacctgtaaaatgagggagttgaagattattttcaaaatcattccagtgcatgtatcctgtgatttacagcattgcttcttaaagtttattgtgtatctgtgtcacctggggatctcagtaaaatgcatattctggccaggcagtgtggctcacacctgtagtcccagctatttgggaagctgaggtgggaggattgcttgagcccagcctgggcaacataat

SEQ ID NO: 532485 - DNA, 587 bp, Homo sapiens
gttttttttgttttgttttgttttgacggaattttactcttgttgcccaggctggagtgcaatggtgcaaacaaggggagaatcgcttgaatatttaacttttttttttttttgagacggagtctcactctgtcgcctaggctggagtgcagtggcactcgatctcggctcactgcaacctccacctcctgggttcaagcaattctcctgcctcagcctcctgagtagcaactacaggcgcgtgccaccacgcccagctaattttttgtattttttttagtagagacggggtttcactgtgttagccaggatggtctcgacctcgtgatccacccgccttggccccccaaarcgttgggattacaggtgtgagccaccgcacctggcgaatatttaactctttaagttatgacctgtgtggtctagtcttagtgcagtgtcataatccatggaacacaatcctgcaaacaaaaagtcattttgaaataactcagtctttatttgcatttcttgaaacatcatgaagtagaatagagttcacagataaaccaagcagaattattaaccctttctgtatcccccaaacc

SEQ ID NO: 532486 - DNA, 623 bp, Homo sapiens
ctgtgtagtgccttattcataccactagtcccacccttaccataccatgttgtagtagatttaacttgaccttatctaacactattttatgacttttagsattagaattgtcttgctatctttgtattcttattatctagtacgcagtttgtgctcagcatttgttgaaacagattaaaataaaagctaatctacttagaaaagtacacagacaaaaaaatagataaaatacacttttatagcttccatccatatatgatacatcccaaagacaattgaatgtaaagtatgcccaaatcagaactcaatttatttaaaattaaaatttgaccaaggtcaaatttatttaaaagtatatttcaaatatggagcatgtgaagcacatgctgttagaccctcatttttttttcaaaaatgatatttgtgtaaatagcaataataaacaatatttggtgtaaaccacatacatagtgagctgaggggtcaggaaaagaataatgacagatttagctcccaggagaaatgagggggtcaaaggtaagcagctcacatgacctcgtgactaaatgttaacgggtggtatttggtgtcctccctgaactctagcttttccacatcaaggc

SEQ ID NO: 532487 - DNA, 609 bp, Homo sapiens
tatttgaacagtgaccagtcattaataatgactactgaattagaatgtaatactctttttaccttgtccattgaccatttgtcatgggagtgttctgcatatttgttaatgaagtattccaatttctcaggaattgtaatactatgagaaaagtaaagacaaaagagcttgattttcacagaatttacaggaaatcatattaataatttactcacagcttatgaatgcttatatctcattcaattttaactgttaaacacgacttctttttttagwattacatttttctattttcacaacaatataagaaaagtcaagcagataatgttctatctgctcatcttatattgattcatattttatgtgctaacataacaaattacatattataaaactataataacaattattattaaatatataaattgaaataattaaaatacattcaaagattaggacaatagattacacaaaaaagaaaaaacaagcactaaatttagtagtgatgtgttaaaatttttaaatatacatggtccacaaataacactgtaaatgttactggtattaactatagggaaaataattaactcctgctttttgataatattt

SEQ ID NO: 532488 - DNA, 489 bp, Homo sapiens
tatcacagaatctgaaactgaaggacacaccctagtcacatctaaagcktcacagtttttttctctgggtctgagatggatggccatagaaaggaatttatgaaggtaccacagattacctactccaaagtgtgtaggatggtttaaggcggcagaaaagagattagaatctgagagaagaatgccattgatgtgttaggtacagagtaagagtcagaagagggttaaacagaagagaattaaagggagggaaagcattttttaattgaccaaataaaagaagacactcatgaaatatatatattgcacttgagtactactcaaggcaatgcccacaatagtcttttaatgcagatggaactaatgttatttcttaagcattccagatttttttaatctgatgtttcaagtggagtttacatgattttcttaaagccacataactagaaagtggcacagctagctctcaaacccaaatctactgccaca

SEQ ID NO: 532489 - DNA, 473 bp, Homo sapiens
  misc_feature (1)...(473): n = A,T,C or G
catgttttttttcccccgtnnnnnnnnnnnnnnnnnnnnnnnnnnnnnnnnnnnnnnnnnnnnnnnnnnnnnnnnnnnnnnnnnnnnnnnnnnnnnnnnnnnnnnnnnnnnnnnnnnnntgaaacaagatgatgcagatgtattggaaaaacagatcagatattgcaaggagatgttaacttgggtttctgttgkttttttcatgctgagcaggggtttgaggctctagagaaggacttaactccttcttcgatcttgtagcacatcagagactatcccacccctactttcaccagacacttaaatatttaagcttgttactgaggtcattctaagaaatctcttcttcaattttacagacatgccttcttcaactgcccgtcacataatatgatttcccaattcattggcatcgagtctccattctgttggcgttcctcttagcattctgtgcccaaaactgggcaaaaaaa

SEQ ID NO: 532490 - DNA, 552 bp, Homo sapiens
ggatttgaacactcgctgtctggcttctgacaaggatctgtgtgcttaaccttgatgctaagttgaataaatacggcacatcttgccaagcaaagaaaagaatctaaagatgttcaaactctcccttcagcagagggcaaagggtggaaagtaagcagctagcaccaggtgaacgagaggaggcaggttgataagccagcttccttcccaggaaaccccttctgtcttagaggaccctgtaaaaccttcttacttcaccaaaatgaatctcacaactgttggaaaaacagagccaccctatcctgttcccccaaacactgtccccaagtctattatgcaagcgcctattacagcgagttgtggatgtctcttttgtggtcatggtttttaactgcaaatgaaagaagaaacccaagtcaggaagcgtgcatcttaccaatcccacatttgggggtgcaggagaccccgaaatgtgggctgtctttggaaagagtagaacactccgygtggggctggcgggctgctgctgggaaggatgaggtatggtaaggg

SEQ ID NO: 532491 - DNA, 450 bp, Homo sapiens
acctctcggctacggcgtccgttcagggccaaatcacgcgcacgctcgcgcgctgagcctccagccgcgcacgcgcaccggcccgcgcccagcctccgctaggggaccccctccrtggcttcccaccgggttgttccaggcctcagcttcgccgaaaggcctcaccacctccgacctccgcctgccccggggatgctcccagccctgctgcggcagaacgcgacgtgctaaccggaatccctaggccgcctgtctcctacccatacttggaggccccgctcagacggtcctgaaaacgtctgaaaggcggttcctgccagagtccctgctacctgttacctccacccctatttagtcctagtggacagcctcgctcaccttccctgggatgacacttctggcggctgagatgagcgagcctctctgggctctgccgccgggcgtgggctg

SEQ ID NO: 532492 - DNA, 450 bp, Homo sapiens
acctctcggctacggcgtccgttcagggccaaatcacgcgcacgctcgcgcgctgagcctccagccgcgcacgcgcaccggcccgcgcccagcctccgctaggggaccccctccgtggcttcccaccgggttgttccaggcctcagcttcgccgaaaggcctcaccacctccgacctccgcctgccccggggatgctcccagccctgctgcggcagaacgcgacrtgctaaccggaatccctaggccgcctgtctcctacccatacttggaggccccgctcagacggtcctgaaaacgtctgaaaggcggttcctgccagagtccctgctacctgttacctccacccctatttagtcctagtggacagcctcgctcaccttccctgggatgacacttctggcggctgagatgagcgagcctctctgggctctgccgccgggcgtgggctg

SEQ ID NO: 532493 - DNA, 450 bp, Homo sapiens
acctctcggctacggcgtccgttcagggccaaatcacgcgcacgctcgcgcgctgagcctccagccgcgcacgcgcaccggcccgcgcccagcctccgctaggggaccccctccgtggcttcccaccgggttgttccaggcctcagcttcgccgaaaggcctcaccacctccgacctccgcctgccccggggatgctcccagccctgctgcggcagaacgcgacgtgctaaccggaatccctaggccgcctgtctcctacccatacttggaggccccgctcagacggtcctkaaaacgtctgaaaggcggttcctgccagagtccctgctacctgttacctccacccctatttagtcctagtggacagcctcgctcaccttccctgggatgacacttctggcggctgagatgagcgagcctctctgggctctgccgccgggcgtgggctg

SEQ ID NO: 532494 - DNA, 450 bp, Homo sapiens
acctctcggctacggcgtccgttcagggccaaatcacgcgcacgctcgcgcgctgagcctccagccgcgcacgcgcaccggcccgcgcccagcctccgctaggggaccccctccgtggcttcccaccgggttgttccaggcctcagcttcgccgaaaggcctcaccacctccgacctccgcctgccccggggatgctcccagccctgctgcggcagaacgcgacgtgctaaccggaatccctaggccgcctgtctcctacccatacttggaggccccgctcagacggtcctgaaaacgtctgaaaggcsgttcctgccagagtccctgctacctgttacctccacccctatttagtcctagtggacagcctcgctcaccttccctgggatgacacttctggcggctgagatgagcgagcctctctgggctctgccgccgggcgtgggctg

SEQ ID NO: 532495 - DNA, 260 bp, Homo sapiens
tctacccctctaacctagcgtatgcytttgtgcaggtgagagcccagatttggagtctgaatgcctagccagggcccctggctgggtaatgtgatggctctgagccttagcattctcatttgagagatgagatggggcaagctccatcacccactgctctcacagagcgtgtgtgttagatctgagcccggtgcctgggccactacacagaggcaccggtgataactaccaagtctgggcctgcttcccaggggaaattt

SEQ ID NO: 532496 - DNA, 260 bp, Homo sapiens
tctacccctctaacctagcgtatgccttygtgcaggtgagagcccagatttggagtctgaatgcctagccagggcccctggctgggtaatgtgatggctctgagccttagcattctcatttgagagatgagatggggcaagctccatcacccactgctctcacagagcgtgtgtgttagatctgagcccggtgcctgggccactacacagaggcaccggtgataactaccaagtctgggcctgcttcccaggggaaattt

SEQ ID NO: 532497 - DNA, 312 bp, Homo sapiens
gcagggaagggccctgggtgagagtcctgggcctcctgggaaggcaggctcaggcctctgtagggggtggcaggctgggcccagacccacaatgccttgtaggctgatagcctggcgccctggggagcagcacatgtgggcaagcccaggggcagtgcacgtgtgcatggggtgatgcagccatgcacgggcacgcagatggggcatgcatggacacatgcaggtgagcccacaaacccaaaccatgcaagcaaagctcaaaggtgcacctgggktctaccgcaggggtctcagtacaccatgtgcctctcc

SEQ ID NO: 532498 - DNA, 312 bp, Homo sapiens
gcagggaagggccctgggtgagagtcctgggcctcctgggaaggcaggctcaggcctctgtagggggtggcaggctgggcccagacccacaatgccttgtaggctgatagcctggcgccctggggagcagcacatgtgggcaagcccaggggcagtgcacgtgtgcatggggtgatgcagccatgcacgggcacgcagatggggcatgcatggacacatgcaggtgagcccacaaacccaaaccatgcaagcaaagctcaaaggtgcacctgggttctacsgcaggggtctcagtacaccatgtgcctctcc

SEQ ID NO: 532499 - DNA, 261 bp, Homo sapiens
gggacagtggaaaaacactaaggttttcaagtggtgttaaaagccactaggccttggggaccattgagcaatctacaaagcacggaagmctagatccctgagctctgcctgccaagtaccaccacagctaacatgggagacctccccgacagagactgaaatttgcctcccgaggaaacaagtgactacagacatctgtcccaggacagtaaacaagaaaacaaggtctcacaaaaacaaaaacagctgaccacagcatac

SEQ ID NO: 532500 - DNA, 560 bp, Homo sapiens
agggaaatcgggaacttaacaaaacttgaataattagaaatggaaagggggaaagagaaggtagtaaaggcatttgttgttttttcatcttatctttgctaggggctkactgtgttgagagagtctccggaactcattcctcggggctctgacttttcagatagtgttaccgaggatctgctagggctctatctatggcaggtcttggagtcagccaagtacaggaaaacgtgtcttttccttttaacttctgccttattactacaagttgtacagcacaccatgcctggttttcatcagcaatgtttcctgaggttacagaaagatttctaatcctgggaggaaacactcccttgaagcaaaagtgttctcccccaaaaaatgcaaggagctatcttcttgatagccaggcagataattctcaggttttgccccacagaatctctatctaaaatagagcagtggtcatgcctagtgaaaagtttgagggaactcacccaatgttgggtttcttcagagccatatatatagatataaccaaatatcctaaaagacactgc

SEQ ID NO: 532501 - DNA, 626 bp, Homo sapiens
acaaaacttgaataattagaaatggaaagggggaaagagaaggtagtaaaggcatttgttgttttttcatcttatctttgctaggggcttactgtgttgagagagtctccggaactcattcctcggggctctgacttttcagatagtgttaccgaggatctgctagggctctatctatggcaggtcttggagtcagccaagtacaggaaaacgtgtcttttccttttaacttctgccttattactacaagttgtacagcacaccatgcctggttttcatcagcaatgtttcctgaggttacagaaagatttctaatcctgggaggaaacactcccttgaagcaaaagtgttctcccccaaaaaatgcaaggagctatcttcttgatagccaggcagataattctcaggttttgccccacagaatctctatctaaaatasagcagtggtcatgcctagtgaaaagtttgagggaactcacccaatgttgggtttcttcagagccatatatatagatataaccaaatatcctaaaagacactgcccttcatcattccatgctgttagacatttacaggaccatggatggtgatctcctccagacaaaaataaatgctggtgcagaata

SEQ ID NO: 532502 - DNA, 469 bp, Homo sapiens
cacttccgatcagcggtcctgaacccgctcccagggcacgggaactccttcgtggygaagcagcaagtggcgaagcagcagcctctgcgctgcctcatctacatagaagtcgccctgtccgtgatgtcaccgacagtgccttgcccagtccccgtctgcctttctgccactcaaccgaccaatctgctgccagagccgccaaggggaagtgacgtctgcctctccctttttccctcccgcccctgcgtctgttctctcccaaagaagctggtccttagcctgtgttaaggagcaacctttcggtggccagatggagccggggcatccttcttcaaataatggcttttaattcgcagactagaatgtttcggattacaaaagaaaccgtttctcttcacatccttatccttgtgatgcagcattccgcttgcaattggaagccgtttaatatcagagagaaaccatattt

SEQ ID NO: 532503 - DNA, 577 bp, Homo sapiens
tgtgacttgttggcaggcaaagattagcctaccaacaagcaggacacagaaaaaatacatatataagaaagacatgataaatgagacttcatcaacattagccacaccttctcatcaaaagataccactaagaaagcgaaaaggcaagcwagccacagacagagagaaaatacccacaaaacgtatctgacctccacaccctgcaattataattatagtggtctggtacactgcacccagtttctgctggatggagtattttctgggtgtctctaatgagtaagagagggccccatgggatattccttcagttcccagatgaacagtgggaaagactccacattgaccaacctcgggggcctgaaaacccaggtcctcaaggagggtagagtatacctggaccctgacccagacccctggatgggctgtgccaagagacccagcaagggaagggatttcctcctgcctcaggttctctgttcttctgtggttagaccacctgaacccaactccctccccaagcactagagatgggcttttccaagggctggggatcttgctgtcctgaggacagctg

SEQ ID NO: 532504 - DNA, 577 bp, Homo sapiens
tgtgacttgttggcaggcaaagattagcctaccaacaagcaggacacagaaaaaatacatatataagaaagacatgataaatgagacttcatcaacattagccacaccttctcatcaaaagataccactaagaaagcgaaaaggcaagctagccacagacagagagaaaatacccacaaaacgtatctgacctccacaycctgcaattataattatagtggtctggtacactgcacccagtttctgctggatggagtattttctgggtgtctctaatgagtaagagagggccccatgggatattccttcagttcccagatgaacagtgggaaagactccacattgaccaacctcgggggcctgaaaacccaggtcctcaaggagggtagagtatacctggaccctgacccagacccctggatgggctgtgccaagagacccagcaagggaagggatttcctcctgcctcaggttctctgttcttctgtggttagaccacctgaacccaactccctccccaagcactagagatgggcttttccaagggctggggatcttgctgtcctgaggacagctg

SEQ ID NO: 532505 - DNA, 563 bp, Homo sapiens
ttggaagtacaatatcttgactccttatttagtgctttatgctgaactttcttttctgaatatgagcacagacttcggaatattaatgtcacctagcgttcttagctagtattctccttttgttttcccataacatcccctccttcttcccacagatccactgtccactcatttccatcctgtctcatgccactcggggctcgtccctcctagaatgcatccctggctcccctgcgtgcacacttctagttaggtttagcaatggagggcccccgatggatcctggaagtgagaggaaggtgaggtccgtatttcttccctgtccctccctgctctggcactgagtatctggcaatagctgcatctgtctattacttcagtggccactcttccacagccccagttctcagtgggtcccataacattatttacctttgttcctttagctcccatcaaggaagatccagagacattctcctcaccaaggcgttaagaaatgcacaggtgaggggaasagcggcatgcgtttaaaagtcctgtggcgcccatcctctgcaggctgg

SEQ ID NO: 532506 - DNA, 451 bp, Homo sapiens
ctaagagtgtctattgccatgtttctgctaaacacattgctatctcattaagacaacaacrgaattacctattaaaaattataaatttttaaacaagttatatcactccaggtataagataataggttttactgtggaagtggcactgggctaataaaaaataggtaactatcaacttgttataattatattccttggggaggattacttaaaaagaatgtcctggatcctaggagccttttttttttttttttttttttttttggtaaataagatctcactgtcacccaggctgaagtgcagtggcataatcacggctcacatgcaacctcgacctcctgggctcaagcaatcctccagcctcagcctcccgagtagctaggattacaggtatatgacaccatgcccggttaattttttgagaaggagtttcaccatgttccccaggctg

SEQ ID NO: 532507 - DNA, 579 bp, Homo sapiens
ttcaccaaagtaactttctctgttgttaccaataattgtactgaagagcagaagtgatttgcttcaattttacaaaggaacctcagagtgtttgtatcagtcaaaatatctactgtaacaaaaatacctaaaatgtgtaatggttctaatattgtaaagtttatttccatttcatataaagttaaaaaatatcttgtatataattgacagggttggcctctcctacaagcagtgactcaagcatctatgttccttcaattttatggagcctccattttaaacatatggcttccaagggtgtactggcagaaggtagataaagtgatggtaaatattacttttgtttatcttccagtttttgcaggcaatagttttaccaaatgctttgccactgcatgccaagaatctccatctttcgatcctcagacattaatttcttattatttactgcctggccacaagtgacacatrttttagatttttctcatagcagtagtccattttgatgcatgactttcagtattgattgtgatagaatagttgctcttattaaataaaccttaaaattgccatggttta

SEQ ID NO: 532508 - DNA, 655 bp, Homo sapiens
aaaaacaaattatgttactccattttgtccatttaaaaggcagacaagccagaccctgaaggctgatgaaaatagccaaattcaacatataatgacatcaatgatttaatcctttcattaccaagagtatcaaagaccattcacattagtagacaaaatcttaaaaaactggaggtggacctagaatttatattatactatatgatcaagctgtttccaaaaaccaaagctcattgtctaaaaattgaacatggagyctgttaaaattgttccttgtgagtcttggttgaaagaaatggtggaggtaactaaatgaactggcttatactcaaaaggcttaagccattatggtccactaggtaaaatatataaaaatgccaaatagttaatgtcactattaggaccaacaattgttggttaaagctgcattgtcagcaatgaagaatgtaattttagaaatataatgaaaactcttctatgataattcataaaaataatgtatatggaataagatgatgtgggaaaggggtacagtattccaaaataacacttgatcccaggtagtactgtttgatatttcttcccacaaatcctcagtgttggaggtggggcctaatgggaagtgtctgggtcatggctgtagatccttcatgaa

SEQ ID NO: 532509 - DNA, 554 bp, Homo sapiens
ctgtgctctctttagataatattccctcactgaaaggttagtctcaatagaatttttatgattaaagcacaaatgtggtatttatgaggactaggatttgtgtttctggcaacccgagtgtcctcaaaagcattgcagccctgtcctcatttcacaagtcctataatgttttgcagaccaccgtgtcctctatacttaaatccktctcatagactaacaagtggcaagccttcactcttacacatattataatctttgtgggatgcactaaagacttctgtgtgatgaattgtcatctccctcaacctcaaaggtaactggctataaaactgttttatgttgctagtattcctagtcctcgtgtaaaaatactagctgtaattcagtgttggcaatgtggtattattcataaagcattcagactgtacagttttagaatgtcatcggaacttcctgattgaattacaatctagcattcagctaagtgtccttttttatgcatgaaaattactcacaagcatttcccaacatctccagggcctacatgggagttc

SEQ ID NO: 532510 - DNA, 554 bp, Homo sapiens
ctgtgctctctttagataatattccctcactgaaaggttagtctcaatagaatttttatgattaaagcacaaatgtggtatttatgaggactaggatttgtgtttctggcaacccgagtgtcctcaaaagcattgcagccctgtcctcatttcacaagtcctataatgttttgcagaccaccgtgtcctctatacttaaatccttctcatagactaacaagtggcaagccttcactcttacacatattataatctttgtgggatgcactaaagacttctgtgtgatgaattgtcatctccctcaacctcaaaggtaactggctataaaactgttttatgttsctagtattcctagtcctcgtgtaaaaatactagctgtaattcagtgttggcaatgtggtattattcataaagcattcagactgtacagttttagaatgtcatcggaacttcctgattgaattacaatctagcattcagctaagtgtccttttttatgcatgaaaattactcacaagcatttcccaacatctccagggcctacatgggagttc

SEQ ID NO: 532511 - DNA, 554 bp, Homo sapiens
ctgtgctctctttagataatattccctcactgaaaggttagtctcaatagaatttttatgattaaagcacaaatgtggtatttatgaggactaggatttgtgtttctggcaacccgagtgtcctcaaaagcattgcagccctgtcctcatttcacaagtcctataatgttttgcagaccaccgtgtcctctatacttaaatccttctcatagactaacaagtggcaagccttcactcttacacatattataatctttgtgggatgcactaaagacttctgtgtgatgaattgtcatctccctcaacctcaaaggtaactggctataaaactgttttatgttgctagtattcctagtcctcgtgtaaaaatactagctgtaattcagtgttggcaatgtggtattattcataaagcattcagactgtacagttttagaatgtcatcrgaacttcctgattgaattacaatctagcattcagctaagtgtccttttttatgcatgaaaattactcacaagcatttcccaacatctccagggcctacatgggagttc

SEQ ID NO: 532512 - DNA, 647 bp, Homo sapiens
tttctaaaatagaaaacccaatttttaattctctgagataaatctgtttaatcattcccatctgaaaaaaaagaaataaagtcaatgataaaaaaaatcaaaatatcaccattattacattattattaatgaaggcagaggatatagcttagttgtgcagctaaatagatgtgctatctgaatcagtatttgacaggcttaccttgcccactaggcaatgctaaatcagagtagaccatttcacctgagaagtattaatagaaggatggagtatctaaatcatggacatggagaagcacaggtgaatgttcattacctgaggctgctcattcccatgacaaagaaaggtagagctgacctaagtaagcatccccagttcattttgcataatttattaatgataaatcactctactttctctggatagaatgaataaagaggtggayagaggccatgaattacatgaattgaacctgcattataaaaaagagggccagtgctcactctcagtgaaagatctctcaaaatgtctgtgcagtgggatgttagaattgctctactgtgcatttcccaattgttccttttccaagtgggaaagtttactgtaattatccaataccatcattgtatatttgatgtgcaaaaga

SEQ ID NO: 532513 - DNA, 490 bp, Homo sapiens
aatatacttctatattttaactcaatcatttctatttcaaaccaaaattaatccttggtatgactcaaatattccaaatacggaggtaaattataagaatataagactttctttcaaacagaaagaaatgtcatcattttaaatggcatacatgagaaattgacttctgcgaaggatacaacacacccacagttaatatttctgttggttagttgctttggaagaaaagcactcatcaacattattttccaaaagaacgaaacccaagaaaagttggtaaacackaaaatattttaggaaaggaacttcgcaaacttggtttcacattttaggaggcaaacattcaaccctaggaagcattaaattgagatttggctatacatatccacttcttaatttaaacgtggagaaaacactaattttaagcttatctgttctacttcatgatctccaatttttcaggttgctacttaattgtaaagttgaactg

SEQ ID NO: 532514 - DNA, 604 bp, Homo sapiens
ctcctggggatccggcagctgagtgggctggacatggagttgtcagcagccacaggagggcagcacagccccaggaacagtcgtatgtgtgatagagtgtgtgagagcatgtatgtgtgtatgtgtgggagcatgcktgtgtggtgtgtgtgtgagcatgggtgcgtgtgtgcgtgtgtgagcatgcgtgtgtgtgtgcgagcatgggtgtgtgtgtatgtgtgcgtgtgtgtgagcatgtatgtgtgtgcatgtatgtgtgtgtgtgagagagcatgtgtgcgtgtgtatgcgtgtgaccatgcctgcgtgcgtatgtgtgtcagcatgtgtgcaagcatgggtgcatatgtgtgcatgtgtgatcatgcatgcaggtgtgtgtgtgatcatttgtgcatgtgtatgtgtgagcacgtgcgtgtgttagcacgtgtgtgagcatgcgggagtctgtgagcatgcgtgcgtgtgtgtgtaagcatgtgtgtatgtatgtgtgcgagcatgtgtgtgagcatgcatgcgtgtgtatatgtgtgagcatgcatgcgtgtatgtatgtgagcatgtgtgcatgtgtgcgtgtgcgagcatgcggtag

SEQ ID NO: 532515 - DNA, 604 bp, Homo sapiens
ctcctggggatccggcagctgagtgggctggacatggagttgtcagcagccacaggagggcagcacagccccaggaacagtcgtatgtgtgatagagtgtgtgagagcatgtatgtgtgtatgtgtgggagcatgcttgtgtggtgtgtgtgtgagcatgggtgcgtgtgtgcgtgtgtgagcatgcgtgtgtgtgtgcgagcatgggygtgtgtgtatgtgtgcgtgtgtgtgagcatgtatgtgtgtgcatgtatgtgtgtgtgtgagagagcatgtgtgcgtgtgtatgcgtgtgaccatgcctgcgtgcgtatgtgtgtcagcatgtgtgcaagcatgggtgcatatgtgtgcatgtgtgatcatgcatgcaggtgtgtgtgtgatcatttgtgcatgtgtatgtgtgagcacgtgcgtgtgttagcacgtgtgtgagcatgcgggagtctgtgagcatgcgtgcgtgtgtgtgtaagcatgtgtgtatgtatgtgtgcgagcatgtgtgtgagcatgcatgcgtgtgtatatgtgtgagcatgcatgcgtgtatgtatgtgagcatgtgtgcatgtgtgcgtgtgcgagcatgcggtag

SEQ ID NO: 532516 - DNA, 604 bp, Homo sapiens
ctcctggggatccggcagctgagtgggctggacatggagttgtcagcagccacaggagggcagcacagccccaggaacagtcgtatgtgtgatagagtgtgtgagagcatgtatgtgtgtatgtgtgggagcatgcttgtgtggtgtgtgtgtgagcatgggtgcgtgtgtgcgtgtgtgagcatgcgtgtgtgtgtgcgagcatgggtgtgtgtgtatgtgtgcgtgtgtgtgagcatgtatgtgtgtgcatgtatgtgtgtgtgtgagagagcatgtgtgcgtgtgtatgcgtgtgaccatgcctgcgtgcgtatgtgtgtcagcatgtgtgcaagcatgggtgcatatgtgtgcatgtgtgatcatgcatgcaggtgtgtgtgtgatcatttgtgcatgtgtatgtgtgagcacgtgcgtgtgttagcacgtgtgtgagcatgcrggagtctgtgagcatgcgtgcgtgtgtgtgtaagcatgtgtgtatgtatgtgtgcgagcatgtgtgtgagcatgcatgcgtgtgtatatgtgtgagcatgcatgcgtgtatgtatgtgagcatgtgtgcatgtgtgcgtgtgcgagcatgcggtag

SEQ ID NO: 532517 - DNA, 516 bp, Homo sapiens
ctgtcctgggaatggtttccaggccccaggcctttgggatgcagcaatgacaccggctgtgggggtcgcagccccaaaggggagggaagagtcagtggctcctggggagtcccgcagatgctccctccacattccccgaacctccgtccctctccaatctatgtggctcacccttcccacccgctcggctgctgcgagcccgcgaggcccttgaggccaggcacagggctggacgtggcaggtgcccatgaacaaggagggatgaagactgaggcaggatggggcgggttgtcagggrtctgatcaggggagggtggaacccctccaccaacaccgtgtgctgacactggagtgaggcctatgcctctggatggggaaggtgggggacaaggacctgagcccccaagggccagcgggtcccaaggagcacagagccctggggtggggacaagggacccctgccttcggctgagtccctggaccccgaccccggaagcaccaggcctggggcgcagc

SEQ ID NO: 532518 - DNA, 479 bp, Homo sapiens
acttagtgtggctcttggaagcacccctgaggaccagggtgcatattgatgccatctatttgggaaggcaggcggcacacgatgggggtggatggaggacgggaggtaaccagcacgtgtgctgccggctcccagcgtgggtcagggctctgtcccccgggttgggaaatggtgcagaacttggagcagcctcgcagggcccctggctgccccagatggtgccaactctggcccgagaaccaagtgggtgagggcacaggtatcaccagcagatgacaccttgatggagatggcagaggtccaaggggacacagtagggggcatcgcactgtggaggggggcaccgcactgtggaggggggcatcgcgtggtggggggagcactgaacagtgtggggggatcacactggatgagagggcatcgcgtggtggsgggagcactgaacagtgtggggggatcacagtggatgagagggcatc

SEQ ID NO: 532519 - DNA, 579 bp, Homo sapiens
taaagaccccatttccacagaaagttacatttacacattccagggggacttatcttttggggggcaccatttaacccactgcagtatcaaaatcaaggtgcagggcagcacgtgcagtgtggtaccattttcatttttgtcatttagctctgtgtgtgtgtgtgcacatgggtgtgtgcccgcgtgcgtgtgtgtgtgtgtgtgtcaatctccctgtgttccttccatgtataggtgattgaacctctcttgctattttttttttttttatccgagacagagtttcacttttgtcacccaggctggagtgcagtggcacgatctcggctcactgcaacctccacctcccaggttcaagcaattctcctgcctcagcctcctgagtagctgggactacaggcgcgcaccaccatgcccggctaattttttgtatttttagtagagatggagtttcaccatgttggccaggctggtctcgawcccctgacctcaggtggtccacccgccttggcctccgaaagtgctgggattacagacgtgagccaccatatccagccctctcttgctatttgcaaaggt

SEQ ID NO: 532520 - DNA, 578 bp, Homo sapiens
tgcaaagtcaaacagaccatgagttctcaccagtgggcatggcaggaccctcagcctcctcatctgtgcaatgggacaatggtagcgcccgcccacaggagtcacgctgcraaatcatgctcacagcactcggtaaaccatgggagagggcctcggagaagatccagcgtggcgatgaaacgtaagttaaaggaatgtgtttagtggtccgttcgcgatgtcttgttagcctctcgtgatgcattgtcgccagctcgtgatgtgttgttagccgcttgtgatgtattgttcgatgaaaaaagcagtttgcaaagaatgattaaatgacattcccgtgagcttccctgattcctacccggcattccaaagggtgaggcagcaccttggccagctcaccttcaacagcacccctggaatgggcccagagccaggccctaagcccccgatacttgcttgggggggctgaatgaaggggatgaatgaatgaatcaatgaagactggccccagttttgtgaacaagatgaaaaaacacactggggagatgctccccctgataccaacaggctggaattactgg

SEQ ID NO: 532521 - DNA, 523 bp, Homo sapiens
ctggggccatccctgggcctgttgggctgctcagccccctcccagtccccaggccctcactgcctttggccactgtaggtttgcgtggccactggcaatctgggcccagcctcctggcgggagtgcctgatgaagagcgggggccaccaccccttcccgtcccagccagaggcccccagccctcctcacaagacccccaggagtgtcccgggcctgccctcrtgttggggtggggctcacaaggcttagcggccagccaggccgcagggcagcattcctggaagcccggtggagtcgcccggctgagaggaaaagcccagtctctgtccccgcctgcaccaggtaggacctgtgcctgagcccagggcgtggtaggatcctctctccctgtggttgcagtacccacggagctcctcagcaccaccccgtcttcatcgcctcctttcagggcgtcttcatcgcctcctttcagggaggcaccctccctgcctccccttcacgctgatgccagcaggagccctgg

SEQ ID NO: 532522 - DNA, 523 bp, Homo sapiens
ctggggccatccctgggcctgttgggctgctcagccccctcccagtccccaggccctcactgcctttggccactgtaggtttgcgtggccactggcaatctgggcccagcctcctggcgggagtgcctgatgaagagcgggggccaccaccccttcccgtcccagccagaggcccccagccctcctcacaagacccccaggagtgtcccgggcctgccctcatgttggggtggggctcacaaggcttagcggccagccaggccgcagggcagcattcctggaagcccggtggagtcgcccggctgrgaggaaaagcccagtctctgtccccgcctgcaccaggtaggacctgtgcctgagcccagggcgtggtaggatcctctctccctgtggttgcagtacccacggagctcctcagcaccaccccgtcttcatcgcctcctttcagggcgtcttcatcgcctcctttcagggaggcaccctccctgcctccccttcacgctgatgccagcaggagccctgg

SEQ ID NO: 532523 - DNA, 410 bp, Homo sapiens
aggactcctgcccaagtttgccaggctggggcctcagggcacctcggtgatgccctagggacaaccctgagttgggtactgagggaatctggatggagcccacccctcagagcgggagtgggcgagagacgagaaagggaaggccccaaagccagggtcgaatggagtcagcggccgagggggcaggtgggcgggcggggttgggcggggttggtcgggctcccagaggagggagctcgaagggccacrggactcctgcggccgggggcacagcctccctagctgcagagtacctcatcctcatcccgggtccacccgccccagtgctggcaggtggctgcggggccagcggggatgggacctggcctgcctcatctcatggttccagtgtctgtcagcagtgagttttg

SEQ ID NO: 532524 - DNA, 417 bp, Homo sapiens
ccaggtttggggaatgggaaagtgggcccatgacaccagtgttttgcggccctgtggcagggttttaacccagacaccagggagctgcagcaatctgtaccccaaagcacagcgctctggcccagggagacctcagtcccagacccctgtgggccaggctgtgcctactcccyggtgccactgagaagaagcaacaggcccccaattttcccagcacggtgttcctcccaccctcccaaagtcctctgcaggagcaagaagcttctcccagagccccgaatgggtgagaggcaaagtccgagccgggagcgcagtggcggggaagggggttatacattctgggaagccacgcataattaatcacacggcattaatccgcctcccccaacaatagctgctgcacttcccctggatccc

SEQ ID NO: 532525 - DNA, 578 bp, Homo sapiens
cataacccccctcttcagatgaggaatgcgaggttcaaggttcagcaaagttaastgacttccccaaggccacacagcagggaagccagaacaggcctgagcccccctcggaaccctgcttcggagctggcagagtcgtgctggggcggcgcgggcccccagtaggactctaggagctcatcctgaggctccctccctcccccgggctccgcagtcccctcaacccctcagcagggctgggagcttgctccggcctcccccagcaggaagctcagagcagccactgtccccaggcttcccccaccagcttgcccagcccagtccctgtcctgtgccaaacaccctgcctcactcaaactcccctcccaccaaccacaggcggacgaggggctgccctgtcctttcctcaaagcctggggcaggtgtcgctgtgccagaccaggacacagtcacacggaccccaaatccaggtcctggactccttgcctccccggggagcaggggcaaagccaaggttgccggaagcctggagctcagggagccctgctggccactgccaggcgggtgacttgtgccag

SEQ ID NO: 532526 - DNA, 546 bp, Homo sapiens
ccgctctgggctttgctttcctctgtcgaatggatgtaccagggcatcggcccctggtgaggaaacgtcccctgcagctccaccgtaactgcgcacacagggaagggctcaggggacaccccctgcctggaaggggtccrtggtctcagccccaagcccggtgggaacgaaggctgcctcagaggttctagtcccatcactgtccctcacacgctcagaactacggtgtagacggtgggggtctcttgggtgccgcctggaaccccgtggggaggggctgggcctcagccagggcagccattgctcaggggcaagatggagcgcccctcccagagctcaggcctgccgcagggctgcctcaccagccccaagcgctgggctgggaacaagggaaagggaaaagcaggtactctggagtcactgtcagtgggttcgaaccccagttccaccccatcctggcttggggaccctgccccagtttcaagttgcttatctcagcctcagtgtccttatttgtaacacagagcacacgcgaatccctgttcc

SEQ ID NO: 532527 - DNA, 605 bp, Homo sapiens
gcttgaccttatagagtagctaattatacaggaaaaagcgcaaagcatcatgtaagagaattacattggagttattcctgccccgagttatcacatccattgccagtcagagtggctttggataagagatcaagatttcaagacatttttaggacatacctgtgaccttagcatagcaaaggtaaaacttgaagatgtttcatctattaacatcacttaaacattttttctgagtaagggaaaagaagtagaaaagagatgtgaagatacttcactttaaatattcactgttctttgaaattatctgcttaatttttttccttttaatcaaaatcttggagacctttatatttaagggtattctattgtcaatcttcttgtagagtgaagagttacctcctaattcattgggtttaaaaagtctatattctctwacactgtttttgcttaaagtaggagttaccactatacataattttaaaaaattgcttctgattttattacttgttcccactgtcctgtaactttgctcccagtgcaaacaatcttgagaatattcaacactagatgctgctgctgcttctggaaaaatggaccattctctt

SEQ ID NO: 532528 - DNA, 589 bp, Homo sapiens
aatgaagggcatgatatgggtgggagagatgattcttcctctaaaaatcaggttcccaaaatataacagttaacaatctcctaataattctgagtgagktgagacagttcattataattttatttgaatagaggaaattgcttttagatttctgtttttctcatctgccatttctgctattgcctaactaatgaaagcagttttttgcaagtatgcaagacacaactctgggtcatgttaggctctgattaaccacagtagtgtccatagtcagtggcttcatctttgaatatgagaatactattcggaaaaaaaaagaaatgaaaggagaacacagatatacagaaagaatacagtgtgtttgtgggtgggttaaagcatgccttttcatgcagacacacagaaagaactctctaactcaattgctgtgaacccctgaaaggggtaaataaaatttcgaaaaatgaaagtatgttttaaatgcactctaggtggtaaaaagacacttatttagagacgtaatcatcccttaactaattttcttgaactgctttggttttcacaacttagatattctcaaaacaagaga

SEQ ID NO: 532529 - DNA, 602 bp, Homo sapiens
tcagattgggcagaatgaagggcatgatatgggtgggagagatgattcttcctctaaaaatcaggttcccaaaatataacagttaacaatctcctaataattctgagtgagttgagacagttcattataattttatttgaatagaggaaattgcttttagatttctgtttttctcatctgccatttctgctattgcctaactaatgaaagcagttttttgcaagtatgcaagacacaactctgggtcatgttaggctstgattaaccacagtagtgtccatagtcagtggcttcatctttgaatatgagaatactattcggaaaaaaaaagaaatgaaaggagaacacagatatacagaaagaatacagtgtgtttgtgggtgggttaaagcatgccttttcatgcagacacacagaaagaactctctaactcaattgctgtgaacccctgaaaggggtaaataaaatttcgaaaaatgaaagtatgttttaaatgcactctaggtggtaaaaagacacttatttagagacgtaatcatcccttaactaattttcttgaactgctttggttttcacaacttagatattctcaaaacaagaga

SEQ ID NO: 532530 - DNA, 602 bp, Homo sapiens
tcagattgggcagaatgaagggcatgatatgggtgggagagatgattcttcctctaaaaatcaggttcccaaaatataacagttaacaatctcctaataattctgagtgagttgagacagttcattataattttatttgaatagaggaaattgcttttagatttctgtttttctcatctgccatttctgctattgcctaactaatgaaagcagttttttgcaagtatgcaagacacaactctgggtcatgttaggctctgattaaccacagtagtgtccatagtcagtggcttcatctttgaatatgagaatactattcggaaaaaaaaagaaatgaaaggagaacacagatatacagaaagaatacagtgtgtytgtgggtgggttaaagcatgccttttcatgcagacacacagaaagaactctctaactcaattgctgtgaacccctgaaaggggtaaataaaatttcgaaaaatgaaagtatgttttaaatgcactctaggtggtaaaaagacacttatttagagacgtaatcatcccttaactaattttcttgaactgctttggttttcacaacttagatattctcaaaacaagaga

SEQ ID NO: 532531 - DNA, 589 bp, Homo sapiens
aatgaagggcatgatatgggtgggagagatgattcttcctctaaaaatcaggttcccaaaatataacagttaacaatctcctaataattctgagtgagttgagacagttcattataattttatttgaatagaggaaattgcttttagatttctgtttttctcatctgccatttctgctattgcctaactaatgaaagcagttttttgcaagtatgcaagacacaactctgggtcatgttaggctctgattaaccacagtagtgtccatagtcagtggcttcatctttgaatatgagaatactattcggaaaaaaaaagaaatgaaaggagaacacagatatacagaaagaatacagtgtgtttgtgggtgggttaaagcatgccttttcatgcagacacacagaaagaactctctaactcaattgctgtgaacccctgaaaggggtaaataaaatttcgaaaaatgaaastatgttttaaatgcactctaggtggtaaaaagacacttatttagagacgtaatcatcccttaactaattttcttgaactgctttggttttcacaacttagatattctcaaaacaagaga

SEQ ID NO: 532532 - DNA, 554 bp, Homo sapiens
aacaaatctcctttgaaaccccacggatatcttgtattatgcaaaggcacataaaacgaagactttgattcagagtcaatttcctggtctttgtacatgttgtgtatcactggtcagcctgtctctagaccagccacaccccttaccttttgtaattgatcatagctcagttactatcccacacttttacagccaatctgggtataaataggaataagtcaatctcaacaggaaaaaaaaagctatcttggaggctttgccatattttayaaatttgtgtttaatgaattcaaatatgttttggtttagcactgacttaagaaaggcaatgtggaccaaaatggaacaacttgatcaaaatcttctatttcatgtaaacaatttagaatgccaaataagctcctctcagatagattgttaaaataatatagcaaatgtttccttcgtttcacttatgataacttagtaactctcttccaatatctatctctgacaggaatgtctatttgtcccacaacatccaacctcaccttcctccatagaaataaaaattt

SEQ ID NO: 532533 - DNA, 573 bp, Homo sapiens
tcacttctcggggccaccactataaaataggaagcttgagctaaacccagcctggttttgcaaacctggctaatgagttttttactgggtgacttttaaaaccagcaatatgcatagtgctactatgtgccaggttttatgtcaagcacataataagtatttatcatttaatcctctcagttactctaagaaataggtactataaacccactttaagttgaagaaaatgagaccaaaagtcacacagttagttaagtggacgtttgaacccagcaatctgggcccagygtccatgctcttaactattatttggactcagaaatttatccttgaaaagctacccaagtgatttacctgatcaatttgactagtctgcctcacagtttttttccagatcttaattctatgattttgttttatcatttctttatgattccttgtcatatcaattccttggggtaataatgttcaatatttgactgggccccttaggagaaatcccagtgagaagccagattgtgaaagatagaagtatttccaaacatcatcttggatcatctttcctcagcacaa

SEQ ID NO: 532534 - DNA, 582 bp, Homo sapiens
aagaaaagtattgggaattggtggaaagctatttaaaaatacttaagacaaagcgtaatttaaaatgcttaggacatataaacttcatttggaggaaaatcaagcattaaacaaaaatactttcttacttcagcccttgttattgaaaatccttctaaattgcttatttattccactttcttgcttcagtgagtaaagaactttgaatctatgttaatcattctttcacagccatggatctggtcttgttttgggcaacatggacacacggaacatgatcatgaaaccacagttacataacatcartctgagagggatccagggagataatgttgtaatcccctatgttatcaaagggaaaagagaattctagagaggcaaaggacttgcatcagatctagcgagagccagacacagctttccctcttcccatgctggattccttccaccattcatattacacatctgcgcagtcacatacagtggggctggatctacatttatgtaacgtaagtgccacatgcaattcttttctgggcagtaatgcaaaaaggataatgcaaacagatacttgcttgaaag

SEQ ID NO: 532535 - DNA, 582 bp, Homo sapiens
aagaaaagtattgggaattggtggaaagctatttaaaaatacttaagacaaagcgtaatttaaaatgcttaggacatataaacttcatttggaggaaaatcaagcattaaacaaaaatactttcttacttcagcccttgttattgaaaatccttctaaattgcttatttattccactttcttgcttcagtgagtaaagaactttgaatctatgttaatcattctttcacagccatggatctggtcttgttttgggcaacatggacacacggaacatgatcatgaaaccacagttacataacatcaatctgagagggatccagggagataatgttgtaatcccctatgttatcmaagggaaaagagaattctagagaggcaaaggacttgcatcagatctagcgagagccagacacagctttccctcttcccatgctggattccttccaccattcatattacacatctgcgcagtcacatacagtggggctggatctacatttatgtaacgtaagtgccacatgcaattcttttctgggcagtaatgcaaaaaggataatgcaaacagatacttgcttgaaag

SEQ ID NO: 532536 - DNA, 582 bp, Homo sapiens
aagaaaagtattgggaattggtggaaagctatttaaaaatacttaagacaaagcgtaatttaaaatgcttaggacatataaacttcatttggaggaaaatcaagcattaaacaaaaatactttcttacttcagcccttgttattgaaaatccttctaaattgcttatttattccactttcttgcttcagtgagtaaagaactttgaatctatgttaatcattctttcacagccatggatctggtcttgttttgggcaacatggacacacggaacatgatcatgaaaccacagttacataacatcaatctgagagggatccagggagataatgttgtaatcccctatgttatcaaagggaaaagagaattctagagaggcaaaggacttgcatcagatctagcgagagccagacacagctttccctcttcccatgctggattycttccaccattcatattacacatctgcgcagtcacatacagtggggctggatctacatttatgtaacgtaagtgccacatgcaattcttttctgggcagtaatgcaaaaaggataatgcaaacagatacttgcttgaaag

SEQ ID NO: 532537 - DNA, 558 bp, Homo sapiens
tgacagagggagactctgtctcaaataataataataataataataataatgggaaaattattaatactacctaccttattggttgtgaggattaaaactagtggcattcaacaggtattcatttcacataaaagattccacttaccagcawaatgaatggcataagtcaggtacttgataaatgtttttattcatttgttttgacttttttatgaatggagagattaatgaattcacactgaagcaccttaggtttgaacagtaagtcaatgagtgccatgctcacctgatgccagcaggcagcatggttcagagcagagactccggtgccagattgcctgcaggaaatcttgggccttccaagctccctgtgagcagtctgtgcctcagttccctcatctgttcagtgtggctggtgttaggaacccttctcctgtgggtggagagaggatggatgaagtcatgtgcatcaggcatgtgtttttgatgttttctggaatgtaggaaccaaagctgccccctccttccctcttcgtggctcctcccttcataatggaa

SEQ ID NO: 532538 - DNA, 528 bp, Homo sapiens
ctggtccttactgagacaagaacccgaagtgagagaacaacaaagaaatatgataaagagaaatgaaatgtttaatcgagtcccaaattgcttttctggatgcaacatcaactaaaatatgaaatggaaagggctgtgcttttaggcaggctgagacacgccttaaaatacaaagtgggctgcttaatgtgagcagaaggaggacttgaaaggcaccccatgaggaagctcgaccagtcttggcttcacttggcagrgccagtgagaccacaggaagtccagtggccagtgacaggcaggacatgtgacagccctgtgaacaaaagttctctgaaaaggaatttggggcaaagagactttattccagtgaacagtttgcaaactggagagatgcaggcttccctgtaaaacaaaagggcattccagagatcaaagggacggttcaggttttatagttgagaagttcccacccaggttcctaatcaggcccatttatgcaaatgaaggattcatagttgtttagttttg

SEQ ID NO: 532539 - DNA, 524 bp, Homo sapiens
gatgagcattggggggagtttgctctccayagttttcttgcagggaggggcgcatgccagggcttattgcccaagaggcaccagaggcagtcaatgtgcggggattttacaggtgctgggaagggacctccctctttatttcctcaaatatggcccacttgattgccctccaacacagttctgaagccatcactcctcccccttttgtatgtagggttgaccatggaatccacatgcagaatgcatttagggggtaagtagggagggtaggagttgctcagaaggacctgccatgctcagtgctttatgtacatgagctcacctagctcagcaacctgatgaggtcattatttttattcccattttataagtgagaaaactgaggctcaagaggtagagtaacttatccagcattaaagaacaaataagtttactatgtggggttcaaaccctggagcttctgatggcagagccaaccctcttcacaccgctctgcacaaactgacacatggccagcattgacc

SEQ ID NO: 532540 - DNA, 629 bp, Homo sapiens
agcatgggagaaaccacccctaagattcaatcacctcycaccaggtcccgccctcaacacgtggggattatgaagatcaaaattcaagatgagatttgggtggggacacattgcttaaccatatcatatggtatgggcacctcttgtttggtgcatgagtgattgtagttgaaagcctgccctgaacacatgaccataaagagtgatgactacatcactgcagtttagggtggctcagcaagattttatgtataacaaagagtgcttctactattaaaaaaaaaaaaaaaaaaaccctgcatcaaaacatgaaaagtgtgggcctttttttccaggttattagtgccggagaaattgtttgaatgagtaaatgattaaacgcatgggctctggatacagaaatattgcctggagaatagcaaggagtccatggccatggtgaaatattcagaggagaaacacacacttccaggaaagaggtctaagcaactttgccctgtggccttttcatcagcaccttaccaactggtacatacctgcatcccacatccaataatatcctcatcgttcaccagtaagcacagaatatctagccaaactcatgactactgagctttaagaatttgaaa

SEQ ID NO: 532541 - DNA, 629 bp, Homo sapiens
agcatgggagaaaccacccctaagattcaatcacctcccaccaggtcccgccctcaacacgtggggattatgaagatcaaaattcaagatgagatttgggtggggacacattgcttaaccatatcatatggtatgggcacctcttgtttggtgcatgagtgattgtagttgaaagcctgccctgaacacaygaccataaagagtgatgactacatcactgcagtttagggtggctcagcaagattttatgtataacaaagagtgcttctactattaaaaaaaaaaaaaaaaaaaccctgcatcaaaacatgaaaagtgtgggcctttttttccaggttattagtgccggagaaattgtttgaatgagtaaatgattaaacgcatgggctctggatacagaaatattgcctggagaatagcaaggagtccatggccatggtgaaatattcagaggagaaacacacacttccaggaaagaggtctaagcaactttgccctgtggccttttcatcagcaccttaccaactggtacatacctgcatcccacatccaataatatcctcatcgttcaccagtaagcacagaatatctagccaaactcatgactactgagctttaagaatttgaaa

SEQ ID NO: 532542 - DNA, 650 bp, Homo sapiens
tttgttcctctagtcatctattcatttaaacattcaacatttattacatgcctactattttcaggytctatataaatgtatctaaatcccaaaggcagaagttattaaattattttagcagataatacacagtacctctttttgaaatatagtattttcctcggcaagtaacataaaatttatcaccaaaattatatcaaatctattcatttctttccatttctgctagcattactctagactaaagtactagtgtctcctataataggctgataatttgtcttactattaaccttttgcagtcctcattttccatgcctatttaaatccctacaaacttaaatgcattttctgcaaagcagccacagtagaaaacataagatttaattctagtcatgtcacttctcttcataaaactatttattgcctttctattgtacactttttgcacttacaaaacctataacacagtcttctagagttgaactcttgtgtctgtaaccctatcgcctttttaaaggcaacagcttttatttggttagtcatccccatacaactttgtatagtctcatttattttagatacttatcccacatgttttgattgaataaatgaaatacgttaaagcaatatataaatatattcaattc

SEQ ID NO: 532543 - DNA, 650 bp, Homo sapiens
tttgttcctctagtcatctattcatttaaacattcaacatttattacatgcctactattttcaggctctatataaatgtatctaaatcccaaaggcagaagttattaaattattttagcagataatacacagtacctctttttgaaatatagtattttcctcggcaagtaacataaawtttatcaccaaaattatatcaaatctattcatttctttccatttctgctagcattactctagactaaagtactagtgtctcctataataggctgataatttgtcttactattaaccttttgcagtcctcattttccatgcctatttaaatccctacaaacttaaatgcattttctgcaaagcagccacagtagaaaacataagatttaattctagtcatgtcacttctcttcataaaactatttattgcctttctattgtacactttttgcacttacaaaacctataacacagtcttctagagttgaactcttgtgtctgtaaccctatcgcctttttaaaggcaacagcttttatttggttagtcatccccatacaactttgtatagtctcatttattttagatacttatcccacatgttttgattgaataaatgaaatacgttaaagcaatatataaatatattcaattc

SEQ ID NO: 532544 - DNA, 594 bp, Homo sapiens
tttgttcctctagtcatctattcatttaaacattcaacatttattacatgcctactattttcaggctctatataaatgtatctaaatcccaaaggcagaagttattaaattattttagcagataatacacagtacctctttttgaaatatagtattttcctcggcaagtaacataaaatttatcaccaaaattatatcaaatctattcatttctttccatttctgctagcattactctagactaaagtactagtgtctcctataayaggctgataatttgtcttactattaaccttttgcagtcctcattttccatgcctatttaaatccctacaaacttaaatgcattttctgcaaagcagccacagtagaaaacataagatttaattctagtcatgtcacttctcttcataaaactatttattgcctttctattgtacactttttgcacttacaaaacctataacacagtcttctagagttgaactcttgtgtctgtaaccctatcgcctttttaaaggcaacagcttttatttggttagtcatccccatacaactttgtatagtctcatttattttagatacttatcccac

SEQ ID NO: 532545 - DNA, 594 bp, Homo sapiens
tttgttcctctagtcatctattcatttaaacattcaacatttattacatgcctactattttcaggctctatataaatgtatctaaatcccaaaggcagaagttattaaattattttagcagataatacacagtacctctttttgaaatatagtattttcctcggcaagtaacataaaatttatcaccaaaattatatcaaatctattcatttctttccatttctgctagcattactctagactaaagtactagtgtctcctataataggctgataatttgtcttactattaaccttttgcagtcctcattttccatgccyatttaaatccctacaaacttaaatgcattttctgcaaagcagccacagtagaaaacataagatttaattctagtcatgtcacttctcttcataaaactatttattgcctttctattgtacactttttgcacttacaaaacctataacacagtcttctagagttgaactcttgtgtctgtaaccctatcgcctttttaaaggcaacagcttttatttggttagtcatccccatacaactttgtatagtctcatttattttagatacttatcccac

SEQ ID NO: 532546 - DNA, 546 bp, Homo sapiens
catagtccaggggcacgggctcacgaaaaggccgacacctaatcatttgactataaaatgctgttgctccctccataccttaccaccacatcacttaatggcctgtttactgcgtttccttttagccagtacatcttgtctgaatttcaacaaaaaattacacagcatatgagaaagcaagaaaacacaatttgaagagactaaacaagcatcaaaatcagaatcagatatagaaggaatgttcrgattaatcagattaggaatgtaaaaagtaaaacctattataatatgctaagggcattaatgtgaaaagtagatgacgtgcaaaaagagatggaaaagggtaagcagagagatgcaaattatatgaatgaattgaaaggaagggttagagatcaaagcactgcaacagaaatgtagaatgtttcttgtaggctcagtagtagactggacatggctgaggatagaatctctgagcttgcagatataggaatggaaaatttcaaaactgaaaaacgactgacaaaaacaatattcaagaactgt

SEQ ID NO: 532547 - DNA, 536 bp, Homo sapiens
tgtcatacaaattagctgtgatcacttagaaatacgatagactcttgtattagagttagaaaaaagtaggaattttgttagccaaggaagtgttacaggaaaggactcccgatctagaccctaagagagggttcttggatcttgcacaataaagaattcagtgtgggtctgtggtgaaaagtaaaaccaagtttattaagaaagtaaaggaataaaagaatgactactccatagacagagcagcctgagggctgctggttgcccacttttatggttatttcttgatgatatgctaaacagggggggattattcatgcctcccgtttttggacaatatagagtaacttcctgacattgctatggcatttctaaactgtaatggtgctggtgggagtgtagcagtgaggacraccagaggtcactctcatggccattttggttttggtaagttttggccagctcctttactgcaatctgttttatcagcaaggtcttcgtgacctgtattttgtgctgacctcctatctcatcctgtg

SEQ ID NO: 532548 - DNA, 538 bp, Homo sapiens
gatataatgacatttctggggctagycctaaaacccattctacagtggcatgaaggacatgggttgaagatggtggcacaacaaaatggaagaatctgggatccctaaatcacaatgtaaaaggctgcctgccaaatttcctattggactgtaacgtcactgagaagtaaatcttttattgctttaagtcacttagaatgaggattgttctttgtagcagtaggcttatcctgagagcctgcttccacttttgcccctccccatgtcttctaatcagttcccctcacagctaccagaggaatttaactacaatacataactgatcacatcactatccaccactcctcacatccccccatatgaaaattcttaaataaatgctttccattgatcataggaaagttcaaaattcttaagatggcctataatgccctgcatggtctacaactgctgaactttcccctgatctgtccctatttattcactcatttaatcacttattcaataaatatttcttgagcaccaactgtcagtagct

SEQ ID NO: 532549 - DNA, 528 bp, Homo sapiens
gtggtcatgggtgccaactcaccttttgatggtaggagagtcaaagtcattccaaaggctatgggtataggaaggggtgaataactggccatgtttgcattccatctgtcacagttttccaccttgtcctgccatccagagcgtgcagcttcctgtgggctgaggcagcaggtagcagttggtagaacttcatcccagctttcctctagagcagaggaagcccttctctacctgctctgctccaaccctttgcttcaaatagtgagcttgactatagttctcttttgcattgattgtggctctggcccccgcctttacttgggcgtgctatgagtctctgttaccccagagaattctcaatgccaggcacctctgtctgtattgcactcagagcccatcaagcctgcagcctcatctccacttaccatgttgtggttttttcccccctgagaattttatttttgagtaatgctatgtctttaaattttctatttttgwatttcagctatcattgctgtgtgtttatta

SEQ ID NO: 532550 - DNA, 473 bp, Homo sapiens
tagaagcaggacttgaacccgggtctataggaccctaacactagtgcgctttctcccatggatgactatctacctgcctcctacrtgctccccaggccttcttcccctagcacagtcacccagcatctggcatcaccagggctgttagcattagggccctaacttggagaccaagctttctgagctctcctgccttgtttcgcataaccaagtttgtttctgaacagattgtgattgaggctttgagttaattcctagccaaggatttatttcggagagtattttaaaatttaatttctagttttcttataatttctagttttattgcattattttgagaatttggcaagtgcagtgtctgcttttggaatttattgagattttctttgtggcctattatacaatcaacttctgtacaagttccatggtggctggaaaaaagatgaaatctatagtcataagctatagaattc

SEQ ID NO: 532551 - DNA, 572 bp, Homo sapiens
cccctttcctaggcagggagaggcctcacattcttccgtgaatccaggggcagcaccaggcgtcaccccctgcgcaggcagtgtcgtgatgggcttggggaccccttagcaggctctcagccacggggtgggaggcgggccagaawtgagtcctggggctagacactgggaaggtgcattaggacttcagatgtagaggagctgggacctgggagcaggatgttgagatgggaacacagctgtgcccaaggctgcttgtgcagcctggaccccagaacccccttacaacctccaagtgtgggcgacactgtgcctgtgggatcagacctgagatgttggggtgttggggaaatcgcctctgggatgggcctctgaaaacaggtgcctgcagcagcttgtgatgcagagaggcggaaggacttatgccaggcttggagaattggagcccttgagtagagtccctcatcacagtgatgtgtgacagtagcccagctctcatctgtcaggtgggggagtgaccaccatgtccccagctggaggacaagcgaggcacataattaactccagctgag

SEQ ID NO: 532552 - DNA, 572 bp, Homo sapiens
cccctttcctaggcagggagaggcctcacattcttccgtgaatccaggggcagcaccaggcgtcaccccctgcgcaggcagtgtcgtgatgggcttggggaccccttagcaggctctcagccacggggtgggaggcgggccagaattgagtcctggggctagacactgggaaggtgcattaggrcttcagatgtagaggagctgggacctgggagcaggatgttgagatgggaacacagctgtgcccaaggctgcttgtgcagcctggaccccagaacccccttacaacctccaagtgtgggcgacactgtgcctgtgggatcagacctgagatgttggggtgttggggaaatcgcctctgggatgggcctctgaaaacaggtgcctgcagcagcttgtgatgcagagaggcggaaggacttatgccaggcttggagaattggagcccttgagtagagtccctcatcacagtgatgtgtgacagtagcccagctctcatctgtcaggtgggggagtgaccaccatgtccccagctggaggacaagcgaggcacataattaactccagctgag

SEQ ID NO: 532553 - DNA, 659 bp, Homo sapiens
gaagtcttggcagaatatctcagtgcaatttgaatattccttccttttttgcgtgacttttgtctctgccattgctcccacttctatcctgccctgtgttatggctttttgtttgaatcttctcttccctcctgaatggaaagctccctgatggccaagactgtatgtcactttttatgcgtcttcagcatctaccatgagacctggttcttcatcacccagggtgcgtttatgggatgaatgaatattctctaactccaggtccaaccctccattacaccatttactacatgttgctaaattatttccatgtctctcacccactccacattataaatcccatgagagcaaggacccagtcttacccatctcatcttcccctacctagctcaggcgcccagccaatgttgaaccaatgtgccccacaaatgtggaatggaaaggagtggcgatggcttggtggcacaygtagttggagtttggtatctcttaagagggcgatccagcccccacccccggagaagggctgccaacatgtgatatttgcacaaacctgcagaaaagagcacccctctcctgatcggcagcccgagtacactttgtgtttgtgaccctgacttttaaaaatgtcacacctgcatatgtggggaggcttactg

SEQ ID NO: 532554 - DNA, 613 bp, Homo sapiens
taccccaccaagagtgaaccctaatgtaaactctggagtctgggtgatgatgccctgtcaatgtagattcatcagttgtaacaaatgggccactctgacagggatggtgagaatgaggaggctgtgcctgtgtgggggcagggagcrtatgggaaatctctgtaccttactctcaattttgctatgaatttaaaatcctctaaaattagtctcttaaacaaacaaagcagaggcacaaagaggcaagtaattctcatgaccatgtccctgggagtggcaggatcagggtcaaaggccaggtctccataagctcacatcctagaatccaaaattctttgagctaggagggatcttagaggtcaactggcccaattctcttagcttacagaaagggaaactgagacccagagacagcaagtgattggcttacgggtacttaagcacttagttggttagctgcaacatagaattgagagcccaaagaataacttggtgaggatggttgggtagaccataagacttgaaaagggggagagacccaaatgtctctgcctccctctgctgtctttctaggcatcccctgcccactgccttcatctccaccccaagccct

SEQ ID NO: 532555 - DNA, 613 bp, Homo sapiens
taccccaccaagagtgaaccctaatgtaaactctggagtctgggtgatgatgccctgtcaatgtagattcatcagttgtaacaaatgggccactctgacagggatggtgagaatgaggaggctgtgcctgtgtgggggcagggagcgtatgggaaatctctgtaccttactctcaattttgctatgaatttaaaatcctctaaaattagtctcttaaacaaacaaagcagaggcacaaagaggcaagtaattctcatgaccatgtccctgggagtggcaggatcagggtcaaaggccaggtctccataagctcacatcctagaatccaaaattctttgagctaggagggatcttagaggtcaactggcccaattctcttagcttacagaaagggaaactgagacccagagacagcaagtgattggcttacgggtacttaagcacttagttggttagctgcaacatagaattgagagcccaaagaataacttggtgaggatggttgggtagaccataagacttgaaaagggggagagacccaaatgtctctgcctccctctgctgtctttctaggcaycccctgcccactgccttcatctccaccccaagccct

SEQ ID NO: 532556 - DNA, 632 bp, Homo sapiens
atacattgaattacaatgtataaaatgcatctttaagagtcttctttttgttcagttgccattaatgctgcgtttattctcctaacatcattagaaactgtatacatgaccttttagcactggaaagaagttaaaatgtaaaatgwaatataggatcacaaatcccaaagtgagaagagatcttagaagtgctctagtccaatgagaagacatgaagcggtgaatttctttgatcacatctcacatatgttacgatctaaggctacttggaacacctgtagtggcacaataatatcctaattagcctggggttctgcgattttctatacaagaagaagaggtattcttttaaaacttaattcatcattccttggctcaaactccttctcttgtcacttaggtaattctaatttttttacctggaaggtcctatataatctatgatgcctcccaaagtctctaatctcatcttctaccactttctcttttggttattcaaattcagcaactgatacttgatattcctcaactactgacacttgatattcctcaaatccactgagcacacatacacttcaaggtctttgtatttgctcttcctttaggctctaatgctttctgccgagaccagc

SEQ ID NO: 532557 - DNA, 620 bp, Homo sapiens
atttagcaagctgcaggaggataagtctatggctaatagggtaaatttttattgtcttttttttttttttttgagatggartctcactctgttgcccaggctggagtgcagtggcatgatctcagctcactgcaacctccacttcccaggttcaagcgattttcctgcctcaacctccctagtagctgggattacagatgcttgccgccatgctcagctaatatttgtatttttagtagagacggggtttcaccatgttgaccaggctggtctcgaactcctgacctcaagtgatccgccagcctcggcctcccaaagtgctgggattacaggcgtgagccaccatgcttggctgagtaaattttttaaaaaaagaaaaaaaaaatttcaggctaaatttcatgaaaaaatttcctggctgtgaaatctattagcctctgaaaagtgtcttttatgacaatattagagaagggctatcccttaagatatttaaagcaagggagaaagtaaatgtaacggtttactataagaaacaattaggcaaaattgagaaggtaggctggatgacttaagatatttgttgtccttaatgatcatatttagtgatttgaatggttaaa

SEQ ID NO: 532558 - DNA, 551 bp, Homo sapiens
attttatggataaaaaggtaaagggactaaattccatggcttgttctgagtgacagctgagatgagtggtggataattacagacatacacaaatctggttgagcaggatttgaagaacaatgtaagctatcctcctcaacatctcaagaaagaatgatagaaatgtaaacctagagccctatggccatatttcatttgaatcctaaaagtcaggagcctcccatttgtgtctggattctataaaatggggaacataagacccaaattgttcaagtggcttacctaaggttggcggcaccattcaagttcactgattcttgtggttttctccccatgataagaaactaatttctaacttcacattggtcaattgcagcctctggagtatggctacctgcctatggctcacagaaatttgaaatgctacmtgaaaatgctgttagggctttagaatggagacaatgccagagggtgctagaatgcttttgtcctcaaccatgagccacaacaatcagagatcggtaagtaattggcattttaaataaccaagg

SEQ ID NO: 532559 - DNA, 530 bp, Homo sapiens
tggttaataccaaggtacttattatttcctatagtgtgacactctatgctggtcactgtcatggcacttcccctgtatgagcttagcaataagataaatgtgccctttgcaactcccatcattccccgcccaaggtctaggattgcagtgctctcaggctagattcctcccaggagcctgtgaactccacagtcaatcctggagctcagaaaaaccattttaaagatgggccacattatgtaatcttgaaacctggggttactagtccagcatttgctccatcttaatgtcacaacttcttggactatctactctgaatctaattttaccaatttacagactgaacaagtagaatcccactccagctagtcaacctaagktttagagtgtcaatacctcaaaacctaccttaagctgttccaaaatctcaaaaacagaattctagtacacatctaatggtctgatggacagaaccctctttttttttttctaatttgcttctttgaatgcgaatgcattataactcgcag

SEQ ID NO: 532560 - DNA, 638 bp, Homo sapiens
aattcaaagatgtacttctctgaaatggcagagctaagtgtagatattcctccagatgacsttatcatttttccagagacatggctgatgaatgagaatagaaaggaatggggaattccaaattctgaacaatcaaatagattgcattaattcacaggaggcaccattcatacagtatttagaattgtttatttccttacattttgcacttccttaagaacctgaacccgaaagttgtaatcaatagattggtttacagcctgttagtcctttaaaagtattaactttcataattcatttgatgagccatataggactccgctgcgcctcttggaagaggaggccttcactttaaaactatgtttaacagtgataaacgggaaataataatgaggcatatgtcatagaacagtgaatctgaaaggtggctaatcagtcaaatatatatacttagcaaatccaaatactagttaagggcataggatttgaaatcaggcatacatggatttggtccccagttcagccactcattagttatgagtactcacaaccctccttcacttcttttcttttttttcttcttccttcttctctccctccctctcttcctttactttattcaaaaatagctgttcgtc

SEQ ID NO: 532561 - DNA, 550 bp, Homo sapiens
ctgatgaatgagaatagaaaggaatggggaattccaaattctgaacaatcaaatagattgcattaattcacaggaggcaccattcatacagtatttagaattgtttatttccttacattttgcacttccttaagaacctgaacccgaaagttgtaatcaatagattggtttacagcctgttagtcctttaaaagtattaactttcataattcatttgatgagccatataggactccgctgcgcctcttggaagaggaggccttcactttaaaactatgtttaacagtgataaacgggamataataatgaggcatatgtcatagaacagtgaatctgaaaggtggctaatcagtcaaatatatatacttagcaaatccaaatactagttaagggcataggatttgaaatcaggcatacatggatttggtccccagttcagccactcattagttatgagtactcacaaccctccttcacttcttttcttttttttcttcttccttcttctctccctccctctcttcctttactttattcaaaaatagctgtt

SEQ ID NO: 532562 - DNA, 556 bp, Homo sapiens
tcagtggcaagaggccaccccaacacggctactagctgcattaaccagcaagtgaaagcgttttcctatattgtataattacagaagtgacagcccgtccccgtggctataacataccgagtaaaaacaagtcacagttcctgctcacacacaagagaaaagggtcacatgagggtatgaaaatcagaaggcagggatcrcagaagccaacctggagcctggttgtgtctgatgcctggttcctccaggcactgtgtctgtgtttaatgccactgtatctgatgcctgtctcctcctttcctatctcaccacccttccttgtttcgattcctagattgaaagaccatatataacccctgctatccagcaaaatcttgtctattcagttaaaggcagtactttagaatttcatagaaataaaataggagaagaaaattcatgctggaaaatattaaaagtagtagtttataacaagttaagttgtctttggtaaaataaacaagtaaaatttcgtaaaatgggaggccctcatgttctcttgtttgtgcttttaatg

SEQ ID NO: 532563 - DNA, 569 bp, Homo sapiens
ctcagcaactgccttgcagccacatggcctttatcatgacatggcagcaactcctgagacagggaggatggagggcctgactcctagaatcaaagggtttgaacaggaattgcccacgaggggctgggaacaggctgccagcagacacagtgacagagctgcaccaccactgaggaggatggagggggatttacctcacctctgaaaagcagagcctcctggagctggaggagatggttaggggttatcacagccattcctctgtccccatgcaggactgcacataacccatgacaggcaggggaaggaaggtctgttcattaccaccatcctaagttagtttaccatcttagmctaagttaatttaccatcctaagcaagaaaagcagggagggaggcagcagagtgttcatgcctgacagatgtcgctggcggaatttctgctaccatcaagccaaaaagttgacacattctatgaggtaacatgtgaaagggggtgagccaagggcaaggttgccagcccccatgcttgtccagctctaaagcacatgctcatcccaccacacaca

SEQ ID NO: 532564 - DNA, 554 bp, Homo sapiens
atcatataattgtcttggtggttgttttcttgttggtatataccatccctcttttcctagagcccttaattatcctctgcttctgccattagtactttgataacacctaatcaaagaatatgcctcacaccatggagaagtccatgcaaaagcaccatttcctgaaaaccatcgattcattgccccaactaacacttagacatctcacatcactttctacaagattattagtctagccactcaggctactctccacttagggtagaagaaactattattatgtttttcttttaacattcagggcctcacacttgtctcagatttcattccaatagaccttaaacttggtcttactaatctttaaacaataaagactgtaggcaccccaagcatatacacaaacaaacacacactcatacacatacaaatgtgtatatacatctatttcaagaataatctatagattttaatggccattctgtatgatttttgtaggcttacacaactttgattactagatacttcaacatggataktatgatcctacttcttaa

SEQ ID NO: 532565 - DNA, 606 bp, Homo sapiens
tagaaagaccaaccatgtggttaacagattaggctttcagcagtgtgatatcagcckgatttctggaaggggaaaaagaggagaactgaagattgaatccaaccatgtggccaatgagtcaatcaacatcatgactcaatgcagcctgaataaaaactctggacaccaaagctaaggtgagcttccctggttagcaatactctttgaacattgtcacacttcaaagctgggaggataacgtatccctgaagacaacagaagctttgcatttggaaacctcccagaattggctctgtgcctctttctttttgatggttctaacttgtatccttttgttgtaataaaactgtaatctttaagtatagcacttccctgagttctgagtcattctagtgagttatcaaacctgaggtggattatgtgaatccccatatttgtagccagatggccagacataaagataacccgggggaaacctgaatttgtggctggcattagagaacagtcttcagggagctgttccctcacactatgcagcttgcctaactctaggtactatgtcaaatttactataaattctaaaacatttccttaaaaactgttgtt

SEQ ID NO: 532566 - DNA, 606 bp, Homo sapiens
tagaaagaccaaccatgtggttaacagattaggctttcagcagtgtgatatcagccggatttctggaaggggaaaaagaggagaactgaagattgaatccaaccatgtggccaatgagtcaatcaacatcatgactcaatgcagcctgaataaaaactctggacaccaaagctaaggtgagcttccctggttagcaatactctttgaacattgtcacacttcaaagctgggaggatamcgtatccctgaagacaacagaagctttgcatttggaaacctcccagaattggctctgtgcctctttctttttgatggttctaacttgtatccttttgttgtaataaaactgtaatctttaagtatagcacttccctgagttctgagtcattctagtgagttatcaaacctgaggtggattatgtgaatccccatatttgtagccagatggccagacataaagataacccgggggaaacctgaatttgtggctggcattagagaacagtcttcagggagctgttccctcacactatgcagcttgcctaactctaggtactatgtcaaatttactataaattctaaaacatttccttaaaaactgttgtt

SEQ ID NO: 532567 - DNA, 579 bp, Homo sapiens
atgctgattcaaatgcacattaaagtgtgagaagcactgctctaagtcacttgatatatgcttttcttttgtcagaatatgtagttttcaacatttagtcagaaaggcatatgcgctaagtggttttttacaaycatgatactaggttacgtaaaatcagatttttataattggaaaaaattagagaaattcaagtctagatatctatttattcatgcaaaaggaaaacaaacaagacaatactcaatctaggtccagaatgggcaaatgatttgctgacaaccacacagcattttaatggtaaagaaagaacaggaagccaggcctgccaattcctcctggtactatttctaccataatactgcttcccactaacctgaccaaaagtgggcattaataacaaaaacaaaaacaaaaaaggctaatattgattaagtacttactacatctcaggcaatttatcacttactctatatgcattttctcacttgatcttgacaataaaagtatgatacaggtaaaattatccttcccattttaaagattagaacaccaactcttaaagagattttgtctaag

SEQ ID NO: 532568 - DNA, 579 bp, Homo sapiens
atgctgattcaaatgcacattaaagtgtgagaagcactgctctaagtcacttgatatatgcttttcttttgtcagaatatgtagttttcaacatttagtcagaaaggcatatgcgctaagtggttttttacaaccatgatactaggttacrtaaaatcagatttttataattggaaaaaattagagaaattcaagtctagatatctatttattcatgcaaaaggaaaacaaacaagacaatactcaatctaggtccagaatgggcaaatgatttgctgacaaccacacagcattttaatggtaaagaaagaacaggaagccaggcctgccaattcctcctggtactatttctaccataatactgcttcccactaacctgaccaaaagtgggcattaataacaaaaacaaaaacaaaaaaggctaatattgattaagtacttactacatctcaggcaatttatcacttactctatatgcattttctcacttgatcttgacaataaaagtatgatacaggtaaaattatccttcccattttaaagattagaacaccaactcttaaagagattttgtctaag

SEQ ID NO: 532569 - DNA, 579 bp, Homo sapiens
atgctgattcaaatgcacattaaagtgtgagaagcactgctctaagtcacttgatatatgcttttcttttgtcagaatatgtagttttcaacatttagtcagaaaggcatatgcgctaagtggttttttacaaccatgatactaggttacgtaaaatcagatttttataattggaaaaaattaragaaattcaagtctagatatctatttattcatgcaaaaggaaaacaaacaagacaatactcaatctaggtccagaatgggcaaatgatttgctgacaaccacacagcattttaatggtaaagaaagaacaggaagccaggcctgccaattcctcctggtactatttctaccataatactgcttcccactaacctgaccaaaagtgggcattaataacaaaaacaaaaacaaaaaaggctaatattgattaagtacttactacatctcaggcaatttatcacttactctatatgcattttctcacttgatcttgacaataaaagtatgatacaggtaaaattatccttcccattttaaagattagaacaccaactcttaaagagattttgtctaag

SEQ ID NO: 532570 - DNA, 418 bp, Homo sapiens
taccaaatactggctcttcatgtatcttgggtttttcataacatgatggctggattctgagaggatctgtctggggagggatcatcaagagagctaatgctataagagaaattgggtagacggaagccatgtggactttttatatatagcttcagaagtcacacagcattgcttccattgtattttattgattactagagttagtaaggccagttcagattcaaagaaagagaattaaactttaccttgtgataggggaatggcaaggccatattgcagaacagcatataagatgggaaatattggtggaagcatccttggaaaatacaatctttcacacttgwgtaaaaatctttttgatgtagggaacttagaaatttctgaagactcttgtcacaacaatttctggttataatag

SEQ ID NO: 532571 - DNA, 472 bp, Homo sapiens
tcccacagccaccccacatagttcaccatgcacgtgggtgctgtgaccacctaatctgatactctgatgagagcaagaacaagcatgctttctctgcatggctttttgcaggaaaaagtgtcagtaaagatttggaggccgtcatttcaacttttagtcactagatggyactctgggaccatgcaaggtcttgagtggcttgtcatttttatgggacacagatttttcagtgatttcaggctgaaactcttctgtatgaagcctggactaaaacagactgagatgactaaattttctttaaaaaatttaaatatatatatcttagggggcaaactatagcttagaaagataaattggaaagattccgaattctaagggaaacactgaaatttctatttgaaaatgtagaatcacccaggaggttgggggtcaggaatggctggggctcagactctctataggaacctgtggg

SEQ ID NO: 532572 - DNA, 624 bp, Homo sapiens
attttgcccagagtgctttaaggcagttgtactaacttctggtaatagtgtccaagttttcttcttgagaatcactgttcccatcctcaatccaagcaattaggtggtggcgacatcacccctgactcctgagtccaggggctggaatatgactcaattacagcctttcagggcattgctacagtgagccactgagtggaggaggtgcgtgggatctttacagggacagggggrccggtcttaaaataattagcccaagctgggcgtggtggcaggcgcctgtactctcagctacttaggaggctgaggtgggagaatcacttaaacccaggagggggaggttgcagtgagttgagatcacaccattgtactccagcctggcgacagagtgagactccatctcaaaaaataataataataataacaactaacccaagagcacacaggtggtaagtggtagaaggaaggagcaggagtgaaacatttaggaggctctagactactgaccttcttgaatgccagacaaaagcatctgaaactagtttttagacaacaggaagccaggaagctagtttttgaaaagtggcatgagaaaattggtgttttggaagattaatccagcag

SEQ ID NO: 532573 - DNA, 441 bp, Homo sapiens
ggcaccatagttcgtgcctgcagccccagctacttgggtggctgagatgggaagattgcttgagcccagaagctggaggctgcagtgagctatgattgagacactgtacttcggcctgaaagacagmgcaagatctcaaagaaaaaaaaaaaagggtatcaatgcatgcaacaatgtgctatttttattttacattatgggttatcttccttattttatttcttatctgctttttgtctgtcagggcttgttgtctgtcaatccaggttacaattctttcccttttctatttatttcagtatatatcgcaaagcagctaaaaccaactatgaaaaagtggcgtccaaatctcttgagaggcaatcatgcttctgcccttctgattagggctccatttttacaatcaggatcatgctacagggatgtgagggattttttctg

SEQ ID NO: 532574 - DNA, 531 bp, Homo sapiens
ttctattccagtgcaaccgaccccttgagatttcctctcccttctttwaatgtccagacagctctgcaacaggaaccctttcaccgcttgttttgagaacctgccgttggtttggactggaatgcaatagctgcaaggctgaattaagtgagtccctctcaacaatgttaaaaataccaagtatgtgctctaggcagttttatagtttcatgtaatagccctggttcctcattctataaacttcccatcagggatgaagtaaggagttaccaagcaaaccagaacgatctgattttcccttagaggaaggaactaaaggactctccagtctattaaacagatcttgttggagcttgaagggattcctgcatatcaagagaagcaggtaggggcctgtcgggctgacaccagatatcatctccagcaaatgctggtcgggtccattccctgttatcatactgtatgtaatgacttcgggtctgcagagagtctggtgagctggttgccctgccaagccaatgaagttgttgg

SEQ ID NO: 532575 - DNA, 623 bp, Homo sapiens
cctaaggtctttcttaggaacttggagttgcatgtttacgatactattaagtgtaaaatcaaatcgtttatctagaagctttaaaatgtttgtttttcccagcccccgcctaacagcaggctgagccttcaggcaaggctctgatatctaataggacgkgcagaggagcagaggagaagcggggccacgtgagcccatcggagacaaggccagtggtttcgccagggccggtgcgggatctgtcctctgctcatggctgccatcttatgccaggctgtgcttttctgccaaagctgcctgggctcccccaggtcggtgactctgcacaaggctcagatcacctcaaattagctggtaactgactgctggggatatctctgccggcagtgagaatgaggtgtaactccctcaagcatattctggaaagttcctcaaaaggcatgagagaaacctggtgaactgatgcatcagggctggcgagggcacctggcctggctcacagaggctgcgggtgagagcaggcagggcgggctgcaccctcattttctttctgtgggtcctaaatccccaacttaaatctcaggaggtgaacagagcacctctgcatccccttcctgctttaa

SEQ ID NO: 532576 - DNA, 575 bp, Homo sapiens
aaggggcaaggatcacagaagtacatccgtacagcaacctctctggagggcagccgagcattaagtgtgtcagccaggctactgacgggggatcaaacagaagagggcaggggaggatgagggaagacagcaaacaaagagataaagctcagggaaaatgcttgggtagagagaaggaaactcacaaagcagaggcgttgtaagaaaggaagagaaatgaagtgagcattgggaaaacccacgtggaggagaaagagaaagggcagaaggagcagagaagggaaaaccacagattgccatccctctctttggtgtatctgcagaaagaattggctggtccagctttgcacatatgagtgctccaggaagtggtttatcctttagtcctgggtactgcrcccaatgccacaggagggtaggttgccaccttggacccattgaagcccacaggaggggcagtgagaggtgaatgccaccactggggctgtcctgagttggtggcccaggcccagggttcccccaggaaacagccctgcggtgtggagtctcagaacaaagggagaatgtgctctttt

SEQ ID NO: 532577 - DNA, 548 bp, Homo sapiens
acacaggcctgggctgagatgcccgccggcgatctgatatttagacaaatttcctgatctttaagcaggctctgccgctgcatgatggcacacgctggtactttctattttgatttttctttggcattagttactacatgacctccagggtgagtgctgcagaaaaggagtgaacagaagtcgcccaatacacactcacagcttctctagaaaaaacagcttcgggttctctcagaaaagatggcttcaaatatttaaaatattacgcttaagtggggttttatacccattacttaagtgagaacacgttggaattggttatgaagaatatatttaagattgctacattttaactaaagctatcatccatcataagcctattataggaaggcgacaggcattttaaattaaataggaatctttgaagagctctaaataatctttctctgccttcacacataagaacagaaagataaaagtygggtcgaaaaagataataatagtatttagtgtataatatatccaagaattatcgtaaataagcaacc

SEQ ID NO: 532578 - DNA, 550 bp, Homo sapiens
ggtgtatttgcctgttacctttattacaaagatttctaaacattcaacacctattgttggagtcatagaatactggattccgcatattttcaggttatatttataaagattgagattcagtggcaatatgtaacttttcaaaattgataaggtgtcagtggcaggtcaggctggcaaggcagtamataaagttcctattgtgcttgactgcatggtaccccttactgaccaaaagcagcctgtgagctcacaatatcattttttaaacactttgcagtttaccaagtgcttttaaatgcatccattcatttgtgtctcacaacaaccttgttaagtggccaatattatctctgttttacagaaaagaaaactgaaacacaaagtcagaggttaactaacgacacaattcatgcaactaagcaatgaaggagccaaaatcaagagcagattccctgactctaagcacaacgattttttttttcactgtacattgttgtgtggtatttttattaagattttcatctccttatattagttatgaattaaatct

SEQ ID NO: 532579 - DNA, 616 bp, Homo sapiens
tatcattttttaaacactttgcagtttaccaagtgcttttaaatgcrtccattcatttgtgtctcacaacaaccttgttaagtggccaatattatctctgttttacagaaaagaaaactgaaacacaaagtcagaggttaactaacgacacaattcatgcaactaagcaatgaaggagccaaaatcaagagcagattccctgactctaagcacaacgattttttttttcactgtacattgttgtgtggtatttttattaagattttcatctccttatattagttatgaattaaatctgaaaatgcaaatgtaataaagtatcacagtgggtagctatttgaaatgaattagcaaaaggaaaaatctggtaggcctaatatcaaaatcttaaaaacttctttcaacaaatattcatccaacatgtatttatttagtccctaccttgtccatgacattttgttatgtgaggtacataaagaagcaggggccaggaatgctgagaaaagccttcaattcaagttctcatatttttagatgtaagagaatttataggaatcatgtcaaggtaattatatatcttatttcattaattaaactaaaatcaaattggtgatgg

SEQ ID NO: 532580 - DNA, 614 bp, Homo sapiens
tgggcagccttgcaaaccccctttctttcactccagaccaattaattaagagtaaatgagaggtgggtttgaagcataatacttttaaaatatccctggatgattctastatgcaactagatttgcaaatctcagatttatagagatatctgccattcctaccagacaatctcttataaagccatagctcgatttctctctctctctctgtctgtcttttaaataaattcaacttttattttagattcagggggtacatttgtaggttttttacatagttatattgcgtgatgctaagtttcggagtatgaaagttcctgtcgttcatgtcatgagcatagtacccaataggtagtttttcatcccttgccttcctccctttctccctcatttacaagttcccaatgtttattgtttccatatttatgtccatgtgtacccaatgtttagtctccgcttacaagtgagaacacacagtatttggctttctgttcctgcgttaatttgcttaggataatggcctccatctgcatccatgttgctgcaaaggacatgatttcattctttttttggctgcatggtattccacagtgtagatgtaccacatttatcca

SEQ ID NO: 532581 - DNA, 614 bp, Homo sapiens
tgggcagccttgcaaaccccctttctttcactccagaccaattaattaagagtaaatgagaggtgggtttgaagcataatacttttaaaatatccctggatgattctactatgcaactagatttgcaaatctcagatttatagagatatctgccattcctaccagacaatctcttataaagccatagctcgatttctctctctctctctgtctgtcttttaaataaattcaacttttattttagattcagggggtacatttgtaggttttttacatagttatattgcgtgatgctaagtttyggagtatgaaagttcctgtcgttcatgtcatgagcatagtacccaataggtagtttttcatcccttgccttcctccctttctccctcatttacaagttcccaatgtttattgtttccatatttatgtccatgtgtacccaatgtttagtctccgcttacaagtgagaacacacagtatttggctttctgttcctgcgttaatttgcttaggataatggcctccatctgcatccatgttgctgcaaaggacatgatttcattctttttttggctgcatggtattccacagtgtagatgtaccacatttatcca

SEQ ID NO: 532582 - DNA, 614 bp, Homo sapiens
tgggcagccttgcaaaccccctttctttcactccagaccaattaattaagagtaaatgagaggtgggtttgaagcataatacttttaaaatatccctggatgattctactatgcaactagatttgcaaatctcagatttatagagatatctgccattcctaccagacaatctcttataaagccatagctcgatttctctctctctctctgtctgtcttttaaataaattcaacttttattttagattcagggggtacatttgtaggttttttacatagttatattgcgtgatgctaagtttcggagtatgaaagttcctgtcgttcatgtcatgagcatagtacccaataggtagtttttcatcccttgccttcctccctttctccctcatttacaagttcccaatgtttattgtttccatatttatgtccatgtgtacccaatgtttagtctccgcttacaagtgagaacacacagtatttggytttctgttcctgcgttaatttgcttaggataatggcctccatctgcatccatgttgctgcaaaggacatgatttcattctttttttggctgcatggtattccacagtgtagatgtaccacatttatcca

SEQ ID NO: 532583 - DNA, 568 bp, Homo sapiens
acgatccttcaccaacaaagagattaccactcactgaaggttcagatgatcattaacattttctagcaataagagttttttaaattaatatatacacattttaggataacgcacacttaatagactacagtattatgtaaaaataactttagtacacacaaggagaccaaaaaaatcgtatgtctcactttattgggctatttgctttattaccatggtctggaactgaacttgcagtacctccaaggtatgcctgtataacagaaaaagtggccaaatcaaatatgtttgggaaacactacaagtaaaataatagagattaaaagtatatgstactctcagaggtcctaaacgtttctatagaagtacgtttagctgttttcaaaccactgtttaagttttatttagacaaacaggctagtatatctcttaggaaaccagcttggaaaacacgtcaggaagctattactaaccaccactgagagaacaagaattactccaccagttaggagccaataggatgggtcaaaggatagtttaccatgattagatgggaagaactaagctg

SEQ ID NO: 532584 - DNA, 399 bp, Homo sapiens
  misc_feature (1)...(399): n = A,T,C or G
taaaaagaatcttctaaatatgtatttatttacagactctatttcctggtaaaataatgaactacttaaccatttctatctttccataatcttgcttgctttaatttatttncttgagtgtccttaaactgtcactctgtcaccacatcatactttttgtcttcaagcatcacagttctctctgatcttaaccaaaaaaagacaaaatgaaataaacttagtctagattctcttctaatgattattgttttcgttataaatatatattaaataaccattcctcatgcmctttgtgtcctccccctcactatccacaccttccttggtgcccttcaatctgtcttctgcaaaatattatttctgcaactagtaattattggtcactcattcttggccatt

SEQ ID NO: 532585 - DNA, 552 bp, Homo sapiens
taatttgcttggttatctccttcaaggaaaattattagacagatctgcaaacttctggacctttccccaccaacccctcacgtaaattcacgacgttttcagcttttagtcctctggcactgtggtcttagaggatcacttctttcagttttcctattcacyttttggtctttaatctgggtcagttttgctattcagtctatctgtgaggcttttatttttacaatcatactgttaatttccaagaactgtgaatgcttccccctttcatatttgcctgttaggtatgactgacacccaaatctctcaagagagttaattatatttctttctttattttcccattggttctgttaactgtctttcccatggtgttcagtattctgtttaatgtagtgtctctgttttacagtttttcacaactgtctggttacttagtgttctatttctatagatggatgagtctaggttgaataatattactatgtgtgctttatcttctcagaccaagtaagaaattcccttcccctaacagtgaatatgcattctgat

SEQ ID NO: 532586 - DNA, 460 bp, Homo sapiens
attgcaatatttggtttattgcagtagtctggaactgaacctgcaatatctttgagctctgctgattaatgtctttcatttaatagcagtggaaactgaaatttaaagacattaagtaacttggcctaaaacattcaattaatctgggcagagacaggattggaatctggttcctaattcctaactattacattgctcagccttctggctaataggttaaacattgggggaaagttttatgcttctggaatataatagagagmaatgcctctctatatcacaaataatcaccaaccaattttggacactcctttatagtttgaaaaagtatttcatatatataaacccatttaatttgctttgaggtgttagaaagaaaactgggggattcttggtcttcatcttaagtaagaaaggtgaaaaaaagacaacagtgatctatttcctcagtccttaatga

SEQ ID NO: 532587 - DNA, 607 bp, Homo sapiens
attttaataccagaaaaccatctacgtagcttgaaatatttttatgttctagtctttttctgaggcaaaagataaatctgggtcttcatggcagtgattagggccacacatgtataaaatgatwtttcttttgttgttgattagattcaaaaggattcctatatggtcctgaatctttttatttattatttgcatggtctgccttaaacatagcttaaggtttaattgataaaatatgaaaaaaattaacaacaaaataattattggacataccagacacaaaaagaaagttttatttaattaaaatattgaaagctatgctctattatattaaaaatgaataaaggtcagacagttcttacagttattaattgttctgactttgtcagatgcaatttgataaattctcattacatgtgggaattatacaaaaatatacataatatattttataatatatattttattttataatatcctatttatatagagagagagcagctttgcagcttttacaaatttatttaattaactgccttattttagaacagtttcagattgaggtaattattgcaaagatagtacagggagttcctgtatacctcac

SEQ ID NO: 532588 - DNA, 399 bp, Homo sapiens
  misc_feature (1)...(399): n = A,T,C or G
taaaaagaatcttctaaatatgtatttatttacagactctatttccyggtaaaataatgaactacttaaccatttctatctttccataatcttgcttgctttaatttatttncttgagtgtccttaaactgtcactctgtcaccacatcatactttttgtcttcaagcatcacagttctctctgatcttaaccaaaaaaagacaaaatgaaataaacttagtctagattctcttctaatgattattgttttcgttataaatatatattaaataaccattcctcatgcactttgtgtcctccccctcactatccacaccttccttggtgcccttcaatctgtcttctgcaaaatattatttctgcaactagtaattattggtcactcattcttggccatt

SEQ ID NO: 532589 - DNA, 279 bp, Homo sapiens
attaaccacgagttgacctaacagctcactgaaaatctccataatcaggacttcttttaattygacctatttcagagtacactctgtatacagcttgatgtacagggcatttatttcttaaaaaacaatcagtagttcaacaaaagaaattagacttaaccaaaatgaaacttttgtgcttcaaatcataacatcaacatacataatgtgagtgaaaaaaaagtaaaaaaacaactcacacaccgggagaaaatatttgcaaatcatatatctgataag

SEQ ID NO: 532590 - DNA, 279 bp, Homo sapiens
attaaccacgagttgacctaacagctcactgaaaatctccataatcaggacttcttttaattcgacctatttcagagtacactctgtatacagcttgwtgtacagggcatttatttcttaaaaaacaatcagtagttcaacaaaagaaattagacttaaccaaaatgaaacttttgtgcttcaaatcataacatcaacatacataatgtgagtgaaaaaaaagtaaaaaaacaactcacacaccgggagaaaatatttgcaaatcatatatctgataag

SEQ ID NO: 532591 - DNA, 279 bp, Homo sapiens
attaaccacgagttgacctaacagctcactgaaaatctccataatcaggacttcttttaattcgacctatttcagagtacactctgtatacagcttgatgtacagggcatttatttcttaaaaaacaatcagtagttcaacaaaagaaattagacttaaccaaaatgaaacttttgtgcttcaaatcataacatcaacatacataatgtgagtgaaaaaaaagtaaaaaaacaactcacacacygggagaaaatatttgcaaatcatatatctgataag

SEQ ID NO: 532592 - DNA, 662 bp, Homo sapiens
cataatcaagtagtattgttagtctttaaaattttccccattctagtgagagtgaaatggtatttcattgtgatttgaattagctttcccctgatgactaacaatgttgagaccttttcatgttttttagcagtgcatatatcttctttgaggaaatgtcttttcaagtcttttgcccatttcacatgacaaatggctatttggaatacatattttaaagtatatttaaaatatatattatattctttgaggtaaaatatttcaaaatatatattccagatagtcatttgtcatgtgcatatatagagtaaaaatttttcccagtctgtcatttatgttytccttttgtatcagtgtcttttgatagaagactttacttctgatgaaattcagtttatcaaatttttttctcttatgattagtggtttgttggtttgtttcctacagaatctctgcttaccctgaagtcactgaaatagttttctgtgttatcttttagaagcttcacagttttagcttttctgttcagtagttcttttgggaaaaccctcaaaccatgtttttcctctgctcacataccacaacgacaatcatcaacacagaagaaaacatctgtgaccaaatgtgtggaggttttcccccacacaccaagcagcacacac

SEQ ID NO: 532593 - DNA, 631 bp, Homo sapiens
tttacatagggcatatcccaagtaaccaatggaatcctagggggtatttaaactcacaaaaactctgtaacagggcctttgagcccctatgctygggcccactcccacactgtgaagtgtactttcatttttaataaaaccctatattcctcccttgctttgtttgtgcattttgtccatttctttgttcgagacgccaagaacctggacaccctccaccattaacaatagtagagaaggagattaaaggaatgaataaatgagttataccttgagggaaatctaaaattgcattaacaccttgaaagaggcttggagcatctcaggaacctgacaagatggaatggaagcttgcagacctgagtggcctcactctggcagatattcaccaatataatgaactggactgattattaatgattaaatgggatcctagtaatatagcagtatcttttgagttgtatatccctttgacgtaagagatttgtgagtggactgtagtacagtgaaatatacatttggtctttgacccagtgtcctgtcatataactcctaaaatccccaaagtgatatctgttgtatgctaaggagttgactgatggctggcagcccctaggtaactttaggatgg

SEQ ID NO: 532594 - DNA, 631 bp, Homo sapiens
tttacatagggcatatcccaagtaaccaatggaatcctagggggtatttaaactcacaaaaactctgtaacagggcctttgagcccctatgcttgggcccactcccacactgtgaagtgtactttcatttttaataaaaccctatattcctcccttgctttgtttgtgcattttgtccatttctttgttcgagacgccaagaacctggacaccctccaccattaacaatagtagagaaggagrttaaaggaatgaataaatgagttataccttgagggaaatctaaaattgcattaacaccttgaaagaggcttggagcatctcaggaacctgacaagatggaatggaagcttgcagacctgagtggcctcactctggcagatattcaccaatataatgaactggactgattattaatgattaaatgggatcctagtaatatagcagtatcttttgagttgtatatccctttgacgtaagagatttgtgagtggactgtagtacagtgaaatatacatttggtctttgacccagtgtcctgtcatataactcctaaaatccccaaagtgatatctgttgtatgctaaggagttgactgatggctggcagcccctaggtaactttaggatgg

SEQ ID NO: 532595 - DNA, 571 bp, Homo sapiens
ttttttttttttttgagacgaagtcttggtattgtcccccttgctggagtgcaatggcatgatctcggctcactgcaacytctgcctcctgggttcaggcaattctcctgcctcagactcctgagtagctgggattacaggcgcctgccaccacgcccggataatttttgtatttttagtagagacagtgtttcactatgttggctgggctggtctcgaactcctgccctcaggtgatccgcctgcctcagcctcccaaagtgctgggattactggcgtgagccactgctgccagccggcagttgaattttaagactgtggagctggctgaggcagtagatgaaacaagatttcttgatgttccttccaggtttattatgcatgtatctttagagatgatttttttttaaagactgtgtttattgtatttcagatgctgagatgaatcgtcacctgtgtgtttggctttttagacatccatctcttaatggttacctccagtgtcacatccagctccattctcatcaatttagacagatacatcttgatacaaggctgcaagtttttagac

SEQ ID NO: 532596 - DNA, 357 bp, Homo sapiens
gaggactttatgtttaagggcagaaagcagccaggattaccacccaggggactcggccttctgtggccccggccagacttagaatttggctcagggcaggaccagctcactcggagcagtgtgtcagtagctggggcctgtacatgctaggcaaggctaagctggctcaaagagcaaccagccaccactgcaagggtgctcctggatgaggtggagcagccagcaacttcagctacacaaggaagcagggatgrccatgttcccacagcatgagtggccaccacttgatggctgatcaagcagaggcctgaggaaaagcagatggcagttgggccctacctctagggtagaagaact

SEQ ID NO: 532597 - DNA, 434 bp, Homo sapiens
ttatgtttaagggcagaaagcagccaggattaccacccaggggactcggccttctgtggccccggccagacttagaatttggctcagggcaggaccagctcactcggagcagtgtgtcagtagctggggcctgtacatgctaggcaaggctaagctggctcaaagagcaaccagccaccactgcaagggtgctcctggatgaggtggagcagccagcaacttcagctacacaaggaagcagggatggccaygttcccacagcatgagtggccaccacttgatggctgatcaagcagaggcctgaggaaaagcagatggcagttgggccctacctctagggtagaagaactgatgaaccctgaccggtagtgagtgaggttggtggtgggtccaccggctcctggcacacccttgcagaggaggctgtttgctct

SEQ ID NO: 532598 - DNA, 379 bp, Homo sapiens
gtcagggggaggtcttgttacaacacagatctgcggatctccggggtttgattgtggcaaggatgctgctggtgtcaaaaccacaacgtgggaaccacagaaccactagttggttttcagtgtttcagtgcatacaactcctaatatatctggccaagaaaacttgtaagttcttagattgtccsaaaggtggcgcatgaaatcaaatcaggagaacagtttcctacgaggtgtagcctgggaacgttgggggtgactgatggaaaggaggagtgaagctccgccctttccgctgcgaggctgcgcccgaggctatttaaacccaccctggctggcctgtactcagatcttcgcagagcggagcagcggccggagcttt

SEQ ID NO: 532599 - DNA, 311 bp, Homo sapiens
actgccatgcatcagggtcagggggaggtcttgttacaacacagatctgcggatctccggggtttgattgtggcaaggatgctgctggtgtcaaaaccacaacgtgggaaccacagaaccactagttggttttcagtgtttcagtgcatacaactcctaatatatctggccaagaaaacttgtaagttcttagattgtcccaaaggtggcgcatgaaatcaaatcaggagaacagtttcctacgaggtgtagcctgggaacsttgggggtgactgatggaaaggaggagtgaagctccgccctttccgctg

SEQ ID NO: 532600 - DNA, 379 bp, Homo sapiens
gtcagggggaggtcttgttacaacacagatctgcggatctccggggtttgattgtggcaaggatgctgctggtgtcaaaaccacaacgtgggaaccacagaaccactagttggttttcagtgtttcagtgcatacaactcctaatatatctggccaagaaaacttgtaagttcttagattgtcccaaaggtggcgcatgaaatcaaatcaggagaacagtttcctacgaggtgtagcctgggaacgttgggggtgactgatggaaaggaggagtgaagctccgccctttccgctgcgaggctgmgcccgaggctatttaaacccaccctggctggcctgtactcagatcttcgcagagcggagcagcggccggagcttt

SEQ ID NO: 532601 - DNA, 601 bp, Homo sapiens
tactgtctgtgagaattaattgaggaaatttaaattatatggttttatttacatagagtgtataacaactagttaagggatagatgtcttcttatctgactttcaagtatctaagagtggattattgtgcttgttaaagttctgggaaccatggatattttctgaaaatacctcagtgatgasaaatgaatgactaccagcctctcataacattaggactccagttcatccctttgcttcataagtgtgtcttttccttttgtatatatttgctttagtgtagaaaataggttttcttgattagaaatctaaaaagaataaattgaaaactggagatttttctattgctttggattaccaaaattaatgtaatttggcagtatatccctgtgccattattgtctctctggtaagtagatggtagggttttgggtgattaaatttttttttcctattttgcttatttaatgggcatgtgtttgtattaaaaaggggaaaatacataggaatgtagaagatgttaactaatcgtgaaagttattgggaagggttacctaatttaaaagttggccagccatggcaacactgcctgtagtcccag

SEQ ID NO: 532602 - DNA, 473 bp, Homo sapiens
tggtggggtagcaagtacgatgggccatgcacttctggcggtcgatgaagagactgttggtcatggcggtaacgtccttctccaggctcatgtggatgtcctcgaggttgcaaagggactgctccccttctagaagcttctcccgcagcgctgtgatggacatgttcagctcctccacctcactcaccagcttggggatgttggggggtgtgagctggggctggggagggcagaagtatgcacctactggggtgcaggggacccaaaactcccaatgggagctggcaggaggtcctgggaagacgccatgaaaggatcccaccaggaaagcggctctagggcagagcataaattacgagggtcctcccagggagcacggtcctgagtgggaatgagtgacctgcgtgcaatctcgaccctggcagracaggactggcctcagccgacaaggctcagttctttccattcctgat

SEQ ID NO: 532603 - DNA, 164 bp, Homo sapiens
ctggggtggcccagtcgtgttcaatggcccactcaaaagtggacaaagcaggtgtttggatggacctgggagatcttgctcagagattctgacaggacaaaggtaaaggaagggccagagtggtsggagagatagtcacagtctatggtctgcacaggatggag

SEQ ID NO: 532604 - DNA, 502 bp, Homo sapiens
tataaggaaaaacaggtttacctaatgaaaatatgcttagtgacttgggataaaccaatagatgttcacaactgatggagagccgtgaaagagagataacggtaaatagttacaataacacaattttcctgcacctgtcgaggatttccccaaaaaaacgcagaatgtgggatgcacctaaggcataggaaagagagagggcagaaggagtaagagagaaataggaggaaggagggaaggaaagaaggaagtcaggaaggaaggaaggaaggaaggaaggaaggaaggaaggaaggaaagaaggacgtaaggaaggagaaaacaccggtgttactaaaagcccccaaaaaaatggtttccccctgtgggtaagcctacaatgtggacgaatcttgaaaatattgtgctacgtgttatgtcagtcataacagctcccctattgtgcaattccgcttataggaaatgtccacaatatgrtaatctatgcatatgggattgatcg

SEQ ID NO: 532605 - DNA, 401 bp, Homo sapiens
ttattctatcagtctcagctcagataccatctgctctgtgagctctgctctgaatcatatctgcttcttctctgggttccttgtgctctgttcttaactactttaaagcagtaattgttctgattctaattartgatccttcccaataaaattttaattttgtagatctcttccccccacccctgccccagcctaaccagtgttttcttacttttttgtgtacaggctacatcactggtcttcttttatttgtggctaaataaatgttgtgttagaagagtaaagagttcccagttacatgggatctatagttctacaaaatgaatgtatacataatccatgtaaatccttcacttattttaaaacaactttttaatttttaaattaaatttaatttgtgc

SEQ ID NO: 532606 - DNA, 401 bp, Homo sapiens
ttattctatcagtctcagctcagataccatctgctctgtgagctctgctctgaatcatatctgcttcttctctgggttccttgtgctctgttcttaactactttaaagcagtaattgttctgattctaattaatgatscttcccaataaaattttaattttgtagatctcttccccccacccctgccccagcctaaccagtgttttcttacttttttgtgtacaggctacatcactggtcttcttttatttgtggctaaataaatgttgtgttagaagagtaaagagttcccagttacatgggatctatagttctacaaaatgaatgtatacataatccatgtaaatccttcacttattttaaaacaactttttaatttttaaattaaatttaatttgtgc

SEQ ID NO: 532607 - DNA, 401 bp, Homo sapiens
ttattctatcagtctcagctcagataccatctgctctgtgagctctgctctgaatcatatctgcttcttctctgggttccttgtgctctgttcttaactactttaaagcagtaattgttctgattctaattaatgatccttcccaataaaattttaattttgtagatctcttccccccacccctgccccagcctaaccagtgttttcttacttttttgtgtacaggctacatcactggtcttcttttatttgtggctaaataaatgttgtgttagaagagtaaagagttcccagttacatgggatctatagttctacaaaatgaatgtatacataatccatgtaaatccttcacttattttaaaacaaytttttaatttttaaattaaatttaatttgtgc

SEQ ID NO: 532608 - DNA, 596 bp, Homo sapiens
cccagctgtgtgtgtgtgtgtgtgtgtgtgtgtgtgtcaggggcactttttcccctgtactgcttacctacattaatctctacagtgaaggattcctgaaagtacagcatgccccaaaacgcagtaccctaatctacccaggttttgctttatcaatacatacaatcaagaactatcccaggttttcctatcccaggtttttctctatccayacatacaatcaagaactatcccaggttttcctatcccaggtttttctctatccatacatacaatcaacaactcattttctcagcatgtgtttctgaacctaaaccattgctaagaaatactagaactatcaaaattcctatttgatagaccacaaacttggagcagtagagaaaaacagcaaataagtctccatagtaagccacagttttggtcatctaaactatgagtaataaaaagtaaatttcaatcaactgtgctaaaggaaagactaagatatctttatattctctgtataaaatattacagaatcttattagtaagaaagtttcatcaaagagtatgcagtcaaaaacgtaaaaagaatgcatagtggtaagtgagag

SEQ ID NO: 532609 - DNA, 525 bp, Homo sapiens
ttttaaatttcaaaaacaatttcaaattttgaacaaagtgcttctctaaaccatgcaagctgtatgatgaaattaattattttcatttgcacatgaaaagaatattctgttttctaaagaggttatcaacggatcaagatacttttccatattgtcaaatctacctacaatttcagtgaggaaatctgaatagtgctattattataaactaaaaaattaattttataattgataattatacaaagacaaagacgtttataataaaagaaaatttattttacaatcttttagaaggaactcaatgaaaaatagttgatgagaatcccggcactttgggagaccaaagcaggaggaatgcttgaggccaggagttcaagrttacaatgagttatgattgtgcgaccgcactccagcctgcgtgacacagcaagactctgtatccaaaaagtaataataataattaaattgaaaattaaaagaaaggaagaaacaatgagaccactaaaaaatccgcactgagttgag

SEQ ID NO: 532610 - DNA, 458 bp, Homo sapiens
ttttggaagttaaaaaagaaaagacagaaatgtggactgggagagttgggaatgtgtagagaagggaggcggccaccacagagccctgaggggaaggagatcagaacccatggaggaaaccacaaagcagcasccagagatgctggaggaaaaccaaggggctgcagagtcatggacaccacgggaatgttcaaggtgaggggagtcgcttccagtgtcccaggcagtagagatgagaagcaaagatgaaagcagaagagtggctgttggatgtggccattagcaggtgagtggtgtctccagagacagagcagttctggggtcacagaggagccaaaagccacactgcaaagaatcaagaagggaatgcaaaacacggaacctgctgaaaaacagacagtgacctgaaacatcaataaataatagccaggcacggtggcatgtgcctgtattcccag

SEQ ID NO: 532611 - DNA, 681 bp, Homo sapiens
gcttcacaatgctctgggagaggagccacagctatactctctgagagcaccctgtattcttcttcatcctgcttatgacagtttgtaatcctacatttattttaaacttgtttaatgagcatctctctccatcactcagtttgaagctctacaaacaaggtcaggtaccatattggttttacttcctgtcctagtccatttttgcattgctataaagaaatatctgggactgggtaatttataaagaaaagaggtttaattggctcatagttctgcaggctgtacaggaagcatgatgctggcatcttctcggcttctggggaggcctcaggaaacttatgatcattgcataaggtgaagggagaggaggcacgtaggcacattacatggtgaaagaaggaataagaaagagagcagggaggtgctacacatttttaaatgaccagatctcacaagaacttactatcacaaggacagtaccaaggggaatggtgccaaaccattcatgaaaaactacccccatgatccaatcacctcccaccaggccccaactccaatactggggattacagttcaatatgagttttgggcagggacatagattcaaaccatatcacttcccttcatcttcctggcaccatgcctgacacmtactgaatactcatcaaagagtgaataaaa

SEQ ID NO: 532612 - DNA, 455 bp, Homo sapiens
gtgaattgagcaaaagaaaaaatgcaaattgagaagcacttattcaacaaaatgtactgaatcttggcgtctgttatttcagttaggggcagctcccatcccaacacattccacccccaggtctgtggtcccacctaaagaaattgacattatttggagcagactatggaaaaattcatgcccaagaatgttgtggagaaaaatatatagatctcaacagcaaatgattagtgtaggccaacatctcagggtaattagttcattcaagctttaaatttacagacaactcagaaacttaacatggagataaagggaaagggaaggtaaaagaccaccatgttgataccacatagtactggtggttcagaacctatgcatawgtgtaaggccacaattttatcatgagtgactacagagaaaatgtgtgagctactactcctgactgaaagtggaac

SEQ ID NO: 532613 - DNA, 571 bp, Homo sapiens
atatagtgcttaccatgttccagacactattttaagggctacatacataggaagatttaaatttgtggtacttcctacatgagataggtggtagtttttatcataatcctcattttatttttgaagaaactgccctaggcttctaaacaatgaacattggaaccaagggtccactctattgtatttgattcagaatctaggccccaaacaattatattcacagccccgttttggttctgtgtacaaaccattattggctgactaaaagaatgaaaaaggtagatgatattaaataagaaataactatgtcttggtgtagaaatttgcatcaataattctgaacggactttgcatttacctccctttatttctcccaagtattacaagtagtctgacttaaacaagtctgttacaggaagaattaactccagcttccccaaatgacaagacctgctccatttataaatgctgtaatcaaatggcaggttactacacatttaacaatttaaattatagtaatcgatgyttaaaattactggtcatatgagagaaaatactttcaaatgattaa

SEQ ID NO: 532614 - DNA, 380 bp, Homo sapiens
tggttaacataaactgtgcttatgtgctaagtactttatgtacatgatctcatttaatcctcataacaaccctctaaggtagataacagaaatatccccattttatagatgagaaaactgatgytaaaggaagtccaagatcatacaattagtgaatgatgaaacaagaatgacttcagatcacatgttcttcagcattactgaggttcagagaagtaacctgactggtcacaaagataagtaatagacctggtatgggaacccaggcctacctgattccaaagcttgcttgctttgtaattacaaagctctttgctaggcaggaccatttgctcattgccttgggacacggcattgccaggaatcatactgttagctca

SEQ ID NO: 532615 - DNA, 625 bp, Homo sapiens
agaggaaactgtgaagcttgcacaatgtgaggaggaaaatggaagcctggaagaagagcccatgtgaaaggtatagggcaattcagacagggaacaagaaaattagaaaagaataaggcgctggcaagctgagcagaaggagattggtgtcagaaattctgagaacaagatacacttacgtgatgttactttgtcagaaatacatggcaaaagagaaaaaaaaaactgcagaaaaaactccctaggaatgagtgctaaatttaacaaacacaaaatacacaacatctaatttcatttgaatttcagataaacagttttttttgtatatgtgtgtcacatataatacttgggacatacattaaaattgatatttaaaatttaaattgaactgaacatctgaattttgtctgtcatccttactcaagaggaasttcctctcattttcactattcgtcccccatttttccctagaaaatgtctcacttccctgaggaagctcagagagtacaattatgttttcatgggctaggtactagaggatctataaaaaccctccaaagcaagactgcatcaacatagcagaaatcagtgtctggaaattgtgtggtgacatacaattggcctt

SEQ ID NO: 532616 - DNA, 468 bp, Homo sapiens
tgagatgcctgcagaagttaaagggaacatgtagtaggaagaagctgaacatgtttagaatattaggctttatgactaaatataaaagagaggactatggtagtatgctttacattaataaattattycattttaccaaccctttcccactaccttatataaagaacactgcgtacctagtattttaggttttaggaagaagtataatcaaattaatatcacctatgattacataatagattatgagagactgtattgggagtacaaggttttcaccttaataaagaaaaggagtagatgctgagggccaaaagggtggagaatgtggatatcatgcatttgcctgtccagaattactctccaccatgctatacgttgcctctagatgttgactgttttgtatatattatttggctccattgcttccttgcttccagttagtgtaagtcacacgtaaagtcaagcagt

SEQ ID NO: 532617 - DNA, 468 bp, Homo sapiens
tgagatgcctgcagaagttaaagggaacatgtagtaggaagaagctgaacatgtttagaatattaggctttatgactaaatataaaagagaggactatggtagtatgctttacattaataaattatttcattttaccaaccctttcccactaccttatataaagaacactgcgtacctagtattttaggttttaggaagaagtataatcaaattaatatcacctatgattacataatagattatgagagactgtattgggagtacaaggttttcaccttaataaagaaaaggagtagatgctgagggccaaaagggtggakaatgtggatatcatgcatttgcctgtccagaattactctccaccatgctatacgttgcctctagatgttgactgttttgtatatattatttggctccattgcttccttgcttccagttagtgtaagtcacacgtaaagtcaagcagt

SEQ ID NO: 532618 - DNA, 642 bp, Homo sapiens
cctgcagaagttaaagggaacatgtagtaggaagaagctgaacatgtttagaatattaggctttatgactaaatataaaagagaggactatggtagtatgctttacattaataaattatttcattttaccaaccctttcccactaccttatataaagaacactgcgtacctagtattttaggttttaggaagaagtataatcaaattaatatcacctatgattacataatagattatgagagactgtattgggagtacaaggttttcaccttaataaagaaaaggagtagatgctgagggccaaaagggtggagaatgtggatatcatgcatttgcctgtccagaattactctccaccatgctatacgttgcctctagatgttgactgttttgtatatattatttggctccattgcttccttgcttccagttagtgtaagtcacacgtaaagtcaagcagtagatctgaggaagggaggagtgtacggatgtgttattaatttcttctgtttatttcctttaggttcacttcgtggcggcagagtaaaggccacagctactggaaaatgactttccctagcctccccttcctgatkttcatcaatcacattatccccttgctccttccagcttagtggtggt

SEQ ID NO: 532619 - DNA, 492 bp, Homo sapiens
atatgcagatgttgttacccctgggggagatggtggaatgaaacctccatggttactgaggaacaactgtatatatatatttttttttttgagacagagtttcactcttatggcccaggctggagtgcagtggcatgatcttggctcactacaaccttcacctcctgggttcaagcgattctcctgcctcagcctyccgagtagctgggattacaggcacccgccaccaagcctggctaattttttgtagagacagagtttcgccatgttgggtacgctggtctcaaactcctgacctcaggtgatctgcccccctcggcctcccaaagtgctgggattacaggcatgagccaccgtgcctggccaacaactgtattcttagcatggattttgagcagacaaggacaatcttaattctcaggctgctgatcttgaactacaagttggcttaacattgtagactaagctaaggctgactgagacaaatttacg

SEQ ID NO: 532620 - DNA, 492 bp, Homo sapiens
atatgcagatgttgttacccctgggggagatggtggaatgaaacctccatggttactgaggaacaactgtatatatatatttttttttttgagacagagtttcactcttatggcccaggctggagtgcagtggcatgatcttggctcactacaaccttcacctcctgggttcaagcgattctcctgcctcagcctcccgagtagctgggattacaggcacccgccaccaagcctggctaattttttgtagagacagagtttmgccatgttgggtacgctggtctcaaactcctgacctcaggtgatctgcccccctcggcctcccaaagtgctgggattacaggcatgagccaccgtgcctggccaacaactgtattcttagcatggattttgagcagacaaggacaatcttaattctcaggctgctgatcttgaactacaagttggcttaacattgtagactaagctaaggctgactgagacaaatttacg

SEQ ID NO: 532621 - DNA, 639 bp, Homo sapiens
aaactattcaaaatggactttgccttaggcccccacatttcacccatctgtaaataggctgaaaatattrttcaaagaccatataactcaatgccttattcgaaagtggccaagcatagtacatgaagatacatttctcaaaaaaagacatgtaagtggccaaaaaacatataaaaaatgctcatcatcactcattatcagagaggtacaaagcaaagccaccttgaaatgctacatctcatcagtcagtatggctgctattaaaaagtcaaataatgacagatgttggggaggctgcagagtaaaaggaagcctaatacactgttggcgggaatgtaaattagttcagccactgtggaaagcagtttggagatttctcaaagaacttaaaacagagctaccattcaacccaccaatacaattactgggcatatagccaaaagagaataaattattctgccaaacaggcacatgcaagtcatatgttcgttgcaggactattcacaatagcaaagatgtgaagtcaaccaagatgttaatcaatggtgaattggataaagaaaatgtgataaatacacaccatggaatactatacaaacataaaaaaaagaatgaaaacatgtccactgaagtaacagg

SEQ ID NO: 532622 - DNA, 557 bp, Homo sapiens
tcatatctctcctgagttctttctttctttttcttttcttctttctttttttttgagagggagtcttgctttgttgacaggctagagtgcagtggtgcaatcttggctcactgcaacctccacctcccaggttcaagcgattctcctgcctcagcctcctgagtagctgggactacaggcacgcaccaccacacccagctaatttttgtacttttagtagagaccgggttttaccatgttggccaagatggtctcaatcttgacctcatgatccgcccgccttggcctcccgaagtgctgggattacacgcgtgagccaccacgttcggcctatctctcctgstttcttgaaaggtcatataaactttagcatgagtgactccattttgatttggtctggtctgctggggcctagtgcaggaggtcagtctaaaacaatggcctcctataaatctcatttaacacatactaaactgctaaagccttaggaagataaacacttcagcatatctcttgctttatgtcctcaaaaaaacccacaactgtgtccaaatgct

SEQ ID NO: 532623 - DNA, 541 bp, Homo sapiens
ttttaaatcaaggtattacattgtgttttgagaaataatactgttcatacttaatataatacagaataatgtaagcataactattttgtgcactgggaaactaaaaaatgtgtgtgacttattttattgcaaaattaattttattgctgtgttctggaaccaagcctgaaatatcttttaggtatgcctacgctggatttgagacatgtatttgtgagttcattagttacagtagctagtattaccctattttagttattaattataataatatggtaatgagatataatggaatttaaaataagctaaagtaggatatcagatatctattcttgttggactttgagtaagaaaaagaggcatagggagaggagttacaagtaggaaagggatgtagagaaggtggggaccatattcatgtattgtgttttggtcaawttgacaattttgatgttgattatcaggcaggctgcaagtagtgaggggttctctaagagccaggttgaagtgaccgcactgtagaagcctacttcaggactca

SEQ ID NO: 532624 - DNA, 616 bp, Homo sapiens
aatataatgcataggtatcagaaatgttttaatattatatctagtctgtacacacatctcataagttagtatgatcatcattttccagatgagcggaatgagacatggaaggattaaataattctcacagggcttaccagttgtagcatccttaccctttttatgcacccagttgtctgaccctggaacccacactcttatttcaccactctacttttctyacattgagaaatttgcattcacttcaatactagagaagtagacaaagggcttctgctactgaaagccaagtcaattcagtctgaagtgagttctacaattagagttttcatggttcaacatctcatcaatgaatccacaatctttcccttctagtaatcatcctcgttaagtcaaagttcgtatttgggaccctcctgtctcccttcctcactctcatccctgccttccttttaccccgcccagagatcctcagtggacacaggtgcaacactcattgccctcaaagttcccctccaaaaacacaaaaatgctcacccaaaccatccttctctgttaaacaatgaccatcttttcctcgttaaagctcttgtaagctcactatcgttctaattca

SEQ ID NO: 532625 - DNA, 495 bp, Homo sapiens
tgaactgtatatatctggtaggctgatgtagcaattagtaggctgaggcagagagatggactcaaaattctagtagctagctgaggttgaatctcaaaagatgcataagacacatatttaataagagacaggaactgtcctaggtgctctgtttatagcagtgaacaaaaaaagttmctgctctcacagagatgtccttacatcttggctttctattggtatttcacagcggcataatggcttattttttgtactttttcttcacttttcttctaagttcttatgttactcctactgagaggtatactcttcctctaagtattcacaattgcatttcgtttttcttaattttattacccccattccttttagatgtcctgttattttattttattttttaaaaattaattttgtttcaagttccaggatacacgtgcaggatgtgcaggtttgttatgtaggtaaatatgtgccatggtggtttgcagcacctat

SEQ ID NO: 532626 - DNA, 495 bp, Homo sapiens
tgaactgtatatatctggtaggctgatgtagcaattagtaggctgaggcagagagatggactcaaaattctagtagctagctgaggttgaatctcaaaagatgcataagacacatatttaataagagacaggaactgtcctaggtgctctgtttatagcagtgaacaaaaaaagttcctgctctcacagagatgtccttacatcttggctttctattggtatttcacagcggcataatggcttattttttgtactttttcttcacttttcttctaagttcttatgttactcctactgagaggtatactcttcctctaagtattcacaattgcatttcgtttttcttaattttattacccccattccttttagatgtcctgttattttattttattttttwaaaattaattttgtttcaagttccaggatacacgtgcaggatgtgcaggtttgttatgtaggtaaatatgtgccatggtggtttgcagcacctat

SEQ ID NO: 532627 - DNA, 604 bp, Homo sapiens
aatatgagcatcatgtaacacatggctagaaatgttgaaagaaaacaatgaatgaaagcattgcaatatccttgtaaaaactgaaactagggtaccccttgaccatgctcgtccaatcctgtagacccactcattcttccaggcaatttttcaagttagtgtaaataactccagattctcaatgcacaaacatatataaccacagaaaacatagttattattttagggtgttagtaataagtataaatggtatcattctgaataactaatgacatttctatgatgttaaattaaaaattgaatatacttgcctgaccagggtaatatccatatccttctggataagttcagtctgtttattactcaactgtaatgatagagcattgtatttactctgtgatacttcaacttctttccttgcttcaattaaattgtcttcaaaggtctaaaattagagtgcttatatcaataatcaaacataataaatactacatgtaacaaaacatctgttatatttaattattctacaaaatgacagagaaaaatagttttaattttttcacttayttaaaataattttaacacaaacaataacttttatacc

SEQ ID NO: 532628 - DNA, 476 bp, Homo sapiens
gttattagtatcttgctaagctcccacatgggaggaagtgagcttccaagatcatctggatttgtctttcttcactttttctctcctcttttcttcttccttatttctctcttcttctataaatcgccaaatcctctcccctaacagcgacctagaagaaacaaaatttttatcagattacaattttaggaaggaataagataacagatattccttgattagttgatggagagatgaatggacacgaatacatgagagttgatgctttggcttcgttttattttacycctacttcttcctctacaactgcttattactcttcaaaaggacgtacagcgataactttgattgcacctcagccactgctcacaggagttcaaacgagctgatgaaaaatggaaggtcttctcctggatgctcaacacattgcaccaaatgagttgggaagtaataggcacaaaaccagagcctgggac

SEQ ID NO: 532629 - DNA, 530 bp, Homo sapiens
aaaagccttctaagtgagtagttctgttttattattggaagataatcactgttgaaatatgagaatacagatagaacttccaagtttatttcagagttatttaagtatataaggatattagagtttargaggcatagattttgtgagaattataagattggaaacttcaaatgggagattaaagttaactagtagtacattggattttgcttatgggctctaagagtaaagttttgaagaaaatgctgtagaacatcattcttaactttcattttaggttcaaacgtacatatgcaggcttattatataggtaaattgcatgtgacagggttttggtgtacagattatttcatcacccagggggtaagtatagtgaccaacaggtagttttttaatcctctccctccttccccgctccaccctcaagtaggccctagtgtctgtttttcccttctttgcgtccatgtgtactcagtgttgagttcccacttataagtgagaatatgcaatatttggttttctcttcctgc

SEQ ID NO: 532630 - DNA, 612 bp, Homo sapiens
acatctggaatgttgtagactgctctgcgtttagtatattattaacctgctatgcaaycactcttgtgatcaccttcagcaaggtaggaaatctctggcaggcactctcaagggcagtgacttcaacacattcatgcctaccccaccctcaacacatttttgggtcatttgtttccccacacggccatgggcaaatctcttaccctctgtggccatcatgtgtaaagaatttttttttttttttagacagagtcttgctctgtcacccaggctggagtgcagtggtgtgatcttagctcactgcaacctctgcctcctgggctcaagcaattctcctgcctcagcctcccaagtagctgggactacaggcacccgccaccactcccagctaatttttgtatttttagtagagatggggtttcaccattttggccaggctggtcttgagctcctgaccttgtgatctgcccccctcggcctcccaaagtgctgggattacaggcgtgagccaccatgaccagcctgtttaaagcatttttaaattgggaaccggaataaagttctgttcttctcccttgagatcagggagcacttctcccttgcttcttctct

SEQ ID NO: 532631 - DNA, 612 bp, Homo sapiens
acatctggaatgttgtagactgctctgcgtttagtatattattaacctgctatgcaatcactcttktgatcaccttcagcaaggtaggaaatctctggcaggcactctcaagggcagtgacttcaacacattcatgcctaccccaccctcaacacatttttgggtcatttgtttccccacacggccatgggcaaatctcttaccctctgtggccatcatgtgtaaagaatttttttttttttttagacagagtcttgctctgtcacccaggctggagtgcagtggtgtgatcttagctcactgcaacctctgcctcctgggctcaagcaattctcctgcctcagcctcccaagtagctgggactacaggcacccgccaccactcccagctaatttttgtatttttagtagagatggggtttcaccattttggccaggctggtcttgagctcctgaccttgtgatctgcccccctcggcctcccaaagtgctgggattacaggcgtgagccaccatgaccagcctgtttaaagcatttttaaattgggaaccggaataaagttctgttcttctcccttgagatcagggagcacttctcccttgcttcttctct

SEQ ID NO: 532632 - DNA, 612 bp, Homo sapiens
acatctggaatgttgtagactgctctgcgtttagtatattattaacctgctatgcaatcactcttgtgatcaccttcagcaaggtaggaaatctctggcaggcactctcaagggcagtgacttcaacacattcatgcctaccccaccctcaacacatttttgggtcatttgtttccccacacggccatgggcaaatctcttaccctctgtggccatcatgtgtaaagaatttttttttttttttagrcagagtcttgctctgtcacccaggctggagtgcagtggtgtgatcttagctcactgcaacctctgcctcctgggctcaagcaattctcctgcctcagcctcccaagtagctgggactacaggcacccgccaccactcccagctaatttttgtatttttagtagagatggggtttcaccattttggccaggctggtcttgagctcctgaccttgtgatctgcccccctcggcctcccaaagtgctgggattacaggcgtgagccaccatgaccagcctgtttaaagcatttttaaattgggaaccggaataaagttctgttcttctcccttgagatcagggagcacttctcccttgcttcttctct

SEQ ID NO: 532633 - DNA, 612 bp, Homo sapiens
acatctggaatgttgtagactgctctgcgtttagtatattattaacctgctatgcaatcactcttgtgatcaccttcagcaaggtaggaaatctctggcaggcactctcaagggcagtgacttcaacacattcatgcctaccccaccctcaacacatttttgggtcatttgtttccccacacggccatgggcaaatctcttaccctctgtggccatcatgtgtaaagaatttttttttttttttagacagagtcttgctctgtcacccaggctggagtgcagtggtgtgatcttagctcactgcaacctctgcctcctgggctcaagcaattctcctgcctcagcctcccaagtagctgggactacaggcacccgccaccactcccagctaatttttgtatttttagtagagatggggtttcaccattttggccaggctggtcttgagctcctgaccttgtgatcygcccccctcggcctcccaaagtgctgggattacaggcgtgagccaccatgaccagcctgtttaaagcatttttaaattgggaaccggaataaagttctgttcttctcccttgagatcagggagcacttctcccttgcttcttctct

SEQ ID NO: 532634 - DNA, 556 bp, Homo sapiens
gggtgtggtggttcacgcctgtaatcccagaactttgggaatccgaggcggggtggatcccctgaggtcaggagtttgagaccagcctggccaacatggcgaaatcctgtctctattaaaaatacaaaaattagccaggcctggtgacaggcgcctgtaatcccagctatttgggaggctggggcaggagaatcgcttgaacccaggaggtggaggttgcagtgagctgagatcctgccattgcaatccagcctgggcaacaagagtgagactccatctcaaaaaggaaaagaagtggagtccttttccctctccctaaatatgggctgacattgtgatcttctttgaccaatagaatgtcatggcaataatgaaggtgcagtttagcccataagaagtggtaccttctgtttggctctcttggaacccagcctccatgytgtaaggaagtccaaggtatattgctgaaaaaagaggggtcatgtaatgaggccctggaggatgagacaccgtatggacagaggcatgtggtggagagctgaggaacccccgccca

SEQ ID NO: 532635 - DNA, 556 bp, Homo sapiens
gggtgtggtggttcacgcctgtaatcccagaactttgggaatccgaggcggggtggatcccctgaggtcaggagtttgagaccagcctggccaacatggcgaaatcctgtctctattaaaaatacaaaaattagccaggcctggtgacaggcgcctgtaatcccagctatttgggaggctggggcaggagaatcgcttgaacccaggaggtggaggttgcagtgagctgagatcctgccattgcaatccagcctgggcaacaagagtgagactccatctcaaaaaggaaaagaagtggagtccttttccctctccctaaatatgggctgacattgtgatcttctttgaccaatagaatgtcatggcaataatgaaggtgcagtttagcccataagaagtggtaccttctgtttggctctcttggaacccagcctccatgctgtaaggaagtccaaggtatattgctgaaaaaagaggggycatgtaatgaggccctggaggatgagacaccgtatggacagaggcatgtggtggagagctgaggaacccccgccca

SEQ ID NO: 532636 - DNA, 549 bp, Homo sapiens
gtttgaaaaggaaggtagcatagaaacaaaagccaagatagactccttagagatggtcaccagagctaggagaggcagtctgtcccccagggtctctagggttccttgggcattagccattcaccatttgaatgtggactacaatgaggatggagttattgtctccattctgagaacagagaaacaaaggccagatggaacagtacatctgtggtagaaaaaaatttaaaacttaattaaaattaaacytcaggagactgtacaacctattacctaagagcatcgtgggaaatggaactgctctgacaggttttagtgtggggagctgagatgcctgcctttactcccccactcccatgccacagtgtcctaaaatttcaccttaaactctggagctctggagtgctaaggaatccccaacctgtgctcactctaaccaaatcctgctttaaaaaataaataaataaataaaaaataaaactatatgtcacccctcatggcagggattccccatggagatggaatcagaggcaggactgggcagggagc

SEQ ID NO: 532637 - DNA, 549 bp, Homo sapiens
gtttgaaaaggaaggtagcatagaaacaaaagccaagatagactccttagagatggtcaccagagctaggagaggcagtctgtcccccagggtctctagggttccttgggcattagccattcaccatttgaatgtggactacaatgaggatggagttattgtctccattctgagaacagagaaacaaaggccagatggaacagtacatctgtggtagaaaaaaatttaaaacttaattaaaattaaacttcaggagactgtacaacctattacctaagagcatcgtgggaaatggaactgctctgacaggttttagtgtggggagctgagatgcctgcctttactcccccactcccatgccacagtgtcctaaaatttcaccttaaactctggagctctggagtgctaaggaatccccaacctgtgctcactctaaccaaatcctgctttaaaaaataaataaataaataaaaaataaaactrtatgtcacccctcatggcagggattccccatggagatggaatcagaggcaggactgggcagggagc

SEQ ID NO: 532638 - DNA, 549 bp, Homo sapiens
gtttgaaaaggaaggtagcatagaaacaaaagccaagatagactccttagagatggtcaccagagctaggagaggcagtctgtcccccagggtctctagggttccttgggcattagccattcaccatttgaatgtggactacaatgaggatggagttattgtctccattctgagaacagagaaacaaaggccagatggaacagtacatctgtggtagaaaaaaatttaaaacttaattaaaattaaacttcaggagactgtacaacctattacctaagagcatcgtgggaaatggaactgctctgacaggttttagtgtggggagctgagatgcctgcctttactcccccactcccatgccacagtgtcctaaaatttcaccttaaactctggagctctggagtgctaaggaatccccaacctgtgctcactctaaccaaatcctgctttaaaaaataaataaataaataaaaaataaaactatatgtcacccctcrtggcagggattccccatggagatggaatcagaggcaggactgggcagggagc

SEQ ID NO: 532639 - DNA, 608 bp, Homo sapiens
tggccacacgctatactctgtgctctcccaaggatatgagaagctggacactcccctcaggcctgccaggcaacagcctacacccacctcagacagcagctctgacagcaacctcacaactgaggaggatgaggacaggcctgaggtgcacaagcccatcagtggaagatatgaggtrtttgaccaggtcactcaggagggcgctggacatgacccagcccctgagggccaagcagactatgatcccgtcactccatatgtcacggaagttgagtctgtggttggagagaacaccatgtatgcacaagtgttcaacttacaggtgagcccttctgatcaatacaccttcctcctcctcccatgtctagcggcatctgagatcctggatgactagttcctccaaactgggggctggggcctggaaacaggactaggggcatacgggcagggactcatggctgtgtccatgtttaccaaaccttgggatcctgtggaacgagggacttgtccctcagctctcattcttgggccactaataaggaaggtgttggagaaccagaggcaccgtccccactgcactaaggcagctcccaccctgtgtgtgagat

SEQ ID NO: 532640 - DNA, 636 bp, Homo sapiens
tggccacacgctatactctgtgctctcccaaggatatgagaagctggacactcccctcaggcctgccaggcaacagcctacacccacctcagacagcagctctgacagcaacctcacaactgaggaggatgaggacaggcctgaggtgcacaagcccatcagtggaagatatgaggtatttgaccaggtcactcaggagggcgctggacatgacccagcccctgagggccaagcagactatgatcccgtcactccatatgtcacggaagttgagtctgtggttggagagaacaccrtgtatgcacaagtgttcaacttacaggtgagcccttctgatcaatacaccttcctcctcctcccatgtctagcggcatctgagatcctggatgactagttcctccaaactgggggctggggcctggaaacaggactaggggcatacgggcagggactcatggctgtgtccatgtttaccaaaccttgggatcctgtggaacgagggacttgtccctcagctctcattcttgggccactaataaggaaggtgttggagaaccagaggcaccgtccccactgcactaaggcagctcccaccctgtgtgtgagatgggaagccagggggtatcccctctcctc

SEQ ID NO: 532641 - DNA, 526 bp, Homo sapiens
tcttcttaccccagtagaacctaaactacccttcctggtacagaaattgattcctcggaatagaattgtttcataagaaaaaatgataaactgtgtagcatggtttaaatattagcatacaggcctcaaaaaggtttttagaagacccattgatggagatcccattaggtggtggagaaagattgtttaaattgttgattgagatracccaaaatccagatcatgcacccaatgaactcttaaaggagaaaagagtgatatcatatattagatgttggaggctgcattggataaaataattcaactaagacatgatctcaaaaataaattggctgattttcaagcaggaattaagggtagtagagataatccagaaattttgaggtttgggcagttttgcaacctcaaataccaagatttaaaaaattttaaatgttactaagcctctgcattagtagcaaaaattaaacgttttactttaattcttgcatcattttaaaacctctcagcatattatgataatatg

SEQ ID NO: 532642 - DNA, 547 bp, Homo sapiens
tttgaaagtgaacaactgagatatctatcagcaaccaaaggcatagtaattgatatatttttaatttgtcaacattatatttatcaacttgtccaaatttaatcaacagcagagaagataaactttagtggaatatttatagtttgatatacactaaagccaaatgctgagaagaaaaacatgtaaaatgccttttttttaaaaaaaagaaacttttattctttttgggaagaggttgaagagatgtgcagaagaaattttaaagaaagaagaagaggaaattgatagtttggcattttaattctctgtttttaatgatccattttaatgatgtctagcaaattttattatggtttatattcgtaagttatctcttcaaataagttacacacaattcagcactwctttactaattggatagtattattgataaaaagcgagaaaaatgtatttgaaaccatagccattaacaaagagttgatcatatgtgtattgttaatatacctttttaaacacttcagtataatttgttaaaacatgattaaca

SEQ ID NO: 532643 - DNA, 678 bp, Homo sapiens
tattggtctactatcacagtactataaaaaactacctgagactgggtaatttataaagaaaaggggtttaattgactcacagttctgcattgctggggaggcctcaggaaacttacaatcatgacagaaagtgaaggagaatcaagcaccattttcaaaaggctgcaggagaaggagagtgaggggggaagtgccacacttttaaaccatcagacctcgtgagaacctactcactatcacaagaacagctttggggaaatctgcccccatgatccagcacctcccaccaggtccttcctctgacacatggagattataattaggcatgatattttggtgaggacactgagccaaaccatataagctattttatgaaattagaatttttgaaattyctaattgcttatatgagcattttatggaaagtaagatttggagtgtattatttatttgattccaaaatgggtatgtcctacagttttaaaaaacaaaatgtttaaaggcataaaaacaaatagttctctcttttgaataataacaacctaaaccagagaggcaacatcatatgtttaccatgattgggactactggggcctaggtttaaatcccagcgtttaccatctgtttaagcagggccatgttaattaacctcttttactatttgttttggcaggtgca

SEQ ID NO: 532644 - DNA, 525 bp, Homo sapiens
ctgattataaccctgcaaccttactaactctagagctggtcatgccttgtgaatgtccatattcaccagtctttgcttcccatattccacaaacccagacagatactcatagatcagaggaggaacacacatcgtaagtcacatcactcagcacaggaaagtggcccaggcccgtctgagaaatgtgtcttaagtttcgccttctggtagcaactcagtattctcggcatgacaatctcggasagtagataaatcaagttcacttaaccttttcgcatacttaagatccccagtgacatggcattaacaatcatgtatgcctggacacatgatttatatttcccccaccttgcaaaaaagaaggcaaaaacgaataagagaacctaaactgtgttatacattttttttaaggcagaatgtttgagccagcaaacaaaaattcttgctttagttaaagagcataaaggaaatgttcactgaagagagcttttcttttcaattgctatcctgcagtacagggcacta

SEQ ID NO: 532645 - DNA, 626 bp, Homo sapiens
tacggacatgaggttaaggaaatctgcttcagaatgggcaaggagggatttggctgaaacagccaaatatttcaagataaaatttttcaatataaaagtgaaatgatccaatactgctgtgatacagcaatattcataaaataagaataaatgtgtcactattcttcatgatttttagatatctcttttaggatctgatattgaatttgtaaagaaatatttamctacagttgagcaattctgattgttttagtttctttataaggttggattcaagaaaaattagttttggtggtttttattaaacaccatatctgacacaattctaattaaaaatgttcttgctattatttatgtattcatttatctacatacacacatagaaaagtatctagaatgatgttcaccaatagctaggcatgattaatattgagtaaagatttgggagtttatttttcttttttctttttgcatttaaaaaattttattttttttaacttttattttaggtttaggggtgcatgtgaaggtttgttacataagtaaacttgtaatttcatcaaccaggcattaagctcagtacccaatagttatcttttcttctctcttccctcttcccaatctcc

SEQ ID NO: 532646 - DNA, 626 bp, Homo sapiens
tacggacatgaggttaaggaaatctgcttcagaatgggcaaggagggatttggctgaaacagccaaatatttcaagataaaatttttcaatataaaagtgaaatgatccaatactgctgtgatacagcaatattcataaaataagaataaatgtgtcactattcttcatgatttttagatatctcttttaggatctgatattgaatttgtaaagaaatatttacctacagttgagcaattctgattgttttagtttctttataaggttggattcaagaaaaattagttttggtggtttttattaaacwccatatctgacacaattctaattaaaaatgttcttgctattatttatgtattcatttatctacatacacacatagaaaagtatctagaatgatgttcaccaatagctaggcatgattaatattgagtaaagatttgggagtttatttttcttttttctttttgcatttaaaaaattttattttttttaacttttattttaggtttaggggtgcatgtgaaggtttgttacataagtaaacttgtaatttcatcaaccaggcattaagctcagtacccaatagttatcttttcttctctcttccctcttcccaatctcc

SEQ ID NO: 532647 - DNA, 626 bp, Homo sapiens
tacggacatgaggttaaggaaatctgcttcagaatgggcaaggagggatttggctgaaacagccaaatatttcaagataaaatttttcaatataaaagtgaaatgatccaatactgctgtgatacagcaatattcataaaataagaataaatgtgtcactattcttcatgatttttagatatctcttttaggatctgatattgaatttgtaaagaaatatttacctacagttgagcaattctgattgttttagtttctttataaggttggattcaagaaaaattagttttggtggtttttattaaacaccatatctgacacaattctaattaaaaatgttcttgctattatttatgtattcatttatctacatacacacatagaaaagtatctagaatgatgttcaccaatagctaggsatgattaatattgagtaaagatttgggagtttatttttcttttttctttttgcatttaaaaaattttattttttttaacttttattttaggtttaggggtgcatgtgaaggtttgttacataagtaaacttgtaatttcatcaaccaggcattaagctcagtacccaatagttatcttttcttctctcttccctcttcccaatctcc

SEQ ID NO: 532648 - DNA, 442 bp, Homo sapiens
  misc_feature (1)...(442): n = A,T,C or G
ctattggcgtaatgactaacactcttatcaaaatctggctgtctcagtgctggaatgtgctgcactatgctgtgtttgctcatgtgtaaaatggcacacttataactggcctgttttcccttttggtattaagaactcacattccaaatgcaagtgtgagagaagctggagggcrtggaattccctggtgttattggccttccctccgccatggtctgactggggtggtttgtcttgacttgctggtgccagggtgacagtgttgagatagcacagttcagggattccttaggtggggcttttccagcggagagtgtactgtcaagtaaaattgaatcaaagagtgacatgaacaagatttttttttaaacttaatttaaaattttaaagtgtnctagaaaaacactggactttcacattagttgtgtgatcttagtgtctt

SEQ ID NO: 532649 - DNA, 643 bp, Homo sapiens
tataaagggaattgtgccgacagttttatatatagctgagaggagtttcttataaaagctttttgattcaactgtaaaaacggcaatccacttggacgcccttgtctgctgcagagagcttcctccttttgcttgttaaactttcactcccacctcacctgtgtgtccccgtcccttaatcatcttggtggtgagatgaagaacrccagatgatacctcacaagagagactgctacgttgtggtgcattggcgagactgcaactttaagaagtgtgacttttattgctgctgaattattttatctcctacccaattgaaaataaaggatataaagtgcttaggttgaacacaaagtcctctgctctaggtaacatcttcagcagccacattagcagaggcatgggtggtaatggtggagtagatgtctctttgcttctgacagggtgtctgcttatgtgttaaacaaaatagtatggtatatatttcattaagaaatctgctaaaaaatgaagtaaaacaggttcatgttcttaagaggcacaggatttgctacggcagcaagaccaaaaggcttaagtaacaaaaatgtgcatagtagttacaaacattttcatctaaacaaaacaatgtgagcatctgcat

SEQ ID NO: 532650 - DNA, 643 bp, Homo sapiens
tataaagggaattgtgccgacagttttatatatagctgagaggagtttcttataaaagctttttgattcaactgtaaaaacggcaatccacttggacgcccttgtctgctgcagagagcttcctccttttgcttgttaaactttcactcccacctcacctgtgtgtccccgtcccttaatcatcttggtggtgagatgaagaacaccagrtgatacctcacaagagagactgctacgttgtggtgcattggcgagactgcaactttaagaagtgtgacttttattgctgctgaattattttatctcctacccaattgaaaataaaggatataaagtgcttaggttgaacacaaagtcctctgctctaggtaacatcttcagcagccacattagcagaggcatgggtggtaatggtggagtagatgtctctttgcttctgacagggtgtctgcttatgtgttaaacaaaatagtatggtatatatttcattaagaaatctgctaaaaaatgaagtaaaacaggttcatgttcttaagaggcacaggatttgctacggcagcaagaccaaaaggcttaagtaacaaaaatgtgcatagtagttacaaacattttcatctaaacaaaacaatgtgagcatctgcat

SEQ ID NO: 532651 - DNA, 643 bp, Homo sapiens
tataaagggaattgtgccgacagttttatatatagctgagaggagtttcttataaaagctttttgattcaactgtaaaaacggcaatccacttggacgcccttgtctgctgcagagagcttcctccttttgcttgttaaactttcactcccacctcacctgtgtgtccccgtcccttaatcatcttggtggtgagatgaagaacaccagatgatacctcacaagagagactgctacgttgtggtgcattggcgagactgcaactttaagaagtgtgacttttattgctgctgaattattttatctcctacccaattgaaaataaaggatataaagtgcttaggttgaacacaaagtcctctgctctaggtaacatcttcagcagccacattagcagaggcatgggtggtaatggtggagtagatrtctctttgcttctgacagggtgtctgcttatgtgttaaacaaaatagtatggtatatatttcattaagaaatctgctaaaaaatgaagtaaaacaggttcatgttcttaagaggcacaggatttgctacggcagcaagaccaaaaggcttaagtaacaaaaatgtgcatagtagttacaaacattttcatctaaacaaaacaatgtgagcatctgcat

SEQ ID NO: 532652 - DNA, 599 bp, Homo sapiens
taccaataaaaaaatttcaggaaacctagtgtgattatttttaatagaaatggatattttaatacagtctcttgctttttcttgtggaaataaatgacaagatggaatttctgggtgtttggtatctgaatatttaagtatagcaggtatggtcagtttttcaaaggcattttaccatcttacttgtccatcggtaactcataagatatgtggaacaacgtcctctccaacaacctctagtatcagtctttgtaaagtttgtcaattaaatgggtgtttttttgtttttgtttttctttttgagaccgtctcaccctgtcacccaggctgtagtgctgctgcgtgatcttagctcactgcagtctttgccttccaggttcaagtgattctcctgccttggcctctcaagtarctgggactacaggtgccccccaccacacccagctaatttttatatgtttagtaaagacagggtttcaccatattggccaagctgttctcaatcctgacctcagatggtccacctgtttcagcctcctaaagctctgggattacagtcatgagccaccgcacttggctgggttttctctctctctctc

SEQ ID NO: 532653 - DNA, 599 bp, Homo sapiens
taccaataaaaaaatttcaggaaacctagtgtgattatttttaatagaaatggatattttaatacagtctcttgctttttcttgtggaaataaatgacaagatggaatttctgggtgtttggtatctgaatatttaagtatagcaggtatggtcagtttttcaaaggcattttaccatcttacttgtccatcggtaactcataagatatgtggaacaacgtcctctccaacaacctctagtatcagtctttgtaaagtttgtcaattaaatgggtgtttttttgtttttgtttttctttttgagaccgtctcaccctgtcacccaggctgtagtgctgctgcgtgatcttagctcactgcagtctttgccttccaggttcaagtgattctcctgccttggcctctcaagtagctgggactacaggtgccccccaccacacccagctaatttttatatgtttagtaaagacagggtttcaccatattggccaagctgttctcaatcctgacctcagatggtccacctgtttcagcctcctaaagckctgggattacagtcatgagccaccgcacttggctgggttttctctctctctctc

SEQ ID NO: 532654 - DNA, 360 bp, Homo sapiens
ccaggaactgccaaaagctggttactccaagaccctaggcattctgtcaaaatctaacttggatgatcatgtaaaatactyatcattttattaatatcagtatgttcattcaaatggtaacaagattttcacttgatttctaaatcactgatcttaagtgaaaaatatcaaaatagaggacttcacaaatattatcatttagaacatcctcactttaaacaacctaaagttatttttaatgttgaatcaatcatactctgaccttctccataggaaaggaaaatgtaaatatcccagacagcagagagcaaactgtcataaaaataaaactgtactttcaaatagctgtagtccacagca

SEQ ID NO: 532655 - DNA, 479 bp, Homo sapiens
ctcccactgctaatttgtatgccataagatggttgttttgttcctcagtayatttatgtcagatataattgttactgtagtaaacaactattgtgtaaaaaaatgataagtgagtgtgaaagtaaaaaaacaaatcagaaaatgaagcagaatgtaaataattgataaagacaagttctgaaaaaatatcaaattggatttaggagtcagacacctgtaagaggtttatttgaggggctaagcgtgctggtatttacacacatattacttcttgtgtctcttcaatttattggttcatttcaaaaaaccaaagctaaaaatcataaaatattcattatgtaaaaagaaacaaagttcaatgaatccatacatacataccaaagacctttgtcggatagttgacaagtatatttgcatatatgttttccaaggtaaaagaaaatttgtggctgggcacggcaactcatgcctgcaatccc

SEQ ID NO: 532656 - DNA, 479 bp, Homo sapiens
ctcccactgctaatttgtatgccataagatggttgttttgttcctcagtacatttatgtcagatataattgttactgtagtaaacaactattgtgtaaaamaatgataagtgagtgtgaaagtaaaaaaacaaatcagaaaatgaagcagaatgtaaataattgataaagacaagttctgaaaaaatatcaaattggatttaggagtcagacacctgtaagaggtttatttgaggggctaagcgtgctggtatttacacacatattacttcttgtgtctcttcaatttattggttcatttcaaaaaaccaaagctaaaaatcataaaatattcattatgtaaaaagaaacaaagttcaatgaatccatacatacataccaaagacctttgtcggatagttgacaagtatatttgcatatatgttttccaaggtaaaagaaaatttgtggctgggcacggcaactcatgcctgcaatccc

SEQ ID NO: 532657 - DNA, 479 bp, Homo sapiens
ctcccactgctaatttgtatgccataagatggttgttttgttcctcagtacatttatgtcagatataattgttactgtagtaaacaactattgtgtaaaaaaatgataagtgagtgtgaaagtaaaaaaacaaatcagaaaatgaagcagaatgtaaataattgataaagacaagttctgaaaaaatrtcaaattggatttaggagtcagacacctgtaagaggtttatttgaggggctaagcgtgctggtatttacacacatattacttcttgtgtctcttcaatttattggttcatttcaaaaaaccaaagctaaaaatcataaaatattcattatgtaaaaagaaacaaagttcaatgaatccatacatacataccaaagacctttgtcggatagttgacaagtatatttgcatatatgttttccaaggtaaaagaaaatttgtggctgggcacggcaactcatgcctgcaatccc

SEQ ID NO: 532658 - DNA, 479 bp, Homo sapiens
ctcccactgctaatttgtatgccataagatggttgttttgttcctcagtacatttatgtcagatataattgttactgtagtaaacaactattgtgtaaaaaaatgataagtgagtgtgaaagtaaaaaaacaaatcagaaaatgaagcagaatgtaaataattgataaagacaagttctgaaaaaatatcaaattggatttaggagtcagacacctgtaagaggtttatttgaggggctaagcgtgctggtatttacacacatattacttcttgtgtctcttcaatttattggttcatttcaaaaaaccaaagctaaaaatcataaaatattcattatgtaaaaagaaacaaagttcaatgaatccatacatacataccraagacctttgtcggatagttgacaagtatatttgcatatatgttttccaaggtaaaagaaaatttgtggctgggcacggcaactcatgcctgcaatccc

SEQ ID NO: 532659 - DNA, 461 bp, Homo sapiens
tggtttaatgctctatttttgtgctgcttggcctcttgcccagaggtggcattttccagaacagctatagtgtggagagggatgggcagtgggcggggccctagaactcccaagattatacgccctttgtcttccactaccagggtgggtagggaaggaccatcaggtgggggcagggctaggcatgtctaagctcagagtctccttgtataggttttgctgtggctgctgtggaggatgggggacaggttcccaggtcactggagttgtgtacctaggaggattgtggctgcctctgcctagtcatgaaggttgtcagggaagtaggggaaagccagcagtcacaggcctcacccagctcccatgcaaactgaagggccagtctcactcccaccatgcccccmacaacagccccgagtctattcccaggtggcgggtgagaggggcttgaaaacttgcca

SEQ ID NO: 532660 - DNA, 591 bp, Homo sapiens
taaaaattctgagacaaactatatgaggctccgatttgttattttttcaaataagattttggcatctatattaaattatgcttaatgtgatttatctactttaatatccaagcaagtgttttattcccataacactatgctatataccttaaatatatacaataaagtgtaagtgaattaaataaaatattttaccattgtgagctctgtctataaggcagtgagaataattttaagcttttttcaagtagatataaaatgaaccactagatggcgcaatcgtcactttaaaaagtaatgacagcatcaygtttaaaaattctttaataagaatttttactatagttttatttcttttgtgaaattagttactgatttccttttttgtgtatgaggtctttgtacattctatactctttgtgatcttcaaaaataatcttcaaaatatgcaattttgtagcagattaattctgtattttgtttgtctccattttagagaaccctatacaattttccgttttttgcacaactattaatttaggtgtaacaagcatataaaagtctatgacataaataaaaggtctgggaagg

SEQ ID NO: 532661 - DNA, 598 bp, Homo sapiens
agtagacattttggccaaagaatagccattcaatctagccaggaaaaccctgggttagacaaacttaaaaacaggtcattttctctcccttaatttctagacctctatggtgtcctctagggtgtcctagacctttatggggctattgcacatagtgaatctgtaagagaatttagtctgaggagcatgtctacactggcgtcgtgcagaaggcatttggaaaatgctggcgtgaaatcttccttcctagccatgctaagctccaaaatcaggaataccagggggccatcaggactggaagtgagggtattccagrgactgctagagagccagaggttaggactggggttaagcaaaagcagaaaataagagaagcagacacaggaggcagctatcagcctgacaaactagattcagggacttgcacattcaaagtgggaaggtttaggtcacaggcaaattagttccagagagaacctagtgcctggaagtccagtttctgctgcctgctgctgggtccttccttgcctcacctggctggactctgccaggtcagcctgtctctacttcggcatctcaaagcgttaaggccgagcag

SEQ ID NO: 532662 - DNA, 526 bp, Homo sapiens
agttaaattagtacttgaatcaaaagatataatgatgttttaatcaggggttacttttctctgaatcatatgtacaggttattgaaacaaaggaagaataacacttctgtaaaatgttgtgtcatgggttttatctagagtcacttattacgtatatgattcctgagtcactaattactaaggctttcctataagaaaaagattactaacaataggcaatgtgagcaattgcaaaactttttgaatagtaattattataggtacagaaagatttttgaaaactctattgaaggaattaaattctaataaattatgtttatttcaaacatggaattagcatcactttttattcaragatatgtacttttttcctgacaaatgaaaatcaactttggggatttagaagcctacaaacaggtttataaagaaatgtatctgtaacactaacagcattattatagtatttattatccagagtaaggcggttataggttttatgttaaagataccttttgaaagtaaggct

SEQ ID NO: 532663 - DNA, 526 bp, Homo sapiens
agttaaattagtacttgaatcaaaagatataatgatgttttaatcaggggttacttttctctgaatcatatgtacaggttattgaaacaaaggaagaataacacttctgtaaaatgttgtgtcatgggttttatctagagtcacttattacgtatatgattcctgagtcactaattactaaggctttcctataagaaaaagattactaacaataggcaatgtgagcaattgcaaaactttttgaatagtaattattataggtacagaaagatttttgaaaactctattgaaggaattaaattctaataaattatgtttatttcaaacatggaattagcatcactttttattcagaratatgtacttttttcctgacaaatgaaaatcaactttggggatttagaagcctacaaacaggtttataaagaaatgtatctgtaacactaacagcattattatagtatttattatccagagtaaggcggttataggttttatgttaaagataccttttgaaagtaaggct

SEQ ID NO: 532664 - DNA, 701 bp, Homo sapiens
ctgaatacttaaagcctgtcagcactctctgatctgcctttctgatcctactctgctccaggcagtggcactattccttctgaccctgaccttctgcatttctagctttagcttggtaacctgattgtgattttctggaataccggctataatcaatcagtacatgagtaacaataagatttccccagtacctccagataaggttatgcagtgatgataaaattaagaagattcaatattagttgggtagttcttccttccttatttttgcttatctggattttctattttattctacaataaaattctttttaaataataataagggaaatttttttcaaaagaggtacaagctcagctatgtcctaatgaaaactgagaggtaatactacaaacaagtcaaatcaaagactgtaagctaatgcagaattagtaaggtgaaccgactagataacctggggcaaatcattaaatgttctcaatgtgttcttatctataaaattaagtgggaggttataatgaaatgagttctggactccttttattctagcatgctatgattctcttcaggcatcataatttttagttattcttttgaatattttcaattttccataagaatacttttttatattttctctgaacttgttgataaggaatttaccaygctaatatttgaagtaagagctaatcattttata

SEQ ID NO: 532665 - DNA, 573 bp, Homo sapiens
gctattatgaaaaacattatgcagtttccttaaaatatcaaaaataaaacttatcatatgatttggtaatcctacttctggatatacattcaaagaattgaaatgagaatttcagagatatctacctcccatgttcattgcagaacgattcacaatagccaagacacaaaaacaaccaacctaaatgcccaccaatagataaatggataaatgaaaatgttgtatatttatataatagaatattatgttgccttataaaagaagaaaatcttgtcatttgcaacaacatgggtgaatctgaaggacattatcttaggtaaaattccctgccatgtcaccaccagactgtgtttctatatttcttaaatttgggaattrtatttttagatcaaaataactttttatgaaatcctaccatttttcttttgtgatttggcacttttcaggttttgtgctattatataactttcatatcatttccagagttattctccaactagactatatactccctaaagacaagaaaattgtcctattttttctcatactatccaatgaaccaatacctgcttt

SEQ ID NO: 532666 - DNA, 534 bp, Homo sapiens
tgttattttttttctttagattttaattaagttatttcttttgaaattaaaataaagttattgaggacatttattcgtttccccttttatacctagagtayagacttttttctttttaaagagaaaatgtttttatttcaaccttatttttgaagggtggtttcactgaatataggattcttggctgaaaaaaattccctcctctgcttttattaatactttctagaaatatcacatatcttctttaaattaagtgagcagaaaattattgtccattatggacacttcagaggcacttctgaaagtgatagtacatgctattatttgtcacattgaaacaggaagggttcctttgtccccctctcagggcctatgggatgggggcatggctcacttcttcagctccccactgctcaatcctctaggggagcatacagatgggcaggctgtggggctccgaccctatggcaatgtctgtggtaaaaatgaatgtttttcatttcattttcattatggtaaaaatgaatgtttaca

SEQ ID NO: 532667 - DNA, 534 bp, Homo sapiens
tgttattttttttctttagattttaattaagttatttcttttgaaattaaaataaagttattgaggacatttattcgtttccccttttatacctagagtacagacttttttctttttaaagagaaaatgtttttatttcaaccttatttttgaagggtggtttcactgratataggattcttggctgaaaaaaattccctcctctgcttttattaatactttctagaaatatcacatatcttctttaaattaagtgagcagaaaattattgtccattatggacacttcagaggcacttctgaaagtgatagtacatgctattatttgtcacattgaaacaggaagggttcctttgtccccctctcagggcctatgggatgggggcatggctcacttcttcagctccccactgctcaatcctctaggggagcatacagatgggcaggctgtggggctccgaccctatggcaatgtctgtggtaaaaatgaatgtttttcatttcattttcattatggtaaaaatgaatgtttaca

SEQ ID NO: 532668 - DNA, 577 bp, Homo sapiens
tgcatgttctccttgctaaggaggggacaattttgctttgatgcctccaattctaaaaaactccagttcattctttctaattagccatcatatttagtttgaactcagggtcttaaaaaaattgaaagaaacctgagggaagttgagttaaaaaattatagtcacaacaaaacttgattaaaagcacataaaattatctggaagtagcagtatttgtastgacatgggaaatgctagtctatttttttaaaattgcatttagaaagtcatttaacctcttcaaaactcaagttttgtcatctataaaatgagatcaacttgccaatttttaagactttgtgtcaggattaaataaaatattgtgaaagcactttgaacatacctatgctaatcaaatataatgtgaaatcatttcatttcatactggaaaaggcaaataaatccttcatttctcttttctgttgataaaatatccaattagatcctgtttccaattgtcatctgattttggtttcacctgaaaagttttcgctactctccactcaaattctctaaaaattcgttttctctatgaaat

SEQ ID NO: 532669 - DNA, 607 bp, Homo sapiens
gttgatgatgctacttagagttgtcccatccataacctcgagagccataaacaatggccctgcctttatatattgcctttaacaaacactaaatattatttctaaaataaaaacactttaattctaaaaagtccctaagtagcaagtaatagtactgtctttgtgaaaaaaaaaaaattataccagtgttacatacaatataaacmggaaatatgcacgtcaaaataataaaaaaattaaatatataattccaaattatttctctctccctatttcttaggaatcacgagaaagactaagactgactaaaccataaaatatttctgaaaacgagttgttaagatttgaattgcttgaaatgtctttgtgtgcctcacctgtggtactgccaatttcaaatacaacaaaagtgttttcttattctttgttctgggcagaagataatctgaacttagaaatacaccccatgcctctggcttagcaatacaccacttgggatttaatgttctattttaatagaggtttgtcacatcattttataatgaacactgaactggccaaaggtgaaaatgatactaaccaaaagaaaatattcatgcaatacagt

SEQ ID NO: 532670 - DNA, 461 bp, Homo sapiens
aagtaatagtactgtctttgtgaaaaaaaaaaaattataccagtgttacatacaatataaacaggaaatatgcacgtcaaaataataaaaaaaktaaatatataattccaaattatttctctctccctatttcttaggaatcacgagaaagactaagactgactaaaccataaaatatttctgaaaacgagttgttaagatttgaattgcttgaaatgtctttgtgtgcctcacctgtggtactgccaatttcaaatacaacaaaagtgttttcttattctttgttctgggcagaagataatctgaacttagaaatacaccccatgcctctggcttagcaatacaccacttgggatttaatgttctattttaatagaggtttgtcacatcattttataatgaacactgaactggccaaaggtgaaaatgatactaaccaaaagaaaatattcatgcaatac

SEQ ID NO: 532671 - DNA, 461 bp, Homo sapiens
aagtaatagtactgtctttgtgaaaaaaaaaaaattataccagtgttacatacaatataaacaggaaatatgcacgtcaaaataataaaaaaattaaatatataattccaaattatttctctctccctatttcttaggaatcacgagaaagactaagactgactaaaccataaaatatttctgaaaacgagttgttaagatttgaattgcttgaaatgtctttgtgtgcctcayctgtggtactgccaatttcaaatacaacaaaagtgttttcttattctttgttctgggcagaagataatctgaacttagaaatacaccccatgcctctggcttagcaatacaccacttgggatttaatgttctattttaatagaggtttgtcacatcattttataatgaacactgaactggccaaaggtgaaaatgatactaaccaaaagaaaatattcatgcaatac

SEQ ID NO: 532672 - DNA, 681 bp, Homo sapiens
gttttctcctcaacaactaccattttaaaatacgtagaactacactgcatatttatgttacaatgatagagtatatttttgtgacagaactgtcagttacactttattttcaagaaaaaaatggtattaaaaaagggagtaagctgtaaagattcactcatttggcttcttatgttgtttttagaacatttgctatacttctgayataattttacctccagccttgtaataaaatatgtgtatgttttcaacagaaagtgttaattagaataagggtaacttttactttatttgtttaaataaaatttagattcttcccctgaaatctgttttaaaggacgtattttattttcctgattacccagcttttcattgtgagccaccaagcttattttcagaaatttgaaagtttgaacactgttttgggttaagataattttaaaaatcaaatttaatttaactaatacatgttttactttcttaaagttacctgatacaagtacttactaattagaccttaatttttctttattgcctaatatttcacttaaaacttctttggcaaatctgaataaaaacgtgagtattcagattcatgaccaccttattttaatataatcttaaagcttataaatttaaaatttatgcctaatcttaatagtgcacatggagtatattagt

SEQ ID NO: 532673 - DNA, 613 bp, Homo sapiens
ctgttttctcctcaacaactaccattttaaaatacgtagaactacactgcatatttatgttacaatgatagagtatatttttgtgacagaactgtcagttacactttattttcaagaaaaaaatggtattaaaaaagggagtaagctgtaaagattcactcatttggcttcttatgttgtttttagaacatttgctatacttctgatataattttacctccagccttgtaataaaatatgtgtatgttttcaacagaaagtgttaattagaataagggtaacttttactttatttgtttaaataaaatttagattcttcccctgaaatctgttttaaaggacgtattttattttcctgattacccagcttttcattgtgagccaccaagcttattttcagaaatttgaaagtttgaacactgttttgggttaagataattttaaaaatcaaatttaatttaactaatacatgttttactttcttaaagttayctgatacaagtacttactaattagaccttaatttttctttattgcctaatatttcacttaaaacttctttggcaaatctgaataaaaacgtgagtattcagattcatgaccaccttatttt

SEQ ID NO: 532674 - DNA, 669 bp, Homo sapiens
atgagtgtttgccaccatttgcaatagattttactaaataaggccagcttttaagatgtcattttctccatttcaatcacgtttgaagaaagaattgtgttggaaaaagtagtgatggggagaagtaggaatatacaagaaggttaattatgtttatcagaagctgcatcttgaagaaacatagttcaagagtcagaagacccatgtttgagtttcaagtaccactgactagtttttctacatttgcaaagacaatactccctctaggtttgattttcattatgaaaaagaaatacattctgttgatgatctccaaggtccattctaataaattcaatacaaaaacattccctgaatttctgctttgtataagagataagatataaagctggcaacwtgctaccagtgaggcagcagaattatagttaacaaacagaaaattagagggaaatacatctgtaaaataaggtcaagcaaccgggtataaagcatccaagggggatttgggtctcaaatataatatgcaccttctgccttctctcattccttctcttcatttatcaatccgtcagtagactttaattctcttatgcctaattctgttctaaatatacattagagagctttggaattaagaagtctcttattttaacggattcccagcaaaca

SEQ ID NO: 532675 - DNA, 610 bp, Homo sapiens
tgtcattttctccatttcaatcacgtttgaagaaagaattgtgttggaaaaagtagtgatggggagaagtaggaatatacaagaaggttaattatgtttatcagaagctgcatcttgaagaaacatagttcaagagtcagaagacccatgtttgagtttcaagtaccactgactagtttttctacatttgcaaagacaatactccctctaggtttgattttcattatgaaaaagaaatacattctgttgatgatctccaaggtccattctaataaattcaatacaaaaacattccctgaatttctgctttgtataagagataagatataaagctggcaacttgctaccagtgaggcagcagaattatagttaacaaacagaaaattagagggaaatacatctgtaaaataaggtcaagcaaccgggtataaagcatccaagggggatttgggtctcaaatataatatgcaccttctgccttctctcattccttctcttcatttatcaatccrtcagtagactttaattctcttatgcctaattctgttctaaatatacattagagagctttggaattaagaagtctcttattttaacggattcccagcaa

SEQ ID NO: 532676 - DNA, 671 bp, Homo sapiens
ctgaaaaagactatttcctgtagactgacagttgtataatagatgggaaaaaaaaaaagatgattggcaaagccataagagagaaacaataaaaatagggcagtccttacctcaatttaacagaagcaaataataggaaaaagaaatctgaatctatggaagcttttaccttagacttaggcaagtaaaatcccatttcctaaggggatgttttaagcaaatttatactaaactctttttcctgaaaataaatattgaaagatttgattaggctaagtttgtgacaaggtctatgggagtgtgaatgcatatttatttacatctctgaaataggtaaaytgggaaattatctagaagtaaagctgataatgagaaaaatacaagatgtgaattaagtataaagaaataaagttatttagtagcaaaaataacaatctagtcatggtatcaaaattaatatgtaaaggtaaaatgttatttagcaattataagttattttcattgtattatattttctataaataatggtaaattcctgcttgatgatagatagctttacagtttttaataatagatacattcattgaaaaagatttccaagtgtattatgtgaggaagtggatttgataagtcaagagtactgttattcagaaatatctttcacttggtga

SEQ ID NO: 532677 - DNA, 443 bp, Homo sapiens
tggcattactgcagtgacgagggctccctggagtaggggtgacaggagccagatgatgctcctgaggagatttgctgatttcaaaagaggcatctgtgaaaacctagtaagaatataaggaatgtgcttgaacagatggtatgtgtmgaacattggaatagaatcattctctgaatcttttaaggattaataaatgtgatgaaggaaaaggattgcaaatgattaatgatgactcaattatattacacaaattatattacacaaattatattacacaaaatgcagttttactccaaaagctgggttttttttttttttttttgtacaggttatcttttattggtcatggcaaaatgatatcgtgtagataaatactttccacatagctttctaaaatatatctctgcattacaggggctactcataaagtcagaacagaagag

SEQ ID NO: 532678 - DNA, 308 bp, Homo sapiens
ctgggctactagctatgtgaacttcaataaaacacatgtactttctgggctcagtttctacatctgtgaaataatgacatgagtataggtaacatataaggtctcttccatcagcccttatgttttgtgatttttaaaccttatcttccattattactcagttatcasgtttttgggaacacagaccaagtctagattattatttatgtgtagtccagaggctggcacttagtaagtgttaaatatttgttgaatggctgaatgcaaatgccagctcacatgcattctaaattattctgcaaatggaa

SEQ ID NO: 532679 - DNA, 602 bp, Homo sapiens
gctgattcctaggagaagcagggtttgatgcaaactgaaaatacgacaagctgaattttcaaataaatgacattctcagatccgctaaattcatccatggaaaagaagaccaccatgaagccaggtaggttgttttcagtttgtttaaagccatttgtggatttctgcttaaaaatggtgcattgttgagtttatctctgttcctttcagaaagagtaagataagactagaaaaataaaattgtataaattcacaggaacaaagtaaacagaggagaagccacagtgggtgagagatagcaccaagtatctggaagaacaggaagcagtagagaaggcggcagaactgtgaaagcggaatacctagtgcatggagaggaacgagtcaattctcaccatggtagaccagaaaattccagcagctagaggtgccaggtactggagaatgctggggtaagccttggaatggaaaacagggggattggcccaaactgcttgaccaccactcccaaccctggcagcaggctgaggawgtgctttgtgaacttatgttgactcattttctcaagactagggggccccagatatgagagggcatgaggg

SEQ ID NO: 532680 - DNA, 592 bp, Homo sapiens
caaacctgcatttgaatctccattctgcctcttactacctgtgtgatttgggcaagttagttcatttcagaccgcaatgccctcatggtcaactggagataataatgcctgtctcacaggattactaaaagaattaaatgaaataatccatgtatttttgtttagtaaaatgtctaatatttagagctcaaatagtagctactattcataatttatataagttttagtgcttttggaactcaattcattagaaaatagatacagtgcaaacaaaatgttacttttttaaaaggaattttcaagctattatacagttgtcccttggtaaacacagaggagggttggttccaggacctcctgtgtataccaaaatccacacatactcaagacctgcatcagcccaacagaacctacatatctggaaagtcagcccttcatacaygcaggtttcacatcctgcaaatactgtattttctatctgttatttagttgaaaaaactctgagtataagtgcatccacgcagttcaaacccaagttattaaatataccctcttactctaattacaaaagtaattagattttagttatata

SEQ ID NO: 532681 - DNA, 533 bp, Homo sapiens
atgctgttaaggcatagtcttctcaactttctcatcctgggctaatccccttctgtgtctttctgtgaatcgagaaataatgatttttttctaaaagcatctgctttatcctttttcctgacatcacttaattatgtaggtcagtgcttttggcatcttctttaagacttcactgctatggttcccatttttagggtctctttttcaaaactatatttggcccctttgtacatgttagagttctatgtattagcaaaccctttggactctcctcagtagcagcaacacttgctgtctaaggactcattgtaaagatttaatgccacttccacatcatcttccatgacctcattaagactatccagttgtataaaccatggagtgttgggaatttgaggcctatcaagttcaagactaaggaaatcatgtcctktctcaaattagactcttttccacacactatccatatcacttcccaccatcatttttcaatatttttcttaacctggtggcaggggattgtaccaaaatcc

SEQ ID NO: 532682 - DNA, 161 bp, Homo sapiens
catggatgcagaacctgtggatatgcagggctaattgtagatactgttttttccatctgctgaccgagatggttattaagtgactaatgggtgggtaggtgtggatatgctgagcaaaakgatgattcacatctggagtgggacaaagtggaacaatgtga

SEQ ID NO: 532683 - DNA, 553 bp, Homo sapiens
cttttgtaaatatatacttcgctatgcagaatttcttttagagataccrgactacttggaataaaggagatgtatctgggcctccacttcaaactcaaaacaagatctcattcaaacactaaaaatatttggccaagcttgttcctaataatgcctctggattttgagatttgggcctgtcagatcataaacaacagtgattaagtatccactaggtacaatgtgtaagtgagattggggttctagggggaggtacaagaaaagcttatgatatggtccttcacctctgagagcttatggcccagtggaaaaaggactaccacataattgcttacaagaaatgctggactagagcatgcttttagccaaattgctaaaaaaaaaaataaaaaacaatttccaaagttgtttaatcatcatgcttgttggcagtctttcctttcaagagtccctccctgcttgctttgtatcttacacaaaatctcatgtggcctactcaggagccatgtattccagaacaccgcccacggaacatacccaggtgcctgcagcc

SEQ ID NO: 532684 - DNA, 553 bp, Homo sapiens
cttttgtaaatatatacttcgctatgcagaatttcttttagagataccagactacttggaataaaggagatgtatctgggcctccacttcaaactcaaaacaagatctcattcaaacactaaaaatatttggccaagcttgttcctaataatgcctctggattttgagatttgggcctgtcagatcataaacaacagtgattaagtatccactaggtacaatgtgtaagtgagattggggttctagggggaggtacaagaaaagcttatgatatggtccttcacctctgagagcttatggcccagtggaaaaaggactaccacataattgcttacaagaaatgctggactagagcatgcttttagccaaattgctaaaaaaaaaaataaaaaacaatttccaaagttgtttwatcatcatgcttgttggcagtctttcctttcaagagtccctccctgcttgctttgtatcttacacaaaatctcatgtggcctactcaggagccatgtattccagaacaccgcccacggaacatacccaggtgcctgcagcc

SEQ ID NO: 532685 - DNA, 546 bp, Homo sapiens
gtggtggacatttgggctgtttccatgctgctatggacattcacatacaatatttggatgtctgttttcagttccttttttttttttgagwtggagtctcgctctgttgcccaggctggagtgcagtggcgctatctcaactcactgcaagctccgcctcatgggttcaagcaattctcctgcctcagcctctggagtagctgggattacaggcatgtgccaccaccacgcctggctaagttttctgtatttttagtagagacggggtttcaccatgttggtcaggctgggctcgaactcccgacctcaggtgatccgcccaccttggcctcccaaagtgctgggattataggcgtgagccaccgcgccgagcctgttttcaggtcttttaggtatggacgtaagagtggaattgctgggtcgtatggtaatatttaactttaccaatttagttttaaatgctttaatgcctcctgtttttagtagcacaatctaagcatcttcaaaaacccttccttctctcatgaaatataggaatgaaggtgg

SEQ ID NO: 532686 - DNA, 366 bp, Homo sapiens
atcattcatacccttacttctaaaagaaaatgtgtgacagctcgtgagaaaagcctggggaattggggagagggatggtcatcgaaccgagaaacacagctaggtaagtagtaccaattatatcaaatcctactgagttttctggcagacaagcctaaaggcacacagaactctagctcttctgatttaataaaagaaagtatgcctaattgacggggaggagaacctttttaatagctctaaagtgcaaragaatttaatatttttactttaacaaaactgaataatataaggcatggtacctttgtactcacagttttacagaaaaatgaccaaccatgtgaccatttattatactgctcctaa

SEQ ID NO: 532687 - DNA, 598 bp, Homo sapiens
catccccagctcctttggacctggaagccctgataccccacgcaaccaaccaggcctctttcccaaaggtgggaaagtagggtggactcagggccccctggacgctgagtaaattcccagctaaacgagagctcaggtgagcccccaaaaatctcttccgcagtggacagggtgagatgcaagacccacaccgataatgggaaaatcagaggaggaggcacctgcatggagctgggaatcccsaaatcggaataaaacgatgttattgagagagggctaaatcccagagtaaatttcaaacgaaataaatcgcacagcacattttagatgataatagacggcggtaactcaatactaatgatagtgtactgacaacccgctaatagtcttgggctccaagaagcccggcaaaaccggctggggcggcaggaggtccggctttggtgttctttcccaccgggagaggttggagccaccctcactcccggccgctctcaatcgatcgcagctcccttcgctcccaagcttcgctttcgctgggtccgggatccaaatcccaacccaagagccaaaggccagaaaaggccctggcgttgcc

SEQ ID NO: 532688 - DNA, 460 bp, Homo sapiens
tgaagccaggcacccttatacaccaagtcccaggaggagcacagttcctggaacttgggtcatgggatggggacattctgcaaagccagatgccagagaacaaatgtcgcattgccctctgcactatgtcggcagttggtactctcttcccaaggacccgatgtcaagtaatttcctgcacatccggtccttgggaaagaaagactggatcggtgtggggacacctggcagaggtgccccaaagagctatttttcctcttcaagaaaatagctcagagttagttcccccgacctcccggcttcctccagaagcctgtctggcccctcctcaccacatcccaaggacttgcccagtagaaggggctggyggagatgacctctgggctcctccacctgctctaattctttgattcagatcaatcaatgacatttgtcacagccaggtgtcctggggctggga

SEQ ID NO: 532689 - DNA, 532 bp, Homo sapiens
ttgcttctttttccagttagggccatgtcttagtccgttttgtgttgctgtaagttaacacctgaggcacagagtgactgataaagaaaagaggtttatttggctctgcaggctgtacaagacgcatggcaccggcatctgctcagcttctggtgagaacctcaggctgcttccactcacagcgggaagcaaaggggagccggggtgtgcagggacccctctgtgagagggagtcaggggttgggggagggaggttccaggctctttttaacaaacagcttccaagaaactaacagagtgagaactcgttcacccctaagggacrcattaatctgttcacgagggatctgcctcccacccaaacacctccaacgtcattcaggatcaactttcaacacgaggcttgggggagcaaccatccaaactatagcaacccgcaaagtgggcactgtggtatgggtgccaggcattccctcatctaagcgccagacacaccctcagaggcagttactatttggcctccctattttac

SEQ ID NO: 532690 - DNA, 330 bp, Homo sapiens
tgcctcagcctcccaagtagactacaggtgcacgccrccatgccgaactaatttttgcattcttagtagacacagggtttcacctttttggctaggctggtcttgaactcctgacctcaagtgacccacctgcctcggcctcccaaagtggtgggattacaggcgtgagccactacacccggccccagacttgcatttttttaaaaagccctggctcctatgaggagcagggggccaggggatgggggctgttgcagggtccaaggacaaaggacggtgtctgggaaagtctggggtcctatatgaaaatagccagggcccctggacttg

SEQ ID NO: 532691 - DNA, 619 bp, Homo sapiens
cggaagggtgggagtccaggctttgctactggagtgtgctgtgtgaccctgggcaagccatttgacctctctgggcttcgcttcccattcctaccttttccatgctcatttagtgaggataaataattaagatcctccatgtgaacccctccagcgcctcaaaagaatggacggctgtaattgttaccacaggggctctccgcctggggcaaaaatcgttcattttgggggtgggaaaaatgcctatattttaccataaagaactacatttacttaaaaaactgaacgtgttgtaaggaagcatcaaaaaatggttatggaagacaacaggaaaaacagctcctaaaactgcattcttgaaaggtcaagtacacagggaaatgctagatgtycccagtgcatggtggggtagggctgggttctgcccatggctccaggaaggcaggatcacccccgggtgctttgtggtggaaaacaaacggcctggagagttctgatctgatgttcggtgtggacctgtgcatggtaggcggagctgggaatgtgtcctgaccccgagtctggggaccggaattcatcaccctcaccaccggccacgcggcctcagccaactctcagg

SEQ ID NO: 532692 - DNA, 619 bp, Homo sapiens
cggaagggtgggagtccaggctttgctactggagtgtgctgtgtgaccctgggcaagccatttgacctctctgggcttcgcttcccattcctaccttttccatgctcatttagtgaggataaataattaagatcctccatgtgaacccctccagcgcctcaaaagaatggacggctgtaattgttaccacaggggctctccgcctggggcaaaaatcgttcattttgggggtgggaaaaatgcctatattttaccataaagaactacatttacttaaaaaactgaacgtgttgtaaggaagcatcaaaaaatggttatggaagacaacaggaaaaacagctcctaaaactgcattcttgaaaggtcaagtacacagggaaatgctagatgtccccagtgcatggtggggtagggctgggytctgcccatggctccaggaaggcaggatcacccccgggtgctttgtggtggaaaacaaacggcctggagagttctgatctgatgttcggtgtggacctgtgcatggtaggcggagctgggaatgtgtcctgaccccgagtctggggaccggaattcatcaccctcaccaccggccacgcggcctcagccaactctcagg

SEQ ID NO: 532693 - DNA, 546 bp, Homo sapiens
gggttctaaacctctggtaagaccagggaagttttccaactcttcttattatctggaaaacttatgagcagttaagagtccctacattttgatgtttttcatgatggccatagtatatttaagaataatattttagaaactatttttcttttaaatagaaatacaaaataaagggtctaaaatgtttacgtgttagaactaaatgtttaaacattataactaaatggttttttaaataaactaaaaaaaaacctgtggtattttaattttatacttcattactccatattactccatgacacaaaattaaaaatgaagatgcaactaagatgacaaattattttaattgatatacaactgcaaatatctcattggtaaagtactttgtcttttactttcctggattctttaggcataaataatagttacaaatgcttcgtaaaggaatagaaacccgtatagtacttatgtagaaagaaatttwctggaatattagctttaatataaaaattttaatctaaggcttcatattattatacagcatag

SEQ ID NO: 532694 - DNA, 660 bp, Homo sapiens
gaaactttcagtccagttgccactgtcattctagatatgtatgcaattccgtaagttgggcttaggtttcatttggagctgccttcaatatttatygataattctgtagcatcattcaaatcaaggaaaactccaccttgcctagtcaaactcacattacctgctttttgaaaaaaggagagaaattctctctcttctgacatttgttcttaaaaaaaaaaatatatatatatatatatatatatatatatatatatcaagaaacctctttcttctttttgttgttaaatgtggttggtacacatagtagagggagggtatacatttcatgttgcatttgtgcctaatttactagctactatattaataaccattattaaaaatacttttttgaacatattacttgtttttacaaattaacttacattatatggttaaaaaatgaattttcttaatgttgtttgaccttgtaggacaacactttttactgctcattgactacaggtaatgaatgactataaaacataaacatatatatttatgcaaaaaatcacaaaaattagcaatcacaatttaattctttagccaataatatctgtagatatgtagataaaatctttatttaaattatttaaatcatctccctttatcttaatttct

SEQ ID NO: 532695 - DNA, 660 bp, Homo sapiens
gaaactttcagtccagttgccactgtcattctagatatgtatgcaattccgtaagttgggcttaggtttcatttggagctgccttcaatatttatcgataattctgtagcatcattcaaatcaaggaaaactccaycttgcctagtcaaactcacattacctgctttttgaaaaaaggagagaaattctctctcttctgacatttgttcttaaaaaaaaaaatatatatatatatatatatatatatatatatatatcaagaaacctctttcttctttttgttgttaaatgtggttggtacacatagtagagggagggtatacatttcatgttgcatttgtgcctaatttactagctactatattaataaccattattaaaaatacttttttgaacatattacttgtttttacaaattaacttacattatatggttaaaaaatgaattttcttaatgttgtttgaccttgtaggacaacactttttactgctcattgactacaggtaatgaatgactataaaacataaacatatatatttatgcaaaaaatcacaaaaattagcaatcacaatttaattctttagccaataatatctgtagatatgtagataaaatctttatttaaattatttaaatcatctccctttatcttaatttct

SEQ ID NO: 532696 - DNA, 660 bp, Homo sapiens
gaaactttcagtccagttgccactgtcattctagatatgtatgcaattccgtaagttgggcttaggtttcatttggagctgccttcaatatttatcgataattctgtagcatcattcaaatcaaggaaaactccaccttgcctagtcaaactcacattacctgctttttgaaaaaaggagagaaattctctctcttctgacatttgttcttaaaaaaaaaaawatatatatatatatatatatatatatatatatatcaagaaacctctttcttctttttgttgttaaatgtggttggtacacatagtagagggagggtatacatttcatgttgcatttgtgcctaatttactagctactatattaataaccattattaaaaatacttttttgaacatattacttgtttttacaaattaacttacattatatggttaaaaaatgaattttcttaatgttgtttgaccttgtaggacaacactttttactgctcattgactacaggtaatgaatgactataaaacataaacatatatatttatgcaaaaaatcacaaaaattagcaatcacaatttaattctttagccaataatatctgtagatatgtagataaaatctttatttaaattatttaaatcatctccctttatcttaatttct

SEQ ID NO: 532697 - DNA, 660 bp, Homo sapiens
gaaactttcagtccagttgccactgtcattctagatatgtatgcaattccgtaagttgggcttaggtttcatttggagctgccttcaatatttatcgataattctgtagcatcattcaaatcaaggaaaactccaccttgcctagtcaaactcacattacctgctttttgaaaaaaggagagaaattctctctcttctgacatttgttcttaaaaaaaaaaatatatatatatatatatatatatatatatatatatcaagaaacctctttcttctttttgttgttaaatgtggttggtacacatagtagagggagggtatacatttcatgttgcatttgtgcctaatttactagctactatattaataaccattattaaaaatacttttttgaacatattacttgtttttacaaattaacttacattatatggttaaaaaatgaattttcttaatgttgtttgaccttgtaggacaacactttttactgctyattgactacaggtaatgaatgactataaaacataaacatatatatttatgcaaaaaatcacaaaaattagcaatcacaatttaattctttagccaataatatctgtagatatgtagataaaatctttatttaaattatttaaatcatctccctttatcttaatttct

SEQ ID NO: 532698 - DNA, 432 bp, Homo sapiens
cgcccggaagggcggggctcctgtccgggctgggctcctgactgttcctggcccccaggagcacagagatgcctgggtcccgagcctcggctgggcggccgcagctttgcccggggagcaggaggctcctgccgtgccaactcgaaggagacagggattccaccttttcccagtttttgccagctccctggagcacagccccggctgagcctgccccactgcagccggcatcatggcagtggctgctcaagacaggatgctgatgccatcaatatttttcacaaggtaagattttctcaatgttaaaatttatgttgattaaatacttgtataactataaattaactagaaaatgggcgatgtgtttgctcctgcatcaaaaaatttaaagcattaawactgtgttaaagtgcacctaccttacgtaaaata

SEQ ID NO: 532699 - DNA, 609 bp, Homo sapiens
tgtcgatggctgtccctacctgttcatattttgggtttgtcactaattctattgtagatgytatccttgagattttggctatgccttcctatttgttttgtttattttgatgggggatttgtggaaataaaatatctgccactgctgcagcctcttcccagtagtactagctttttgaatagagaacagttgtcaacagaaatcgcatagccttaggtgtctatatgtggttcttgtcatgcttgtcaggcattccacataccacctctgtctgctacagacatattcataatctttggttcactgagtcatctcctcaagccattaatatttcctgtccatagcactgcccattttctattgatgcgtctttttatataatttgtagatgatctttaaatcttctggatattagtcctttaccttctttatgtgttgtaaatacctttttctggttagtcatttgacttttaactctttttatatatctgttactatatagatgtttaaagttctattaacgctttttcatatctggctctgtattttcatctcttgcttaagtatacttcctagagatgctccaaagttataaacaagtaatcttgt

SEQ ID NO: 532700 - DNA, 617 bp, Homo sapiens
ctgtgaagcttgcacaatgtgaggaggaaaatggaagcctggaagaagagcccatgtgaaaggtatagggcaattcagacagggaacaagaaaattagaaaagaataaggcgctggcaagctgagcagaaggagattggtgtcagaaattctgagaacaagatacacttacgtgatgttactttgtcagaaatacatggcaaaagagaaaaaaaaaactgcagaaaaaactccctaggaatgagtgctaaatttaacaaacacaaaatacacaacatctaatttcatttgaatttcagataaacagttttttttgtatatgtgtgtcacatataatacttgggacatacattaaaattgatatttaaaatttaaattgaactgaacatctgaattttgtctgtcatccttactcaagaggaacttcctctcattttcactattcgtcccccatttttccctagaaaatgtctcacttccctgaggaagctcagagagtacaattatgttttcatgggctaggtactagaggatctrtaaaaaccctccaaagcaagactgcatcaacatagcagaaatcagtgtctggaaattgtgtggtgacatacaattggcctt

SEQ ID NO: 532701 - DNA, 612 bp, Homo sapiens
ctgatttgctatacttgactttcatggctataacatctttgaagtttgtcgattgtttcattcgtatagaatttccctcagttcaggtttatctaatgtaktctcatgattagatctggcagaaatattacaatggaattgttgtgatcttcttattgtgtcccaatagatggtgcgcaatttagatttactccattaagaatgatgtttactttagctacttgattaaggtgatttctgtcagacttctccagtgaacatgtactctttttttcctttttagtaaataagtacgttgtgtggatatgctttaacataatgtagctattacatttaccaagaaactttaatgtgtttattttttaaaatcagaatgagttcattttctccattttattcagtgggttatagtctcttgtaattattttatctgatactgaaattatttcagaatcagtcagtgggagcctcttcaatctgtcttccatgtctcttgtcccattgacatgtcctcatcatttcttgagcacttccttgttttctagaatgacaaaatgttcagcctcatcttacattttccttgcttcagccctgtaaccagctatatttcca

SEQ ID NO: 532702 - DNA, 612 bp, Homo sapiens
ctgatttgctatacttgactttcatggctataacatctttgaagtttgtcgattgtttcattcgtatagaatttccctcagttcaggtttatctaatgtattctcatgattagatctggcagaaatattacaatggaattgttgtgatcttcttattgtgtcccaatagatggtgcrcaatttagatttactccattaagaatgatgtttactttagctacttgattaaggtgatttctgtcagacttctccagtgaacatgtactctttttttcctttttagtaaataagtacgttgtgtggatatgctttaacataatgtagctattacatttaccaagaaactttaatgtgtttattttttaaaatcagaatgagttcattttctccattttattcagtgggttatagtctcttgtaattattttatctgatactgaaattatttcagaatcagtcagtgggagcctcttcaatctgtcttccatgtctcttgtcccattgacatgtcctcatcatttcttgagcacttccttgttttctagaatgacaaaatgttcagcctcatcttacattttccttgcttcagccctgtaaccagctatatttcca

SEQ ID NO: 532703 - DNA, 555 bp, Homo sapiens
ccaaatcaaataacagctttcagcagagtcagatcatgctggttctcttgatgcytagttcagcaatattttgttgtgttttgggccactaggatgtaagcaaccaaggacagagacttaaattgtccttttcactataatacagacctcaaaaaattgtcatttccctgtaagtatcatataatatttgttaaattaatgaatgagagaatgaaatactttgatactcaaggaaactgacagcaagccgcagatgaaagtaaagtaatatgccaatgttttactgggctccataggaccaaatatggtgataattcttgccattcttattcacaaggacatctagagttaagctgagggtattaggcagaaatctcaataaggtagtttgtatatttctggatatgagatgagatgtgaatctgttattttaatgtagcacatgccaatccacatatttatttagtcctatttatactttagtctaattcagaggtttgcaaactggcccacaagctaaatggagcccatacccttttttcagaaataaagtat

SEQ ID NO: 532704 - DNA, 562 bp, Homo sapiens
cagttaccagcaaggatggcgtgttcctaaactaagtaactggtgaagttgcctaatttccctgtgcctcaggcacctcacctgtaaaatagggataataatagtatccacctttttttttttgagacagagtcttgctgtgtctcccaatctctgcctcccaggttcaagtgattctcctgcctcagcctcctgagtagctgggattacaggtgcccgccacagtgcctggctaatttttgtatttttagtagagatggggtttcactgtattggccaggctggtcttgaactcctgacctcaggtaatccgcctgcctcagactcccaaagtgctgggattacaggtgtgagtgacygtaccctgcgtagtacccaccttttagggttgctgtgaggattaagtgagtctgatggtggtagtggtccgtctggagtggctgctgaaaagactctggctgcagtgggggaggcatgaccggggctgctagctccacggagccagcaggaaccagaaacaggcgggagctgcgcccccttctgagttgttagggtgggaaca

SEQ ID NO: 532705 - DNA, 633 bp, Homo sapiens
aaacaaccctcattctagaattcacatttacataaatgcgtatctctttataaaatggaatatctggtcagactgttaaacaagttcaattctcatgatccttcaatgaccttggcaaaggaagcataagactagaggtcctttttgggatatagtgttccttaactgtggcttattaacttctaaaatactaagatgaagaaatcttggaatatttcccaaaggtactcattctgtgcttttcaagttcaaaagtggctcttgatgaattctaagacataacaattgatttgcaaactttatgaaaggtttttccaaattaaattattacatggttctttttgtaaacccagatgcaggtggtaggtttctttacaagttacctgagaaacggtttcctgaagccgaccaagcaaaccactyccctactattttgcaccaattctaaatcatgtgggcgtccagactgggtgagggcgagaggagcaggagaatacgagatcaaagcctgtgcattataggagaaaatgctttttctctgtggctttgaaaatctctttttaaagggatcccctccccacttactttggggtttggcatatggtgtgtgctacagatggatgagcagtgatg

SEQ ID NO: 532706 - DNA, 644 bp, Homo sapiens
tcatcagtggctggacatgtatttatcctttagtatattgcttaatatgcttcacatactgttccagtattctcaactttcttgtcatgtatgatgctcagctcaaaacagtacttccgttattatcagagagctgtactttgaactgggtgtatagctactattctggtatccacacttaggaaagaatgaaacaatcacttttttacagaatggcaaccaaataagatttatttggaaggtctgcctccttttcataagaatcgatcacaatggtttagaatgttcagagaagacacatggaaaagttgggacaagaattgggacacaagrtatttattgccaaatgctaatcttaattgatagctagctatgtaccagtccttgtggccatggccatgtgtgtgatcttgttttttatttatttctttattttgagacagagtcttggtctgtcacccacagctcattgcagcttctacctcccaggctcaagtgatcctctcacccccgccccaccaagtagctgggactacaggcaagtgccatcatacccaactaatttttttactttccgtaaagacattatctctctgtgttgcccaggctggtctcaaacccctgagctcaagcatgccttagct

SEQ ID NO: 532707 - DNA, 492 bp, Homo sapiens
ttaaaaataataatgagaatataatgccttgcacttatttagtgttagagtatgcaaagctttttttggaatattatctcatttaactctattcaaattatctgtctacattcagccactatcatctagtacatacatacacacacatagatacacacacacacagacacacacacacacacacacaatgcagtcatgcattgcttaacaacaaggatacattctgaaaaatgtgttgttaggcaaatctgtcattgtgagaacttcacagaggtaccatatatgtttgtacttacacagcctactacacacctaggttgtacgatatagcctattactcctaggctacaaacctttacagcatgctgcagtactcagtagtgtaggcaattgtarcacaatagtaaaatgggggatcaggtgatttgtatgtctctgaacatagaaaagatacagtaaaaacatggtttgaaggcataaaattggtacaca

SEQ ID NO: 532708 - DNA, 436 bp, Homo sapiens
tgtcaaagtcatccaagtgtgccctcatggtacgtataggctaccgtatatatcacacatcatacaggcatgggggctctgaggccagactgcctggtttgagactcacctctgtcacttcctattctagccactgctaactgtggacacttattttagcaagctgccttgcctgcaggcagagaggtgacgtggcagaaggggccactgaagtagtgggtggcttggttgctcccacctgcccrgagggcttctcaggtttgagttgttaattttcctcccctggaactttccacaaataacttgaagtgttttgggagttgggagagtattgtcttaggaatatgttcattcattctcccaaggacctggtatggaactgtgggttccaaggttacttctggggttcggtggggagggtgttggtggcacaggt

SEQ ID NO: 532709 - DNA, 320 bp, Homo sapiens
tctctgaggattccagcagctggggaagggaatggtgaggcaggtgaggggggagtttagccccgtctcccacagttctgagggaggctgaggcagatggggtaactgagctctgcacacyccccaccacacacacaatgcagccaggggtccgcagtaggactgtcaccttcacgagcaaggtgggaggtgtgagcgagaccaaggcaatggtcgctccgcagcctcctcccacgctccttcccacctcactgcctgaatcgctcggtgggcaacaaagctttgttgctcttgaaatcccagcctaagtagcacttcct

SEQ ID NO: 532710 - DNA, 320 bp, Homo sapiens
tctctgaggattccagcagctggggaagggaatggtgaggcaggtgaggggggagtttagccccgtctcccacagttctgagggaggctgaggcagatggggtaactgagctctgcacaccccccaccacacacacaatgcagccaggggtccgcagtaggactgtcaccttcacgagcaaggtgggaggtgtgagcgagaccaaggcaatggtcgctccgcagcctcctcccacgctccttcccacctcactgcctgaatckctcggtgggcaacaaagctttgttgctcttgaaatcccagcctaagtagcacttcct

SEQ ID NO: 532711 - DNA, 576 bp, Homo sapiens
tctgcacatcagcgtcagcgatactctgggcaggctgtcgagacgtcacagcctcctctgtggggctgcctgacagatccacgactgacttcagggagcggagttcacagtaaggaggttctgaggaccagagagagcgagcagggctgggctggtcatggagaccagtctgagctctcccacacttcagtgcaggagcatggggcacttggcccccgggcctcctgtgaacctgggcagaggtggctggggtgccaggggaggtgtgggcagctgggctctgtggactcctgagtcctccttgcccctgccaggccagcaccttccaccaggatgccagaaagaacggggaagaaggctggattttgaaagaagtaggtgtttttctttggaaagtttatttgcagatttatgtccaagggtgtgtgtgtgtgtgtgtgtgtgtgtgtgtgtgtgtgtgttttaacctcagccaaaggttagatttcagatatcctccaatgctctgtttgaagccttgtttrtttgtttggattggccagtcaaaagttaaaagaaataaactctgctcccttt

SEQ ID NO: 532712 - DNA, 548 bp, Homo sapiens
cactttacgtgtgttatgccgttttgcattacttcaaagaaacacctgaggctgggtaaagaaaagaggtttcattggctcgtggtcctgcaggctgtataagcatggcaccagcatcagctcagctcaggggaggcctcagggagcttttactcatggcagaaggggaggggagcctgcgtgtgacatgtgatagagygggcaagagggagaggctggggaggtcctagactcttttaaagcagatctcgcatgagctaaccgaggggggactcactcatcaccaaggggatggagccaaaccttccatgatccatgatctactcgcctcctgccaagctccacctccaaaatcaggcatcacacttcaacatgagatttggaggggacgcacatccaaaccccaccaccacatctgtgaccttagccgcgatggctcttggccaagagaaggttctagatgccttcggaggaaggctttttggaggagagacgtctgtgctcatcaaaggggcagatctttcctccctcaccgtgctgctctaggt

SEQ ID NO: 532713 - DNA, 548 bp, Homo sapiens
cactttacgtgtgttatgccgttttgcattacttcaaagaaacacctgaggctgggtaaagaaaagaggtttcattggctcgtggtcctgcaggctgtataagcatggcaccagcatcagctcagctcaggggaggcctcagggagcttttactcatggcagaaggggaggggagcctgcgtgtgacatgtgatagagtgggcaagagggagaggctggggaggtcctagactcttttaaagcagatctcgcatgagctaaccgaggggggactcactcatcaccaaggggatggagccaaaccttccatgatccatgatctactcgcctcctgccaagctccacctccaaaatcaggcatcacacttcaacatgagatttggaggggacgcacatccaaaccccaccaccacatctgtgaccttagccgcgatggctcttggccaagagaaggttctagatgccttyggaggaaggctttttggaggagagacgtctgtgctcatcaaaggggcagatctttcctccctcaccgtgctgctctaggt

SEQ ID NO: 532714 - DNA, 599 bp, Homo sapiens
gggctgaaaaggaagagtgttcatcatcccctgaggggtagcaaaaggcaaaacagggaacaaaccccgggcctcggcaccacacacccagcctgctgaaggtggggccagtgctcccagggcccaatgcctgacccacagggccctccagacacctttgctaaacaggtattttcatagcctgcctcccctgggagctcccagagaaggggatgaggagggagggcaagggtgaggcaggagctgatacagatgcagagggaagggagagcttggggttccccaggtgctggtgtcactgggaggaactggccagggtgccggtccttggcacccagcctccacggaatgggtgtgggggtgaggagaagggcaggtgaggacctgcgtcatcaaggggcttcatatagggctcgctgcctctgggcaatgctcagagccagctccacagaggtgacccgcccatttacagcaagaccctrgccctggctgcccactagcaaacaaaactatcccatcacgcggctggggtctctcagagtccgagtgccgggcatctggcactcagcttttcggagacctgcttgccagggacttat

SEQ ID NO: 532715 - DNA, 550 bp, Homo sapiens
tattagtcatctctctcttcccgccccccacctcctggctccgggctgcagggacaggcagcgggggtggcaggcccgtgggggcagcgggcaggagggacaatggaaactgccccccgctgggctcccttcctcgggcctgggtgggcctctcccgcccggcttgctccgcccgatcagatattcccggcctcgctccccgcacaaacaaacgcaggatgcgcctggctggctcgtggctctttccagcccatcccgaggaaaatcaggggaagttattaaccaaactccacggccccggggaaacaatgggaggcgctaagtttagctgtgaactcagcctgggcgcaggtttcacaaaccaggtggggggcccgtccacggcggggaaggccgagaaagagaacaatgccccggtctggtctgcagtctgtcagggccaggcccactgtgcgaccctcaggaccctccaggtgcagcccayggcgctgcggaaggggccaggctcccagcaatgagaccaagtcagtaggggacaggaggtcgggaa

SEQ ID NO: 532716 - DNA, 484 bp, Homo sapiens
actctggagacctggccccctcaccacggtgcctcagggcctgcacccaggctggccagtcctgcactgcttccttccagccttcaacttggggcccaccagcctgccctggaaacaggcatgtggagtccccagggcccagccctgggcaggaccaaaggaccccccaatctgtgcctcagagggagccccgggcgacacccggccctgcctgtgcctcaggcagccacygtgggctggagaaggccccgctcgggagtggaggaggaagccgggccaagtgctttgtttatgaatcagtagaaaaacgatgacagagctccagtgcatataataaattattgtcgtcaaggtcaaacaaattaaaaggggggcagctattattaagtttacgaggcagcatcctgactgccttgccaagccaaacaatcagcctggagctgtcatcccggtggggggctctgggcccgtccctgcctcccct

SEQ ID NO: 532717 - DNA, 566 bp, Homo sapiens
gctcggccatgtgtccccgtggggatggcagggagggcagcacgcgttggctgggctccttcctggctgcaatccctgctgtttttctcacggaggtgcaggctggagtgggtttgccacacggggccaggctgctagaactgatgccccagccccgcttgcccagcacccccaggagagaagctccaggtcccgcgtctgtcctgcctgcagggagggaccccaggggtggatcaagtctgtcacgccaggttgaccaggcctggttctgtggccttgcaggggtgtttttcataagcacagagacggatttccatggctgcgtagatgactaggtcaaagcaaggatgtgggggcgctgagcctgaacctgctgagaaacgtctgcaacgacggcctgggacttccccccgaaccccctggctccccgaggagrtgtctggagtctccacagtgtctacttgcccagatgtgggtcaccgcaaaggcacgctggggcggggctctcactgtctctccagggcatggcgatttccgacctcaaggaatctaggggctctaaggag

SEQ ID NO: 532718 - DNA, 633 bp, Homo sapiens
ttttaaatggatagacagatggatgaaaataattttcagaagagttttttgaaagacgtagtaccctttcacyagacttttcatagaaccaaaaaaaaaaaagccaccaaaaaccaaaactgcttatcgtttatattatcacacattgagacagcctccagtctgacagaaacaatgtgcagggctctctgatttgggcagtcctaccattctttggattcaggtgccatccttggaagtgtggccaataagggagttttcactatccagaacttatataataacactgttgccaatcctattaataagtgctcatgcaactataatgtgaagtaatggatgcatgtaatatgcaaagttcagtagtaaaaggtcacccatgtacatttacagaatataaacacactgaaatcaaattagacacgggatgttttcagaggctcaagcagaacaaaaaacatcaagatcactaacatactttgtcaagtttataaactgaatgtagaacaaggtttattattagaaatacggggaaaaagtggctaaagttcctctctagaaaaagaacactcacaacatattagcaaaaagaaacatatattgagggaaactttcatgagtctgtaactaatt

SEQ ID NO: 532719 - DNA, 633 bp, Homo sapiens
ttttaaatggatagacagatggatgaaaataattttcagaagagttttttgaaagacgtagtaccctttcaccagacttttcatagaaccaaaaaaaaaaaagccaccaaaaaccaaaactgcttatcgtttatattatcacacattgagacagcctccagtctgacagaaacaatgtgcagggctctctgatttgggcagtcctaccattctttggattcaggtgccatccttggaagtgtggccaataagggagttttcactatccagaacttatataataacactgttgccaatcctattaataagtgctcatgcaactataatgtgaagtaatggatgcatgtaataygcaaagttcagtagtaaaaggtcacccatgtacatttacagaatataaacacactgaaatcaaattagacacgggatgttttcagaggctcaagcagaacaaaaaacatcaagatcactaacatactttgtcaagtttataaactgaatgtagaacaaggtttattattagaaatacggggaaaaagtggctaaagttcctctctagaaaaagaacactcacaacatattagcaaaaagaaacatatattgagggaaactttcatgagtctgtaactaatt

SEQ ID NO: 532720 - DNA, 494 bp, Homo sapiens
ctgcttggcatctcacctttaagggaactcaacccytgccctcttgtatcagtttagattacatggtctgagtgatcctgtcatcttgtcattaccctcactggatagtgggaatagatggagcaatattctcagtcaccgtttctgtcagatagggacattggcatgtataagccaccatggggactctttttttttttgtggtgcttggaatagcccagaaatcatacgtcctctcaaagaaagccctcagcctgagggccacattctcatttttggctttggctaggaaccaccacctgctcttctttcttaagcctctccctttgtcctttcttacctgctatctggtgaagctgcaattccaggctcaacattagcaggaggaagatcatgttctgtatttgatctgaaatagacaattgaaagtctcagggccttgtgaaactttgctgggtctttggttctttgttcacttttgaaaacaggggaat

SEQ ID NO: 532721 - DNA, 595 bp, Homo sapiens
gaggggccacaaaagcagtgccatcaccgctctctggagaagaccttccattgacagaagccyacaagacaccaatgatgaaccagaaaagtgacagtctcctggaccccaaacttgtgctgagtgtcattggagctgcccccttggccaacaacccgaggtgctcataaactcccaaacataggatggtattcctgacacccagaggggaagtaagaagcacaggaggaaaagcccttaactatgctgggctgtcacttgggaaaacctgccccagttcactcctttgggaaacagagaggtggaccatgtggctggagcatagtgcaagctaagggtgaaaggacagaggccacatcataaggccttgtagactctgctcaggcatgtgtctttagataaaagtaataggccattggaggactttaagcagaggagagacatgagttgctttgtgaaaagaatctagaactggagtactttctgctggggccgggtaaggcgccagcttggagagaggtccattgtcctctcactttctctccccagtgctctgcccattatgtcccagcattcctgatgagctttagggact

SEQ ID NO: 532722 - DNA, 580 bp, Homo sapiens
aggggccacaaaagcagtgccatcaccgctctctggagaagaccttccattgacagaagcctacaagacaccaatgatgaaccagaaaagtgacagtctcctggaccccaaacttgtgctgagtgtcattggagctgcccccttggccaacaacccgaggtgytcataaactcccaaacataggatggtattcctgacacccagaggggaagtaagaagcacaggaggaaaagcccttaactatgctgggctgtcacttgggaaaacctgccccagttcactcctttgggaaacagagaggtggaccatgtggctggagcatagtgcaagctaagggtgaaaggacagaggccacatcataaggccttgtagactctgctcaggcatgtgtctttagataaaagtaataggccattggaggactttaagcagaggagagacatgagttgctttgtgaaaagaatctagaactggagtactttctgctggggccgggtaaggcgccagcttggagagaggtccattgtcctctcactttctctccccagtgctctgcccattatgtcccagcattcctgat

SEQ ID NO: 532723 - DNA, 612 bp, Homo sapiens
aacatatagaaaggcaacatacggaacacacaggcacacactgtggcaggtaaggtggggaaaatagtaaacaaatatagtagatattaattgaactatattataatcactttaaatgtcaaagctgtaaatacaccaattaaaagaaagagagtgtcaaagtgaaacaaaacaaaaaaaattcaagatccaataatacgttgtgtataagaaacccactttaaaggaggcttcaagatggctgactacagatatgtggtactcaccttctccacaaagaaccaatatagcccttcaaatggagcatctaagatagaacactggaattcagaagaaaagtgacaggaaacatctgaagcatggaaagaaagggaaatgaggcagccagtttagccaggattgcctgtgagccccrtgaggttgccccatgtgggaaagggtaagtgagagatctccagcagcccacattcctgtaatcctagccatgggagagccctgtgacccttgtgggccctgagactaatatcagaagcagtctggagtctgtgtaatggcattgctccagaatggaagctcatgctgggtcccatacatcctctgagactcaagcag

SEQ ID NO: 532724 - DNA, 641 bp, Homo sapiens
ctgccactgacaacaaccctgccacccagcagcatggatgctgtatactttcacacactctggaaatgctttcctgcccactgctgccactgatccctccccctgagcatgccacccaggagcctggagatagccacctttcctgccacagtgtgtgcccatgaacatcactgaagggcctgaggacaggcccgctcaacctggtacccaaccccactgcctaagtatgcygcccaggggcctggggattaccccaccccgtctatgatgattggcagctatgcactcctccaaggggcctgaggacaagcccacccagcctgcagctatcaccacttctgaaaacttcctggatgtgccacctgggggcctgggtcctggaatagccagcctgctgcagccaccaccaccagtgtgtgctgcctgggagtccgaaggtaggtccaccactgggccaccttctgggtactctcatcgcccacaccatatatgttgcccaggggcccaaacatctgcccaccttcctggcccactgctgtcactgctggcatctggaggtccaaggattgacctacctggacccactgacactgctgcccacatttgccacctggggccccaaagacagacagaatcagccc

SEQ ID NO: 532725 - DNA, 575 bp, Homo sapiens
tgccctatgtagctcctaactgttgtgtgatttggacggctttttgcatatttgtgtcagtttgatgttaaccacaagtgccagactgatttttcagacggagcctattttgctgcaagcagtttatataaagatacatatgtgtaaatatatgtacaaaaattactgaaaggcttcagttttttctaattggattattatgtcttgaaagttattgtcagtttttattccttgttaggctattttctgcaggatgcttttaactgatgtaggaaactgaaaggaaatagattttttccaaaacccagttccccttatttaatcttttttagaaatgtgggtaatgaattctatctaataagtcaaggaaaccagaatttgacacactccaacaatccraaggggcatgttgctcctgagcagcatgaagaactgaccaaattggttttgatgcttgggggatcatagagtatttatgtctgcttttctaaatctgcattataatagctctaaaatttgttgattggtaagaaattgggcattgcttggctctttaaacacatcagtgcttccac

SEQ ID NO: 532726 - DNA, 648 bp, Homo sapiens
acatctctttcatagtaaagggggcttcctattccagtgaaataactgatgggattctgtggaggtgtttccagcattctgaaagctcttcagaagtgatataggctgaggcctcagggaaagaaggcagacccatttctaagacatctgccaatttcagtcaaatgcatgttactgcctcttctctgtggaaggagcttaacttgacccttggtcgtctctcatgggacgatgctataggaagaactaagcgcaggtctcgttgctggaagtttgaacgtttggcagcaggtgcaggtagaggcccctggcaagtgacagctgatgcttttggactcatgagcagtctccctccctccctgtggccatgactactccatcacaccgtttttgtagcagctcccaagtggacaatgacagaggctggttgaattcaaccgcttggttacttagtgtctcttccaaaatagatgctctctgtggtgttaaagcttgttacaaagatctccgaaggcagtgcccacccttccaggcccacccacmtacctgttttccttgtatcttacactccaatctttcttcttgctggctccgatcaactggtcaaacattcaccgctgaccgttagtgggcatctattatctctac

SEQ ID NO: 532727 - DNA, 618 bp, Homo sapiens
cctaaatccctcacatatcacattcacatccctaagtatctaatgcatatgaaaggtagttccagaaatgcttcaggttccccgaaatctcttgtcrtttctgtttctcttctggtctaaaactgtcattgagaaaattaaaactgtcagtgctgtagggtaatgactacactatcaaacagtcaataatgcccagctgatgactaaattagttaaacagatcattcttgtctccaagacgctgtaacgtgggcatagtatagtgttccagtctttctgctgctgccctcctgtatctgacttctgctccaatctacgtgaattatgttccgtcatcaagcacagtcctgaataacttcctctgtgaattacggatcactctctctgcctgaaacattctcaatactgttgtgccctttggtctgatgaaatttcatgatcctgaaagttcttttaatagagtctccccaggtccctccatcctgtaccagctgcatcctgtggtacttagagttcctccagcaggtgtcagctaacgaggtaagggattgttttctaaacttgcggtaaaggtaaaatttcattcttgttttatcttcctcgaagaagctggtggat

SEQ ID NO: 532728 - DNA, 527 bp, Homo sapiens
catttcacaggcttcatatggaccaagcatacgtgtgaccagcagcagctccaacagtcactgtaggcaggcagtgtccgacaccaggtgtattagtctgttctcacactgctaataaagacatatgcaagactgggtaaattataaaggaaagaggtttaatggagtcacagttccatgtggctgggaaggtctcacagtcatggcagaaggtgaatgaggggcaaagttrccccttacaaggtagcaggccagacaatatgtgcaggggaactcccctttttaaaaccatcagatctcatgagacttattcactatcacgagaacagcatgggaaagacccgcctccatgattcaattacctttgactgggttcctcccacaacacgtggggattatgggagctacagttcaagatgagatttgggtggggacacagcccaaccagatcaccagggacctgacacacccagtgtcgcttgctctttctcccgttactgaatagtgagttgctgctcctggaggtg

SEQ ID NO: 532729 - DNA, 527 bp, Homo sapiens
catttcacaggcttcatatggaccaagcatacgtgtgaccagcagcagctccaacagtcactgtaggcaggcagtgtccgacaccaggtgtattagtctgttctcacactgctaataaagacatatgcaagactgggtaaattataaaggaaagaggtttaatggagtcacagttccatgtggctgggaaggtctcacagtcatggcagaaggtgaatgaggggcaaagttgccccttacaaggtagcaggcmagacaatatgtgcaggggaactcccctttttaaaaccatcagatctcatgagacttattcactatcacgagaacagcatgggaaagacccgcctccatgattcaattacctttgactgggttcctcccacaacacgtggggattatgggagctacagttcaagatgagatttgggtggggacacagcccaaccagatcaccagggacctgacacacccagtgtcgcttgctctttctcccgttactgaatagtgagttgctgctcctggaggtg

SEQ ID NO: 532730 - DNA, 618 bp, Homo sapiens
tttaagagtaggaatatgggctctggtagatgagctattttggcaaatttgtataagatagaaaatagataaggtttatctaatagatacatcacagaagaaaggactcgtctcaaacacaaattcaaagtgagaggaagatatcctggcaaagctcccaatttattgtttggcatttagagagggcagatgtgggtatggagtcaaggtggttaattaattaattaattaatggctatttgcagatgacctgtaaggtcctcatgcaatttctttcctcaagttcaagcccaagttcctgcacaaagacaaatgatatcccaaatcttccagttgatctgctgtgctgggcgatgtttccaggggggaatgcagctgagtgtggcacctgagggagtctcaaccaattcaacagcccactgtgcagccacgttgaactgaagcttagctattcacttcccagcccatctgcaaagcgcttccccaacrctgccctatagattataaacgtctgatttaccagactgtgggtagaaaaggaaaataaatacatcaccattttatattaaccaaaaaaatgtgattttgacgtacaaatacacatcaatgaacatacat

SEQ ID NO: 532731 - DNA, 495 bp, Homo sapiens
cagacgtctctgtggagaagcaagtagggaagcccaaggcaaagaagagagacaaagtcaagggcacagggagaattccaagmctctgccacctgcagccaacaataaatgcagcttaactcttaacaggcattttcacactaactgccaattcctgtttcatgatacaacatgtttgcctttgcacaaccaaaaattaaaaaaaaaaagtcaggcatgccacaaagcaagaaaaaacatgttccaaagagacaaaacaatgatcagaaccagactcaggtatgacacagttttttgaactataaatgaatttaaaataaatatgattaatgttctaaagagtgaaatgaaaaaagtagacgacatgcaaggaccaaaagctaatgtaaacagagaactggaaacaaaaagaaagaatcaaggaactgtagaaatagaaaactctgtaacagaaacaacaaatgccttaaactgattcattagtagattaaatac

SEQ ID NO: 532732 - DNA, 590 bp, Homo sapiens
tgtgtgaccttgccaattcgcctaatatctctgtgctccagtgtctcctctgtaaaatgagatctgttgagggattaaatgagataatactggccagatgaggagcccagacctgggcatgtagtgtaagaagtggttccttctccacagttggatactggacattcacagcagcctggtgtcactgcttggcaatgtaggatcatgattaagagcactggtttcaaacatttccttgttggattgatccttcctagttggaaagccttgatcgagtcacttaagttgcccaggatcacgtagcyagaaagggactgaactgtgattgaaacccagtctctagcctttctactggaccacagggcctctgttcaccagagaagatgtaaaatatcaagaagtagccaaaacacttctgtcttgaagatgttgttttggaaaatgtgactttggggccccgcagttggctgcacgcttgtttctggttattccagagagattacggaatgctccctgggctgcccctgctgggttcccaggctctacttctctcctctccccaagccttgagtggcttgtccctggcacct

SEQ ID NO: 532733 - DNA, 590 bp, Homo sapiens
tgtgtgaccttgccaattcgcctaatatctctgtgctccagtgtctcctctgtaaaatgagatctgttgagggattaaatgagataatactggccagatgaggagcccagacctgggcatgtagtgtaagaagtggttccttctccacagttggatactggacattcacagcagcctggtgtcactgcttggcaatgtaggatcatgattaagagcactggtttcaaacatttccttgttggattgatccttcctagttggaaagccttgatcgagtcacttaagttgcccaggatcacgtagccagaaagggactgaactgtgattgaaacccagtctcyagcctttctactggaccacagggcctctgttcaccagagaagatgtaaaatatcaagaagtagccaaaacacttctgtcttgaagatgttgttttggaaaatgtgactttggggccccgcagttggctgcacgcttgtttctggttattccagagagattacggaatgctccctgggctgcccctgctgggttcccaggctctacttctctcctctccccaagccttgagtggcttgtccctggcacct

SEQ ID NO: 532734 - DNA, 539 bp, Homo sapiens
agttatcagagaagcagtttgattcatgggccttgttcctggaagcatggttcagactggagataggaatatgggagtcatcagcatataggtggtagttaaatcccagtgatggtgagattacctagagaggaagtaagaagaaaatggagtctaggaaggagccttgaacttccaaaatctaatggcccactagagaagaaagcagcagaggagagggagaaaygcggctggagaggaaaggaggaaataaggagagtgctatattatggaaacaaagggaaggggacattggattcaagtgctctccagaggttaagtaagatgaggactgcaaatgtccactggagtttatgacacaaatgtaatatgagctatttgagtactagattggagatgattccacacaggatcttggagcctgttggtctctctgcctggaatgcttttctgtattctcacgttgttgaattcttggcattaagacagttcgcctggcacctctttgaggcctttcctcactccccaatcttcgtgtt

SEQ ID NO: 532735 - DNA, 489 bp, Homo sapiens
ggcgtgcccttgcttccaatgggcatcttctctaccccactgcattctttgattctgttctgagtctgttctctgcagcatcccccaygcttccattggctggtgattatgtcaggatcttgatgggaactcagcctggcatgtgctcatgagaggggagatggagaaaaaccttcgctggctcacagttctgactgacacatagttcagctccatctaactgtgcttcaaggctgaggatggtaactaccctgggtgggaatgggtagtaaggaaggaaaaccagggcaggagtctacaagtcagcttccgggaagcttactgctgctatccctcagtgcgctggcagcataggaggcaggaggcagaaatatgcccttcaagaatgccacagtagctgatgccggctcctccacagaaggtcacttcctcttgactctgaccaaagtctgagtcactcactacattctttctgaactcctgcttgct

SEQ ID NO: 532736 - DNA, 489 bp, Homo sapiens
ggcgtgcccttgcttccaatgggcatcttctctaccccactgcattctttgattctgttctgagtctgttctctgcagcatcccccatgcttccattggctggtgattatgtcaggatcttgatgggaactcagcctggcatgtgctcatgaraggggagatggagaaaaaccttcgctggctcacagttctgactgacacatagttcagctccatctaactgtgcttcaaggctgaggatggtaactaccctgggtgggaatgggtagtaaggaaggaaaaccagggcaggagtctacaagtcagcttccgggaagcttactgctgctatccctcagtgcgctggcagcataggaggcaggaggcagaaatatgcccttcaagaatgccacagtagctgatgccggctcctccacagaaggtcacttcctcttgactctgaccaaagtctgagtcactcactacattctttctgaactcctgcttgct

SEQ ID NO: 532737 - DNA, 532 bp, Homo sapiens
catctaaggggtgttttttgatattaaaatgagaaaaatattactataagctaaaccttgagtctagctatgcctgtgggacactggaggagtctctgcccctctctcagtgcccagcaggcagaaatttgtagctaatagtttcttgtgcttttggtgctggggaagttacatcaggaataacagacttttgttctcttccccaagcccatactgagtatcaggaacttgtaaccatctaacagtctgttggtattcggtaggaccgcttatcttgcaaaagagttaggtgttgatgcctgagggtgcaaggggaaagagccagctataaaagtggcccactgagctttacacacaggacaagtaagtatgggtcctaaccttacttatcctgcctcaagaccatgttttcattcttatgcaaataggaagcttcctgactgtggtacctaggacaytggagagagactagagttgtgacatttaaaataaggattacctatcattacactaaaaataatatttgtgaaca

SEQ ID NO: 532738 - DNA, 531 bp, Homo sapiens
gctggcattaccctaactatactcttccttgtcatctactaaattccagtatagtttatcwtattaatgggaaactttggcatataaccaacattttttttctctctgtcccaaccctagcattatcatgagtaactggaatatccattagacaacttatccaaaactatgtcctctcaagtccttgacctctagtttcaaattatttccccctcaacctcagtttggttatttacactcataggaatgctttgaatattgtcatctcctataactcctccatcttcaaaatcaaaatcaaccaatctgccatatgactataatctcttcatcacaccagcttgttcaagcgctctcatgatgactactaattgatttcattgaaacggtcattcttctttcacttccttctacaactatctcacattccatcgcgcttcatttgaataacatcctaaatctcattggttttctgagttttcatcacatctatccaacaaaaccgcaagcctgcaggaattgagctgtctg

SEQ ID NO: 532739 - DNA, 531 bp, Homo sapiens
gctggcattaccctaactatactcttccttgtcatctactaaattccagtatagtttatcatattaatgggaaactttggcatataacmaacattttttttctctctgtcccaaccctagcattatcatgagtaactggaatatccattagacaacttatccaaaactatgtcctctcaagtccttgacctctagtttcaaattatttccccctcaacctcagtttggttatttacactcataggaatgctttgaatattgtcatctcctataactcctccatcttcaaaatcaaaatcaaccaatctgccatatgactataatctcttcatcacaccagcttgttcaagcgctctcatgatgactactaattgatttcattgaaacggtcattcttctttcacttccttctacaactatctcacattccatcgcgcttcatttgaataacatcctaaatctcattggttttctgagttttcatcacatctatccaacaaaaccgcaagcctgcaggaattgagctgtctg

SEQ ID NO: 532740 - DNA, 531 bp, Homo sapiens
gctggcattaccctaactatactcttccttgtcatctactaaattccagtatagtttatcatattaatgggaaactttggcatataaccaacatttttttyctctctgtcccaaccctagcattatcatgagtaactggaatatccattagacaacttatccaaaactatgtcctctcaagtccttgacctctagtttcaaattatttccccctcaacctcagtttggttatttacactcataggaatgctttgaatattgtcatctcctataactcctccatcttcaaaatcaaaatcaaccaatctgccatatgactataatctcttcatcacaccagcttgttcaagcgctctcatgatgactactaattgatttcattgaaacggtcattcttctttcacttccttctacaactatctcacattccatcgcgcttcatttgaataacatcctaaatctcattggttttctgagttttcatcacatctatccaacaaaaccgcaagcctgcaggaattgagctgtctg

SEQ ID NO: 532741 - DNA, 531 bp, Homo sapiens
gctggcattaccctaactatactcttccttgtcatctactaaattccagtatagtttatcatattaatgggaaactttggcatataaccaacattttttttctctctgtcccaaccctagcattatcatgagtaactggaatatccattagacaacttatccaaaactatgtcctctcaagtccttgacctctagtttcaaattatttccccctcaacctcagtttggttatttacactcataggaatgctttgaatattgtcatctcctataactcctccatcttcaaaatcaaaatcaaccaatctgccatatgactataatctcttcatcacaccagcttgttcaagcgctctcatgatgactactaattgatttcattgaaacggtcattcttctttcacttccttctacaactatctcacattccatcgcrcttcatttgaataacatcctaaatctcattggttttctgagttttcatcacatctatccaacaaaaccgcaagcctgcaggaattgagctgtctg

SEQ ID NO: 532742 - DNA, 633 bp, Homo sapiens
ttctttcgtcatcatttaactttcttcttccttttatcccgctgagactcgtatttgaatattatgatttctacattgactgttttaagtcttctatctttttcatcatggcttctatgtgtatgtttgttctgtggtatgagatatgtcttccatttaatttacaagatttctaaacttattctcaaaagtaagcaacctttctccttttcacttcctcttgaacttttaagttaaaaaagtcatgtttgctttctttaaaaatctcaggagatcctaatttagggttctaattccatcattcagagaacactatcagggtcttaatgttttctttctaattattttctgtttatccctctagctctgctttagtaggggctatgtctttggattgttcaacttcctctctgaagttacttagtcccatcccatggtttattgcatttctstgcctgtttatggacatgtttcctcagcagctcattggtcatgtgttgaaatcgcttgtgcagttgttgtaaggtttacttttgttcccattatcacgtgcttttgttttatagatgctgtgttctctcaaatttcaatgagaataaaatgtagatttagggatttcttttgtttcttaaa

SEQ ID NO: 532743 - DNA, 598 bp, Homo sapiens
tcaaatataataatcctggaggatacaaaataagtggaggtcaaatatcagacatcaagaaagggggagtggggatggggaacaactgaagtaggagtctagtaagtccctgtactgctcagtaaggaagagaggaagattaattaacatttggggcaaggtggctcatgcccgcaatcccagcactttgggacaccaaagcagggggatcacttgaggtcaggagtccgagaccagcctggccaacatggtgaaaccctgtctctactaaaaatacaaaaaatattagccgggtgtggtggtgcatgcctgtaatcccagctactccagaggcggaggcaggagaatcccttgcacctgggagagagacactgcagtgagctgagacggtgccactgcattccagcctgggcaacagagtgagaccctgtctcaaaaaacaaacaaaaaaaaattggacaggaattacttatgttaagcatgaggagaagaaaagaataagggaagtctaatcaagaaaacctgatcaagcagactaaaggcaagggraaaaaaaaagaaatgaaaaaattaaggccactgccctggaacaaaagac

SEQ ID NO: 532744 - DNA, 610 bp, Homo sapiens
tttagggctcctggataatccaggattatctctgctatcaacatccttaccttaatcatatgtgcaaagtcctttttggcaggtaaggtcacatattcacaaggtctgtggattaggatatggacatcttgtgggggtgccggggggggggggggcattattctgccaaacatagtatttgtcctcagtgtctccttatatgaactggagtttggccagttcagagggcacctgggtctggaacttggagctttctgaggtaccatcactgggggctggacaaatagttctactgagataataataacaagctctggtagaagtctccattttataggtgaggcacaggggcatttgagtaacttgttttagttaatgagaggcccagtgagggtttgaatgtaaatatacccttccccaacacaacactgctggcctgaggggccaggtgggtcccagtrgcagagacctctgaggtgagtagtcctggatgaagtgcgtggcattacttctagcctcaagaactgtgacagaataagtttctgttgtttaagtcatccaattttggggtatttgttgtggcagctaaaggccaacctggtagcacatc

SEQ ID NO: 532745 - DNA, 523 bp, Homo sapiens
caactttcctttaatatcaatggccaaggtcaccattygcctaggactagaggactcccgaggaaacagaaatcagtacatgcattctatatccagggccaagaggatagaaatcctgctcggtgggaagaacaatgaactgaaattccaagtgtctgggtacttctcgtttcttccacttattaacagtgtgatccttggcaattattccttcacctctctgagccttaatttcctctcctgttaaatgaaggagataatgtaaaatctagaaggttggttctcaaccttggctacaaatgagctctccatgggtgcttttaaaggcctgatgtccaggagataccccagattaattaaatcagaatctctgagcatagaatataggcattggtatttttttaaactccccaggtaattccaaaatgtaaccatgttcaagacccattgatcattctagatagtttcaaggtcaggcccttccatgtctaatactctagtattttgcaaaaacctcttgtta

SEQ ID NO: 532746 - DNA, 523 bp, Homo sapiens
caactttcctttaatatcaatggccaaggtcaccattcgcctaggactagaggactccygaggaaacagaaatcagtacatgcattctatatccagggccaagaggatagaaatcctgctcggtgggaagaacaatgaactgaaattccaagtgtctgggtacttctcgtttcttccacttattaacagtgtgatccttggcaattattccttcacctctctgagccttaatttcctctcctgttaaatgaaggagataatgtaaaatctagaaggttggttctcaaccttggctacaaatgagctctccatgggtgcttttaaaggcctgatgtccaggagataccccagattaattaaatcagaatctctgagcatagaatataggcattggtatttttttaaactccccaggtaattccaaaatgtaaccatgttcaagacccattgatcattctagatagtttcaaggtcaggcccttccatgtctaatactctagtattttgcaaaaacctcttgtta

SEQ ID NO: 532747 - DNA, 523 bp, Homo sapiens
caactttcctttaatatcaatggccaaggtcaccattcgcctaggactagaggactcccgaggaaacagaaatcagtacatgcattctatatccagggccaagaggatagaaatcctgctcggtgggaagaacaatgaactgaaattccaagtgtctgggtacttctcgtttcttccacttattaacagtgtgayccttggcaattattccttcacctctctgagccttaatttcctctcctgttaaatgaaggagataatgtaaaatctagaaggttggttctcaaccttggctacaaatgagctctccatgggtgcttttaaaggcctgatgtccaggagataccccagattaattaaatcagaatctctgagcatagaatataggcattggtatttttttaaactccccaggtaattccaaaatgtaaccatgttcaagacccattgatcattctagatagtttcaaggtcaggcccttccatgtctaatactctagtattttgcaaaaacctcttgtta

SEQ ID NO: 532748 - DNA, 612 bp, Homo sapiens
ctcactgtgcacatggagaattgacaactttcctttaatatcaatggccaaggtcaccattcgcctaggactagaggactcccgaggaaacagaaatcagtacatgcattctatatccagggccaagaggatagaaatcctgctcggtgggaagaacaatgaactgaaattccaagtgtctgggtacttctcgtttcttccacttattaacagtgtgatccttggcaattattccttyacctctctgagccttaatttcctctcctgttaaatgaaggagataatgtaaaatctagaaggttggttctcaaccttggctacaaatgagctctccatgggtgcttttaaaggcctgatgtccaggagataccccagattaattaaatcagaatctctgagcatagaatataggcattggtatttttttaaactccccaggtaattccaaaatgtaaccatgttcaagacccattgatcattctagatagtttcaaggtcaggcccttccatgtctaatactctagtattttgcaaaaacctcttgttagctctagatcagtccctctccaatttctttgtagagataggtaatgccattgtgagtccaatatg

SEQ ID NO: 532749 - DNA, 677 bp, Homo sapiens
gagtttgaatcctccttccattctttgttactgagtgaccttgagcaagtcagtcaactgctgttttctcccttttcttatctgtacatttagattaataataattccaacatcacaggttacctatgaggatagtaatatataatacatgtaaaatgcttaacaccgaggctggcaggcaggcatctcagagacatcagtaaggaagtgtaacttcccaaaggcacctgtgttcaggttagcgatcatttcagttcccatactcatacccagtgggtgaacttttacttatctatgctgtgaggctatcttggggaaatgaaaaggggtaagggagagtctgccctggaagtaaattcaactcaggcagaaatggtttataacttttaaatggcaatttttttcaagttttaaaaaatattagagtacagtcccagtgagtacacattattaaaacatgtgaaaggtgggagaacagagagagagagcacaagagtgagagcagttattagaatagtttaataaccacaaaggagccctatgaaattgactgaaggccgaggtgggttggattgcttgagcctaggaattcaagaccagcctgggcaacatggcaaaaccccatttttacaaaaaatacaaaaatttgccaggcwtggtggcactcagaggcagtt

SEQ ID NO: 532750 - DNA, 595 bp, Homo sapiens
tccttctctctgtggtgttttctccccactgctggctgccctcctgaaggatccctgtgaggccaggcaggaatggcttgcctggggacccagcaggctcccagggcctttcccgctgcyttctctgcccttgtatttcactcaactctctaaagtgactcagctccaggtaaggttggagttttctcccgcaaactaaaccttcattttccccagttggggtgtgtgttcggtgcggggcagtggtggggaggaactccctttcccacttctgcagtttgagcactcatagtatttggggtgcctcctgggtcctgcaggagcagttcacttccttcagagggtctgtgggtcctcttgggattcctgactgattcctgcagtctttctgaagctaaaattcatgatgcgagcctccgcatgctgctctgtcccagggaagagaattttaagaggcagatagtagccagccatgtcacacgtgatagtccaagtgaaatttttatttccttatttctgcttcttaattttactttgtcatgtagcctctttttcttgtttcatgagagttgaaaaaaaatcttctctctcagat

SEQ ID NO: 532751 - DNA, 638 bp, Homo sapiens
ttttgtgcctccactgacgcattcagcagaaattgcaaaagcctcctcactctgggaggacgctggaaccccctctgccccaccagcacatcgctcagacaccaacatttaacttcgcgttccacgtcccttccagagactccggggccctctgttccccttttctcaccctccactggggaggaggagtgactgctaagggtgggctcccaagtctccgcacccaggctagatatcttaaggccaccccaggtccacccctccctgcaccgctccaggccgaagccgagaaaggggagctgtgaagagaagacagcggggccaggtgtcctcccggccgtgcaggatctgggcctgtcctcccgagtgcagccccgctgggtccaagctcttcacgtgtatgcaggaatcgagtggaggagccgccgctcgacggctgggaagtgtctttggacagaactaggccaagggaggggccgtgcgggagggaggtggcctgcatcttcagctcgcctctaggaaaacttgcgggagagtgagtgcccttycctccccgtccctgcagagagttggggcctctcctgtacccagtgcccgtttaaggggcccacagaaatcaaactccgaaagctcgggcc

SEQ ID NO: 532752 - DNA, 380 bp, Homo sapiens
cagtatattttaaatcaaatcatctcaactattttgtgataatcataaaagatatgtcctacttcctgacttttggattcatgacatcacctcctggccttcttgagattgtgtggaatctagtgaatgttgtgcagaagttaygtgtgtgacttttaattgttggtgctagatctttcacatctctcatttccttctggcacaataaccagccacattctttatggtggcggtgttgaaagttagttaattaacattatattttgaggtatttcctctgtacagtttacactcagtttcaactgatctagacaataattatctttttctttcaggtactccaaactaaatgatctgttcaataaaatcctcattttgag

SEQ ID NO: 532753 - DNA, 638 bp, Homo sapiens
tttccatttaattgttggatatatgacagatgacaagaaatcctgaggtagacagaaagttcctactggctaaagtattccaccaggatgtgcccttccactttggagtgttatgggatccttctgttctttcaagttagaatgaccactttccgtatgctcctgcagggacgcttattaaaatctgaggccgatgtgttgcctcaagttgtgtgcagtggtgagcaggggacagcataggccagcagctctgtagatagcagtgccctttgattcagttgaagagacctctttatcctcagttttgaatcacaattagcaccagttgttggtagccatttcattttaagtttcattttgtgggcaccaacgtggagctttcattctggcagtctgaagtttatatgacactcaacaagtctacaaaaattataggagggagtgtggtraggaacgtatcttttaacttttacttctcttccaccactttctcatcatcatatgtattagataatatttgttactggcatcagtccttgtctagcccagccaacccgtggagagaatgaaggcacctcatgaaactggaaaagacagaaacaataaaagatagaaatctactcttggctgttttagga

SEQ ID NO: 532754 - DNA, 624 bp, Homo sapiens
acaacttaaatttgggagtgggttctagttgccatagcaggcactataattctaataacaaaagtaggtaccaaacctccaatgtcaagccaggcagatcaggactggaggacaagttctgtgagcctgattctagattcaggcagacctgatttcgaatcccactttaactgagtttttcaagttaaaatggcatggagtgaacattctgagtactttttgtgcattatctcatttaattgagacaaccatcttatggggcatgtaagtgacttgtccaaaggcacatggatcaatgggacagcagggatttatgccctgactccaaatctattcgaacgtaatgtaacttgacttcatttacatttttgtggtcttcgcagttccatggacacagctrtagtgtcttctgacatttatttttgcagaagtctgatgtcagtctgatttttggtcatttgtaattaattttctctttatttgctttggtttagttttattgggtttttggcctggatccctgaataattgcctttgtctttataatataaaagttttgttggaatgatgtgaatacattttttcttaatttagcttacatcacactgagtcccttcaatctgt

SEQ ID NO: 532755 - DNA, 498 bp, Homo sapiens
tgtcagacctcatcagcgatgacagttgacgttaatgggatttaccaagttgtttatagtataatcacatgaacaataaatttctccttattttgcagcattggacacatttccaccatgctaatggcattttaaatatatttggcaattttcccaattttttactgaagaaaactgtaagtttatacttgaggactgaagtgtgactctgccgattatcaggtcagtatcacccctacctccaaggatatcactgctatcctaaaatctaatgcarttttactgtcattcttttatatttcaggcaaaaatttattgcagtgtctatatattgagattacattcaaatgcatagaacagaaggaactgttaaatgttaatacttataaatggtggttattggaatatgcaaaaacagatctgttggttcttacattacacagcagtggcctttctttcctcctgtgtaatatttatattgtgttcatgtagacacta

SEQ ID NO: 532756 - DNA, 425 bp, Homo sapiens
gtcctgcagggtcacagttcctscagccagaagccgctcccaggtcgagcacaaccttattgtcaatcactgtgacacaattatgtgtcaatcacaggccacgttcttgatcaatctcctctgtggccacccaggaccctgcagacctcacaagccaaggagatgagtggagcccggacgtacttgtaaaagcaggtgacaccgtcatgtgtgatgtcaggctcatgctgggcaccgtgaggagagcatcccgcaggcccaggacagcgcagggagaccaggcaggtagctgccacctccatgcaggtgagggacgggggtgtggaggtggggaggagtgtggagaagcaggcaatgtgtgcagtatgctgatggccctggatggtgcctccagacaccaatcacattgcacgggatgtgaattc

SEQ ID NO: 532757 - DNA, 566 bp, Homo sapiens
tgtctgattttcctgattagtctggcttgagatttatccatttcattaatctttttgaagatcaaaccarctttcagtttcattgatttctctattgtttttctgttttctatttcactgatttcagctattatattgagtgtttatttcctcctgcctgctttgttttagacaattctttttctagttactcagatgctagctcagattgctgaatggaggatgtttatgtcattgaatataaacatttaatgctataaattttctccaaagtactgctttagttcatcccacatattttaatatattttcttttataacatttttaaaaatttatttattttcttagagatggggtcttgccatgttgcccagttggtctcaaacccctgggctaagataatcctcccacctcagcctcccaaagagctgggattccaggcaggagccaccacacctagccatattttgttttcattttttctcaactcaaaatattttctgattttccttgtgaaattcatcctttggctacttaaatgtggtttgttttgtaaaaggaaatt

SEQ ID NO: 532758 - DNA, 622 bp, Homo sapiens
tgttttgctgctgtcctcctgcgatgggcccctttcccagagaccctgtagccccggccctcagtcccagccctcagccaacacaacagccaaggattttagccccggccctcagccaacacaacagcgaagtattttcaaggtttctggctctgtggggggaacaaggcaggatgccaggaggcctgcaggacacctgcttatggccgtgtgctcactcaagtgtcaaagcagcttcccaagggaagaagggcatcttgtccttgtcaccctccccaggccacatctggggagcaggggtggggccaggtctctggactcctggtgcacttccttcccctggtgactcctgaagcaagccaaggtccaagcccctgagcttgtccatgggccctgccaagactgggccttgaggccaggaggaggaaccagagccgctcaaaaggcagacggggtggggasgggaggaggcagccacgcctgaggagccggcagtctcttggggttttgccattgaaaggggctttcagtgaggaaggcacaaaatcaagaaaatagagccccgacccctggccacgtggttcccctgcctgcctgcacctccccatggcccagccagctt

SEQ ID NO: 532759 - DNA, 374 bp, Homo sapiens
tcaggactcaagtgctctccagggagtgagatgcgggctcgattgtaagttayaaagtgatgcttccctgtgggaaaaagtacatccaatatagactgtaggacaaagtctgaaagtccactgcctcccatttccacccagtcttgcctgtgagtcagagagaaacagtgctaacaggcagtgtgcacctgtccagaggctggctgtttgagggacacaggtgtgcacacctggggatgtctgagtggaaggtacaggtcaggattatgaccgtgcagtcagtcacccactggcatgatgtctgtggcatcctggggcagccatggggctctcaggccctctgcctgccccacaggccatacccctgccctgga

SEQ ID NO: 532760 - DNA, 669 bp, Homo sapiens
atgtgtgagtgcagggatgtgaatgcaggggtgtgcatgtgcaagtgtgtgagtgtgcacgtgtgtgtgcaggtgygtgtgcaaatgtgaggtcggggtgtgagtgcaggggtgtgagtgcagatgtatgtgcaagtgtgtgagtgcaggggtgtgtgtgtacaggggtgtgtgcaggtgtgagtgcagatgtgtgtgcaagtgtgaagtcaggagtgtgagtgcaggggtgtgtgagtgtgcaagtgtatatgtgtgcagggctgtgtgtgcagggggcagacagaaggggtgactggagacaaggcagggggcaccaagaccaggtgccagtttcatgccatctggggtgggaggaggctgtggctcttcctgagacctcagtgggagcttctggagggtccccacctgctctgcgagccctgcacacctgggtagagagagtagggtcttcctcggtctgcagattcccttcctacctggatgttctgacaggccaggccctggaccagccatctttaaccagcaccgcccattggcctctggcccagtggactggggactgcaccgggagggccatccttggagcaagaccccatcccttctggtggaaaaggccgctggcccagagcagcagatgtggacagggccaggggtcaattcacccac

SEQ ID NO: 532761 - DNA, 440 bp, Homo sapiens
ccaaaagacagagatttggaagaaaaaaacatgaaaatttggacagatagaatataaaaagtatttttttaaaattaaggacaaatatgtattcagaggaagatgacaatgattaagttgtctttatacttggtcatgtggtttattattagttttgtcattggaaattatgacctatttaaaaatactgtcaacttatatgattatttctggagattatattgaaataactaaaaatgctatgttaaaacatataaatattattaatattcttaatgcttcccgaaggccttatatgatgtatagtccaaacrtatgaaattgcttgtgcatatttcatctttatcaggcatcaccatgcctattatttatttcaaaactatttgctaatttgattggtgacaattgatatatcttgtttttttttagtaagtttaaca

SEQ ID NO: 532762 - DNA, 351 bp, Homo sapiens
gtcaactggatcctgctggcagagcgaagccaaatgtgatgaatcctccatacagttagtgtgtttcagacttggtacataagacacaccatccccttttgtcacctattcgtgattttccatgttcaaagaacagattaaaattacaatttttagcttgctaatttacatcattatgcccaatctctaattgtatctccccagaattgtgacattaaattgcactactaatgttctcaatgctttcattagtaaaactgatattggtaaayagatgtgctgtttctgttagaatttttcttgacaatttaaaaaaaagaataaaattacctacaattacattaaaagaat

SEQ ID NO: 532763 - DNA, 654 bp, Homo sapiens
tgtatcaactgactcttgtttagcatttacctggaatagattttttccatcctttattcttagacgtctctattctctattccttgatacttcagaggatattgtttgttaaatcaagtataactatctttatctttctttcctctacttgtttggaaattttcctcataaaagtgagacagatatagaaactaaaatgwccttgaaaagtttatttcagcagaaaaattattttaggtgatcagggaaagaaaaaaattttactcatgatctccacaggtagtggatcccttagatagtataatacgtaattaataatttcattctgttttaaaacataaaacctctttgttttaatttcaatgattttcctcacattatatactattgccaagtagtttgggtttatactattttttgtgttatatgcacaagttaggcaacattgttttatataattattgtctatattatttatgtgtttataaatgacatacatataaagtcttctaggtatttgtcattgactttaccttcaatattgtggtaattgggggccactgcaggggttttagccataagtgccataatcagacaatttttaaagttggacaacattgaagccactgtgggaatgtaaaagggaacatgaca

SEQ ID NO: 532764 - DNA, 664 bp, Homo sapiens
atttcaaaaggacaagtcagtaatacagagtgttagatagagatagacaagtattgagaatcactattttttctttggaaatttaaaattaccccatgcacctgtgagtttacttcagcctgccaggccccttggcatacagtttggaaactatgaacttaaatgactgcaggtcaggtcatctgagytaatatttaggttgtgagtatgctttctaagtacactacccatatgagcttatcacttgtggaccagttagataataaggcataagtgtattagggttctctcgagggacagaactaataggatatatgtatatatgaaagcgagtttataaaggagaattgattcacatgatcacaaggtaaaattcacaataggccgtctgcaagttgaggagcaaggaagccagtggtggatcagtccgagtcccaaaacctcaaaagtagggaagctgacagtgcagccttcagtctgtggccaaaggtccgagagcccctgggaaaccactggtataagtccaagagtccaaaagctgaagaacttggagtctgactttcgagggcaggaagcatccagcatgggagaaagaagaaggctcgaaaactcaggaagtctgctcttccaccttctactgcctgctttattcttattgcactgg

SEQ ID NO: 532765 - DNA, 524 bp, Homo sapiens
agtttggaaactatgaacttaaatgactgcaggtcaggtcatctgagctaatatttaggttgtgagtatgctttctaagtacactacccatatgagcttatcacttgtggaccagttagataataaggcataagtgtattagggttctctcgagggacagaactaataggatatatgtatatatgaaagcgagtttataaaggagaattgattcacatgatcacaaggtaaaattcacaataggccgtctgcaagttgaggagcaaggaagccagtggtggatcagtccgagtcccaaaacctcaaaagtagggaagctgacagtgcagccttcagtctgtggccaaaggtccgagagcccctgggaaaccactggtataagtccaagagtccaaaagctgaagaacttggagtctgactttcgagggcagraagcatccagcatgggagaaagaagaaggctcgaaaactcaggaagtctgctcttccaccttctactgcctgctttattcttattgcactgg

SEQ ID NO: 532766 - DNA, 649 bp, Homo sapiens
agttgagcagtagcaacagagactgtacgactcaccagacacttcacagcgtcggcccaccccagctctatgcttaaaattcatgagaagatacatcattatcatgtttgacaaaagaccattttttaatcttttccttcttttactctgttctgtgcctagaagtatatttgaaatgaatttcattgttttgtcatctgtttgtatgatttaacttataatttttattaccaaggcactatacttttctaccgtgtataatagaattcttcttgggaaaaaaataataattttcaaaaatgtcacacttcctcttcattgaagagtgtactgtgaaatttttctcagtcatatactatcatacattgttttcaacttgcttgcagtggtcaagtatctcttccagtagttagcaggatgagtgtgcactgcacgctgctagctattgaaggttaagagcatatatattgaaaaacactttatggttacagtataattttgaaacacttatttttgcagttgcaaaatattgctaaaaccaaacaaatgatgatttaaaatgattaattccattctgtcctgataggattagtaaatgaaataatgaaagcrtgccaatttgttgcctatacctgctcccttagggcat

SEQ ID NO: 532767 - DNA, 562 bp, Homo sapiens
ggtggatcaggatgcgcgcccggactccagcagccccaacgcgacgggctttgtccgcggccgcccccgcccgcccgcctgcsggggacagggaccctaggacccgggccgggctcacctctctgccggcactgcgcggcgacacacagcagcaagaccaggagcacgcccccgcgcatctcgcctccgccgccactcggtgggtctggggagaaagccgcgcgcccgcctggaacgctccacgggacgcgagtccgcgctgccctggccccgccgctcctggagtcctgccgcccctccctccagccgccctcggacacacccctcggctgcgccccgccccgccccgtcccgccccggcttggccccgccacccagacccctcccccgggggcgcccagcttggcctctgggtcccggcgcacgcggaccccaagtcggggaggccgggctgaccgcggccgcctccccggctccgggtaggaggtgggcagagaaggtgggctgaggggaggagaaactgggctgcgggggtccgggagggtggattccgagaaactat

SEQ ID NO: 532768 - DNA, 562 bp, Homo sapiens
ggtggatcaggatgcgcgcccggactccagcagccccaacgcgacgggctttgtccgcggccgcccccgcccgcccgcctgcgggggacagggaccctaggacccgggccgggctcacctctctgccggcactgcgcggcgacacacagcagcaagaccaggagcacgcccccgcgcatctcgcctccgccgccactcggtgggtctggggagaaagccgcgcgcccgcctggaacgctccrcgggacgcgagtccgcgctgccctggccccgccgctcctggagtcctgccgcccctccctccagccgccctcggacacacccctcggctgcgccccgccccgccccgtcccgccccggcttggccccgccacccagacccctcccccgggggcgcccagcttggcctctgggtcccggcgcacgcggaccccaagtcggggaggccgggctgaccgcggccgcctccccggctccgggtaggaggtgggcagagaaggtgggctgaggggaggagaaactgggctgcgggggtccgggagggtggattccgagaaactat

SEQ ID NO: 532769 - DNA, 562 bp, Homo sapiens
ggtggatcaggatgcgcgcccggactccagcagccccaacgcgacgggctttgtccgcggccgcccccgcccgcccgcctgcgggggacagggaccctaggacccgggccgggctcacctctctgccggcactgcgcggcgacacacagcagcaagaccaggagcacgcccccgcgcatctcgcctccgccgccactcggtgggtctggggagaaagccgcgcgcccgcctggaacgctccacgggacgcgagtccgcgctgccctggccccgccgctcctggagtcctgccgcccctccctccagccgccctcggacacacccctcggctgcgccccgccccgccccgtcccgccccggcttggccccgccacccagacccctcccccgggggcgcccagcttggcctctgggtcccggcgcacgcggaccccaagtcggggaggccgggctgaccgcggccgcckccccggctccgggtaggaggtgggcagagaaggtgggctgaggggaggagaaactgggctgcgggggtccgggagggtggattccgagaaactat

SEQ ID NO: 532770 - DNA, 636 bp, Homo sapiens
tggaaaacacgaaagggagatacttgagttgtsatcatagcaaatgttcctataatatttagtgtgtgtcactgatgctttacatattctaattcgtttcatcttcatgactaccctctgaggcagatgtactgttaaccccactttacacatggggatgctggggtctgagggcttgagaactccgcgggttaacccaagagttatgggacctggttatggaacctcagtgctaaggaaagtgacaccatcataggtagtgttagaacaaaatcttggggaatggttatgttttcctgttcggtggaaaggaagcatcaacatagaagattaggtaggagctcatgtacactaaaaatgaaagtagattagaatgagccgggttggaagtgggagaaatgtccccaaacacaggtttagagttggccttgagaacatcagcggtatggacagatgtacagacactggggcctgataattcttccttatggcgctgtcctgtgccttgtaggatggttagcagtatccctggcctctccctccccagttcctctccctccccagttatgacaaccagaagtgtctctggacattgccaactgtccactgggaagtaaaatcactgccattcagaac

SEQ ID NO: 532771 - DNA, 636 bp, Homo sapiens
tggaaaacacgaaagggagatacttgagttgtgatcatagcaaatgttcctataatatttagtgtgtgtcactgatgctttacatattctaattcgtttcatcttcatgactaccctctgaggcagatgtactgttaaccccactttacacatggggatgctggggtctgagggcttgagaactccgcgggttaacccaagagttatgggacctggttatggaacctcagtgctaaggaaagtgacaccatcataggtagtgttagaacaaaatcttggggaatggttatgttttcctgttcggtggaaaggaagcatcaacatagaagattaggtaggagctcatgtacactaaaaatgaaagtagattagaatgagccgggttggaagtgggagaaatgtccccaaacacaggtttagagttggccttgagaacatcagcggtatggacagatgtacrgacactggggcctgataattcttccttatggcgctgtcctgtgccttgtaggatggttagcagtatccctggcctctccctccccagttcctctccctccccagttatgacaaccagaagtgtctctggacattgccaactgtccactgggaagtaaaatcactgccattcagaac

SEQ ID NO: 532772 - DNA, 663 bp, Homo sapiens
ctgccctttgttgaatacccactcactcgtgccttctctgactcatttttctcagaataacctggcggggagggtattattttctccatcttatagaactgaggctcagataagtgaaataacttgcccaaggttacacygctgataacgacatagctgggatttgaacccctggagcagataacacgtctggtgctctgactgggtagcttagtagactttagagctggatgggccctgagttgaaattgtgatccagagctatttgcaagctgtggttaagagcacagatctggagccagatcacctggttgagaatcctgactctaccactgactagccaggtcagtctctgaacctgtctccttatctctacctacttcataggatgaaacgagccagtgcatgcagagagatttaagcctcagcgtaaatgctctgtaactgtgagctgtttttatttctagtatctgtaaactaagcaatataattagggccaggttaagacctttagcagcctcaaacaccagagactggcctctctcctccattgtctcctccaatacaataataaaacggtgtggttcgtaagacaaaaaactcgctgtgctgaaattttttttacaattttgtttagttttgttttttattgatacataatag

SEQ ID NO: 532773 - DNA, 606 bp, Homo sapiens
tgccctttgttgaatacccactcactcgtgccttctctgactcatttttctcagaataacctggcggggagggtattattttctccatcttatagaactgaggctcagataagtgaaataacttgcccaaggttacactgctgataacgacatagctgggatttgaacccctggagcagataacacgtctggtgctctgactgggtagcttagtagactttagagctrgatgggccctgagttgaaattgtgatccagagctatttgcaagctgtggttaagagcacagatctggagccagatcacctggttgagaatcctgactctaccactgactagccaggtcagtctctgaacctgtctccttatctctacctacttcataggatgaaacgagccagtgcatgcagagagatttaagcctcagcgtaaatgctctgtaactgtgagctgtttttatttctagtatctgtaaactaagcaatataattagggccaggttaagacctttagcagcctcaaacaccagagactggcctctctcctccattgtctcctccaatacaataataaaacggtgtggttcgtaagacaaaaaactcgctg

SEQ ID NO: 532774 - DNA, 617 bp, Homo sapiens
ctagggcatggtggaaaataaggataaatgggaacttttaaaaatcttgttggaagaaggtgatggctcaaataagatttccttcctccctgtctctctctccctctgccccttctttcctcccttcctccaacagatgctaactggatgatggaatgaacaagattctgtgttaagtgctgtggaggaaataaagatgatttccccattggcttggccttcaagaaccttaggcaagggcctaaggtgaatacaccagaagccttagtagcaatactctgtcccagagttcagactcataaacacattcctgctctgcttaaaatcaacaaatgctgttttggatgtgtaagagctcttaaggatgacagcaacactcagtaaagtaaataagctaygtgactgaggccagaagtgtcacactgccgtctctttccttagcaggcttttctgataatacatatgacatagctctcaaatgcaaatgcctatagggaccaggaggaaataccaatggaaaaagagggtcaaatttaagagagtagggagtggtggggactgtgacaaaatggagcccatatgccttgacttaattgggccgccactgttcagtgcca

SEQ ID NO: 532775 - DNA, 496 bp, Homo sapiens
ctccagaccctggatcttcaattctcccacagtggtgaaatccacagacacactcctttttgtgacttggagctgtcagtgccctttctactgccctggaacaatctggctgccatggtgaaggctttgagggtggaagcgatgaggcagagagaggttgctcccaaattcagaacaggtagcgccagtgaggtcaggttacacacacacactttctttctcatgggrcaggtggtgagctccagagactctgcaggggacattccaccctggagcatgacccccaagtgctggattatgcctctccccctgcctggcctactgttctccctcctcctgggccattccttctattacagagtctttactaggtggcttcaaaggtcctactcaaaggaggacccccaagagtcatgagtcacaggacctgcactcagggggattctggagggagcatggagccaagaagccccccagtggcttccattgcattccc

SEQ ID NO: 532776 - DNA, 595 bp, Homo sapiens
tctgcatgatgagtaggggttacaagggtcaagggctttggggtgaggaggagagctttgggtggatgacaggacatgtgcagactttggcgtgagaggccatgtaccctgaggtggggattgaagcaggttcagtgtgtcctgaggracttgaaggaggaagacgtccaacaggagctgagagcatgggactcgggacaggggagtgttaagagtggggacagagaaaagaggctgaggtcttctgggaccttgatggggggaatgtagcattaagactctgaggattcgggaagaagacctcccaaaacacagtaaaacttgagagctgctttaggaaggcatcccagagtttagggcagggggcggctattcagaacagcaggccatggggctgcagattgaagtcccggaagaaaaaatgagaaggaggcccctggtcagctttggaccagctacccaagacgttccaggttctgcgtgcagtacattctggaaaaattctgaaggcttcccaacgtcaagatctgtgggaaagaactaaagctaaagtttcattaggatgaatgtcaaagtcagcctgtggggttattca

SEQ ID NO: 532777 - DNA, 461 bp, Homo sapiens
gaaactaattaggccagcagtaaactccttgtataataaaatcgcaggccgtaatggtgaataagtgaggttcccagccgcttatgacagatgcctttctgggcagagagagaagagagcctgtggctgtcaggagaaaatgaagggagtggaggtgccttctttagacacatgcctttcctaagtatccacgcacatgatcgcagagcggaggagtggaagttgcgactggggtagagttttgtctttgctgggcaggcctccttcatacaaagatgcttgggggagaatcaattataagtattaggcagtgtcttcaggtcttaggtgtatgctgtgtgtgtgtgtgcaaaggcttggggagaaggattggtgtcacgtgcggggcagtgtraaaaacttaactgcttcccacctgggcacaaaatgaaaagaaagactgcctggcctgacataaattc

SEQ ID NO: 532778 - DNA, 430 bp, Homo sapiens
ttagggagaaatcctgataagacccattgtccccggattacccactggcatcttaggccagattcattcatctggcagcctgccctgccctggcatgcccrggacagctgatgctccaggagcaggtgaacacggccagaatatcaccttggaggtaattttctccttgtgctccttattcactgagatgttaaaagaggttgttggtgttgtggggtttttttttaaagactatatcagcacatcctatttgtagcatgaacccaggcagttcctaaagactggctttagtctattgtgtttgcttcctctttgaacccagtcaaatcaagatagtgaagccaaaagagatgagtgagcagaggagagacgctgaaatggcactttgacactgcaaaaaaacaaatgagttttgaaaaggcactaattg

SEQ ID NO: 532779 - DNA, 430 bp, Homo sapiens
ttagggagaaatcctgataagacccattgtccccggattacccactggcatcttaggccagattcattcatctggcagcctgccctgccctggcatgcccaggacagctgatgctccaggagcaggtgaacayggccagaatatcaccttggaggtaattttctccttgtgctccttattcactgagatgttaaaagaggttgttggtgttgtggggtttttttttaaagactatatcagcacatcctatttgtagcatgaacccaggcagttcctaaagactggctttagtctattgtgtttgcttcctctttgaacccagtcaaatcaagatagtgaagccaaaagagatgagtgagcagaggagagacgctgaaatggcactttgacactgcaaaaaaacaaatgagttttgaaaaggcactaattg

SEQ ID NO: 532780 - DNA, 430 bp, Homo sapiens
ttagggagaaatcctgataagacccattgtccccggattacccactggcatcttaggccagattcattcatctggcagcctgccctgccctggcatgcccaggacagctgatgctccaggagcaggtgaacacggccagaatatcaccttggaggtaattttctccttgtgctccttattcactgagatgttaaaagaggttgttggtgttgtgggktttttttttaaagactatatcagcacatcctatttgtagcatgaacccaggcagttcctaaagactggctttagtctattgtgtttgcttcctctttgaacccagtcaaatcaagatagtgaagccaaaagagatgagtgagcagaggagagacgctgaaatggcactttgacactgcaaaaaaacaaatgagttttgaaaaggcactaattg

SEQ ID NO: 532781 - DNA, 547 bp, Homo sapiens
tgacaaagcaggtagcctcgctctggagtctgtgctcttcacctctcccttctctgagggtgagacatggtgcctgtcctgcccacagggggttacagtctggtaggaaagacagagtaagcagacaatcatagtatatacggtgcatgttgtgatggggagtgcaggggatcagagccagagaaggggctcacacccagcccagggggattaaggaagacttcttggaggaagtcaatacagagaaatgaagtcatcctgggcaaagcactagttgcgggagagctctgggctgagaaagaggctgttgcctttgaatagtggagagaagttggaacactgggttcaagggcaaagataggccggggcagatcctgtgrgaccttgtaagctgttgtcagtcagggacccagcagcaaagagatggcatgctcacctgagtggtttaagaaaagtttagcaaaggaactttgcacaaactgtgggcagggaagatgagaagtaataatggatgctgcactactcctgggctagtagccattaccac

SEQ ID NO: 532782 - DNA, 537 bp, Homo sapiens
tggcgcttggccttaggcacaaaataggcttaatgagaacttactgcacaagaaggtgcaactagttcaaaaaggtgggcctctcatatccctgccttcccactgggcactggcaaagaagatgagtggaatattttaggcaattgattaatggatcaactctaacaagaatgattctgcattcagttatctctgaggaaactgtgagtatgaaatactgatcacatgttaaatcgatttataattgtataagcttgttyatccacaggcgagtcttggagattcttgtttgaggtacatgaactaaatacgctgttgtcttttacctcgggaaggaggtgcaaggcattattttaaaatgtctgcatttcagttcactatagtacctatggtgggtacctatgtaaggccagtcaggaaaccggggatacttctttagcttttcaggaaatcaggtctgacatttgcattcacacaaatccatgtatattcctggcttaaagctcctgtggaaccagatagacagaaagctaatag

SEQ ID NO: 532783 - DNA, 614 bp, Homo sapiens
atggaagacagcgagttctgacttatatgagaattgtttgtgtttgtttttactcaataaatcagagccatctgccaggctactctctcaaaactgattttattattttcttttacttaaaaatctatatttttcccatttttatgttggcatgaaattctaaactctctgtttgccttccatctggtccagttctttccaataygccagtatctccctgttcagtttgacattcattctgtgcctttgcttatacaacatcctccactcccacctcacttggattagaaacttctcctttctcaactttgactaatcagttttatctatcctcaaaattaagctcatgttcaaacatttacacaaagtattccttgatgatttctacctgtgttattttaccatttccatccaattttggtctgcagcacacaggtttagtacttaaatatgtaatctcatatgtggactgattttttcatggatgtcttgggatggatagtattaggagatgaggagactaaatttaatgaattttatgaggctgaaaatgtatcctgaagatttaatcctgaagatttaaaactatttaaagcagagcagtattgtcagaa

SEQ ID NO: 532784 - DNA, 425 bp, Homo sapiens
ccctatgatgctaggcatggaagacgaccagaggcccaagaggatgttcccatgtcaacacatactccctgccactattatgtaatagagaaccctgttctactgtgttccctactacaaatgttctcacctctcatgcctcagaaaccaagacatctaatccatcagagcctaagatttcagaggaaggaagcataaattcctcacaggtgactggcagtggtggtgagaaaggccattcttctttcatcaatgarcttgtatgttctaccatttgattcaaatttcatatttcaagaaatcatttcaatgcatacactgtattcttgcagacaacactgcaaccctgaggagtgttggacatggtaccatagttgagtctttaataagacgtcccattataccattagcctggtaattctgga

SEQ ID NO: 532785 - DNA, 643 bp, Homo sapiens
ttattctgaacttagtccaagattaaaggatttttatgacaaatgttcttgagagtgaaatgatgtggaatccctcaacttatctggaatattcttccaataaacccaagtcagttactcagagaggaagaaacgttgtaaagcaaagttctagtgagttgaatctggaaagaacatcagaatacaaggccaattttagtgctcaacattggctaaataaggtcacagtgtccactagtctagagtaaccactggagcacagatgggtctagagcatgtcaacttagattgggggaaggagaaragagaaagagcacaataaaagaaaagtttatggccaagaggaggcacagaaacttagtgtctgggaaacatgcaataagactctcagaagaaatgaaaatagagctactaggaagatcatcgtgtttgtattgcacaatattgagtactagaaaaaaggaatttgggagcattgtttcattgtaatagcaaaccaggaatattaataggtgctgtagcattaaggacattctctggactggcatcagacaagtctgcattctaacattggctccctcacttatgccatctgtgatctcactaactcacctttcagtttcttatttgcaaaatacggata

SEQ ID NO: 532786 - DNA, 566 bp, Homo sapiens
agctgttgggcaaatggaaaaggagagtaggatttcaaaataaaggaaagatcgagaaagatgaagaagcaaaacgcattcaggccacaagtagctacatattccacctgtgacttgggtaagagaagaaacattttcccaatggtattgaaggaaaaaatgtaaaaatagtggatacaaatacctgtttaggtagggcagggacagataagacaaaaaaggtattattaccttgatgtctgttttttatgcgaaatagaagttagttttctcagaaaagaagaaaggcaagttgaagacattggtaaaatttgaaattactgcaggaaagaattggagaaggaacagataatggaaacagaataatgtactggcattattgaggataaagataaggtatgttatattatcaccaacctacacagccaactgattttcttcrttaatgcttagaaactcagttgtagaatcagaaatttattgacagatgaaggactggtggagttatacagaaaacagggcagagagtttcaaatttctaagaagaaaatgatgaaagtgaggga

SEQ ID NO: 532787 - DNA, 679 bp, Homo sapiens
agaacataaatggtctgtgggaggtgggagagtggaccmcacacgccacccagtaagacccgtggctactccttcactgtggcatcagagtcttggattgctccagagagattttggttgtttctatcacgtttctccatgaaatgaattagagtttgacagtgagaggcagtcacatgggtgtgccccacatcttctcactccttttgtagcagaccacgttcttcaaaaattcaagccaaattttaaaaatcaagagagatctggccgggtgtggtggctcatgcctgtaaatccaacactttgggaggccgaggggggcagatcatgaggtcaggagttcgagaccaacctggccaacgtggtgaaaccccatctctactaaaaatacaaaaattagccaggcatggtggcaggtgcctgtaatcttagctactcaagaggctgaggcaggagaatcgcttgaacccaggaggcagaggttgcagtgagccgagatggcaccactgcactccagcctgggcaatagagcaagactctgtctcaaaaaaagaaaaaaaaaaatcaagggagatcctttcaaaaagccagatttccaggtctggagagttctagaaagatctagtggcctctgcctttcatttctgcaggagtcaagtctcggtgctctcttcagaca

SEQ ID NO: 532788 - DNA, 642 bp, Homo sapiens
ctattatgccagtgcattagacggtccccagaagggagagaaggtaattggctcccatcaccctgagcagcgctattgggtacaatgtgcaaatagcttaaaattaaaggctggcattagagcctgttcagtctgtaatggattactaaatgagcacaggcttacctactgccatcaacaccctccagaaatcatttgcaaacaggacagataatttcgtatctgattcaggttaattgccctgttttcctgcctccctgctcaccaagggcccccatgggattgaactctgcaaagttgcccaaaccagcctcagcgggcaaacgttcccaccaggagctaatgaggggtcatcgtcatcttctcagacctaaacccagacttgaccctctgcaaagcattcttcatgaccaagtcattcagatcccttatccccgactttgctatccggtggaggaggaccatctgcctctcgctcagtgtgtggttcaggcagtgtgcaatggagatgggggtctcccccttggcatctctgtcgtggatggaggccccrtgctggagcaggaggattatacagtctgaccggcccatagctgcagccacatgcaggggtgtcctgcccaggggggatctgctgaggca

SEQ ID NO: 532789 - DNA, 614 bp, Homo sapiens
aattataggagaggcggggctggggctactatcagccctactttgcaaaggtgaaaatgaatacaaagagtggttaaatcatacgccaagaccccacggctgataaatgctagagctgagtttaaactcagtctgtctggcatttaagctctcagacatacccccacactgactcttaagatgcaccgcacagtcattatcacacaggtatatacggcatgctcagacctctgcacatacacccaaggccactgtgttcacacacagagatgtttcactgcatgtgcactgccatgctattgcttttttttcttctttttyttttttttttttttttttttgagacagagtcttcctctgtctcccaggctggagtgcaacctccgcctcccaggttcaagagattctcctgcctcagcctcctgagtagctgggattacaggcacctgccacaacatccagctaatttttgtatttttagtagagatggggttttgccatgttggccaggctggtctcgaactcctgatctcaggcgatccgcccaccttggcctcccaaagtgctgggattacaggtgtgcaccaccgcacccggcctgccacactgtttct

SEQ ID NO: 532790 - DNA, 402 bp, Homo sapiens
ctgaagtgtttcctagatgggaaggcggccagtgtggcaggagcacagattgtgaggaggggctgagagagtggaagggagagtcaaggtaaatgggtcagcccaggtagggcctgtgtccaccatgagaagcctcgcccttaccctaagagcaaacacgttgccctcagcaagcacaggcagctcatgactgtccagccctctctgccaggtggagggcagtggaaggggttgtgcatccatgcagggctgggtggaagctgaccaggttagggagggggtatgaactcgctacttcccacgccagtgcctrtgtccatggttccctctgccagggcctccatcctcctagtccccatcctttgtgtctcagatacagcagcacgtccccttgaccactca

SEQ ID NO: 532791 - DNA, 439 bp, Homo sapiens
tgctggacaccctcagggttatctcacctgtggggcaagggagctggggtatttatcctccgttcccaccatcactggctgggggctgctcttgggggaacttagcttcctggcatgtgggtccagactggaatggtgagtacagggaactgggcagaaccagtgcaggtgctgttcagtgctggatctgtgcttggaggtggggacacagacaattcaggttctaggctctccagggactccccctggagactggaaggtggacctaggagtggagactcatattgctgcagccattcacaaaatgcttcctcttctctccgtatttctccctcactcttcattgccacaaacaggacaggggccccaggggcagggtcatgcactccrccctggctcctggtcacgctcccacctcggcaaccccccggagttcagt

SEQ ID NO: 532792 - DNA, 571 bp, Homo sapiens
cattatcttgctcatctttgcttttatcctatggcagcttgaaattaacttcagttgtttttttcccccactaataagcacagtttcacttttacatttttatcatttcctatttaaatattttaagaagtgctttcatttaccttcttgctttttccatttcttatctttttacccagattacatattagaaacatctaaggacttttgaagtgttttattttataacactcaggtatttggaagaaatatttccttcttcctatgagtttattttgctttgctaacactatctgacagaactttacctttgcatttgatgaggcttctttcaaggtgygttgacatgtcagttgatggtctagcaactccattaaagatttgtagctgttaaagtgctgcttttctaaaaatgtatacagcacttgaaaaatcaatctagagcgttctatagttcaaccctcacatctgtgctctaatatcagttttgctgtcaaaatgaagtaattggagacttggttgaccggaatacaccattccccaacgagactgggatacaaaggtgttacct

SEQ ID NO: 532793 - DNA, 554 bp, Homo sapiens
gacatatttgcacctgcaagtcttttgtaccacgtaacttgggtgtaatgtaaacaaaacaagataatttgaagccaacccccaaaaaaagaaatatgaaaagaacagaggaggaaggttcaagggtaaggtccagttgccaagagggggcaaaaggccttctgttggttcctcggctcttggcaagaagggagtgcctcctccctcgcgtccttcccttcctggtaactgagtgcttcctcagggcgagcagtggggctctgggcaagcccctcacacctgtgtgcccagtggtcagggagggcaggmggctggctcactgacagattagagaaaacagaagtgaagcacccaagggcgtgtggcgcacacggtggggcctcaatctacggcagcctttacaaaggaccagtgctccaaccggggtctgctgagatccagacagcaaggctggcaggtgtgcctcctctgcgcctccctcagaagcgcccctgggggactctggagaccagtccctggataagcagaggtggcacaagcttgctcttggcgca

SEQ ID NO: 532794 - DNA, 564 bp, Homo sapiens
gctgccagattcctcaccagtgaaactaaaagcaagaaggacacactcctattaacaatttccaaaccatgacatttccttagctacacagtcttgtataaaatataaaagtctgcaccctacttttctattgttgcttctttgtccctagaaagactgataacagtgagagggaagatttattttatttcactgaaagtaaagtcatgtgaaaaattacagaattcaaaattttaaaatgtggctgggcatggtggctcatgcctgtaatcccagcacttcaggaggccaaagcgggtggatcccctgaggtcgggagttcaagaccagcctgaccaatatggtgaaacccctctctactaaaaatacaaaaattagctgggcgtsgtagcgtgcacctgtagtcccagctactcaggaggctgagacaggagaattgcttgaacccgtgaggtggaggttgcagtgagctgagatcgcaccactgcactctagcctgagtgacagagcaagactctgtcttaaaaaaaaaaaaattataaaatgtaataccagaataagtaa

SEQ ID NO: 532795 - DNA, 637 bp, Homo sapiens
tcatttgtccgttggactgggtcagtgtttcccaacaccagggccttgactgtcatgggaaacgtgcactgccatttgcctttcttcttgtctcacctcttcaccctgaggttgtcgttctaggcccctcaccccttcctcttctgtttctccygcctttctgggcctgcccacaataggcctccactgggagattctggttttgatgaccgcaggctgccgtggggtcagaggccacctgcctgtggcaccgaggcctcgcctacagtgtgcagagtctttttagctggttttcactgtgacgggcacacgtgctcacagcattcagaaagctccattgggaaactgaccagaccaggacacctacaggatccttgacccaaatgcccagtttttttcactttgttttatctttgaagaccttggttgttgcttcattccagtgtctgagacagtttcctatcagtggaggcaggcagcggtgaggaaggaggaaatagtacctgaccgtgaccacattccaaggaaagatgccttttattgctttttcaccatgagtaagataatagctcagagacactttgatctaaaaggaagtatttctttaaatacagggtcttttataaaatgtttctga

SEQ ID NO: 532796 - DNA, 637 bp, Homo sapiens
tcatttgtccgttggactgggtcagtgtttcccaacaccagggccttgactgtcatgggaaacgtgcactgccatttgcctttcttcttgtctcacctcttcaccctgaggttgtcgttctaggcccctcaccccttcctcttctgtttctcctgcctttctgggcctgcccacaataggcctccactgggagattctggttttgatgaccgcaggctgccgtggggtcagaggccacctgcctgtggcaccgaggcctcgcctacagtgtgcagagtctttttagctggttttcactgtgacgggcacacgtgctcacagcattcagaaagctccattgggaaactgaccagaccaggacacctacaggatccttgacccaaatgcccagtttttttcactttgttttatctttgaagaccttggttgttgcttcattccagtgtctgagacagtttcctatcagtggaggcaggcagcggtgaggaaggaggaaatagtacctgaccgtgaccacattccaaggaaagatgccttttattgctttttcaccatgrgtaagataatagctcagagacactttgatctaaaaggaagtatttctttaaatacagggtcttttataaaatgtttctga

SEQ ID NO: 532797 - DNA, 611 bp, Homo sapiens
tgccttggatgataccagcctgcctcccaactcatgccaagtttattcactcactcagccagccagtcagctagcacctactatctaagctatatgctgaaamcaataacaatatttgtcactaaatgtaacagagaaccctaactgcattcttgtaaaatccatttcctttctcaaaattttgtttataggactgttagagccattccaataatgtactttttttcatttttctttttttgtttttgacagagtctcactctgttggccaggctggagtacaatggtgtgatcttggctcactgcaacctctgccttctgggctcaagtgattcacgtgccttagcctcccaagtagtagctgggattacaggcatgtgccaccaagcatggctaatttttgtatttttagtagagacagggtttcaccatgttggccaggctggtcttgaactcccagcctcaagagaccagcccacctcggcctcccaaagtgctgggactacaggtgtgagccactgcatctggcccatcaatgcacttttgaaggtgagcctctcttacttgggttgatggaggtgcagccttcccaacttagcagttcagaaatg

SEQ ID NO: 532798 - DNA, 499 bp, Homo sapiens
caaatactaatcttctgtaatacttgtttttctcataatgggctgttgtggtgttcagataaaaatatatgtgaaagatgtcataagatataaagaactctgcagtggttattcattgttattatagtaagtgctcaatcagtatatgttaattcaatttgatacctaacttggccagcttaacagcatatttcctttttcaatgatctrtgtccttttaaaaaggaatatgtgatcctgtgcccagggatgcgttaggtatgtaggaattatttacttacagatgaattacaacagaaagcctttttttaaaggcagattttggggcttgtttttactgttgatgctgacaacacatctgtgaaatacatgcttcccagtggtcattttggtcaaacacgaagctgagcagatgcatgcttgagctccaaccacctggcaggcctttgttgacttggcaagagtctccaggctgggaaatttgaagaacacatttcat

SEQ ID NO: 532799 - DNA, 596 bp, Homo sapiens
gggctcagccaagcatgcgtgatggctgcagagaatttctactggtccccttccaggattgggtctcccggcgtgggttttgagaaaaacgaatctgactctggggctcaggcccaaggtgtcagggctcacggccccgtacagcggggcgcccggggctgaggattgtttggtggggggtgcactgatcagttcttgtcccctggtgactgtgcccctggccagcgacctggcctccctgagccctggagtagggtctcacttcaaatgctggccggagcctgctgccactgagtgctttaagcagyagtcagagaggtgggggcggggcacagaggcagggaagacccccactcgatgtatgccagggtgcacactaatgggcctagagacgaggatcccaggttcccatggacaaaatggtggccatctcctggcgcccctgagctgccggcagtggagacggtgggtggcccctacaccagcctttcttcatgaggcatttccagtctctcctgcccttgagcaagttccagtgaacacgtgttgcttgctaggacctggatcccctggtcctaactctaaccctaacccta

SEQ ID NO: 532800 - DNA, 524 bp, Homo sapiens
gcccgagggcccagggtcacctgcatcctctgcggtttgcgttggtctgggagctggcggggccggaggggaaagcccaggggtatggggaagtggctgcagccctcgaccgctcctccgagtcatgtctcagtgcaatcagacctgggcctgggagcttagctccaacacgatttacaattcaattgtgaaatgggataaaaattagacatcccccttcgggcatckcaattttctttgttaaagctccggttcctcctagtaaatttatctatttctagatgagcttgtatgttgtgttgacaggcaaagggctgggttatgggagggtggtctgctgactgcttccttcttcagtctgggagaggctgcagtgaggacccagggccacagcagtcacattcacttgccacgtgggctgtgacctgagtggtggagctgaacagtgaggaggcggtcctggtgggaatctcagcttccccgttcacaagctgtgtgaccctaggcgggttaccaacatctct

SEQ ID NO: 532801 - DNA, 524 bp, Homo sapiens
gcccgagggcccagggtcacctgcatcctctgcggtttgcgttggtctgggagctggcggggccggaggggaaagcccaggggtatggggaagtggctgcagccctcgaccgctcctccgagtcatgtctcagtgcaatcagacctgggcctgggagcttagctccaacacgatttacaattcaattgtgaaatgggataaaaattagacatcccccttcgggcatctcaattttctttgttaaagctccggttcctcctagtaaatttatctatttctagatgagcttgtatgttgtgttgacaggcaaagggctgggttatgggagggtggtctgctgactgcttccttcttcagtctgggagaggctgcagtgaggacccagggccacagcagtcacrttcacttgccacgtgggctgtgacctgagtggtggagctgaacagtgaggaggcggtcctggtgggaatctcagcttccccgttcacaagctgtgtgaccctaggcgggttaccaacatctct

SEQ ID NO: 532802 - DNA, 643 bp, Homo sapiens
ctgctcgaagtcctctgtacgtccctgtgccaaacactccccagccctggccactgcggccgtctcctgcctgccactgcccagaccctgactgcccaggccctgactgcctgctgtcctgactgccacaacctcctccgggaattctttgcctcccccstccagctctggcagggaggccggccctgggggggggtcctgtccaactatgggcccctgtgtgcaggcatctgtagaggggcattcacccccactctgcatgggagggctggagggatgccctgagcctgctcagccccgggctctgcccggaatgggtgatgggacaaaggcatccgggaggctgggtcatctcctgagctcctggacagtggcagacatacctgcgccactgcctgccaggggcctccagccagaaagaagcagcgatggccccacactcttcatgcagcccccacacagcacctgggcacagccttggaaacctcgcccggcctgcaggcccccaggaagcctgagctttggtgtgatccagccttgccccagacaggagcgtcctgaccctgactccctgtggctctgggacagaggctatctgccttcctcaccacagccccgcgggccagggtccctgttcctgctg

SEQ ID NO: 532803 - DNA, 643 bp, Homo sapiens
ctgctcgaagtcctctgtacgtccctgtgccaaacactccccagccctggccactgcggccgtctcctgcctgccactgcccagaccctgactgcccaggccctgactgcctgctgtcctgactgccacaacctcctccgggaattctttgcctcccccctccagctctggcagggaggccggccctgggggggggtcctgtccaactatgggcccctgtgtgcaggcatctgtagaggggcwttcacccccactctgcatgggagggctggagggatgccctgagcctgctcagccccgggctctgcccggaatgggtgatgggacaaaggcatccgggaggctgggtcatctcctgagctcctggacagtggcagacatacctgcgccactgcctgccaggggcctccagccagaaagaagcagcgatggccccacactcttcatgcagcccccacacagcacctgggcacagccttggaaacctcgcccggcctgcaggcccccaggaagcctgagctttggtgtgatccagccttgccccagacaggagcgtcctgaccctgactccctgtggctctgggacagaggctatctgccttcctcaccacagccccgcgggccagggtccctgttcctgctg

SEQ ID NO: 532804 - DNA, 384 bp, Homo sapiens
cgcagtttcagactccaggaaccacttgagggtggggccccacacatccctaccctcagttaactgcctgggggctgcaggctccccagcccaccccaacccggcctctcggcacaagaggatgccctgacatccttcgtcaggagcaaaccatgaaacccctcaggagcccaggcggtagcagggatgcagggrttcaaggactctactgccccaaggcccttcagggtccccgcgcagcacgttagagccccactgttgtcacccccagcacggtgcacagggtgcctgaggtttccaaggttaccctgccattaagaagcaaatctggcacccagtctaggctctgctgggccccgaagctcacatccttcctgagggtgg

SEQ ID NO: 532805 - DNA, 616 bp, Homo sapiens
gctcaccagtgtcttcaaaaagagcattcgtattttacccagcttgtctacgtagtgatctatgctggctacttcataacagccagaagcaatagtcattaagtggtattttaattaactatattggcattttatatatatatatatacacacacacacacacacacacacatacgcacactatgttcagcactacagagtccaaatacaagacacttttaccaagtattttatttgtaaaggcatcccaaaggtaagatgtcaacacgcaagattggagtgtggaggtgacgctcatccaacttctttatttctttttttttttttttttgagacagactcttgctctgtcacccaggctggagtgcagtggcatgatcttggctcactgcaacctccgcctcccgagttccagtgattctcctgcctcagcttcctgagtagctgggataacaggcacacgccgccaccatgcctggatwtttttttgtatttttagtagagatgggttttcgccatgttggccaggctggtctcaaactcctggcctcaagtgatctgcccgcctcagcctcccaaagtgctaggattacaggcatgagccaccgcgcccagc

SEQ ID NO: 532806 - DNA, 480 bp, Homo sapiens
caccagtctccgggggagacagggaaatcaatgccgagggtgaggaggtctctcccaggtgggaaggcaggggaaccgtggctgccccaggaggagtaacagcctgccccaggcagggccctgacctccacacactggctccccctcaccccacagagaggatttctctcagttttacagggaagaaatggaggcgagggagcgaggacacttccccaggctgtacggccaggaaggggtgagtgggctgcccactccagaggcccggcaccctggaccccttcccacggctctgcctcgggctgcctcggaagcaggaaggccccccaggactttgactaacctacctgagcctggcatgtgagcccttgcgggacggacaagcccacctggagcctcgagccgcagccaaccgygccaaactcgctctacggaggagcctctggcgctccgggatgggacatggcctggctccggcca

SEQ ID NO: 532807 - DNA, 444 bp, Homo sapiens
ggaggggagggctcagcagggggtctgtctggagaggmctgtcaggcagggtcttgtggggcttcagcaaatgctcgggatgatcctgcaggtgggagtcggggaggcagagaaagagcagtggggacattttaggaatgcttggcccgagtgaatgccggttggtccaggccttggagttagctctttgttgaggacagagagagagaagattagttcacctgtctgcacccctagggttcatccacccaagactctcactcctctttggggtgagttttgcaggaccggcctagttgagaggaccagcttcaaggggaggcgggtggcatccatgcgtctttggcaaagagcctcataaaaggggcccggactgaaaatcgattctctaaagctgaaatcaataacaataactaatattaatactgatggtcctctccttac

SEQ ID NO: 532808 - DNA, 441 bp, Homo sapiens
agcagggggtctgtctggagaggcctgtcaggcagggtcttgtggggcttcagcaaatgctcgggatgatcctgcaggtgggagtcggggaggcagagaaagagcagtggggacattttaggaatgcttggcccgagtgaatgccggttggtccaggccttggagttagctctttgttgaggacagagagagagaagattagttcmcctgtctgcacccctagggttcatccacccaagactctcactcctctttggggtgagttttgcaggaccggcctagttgagaggaccagcttcaaggggaggcgggtggcatccatgcgtctttggcaaagagcctcataaaaggggcccggactgaaaatcgattctctaaagctgaaatcaataacaataactaatattaatactgatggtcctctccttactgcactctgca

SEQ ID NO: 532809 - DNA, 644 bp, Homo sapiens
atgtaaatgaaaaactcaagggcctagacaaaatagagtcttctgagtgggttccacgaagtctgtttttgtggcttcactgattctagcatggggtaaatactctcagaagaaaaggtkattccaaacaaactgctaaagagacattttactcattcattctagaattgcaccaatttgctggccaactgctgtttggaaatactcttgattgataattttgttaaaagtggaaacaggaattaaagggtgaatttacagaataaactaagtgctgacttcttactccactgtatttaacagatcttaacttgtctagctttttctagagcatatgtgctggctcctcaatgagactggaaaaaccctgcaggcagctaccatgtgtgacaggccttaattcatagcacctaatacaccatgttctgctgagctgttcaatcaaagctgactcataaattagttattatttggagttggggaagaaagttagcattcttataaataataactgagatttaactattcaggcctatgttctaagtaatcactttgatcttttttaaaatgtaaattatgtaagttaaatgcatttagtcgggtgttctaattattaatttattacacagtaaaaccaaaattgt

SEQ ID NO: 532810 - DNA, 277 bp, Homo sapiens
tgcaattgcaaatgaaaccagaaatatgctttaacagggaaggaaatatgaygtgtacttatctatgtggacgtaccagagagagtacaaaattgagaagggctgtcccgctgtagaagaggatggtcaagagtgtagtgacagtggtgaacagcaggctcacattccggctcataacgatccacagagactccaagatctgacgaggaaggaaagctggatatcagaaccaatcctcatgaaaaaagtttctagagccatctagtgtgcttttaat

SEQ ID NO: 532811 - DNA, 595 bp, Homo sapiens
ttaacctgctttccaccactgggtctcccttattttcctcaccttggcactaagatgctgggggtgtgggtggagcgtwtccaagtttgtaagacctgtcacttacacaagtttagaggctctctatgaaaaaagaatacaggctgagttcgatggcttacgcctgtaatctcagcacttcaggtcaaggcaggaagattgcttaagcccaggagtttgcgaccaggctgggcaacatggtgagaccccatcgctacaaaacatgcaaagattagttggccatggtggtgcatgcctgggtctcacctactcaggaaactgaggcaggaggatagcttgagcccaggagggcaaggctgtagtgagctgcgttcatgccactgctccagcctgggcaacagagtaagaccctgtctcattttctaaaactaaaataaatacagaagtttatatttcttgagaatgagaaaagaaatcacaacaaataactggagctttaggaacttttgagaatattcaggtccctcatgagatctttaggcttatgtgcaaatgctgcaaatgcttcctgactgtaacctgggcccatcagaat

SEQ ID NO: 532812 - DNA, 653 bp, Homo sapiens
ggcatatactcatgtttttaaaataattaatgctccccaagaatatatgtgtccatgcaacacgatacctttggagaatggcagtaccaaataagrctaacatggtccttggaagaatatcgtgctgatgtcctccccacgtaatttgttgtttgtgctcagcaggaaatgttgccagacttttctgcaaaaattcacactgaggtcacacctatactaataaggaaaatgagtagtcagaggcacaagacggatcaggcccctattctcccttaagacatttgtatggctctttagcttgcaacatttgtggaagtggggcaactacgtgggggcctcttaaagagaaaagtccccatgaaaatgtcccttctgtcgttcatgtattcaattcttggatcagcctggccagttaaagagatgagctttgttctgtaatacccaatatgttttcttcattaggagaacagttcagaaaataagcaaagatgccagtttcatctttaaaatgacttcattttttataaattgatttcaaacacattctagtctgagcctggccactctggtgacctccctaggaccatttccttatttgtaaaataagcatatttataatctctgcattcctgcttcgttaataacaacaacaa

SEQ ID NO: 532813 - DNA, 548 bp, Homo sapiens
tgtgtggtctccagatcagcagtatctgtgtcacctgggaacttattaggaatgcaaattcacatgctctacctctcacccactaatccaacactttggggcatagcctagcaatctgatgaactctagtttgacagtaacagattttgattctagacctttttataaaaacagacacactgaagtacaagtcacaaaggcagagttaaagtcgaccacaggatatttttttttcataagtgatcttgttcacacagtccatataaayactgtcttgcacttaataattactaaaatatgtcatttgaatgaaataactcagatgatttcttttttagtaagtaaaaatttagaacttttacctattttaaaatcaaaagtatcaaaatgattccattgtactaaatttaccttttacttgccctgactctaatcaatatatacacaatattcacttctctatgtaccatattttaggtatattcttactcttgtatagagagaagcattaaaggaaagttaagaatatatatacacctaaaaccata

SEQ ID NO: 532814 - DNA, 212 bp, Homo sapiens
acgagaaacagtctgggcttgaatccatctgaagmagtctggctcccgtgtcaggctccaatctggaatgttaaccattgcacatggcacagcttctcacaaactggaatcctgggtcatgggagtatgaaggaatccacattcccaaccaaggcttaaattgcagggggaatgtgatctgcctgacaggcagaggtcctgaacaatgcctg

SEQ ID NO: 532815 - DNA, 587 bp, Homo sapiens
ctgccctgacaatgaagcaaggagagtcagccataatggaaatggcctggactstcacagatcaagaggactagccaaagaagatacctaaagtggaattctctgaagcagaactagaggcaagtctctcagttgaaaggatcttagcaaatcgaggctgcaggctgcacccgcagagaaaaagctgggagttagcgtcatccatgtcaaggacccctgaagattccttcagtacatgtgcagaaaaagctttgtgcattggccaagcccagagcataacaaagccagggcatggcagtctcacaaggaagacctcccctgcctccctccacccagctctaaaggggtgagaaactatcaaaggaggtagtaaggaggaggaggaggaaaggagaagcacaagataagaaaacaaatcaatgattgtctacaatcctttttccctgttatagggttctatcagttggcgaagtgagaagctttagctatacttgaagtagttaagagttttgattagtccatggggctgggtactttcattactgaaatgaaactgttttgtgctgtaaagtgattatagaattttt

SEQ ID NO: 532816 - DNA, 574 bp, Homo sapiens
aactagaactgtgaagaactgtgctgtctgataaggtagccgcatgtgactatttagatataaattaaagttaaataatttaaaaagtcaatgtcttcaccttgttagctacatttcaagtgctcaatagccatatgtggctactgtctaccatttaacagcacagatctgagactttttcatcattgcaagtatttttattgagcagcactgagctagaaatttgggattgtgatttgggagagacctcggacttctcagacctgaggtcagtaacaaattcggggttcatccagatagatatggtagtaaaagttaattaaaacctaaggccatcaagggagaaagtaaagagagatgaaaagcraatgacaacccattcctggagggctgcctgcattaaagaagcaagtaacaaaaagaagatttaaagtgagagatcagatacttgctacaagaattgaggtcatatcccagtagctcagagaaagtagtccaacaggagaaaaggtcagccacgtcacaagcctcagatgtttacatagaatgtgaccaatgtgtaacttttgagttt

SEQ ID NO: 532817 - DNA, 400 bp, Homo sapiens
tatagcataaggaaggaacactgtactgagcttcaggaaatctggcttctgatgctagctcaatccctgtactaggtgtggatgtcgaccaaagagcatattcattgtacaaatcagaaggtggtttcagaagctagtagcattttcaaamtatatataagttgtaaaatggcttacacctagatgctagtcaaatgttaatgaacttctgtgccaagaactacacatgagaaaggatagaaatgaatgggttaggattgtgaaaaaatatagcagctagtgtgtgaacctgcattaatctacatcaggaaacatcttgtaggaatgacctttattcatcatgtataggaggttacagaaaatttagaaagctcattttacataatcctgaagaaatata

SEQ ID NO: 532818 - DNA, 634 bp, Homo sapiens
ttacatgcttacatttcagctaagaaaatggtaaattgtattccatagacatataacttgtagaaaaatcattaatttaaaaagagccatagccaggcactgtggcttatacctataatcctagctattcacgctgtctagatgggagcatcccttgagtccagtagttccaggctgcagtgagctatgatcctgccactacactgcagcctgggaaacagagggagttccccatctcttgaaaaaaaaagcggcatccatattctaagtataaattattattatttgtctaggttttgccaatgcactttattatataatattaagtattgattaaacttacatatggtatacaattagctatttctttcctaaatgtaagaaatcttcttatgtttttatgtttttaagaagaggraaactaacctgaatcttaaacacatttcatgtatgatacacttcctatattactcttataagacaaagacaatatcaaataaagaaaatcttgacaattatgtagtcataagcttttaaacaagaaccaaatagatactagatgaattttctcctttggatataaaaaaaaatactgaagatgtagtcatttcgggcagctgcattccatatttag

SEQ ID NO: 532819 - DNA, 584 bp, Homo sapiens
tttgcacttctttttgtaatagtactgctgaggccatgtaatctaaagtggagtccataaattttgaatttaataattatttatccaggagctggcataagccaggaaggtttaggcaatggagatacagtagtaaacactaaaactcatggaacttatcttaaaagcaatgaacacaataaacaaaygagatagtgtttatgttagcttggactccctaggagatgaagtcaaagagtaattgctgactcttcagtgagatgtgtaatactatggaagaaggagtgaaggaaaagttcagtgtgttgggagagaatgggagcaaatacatgatgatgtgttatccaggtagccactgcttcactgtcatgatcattcgtctaggagggatcattctggagaggattgagggaaaactaggagcagtcattgggagataggaagggaaattatctgcctatctttagctcccttactattttctagctttcattggagaaagttcccccaagggagttgtgagagtggtagagatggttaaatcccaatttcagtacttctggaatacctggccccttggagca

SEQ ID NO: 532820 - DNA, 471 bp, Homo sapiens
accatgtcttctacccagttccttctcacttaattgaatgtaatttcaagcaaaactacaagcccagggaggatgatgcaattcttagctgcttggtctgtagtacttctttatgtctccttcctggcttcaaagctagcacataaagatgaaaggtgggttcctggatgatcgcaaattaataaattaataagtgctattgagctccatcttcatgttggtccagtccaaaggatcaggtttctggcaagaatcatgtttagtagttactttgattagtactccaaatacgcttctctaagtataaagttctgatgggaaacccagattgctgttagtagtgatcctggtaagctactgctgctactactttctacttctatgctttctactactaccattaatttaataagagtaaagtcctcttgcttccygccagtatccctttccaggaaatttccaaaaaaaatg

SEQ ID NO: 532821 - DNA, 609 bp, Homo sapiens
gaaaagggatctaatttttttttttttttttktgagagacgggtctcacgacgttgctcaggctagtctcgaactcccgggctcaagcaaacctcagccttcagagtagctgggactacaggtgcctactactacactcagcttgttttaatttttttaatttttctttttgttcttttgaagacctctaagaaataaggaagtatcagtctttacaaataactacaaataacaaataaggaaatatcaatctttacaaaaaaaagaaagcaaaaaactaaaactggatccaattagcactgatagtatatcaagggttaatgttgctttcctaaaaagttaagtagcaatttatacttatcagcaggttttcctagataactcattattttcaacaggcaatggaaatattataatgtttttcttaaagaattttttttgtctaaaagtaatctcatttaatggaaagatatgataaagcaaataaaatgttggaaaaagtaatccctttcaaatataaatataaaataggaaaagtacaaaattatttttgtactcttctgcacaggaaaagtgtgcagaaaagagttttaaaaagcaagcctgcag

SEQ ID NO: 532822 - DNA, 537 bp, Homo sapiens
gatctagaaataatctttattacactgttgcactttagaaagaatacctaataaaaatcarcagccttcaaatactatttatacataaactatatttttgaattttatgaacaataatgtgtacctggtacacagaaatcaagatacaaagtgatgcagagtgatagtaaatttctcagtatcatctaacagccatccaacttctctatccaggggcagccgctgttactaatttctggtgtatccttccagaagtttctgtattcatagatgtatatattcttaatacatccgcatttctcaatttttttttgtgatcacttcctccacagaaggccttttagaccttcttttcctaattgaccccctgctactgaaatgttgacaacctggataactgtggatggttgtaagtctatctgttaaatctgtgctgcatacatagaaagagtacgatttttgtcctctccctcccccaggtaattttctcccccttgggacggagattgctctgttgagaatgcaagatgtggagca

SEQ ID NO: 532823 - DNA, 537 bp, Homo sapiens
gatctagaaataatctttattacactgttgcactttagaaagaatacctaataaaaatcaacagccttcaaatactatttatacataaactatatttttgaattttwtgaacaataatgtgtacctggtacacagaaatcaagatacaaagtgatgcagagtgatagtaaatttctcagtatcatctaacagccatccaacttctctatccaggggcagccgctgttactaatttctggtgtatccttccagaagtttctgtattcatagatgtatatattcttaatacatccgcatttctcaatttttttttgtgatcacttcctccacagaaggccttttagaccttcttttcctaattgaccccctgctactgaaatgttgacaacctggataactgtggatggttgtaagtctatctgttaaatctgtgctgcatacatagaaagagtacgatttttgtcctctccctcccccaggtaattttctcccccttgggacggagattgctctgttgagaatgcaagatgtggagca

SEQ ID NO: 532824 - DNA, 535 bp, Homo sapiens
ctttaaaactactcatcttcctgtgctttttatacatctaacaccctgtccctccaaaaaaatgagcgctgtatttctaaagtacgtatcaattgagataaaaacacccmatgctaaaaggagtgcttaacttttctctgccttgcctggctctgccctcccaccacccacacatttcattgttcacaaggaaaaatcctgtaattagatagacgtggcttgcacatgacatagtaataaccaacattgaaccttggccatatgccaggtactttacatggactattcatttaattggtgggggtaagtattgttatttccaggtgatggagaaagttgatgcagggcggtcagatcacttggctgggatagccagctgggaaagagggaagctggcattcacacccagacaacctgattctaaaagctgtacatctaccccttagctgtccttcctcttaacatccagtgtcagttcacggatagtgcttcatgatgcagctcagagcaaagatggggcaaacctctcttagtg

SEQ ID NO: 532825 - DNA, 535 bp, Homo sapiens
ctttaaaactactcatcttcctgtgctttttatacatctaacaccctgtccctccaaaaaaatgagcgctgtatttctaaagtacgtatcaattgagataaaaacaccccatgctaaaaggagtgcttaacttttctctgccttgccwggctctgccctcccaccacccacacatttcattgttcacaaggaaaaatcctgtaattagatagacgtggcttgcacatgacatagtaataaccaacattgaaccttggccatatgccaggtactttacatggactattcatttaattggtgggggtaagtattgttatttccaggtgatggagaaagttgatgcagggcggtcagatcacttggctgggatagccagctgggaaagagggaagctggcattcacacccagacaacctgattctaaaagctgtacatctaccccttagctgtccttcctcttaacatccagtgtcagttcacggatagtgcttcatgatgcagctcagagcaaagatggggcaaacctctcttagtg

SEQ ID NO: 532826 - DNA, 499 bp, Homo sapiens
tttcccttgcagccccataggcttgttaccctccacaggactaaaacatattctgccattttttttcccaaaagcagaaaggtacatccagccagaaaccagtcatacctctgtatggagttgcagtaattggatggaagagaaacataaatgaaatctaacacactaggtggcaaatttgttaaatgcagaagagattgctggaatcagactctggttaaggttagggggcagtgcagagatggaaatactagagacacaggagggagaaaatgttaaaggaagagtgctttggcaagataaggaaagyagagagtaaggaatgaaggcccaggggagaggacaggaagaagagctggagatcatccacaccacactcttcgcaaaaagcctagagagtaacactgtaatggtactgcaaggaaactagtaactagattaggaatgcaaaacccatatcctctctattagtacttaccactcacttacccccactccc

SEQ ID NO: 532827 - DNA, 567 bp, Homo sapiens
ctaaatttagggctttgaatgataaggactttatgtgtcacaacactaaacaatttcacctacagagtgctacagtgaaattaccacttatttggggtccccgagatagcacatttcatttttaccttgttttattttacctatttcctgggagcaggcttagtcctacaagggaaatacaaaagctcccttcacactatgatatgagaactgtaaatagccctgcctgggaaaactgatcttatccagaaagtttactgggcagacatctgtactgttacattaactatgactacatagaaaagctccagtctaaaatgtgtaaataccatctgaccaagscctttgggccctcctctctcactaacaccctaggagacgttatcctccacagttaagatgctgatttcctgatgatgggatgggaatggaaagaaacatgaaggccaatccgaggaagcagcccgcagatgaagagaaatctatttccattaatatttgctagggccaggcttgcagggaagaaactgggttttagtagtttctctgctgatccgtactcattat

SEQ ID NO: 532828 - DNA, 515 bp, Homo sapiens
ctttatgtgtcacaacactaaacaatttcacctacagagtgctacagtgaaattaccacttatttggggtccccgagatagcacatttcatttttaccttgttttattttacctatttcctgggagcaggcttagtcctacaagggaaatacaaaagctcccttcacactatgatatgagaactgtaaatagccctgcctgggaaaactgatcttatccagaaagtttactgggcagacatctgtactgttacattaactatgactacatagaaaagctccagtctaaaatgtgtaaataccatctgaccaaggcctttgggccctcctctctcactaacaccctaggagacrttatcctccacagttaagatgctgatttcctgatgatgggatgggaatggaaagaaacatgaaggccaatccgaggaagcagcccgcagatgaagagaaatctatttccattaatatttgctagggccaggcttgcagggaagaaactgggttttagtagtt

SEQ ID NO: 532829 - DNA, 567 bp, Homo sapiens
ctaaatttagggctttgaatgataaggactttatgtgtcacaacactaaacaatttcacctacagagtgctacagtgaaattaccacttatttggggtccccgagatagcacatttcatttttaccttgttttattttacctatttcctgggagcaggcttagtcctacaagggaaatacaaaagctcccttcacactatgatatgagaactgtaaatagccctgcctgggaaaactgatcttatccagaaagtttactgggcagacatctgtactgttacattaactatgactacatagaaaagctccagtctaaaatgtgtaaataccatctgaccaaggcctttgggccctcctctctcactaacaccctaggagacgttatcctccacagttaagatgctgatttcytgatgatgggatgggaatggaaagaaacatgaaggccaatccgaggaagcagcccgcagatgaagagaaatctatttccattaatatttgctagggccaggcttgcagggaagaaactgggttttagtagtttctctgctgatccgtactcattat

SEQ ID NO: 532830 - DNA, 663 bp, Homo sapiens
catacaatgaactagaatattcytttgaacaatcaatttttaattagttaaatacatagacaattaaaatatttcatgtaagcttgaaaatctccttagccactcactcctgtaatttcaatagcttctcatatttcttatgtatctaaacttataaatctatatgcaaggaaatgtatgttgttattatatattagttggaatcctaaataccaagttgtaactctaaaaagttaatgaagaaagcatagagacataagttacaaaataagaaatacagatggtcaataaacatttgaaaaatatacaaccttttaaaatcaaagaaatgtaaattaaaatcttttcatttttggcatcaaatttccacaggtctggttatactgttttgctgtgtatttcattatgctgacaagagcacaatgaattgggtactctcattaaatattgatggactggcaaattgataaaacttttccaaaggcattttacaatagacatcaaggaaccaaatatttagatctcagatttattaatttttaatagatatttggtaggtgtagttcaaaatatatgtacataaatactcatctcacgatttagaataataaagaattacacatcatatatacagtatttataatggcctctttatatgttctg

SEQ ID NO: 532831 - DNA, 663 bp, Homo sapiens
catacaatgaactagaatattcctttgaacaatcaatttttaattagttaaatacatagacaattaaaatatttcatgtaagcttgaaaatctccttagccactcactcctgtaatttcaatagcttctcatatttcttatgtatctaaacttataaatctatatgcaaggaaatgtatgttgttattatatattagttggaatcctaaataccaagttgtaactctaaaaagttaatgaagaaagcatagagacataagttacaaaataagaaatacagatggtcaataaacatttgaaaaatatacaaccttttaaaatcaaagaaatgtaaattaaaatcttttcatttttggcatcaaatttccacaggtctggttatactgttttgctgtgtatttcattatgctgacaagagcacaatgaattgggtactctcattaaatattgatggactggcaaattgataaaacttttccaaaggcattttacaatagacatcaaggaaccaaatatttagatctcagatttattaatttttaatagatatttggtaggygtagttcaaaatatatgtacataaatactcatctcacgatttagaataataaagaattacacatcatatatacagtatttataatggcctctttatatgttctg

SEQ ID NO: 532832 - DNA, 505 bp, Homo sapiens
atgcccaacaggtgggggaacaagtccttgaagtgggatctaggccgtgtatcacggtgtccacataggccatgtatcacagtgtccacaaaagaccagaggcaggtcctgctaawcaagtgatcccatgaatcttttctcatgatttagcagatcagatcccagtactgctcactggtaatacaatatcccaaacaggcggctctcatgcaaggcctcttcttctctgctactgagaaacaacatgcaatcttggaaaatttcaaacacaacacatccaattcaggggagcaccagaaaaccagcaaacctgcagcaagcgtgatgtaactacagtgttgtacaagccacgactcatgcattaaggtcaaaatgtagatttatttttgtcactccctaacccttcccaaagtctcctcatagctccaggaacaagctctacatttatcccacattatctcttccctgctcccaagggtctgtccctgaccaggcagtgctctct

SEQ ID NO: 532833 - DNA, 505 bp, Homo sapiens
atgcccaacaggtgggggaacaagtccttgaagtgggatctaggccgtgtatcacggtgtccacataggccatgtatcacagtgtccacaaaagaccagaggcaggtcctgctaaacaagtgatcccatgaatcttttctcatgatttagcagatcagatcccagtactgctcactggtaatrcaatatcccaaacaggcggctctcatgcaaggcctcttcttctctgctactgagaaacaacatgcaatcttggaaaatttcaaacacaacacatccaattcaggggagcaccagaaaaccagcaaacctgcagcaagcgtgatgtaactacagtgttgtacaagccacgactcatgcattaaggtcaaaatgtagatttatttttgtcactccctaacccttcccaaagtctcctcatagctccaggaacaagctctacatttatcccacattatctcttccctgctcccaagggtctgtccctgaccaggcagtgctctct

SEQ ID NO: 532834 - DNA, 505 bp, Homo sapiens
atgcccaacaggtgggggaacaagtccttgaagtgggatctaggccgtgtatcacggtgtccacataggccatgtatcacagtgtccacaaaagaccagaggcaggtcctgctaaacaagtgatcccatgaatcttttctcatgatttagcagatcagatcccagtactgctcactggtaatacaatatcccaaacaggcggctctcatgcaaggcctcttcttctctgctactgagaaacaacatgcaatcttggaaaatttcaaacacaacacatccaattcaggggagcaccagaaaaccagcaaacctgcagcaagcgtgatgtaactacagtgttgtacaagccacgactcatgcattaaggtcaaaatgtagatttatttttgtcactccctaacccttcccaaagtctcctcatagctccaggaacaagctctayatttatcccacattatctcttccctgctcccaagggtctgtccctgaccaggcagtgctctct

SEQ ID NO: 532835 - DNA, 643 bp, Homo sapiens
acagaatgtcccagtagaaggaatgacccaggattgttagataataaaagcaataaattttatcacacatgatttagaatgcttaatcccaacttgtcagttataaactaattgaccgacttctggcttttgctcttcctctagtggcattaattgtcatttgtagatagagtgaaagtgtccacaacagacctggagtaacaattcataggtcctgtttatcacctgatggtatattcactatgtcatacttctcttattgcagaatagtctgtgtaaatattttgtgtgtaagttttctttaataaatactatcttcaattaccacctataatcatatataaaatgtcattaaggtaaatattcttaaatagccttaggtgctmgtctataatcaactttggagaaaattctcaggtgagaaatatctgctttaaatttccatcctctttttcctgatatatccattttactttttccacaaattagcaatattagagtgtccaatgatttcataaaacattctctacttacctttccactaacaacacatacactcataagtttgaattttaaccaaagctttgtacttaattatatgtatacagttgattattgataagataataatgttttaatcata

SEQ ID NO: 532836 - DNA, 643 bp, Homo sapiens
acagaatgtcccagtagaaggaatgacccaggattgttagataataaaagcaataaattttatcacacatgatttagaatgcttaatcccaacttgtcagttataaactaattgaccgacttctggcttttgctcttcctctagtggcattaattgtcatttgtagatagagtgaaagtgtccacaacagacctggagtaacaattcataggtcctgtttatcacctgatggtatattcactatgtcatacttctcttattgcagaatagtctgtgtaaatattttgtgtgtaagttttctttaataaatactatcttcaattaccacctataatcatatataaaatgtcattaaggtaaatattcttaaatagccttaggtgctagtctataatcaactttggagaaaattctcaggtgagaaatatctgctttaaatttccatcctctttttcctgatatatccattttactttttccacaaattagcaatattagagtgtccaatgatttcataaaacattctctacttacctttccactaacaacacatacactcataagtttgaattttaaccaaagctttgtacttaattatatgkatacagttgattattgataagataataatgttttaatcata

SEQ ID NO: 532837 - DNA, 604 bp, Homo sapiens
attgtcagctgcaatttaaaataagaggaggaggattcaaagtttgatgaaagaggagaaaatatgaaaaaaatgagaaagttaatgggctaagaaaatagtgtcaggcaggagtaaaggttcacttaagattattgaacatcaatttgaaatgagaagtgtgtttgtgtgtgtgtgtgtgtgtgtgtgtgtgtttgccagtcatgaataactttgtcagcccaggcatgagatgggcagagagttggattaaccagggttatgttttatcttaatgagcacaaccacaagtctgatttacacaaattctgatttacacaggtctgacgcaattgtacccggtctacaaacaaagatatatctgatgatagatatgyttcgttgggtgtcattctttacagaataggattgatcagaaacttggttccagtttatctcatttaaagagcaggaccttgatgttagtatctacagaattgactcagatgattcaattagcagcagcaatttattttgagtttgcggccccagaaagggatgcttctaatctgccatactatagtttttcaagtgaattccagaggcctaagtcattggcaacagc

SEQ ID NO: 532838 - DNA, 417 bp, Homo sapiens
gtagagggagatagaggcttagctctattaagtaaaacttctcattcacttacaggttcaagtggctatacattttcaacaaatgaacatctgggtttggttcattcaaagctctctatcattattactgacaccattgattttaactttggggatctttgactcagcagccacaaccatattgcctttactttgaggcctcagacctttgtggtgttcacattctttcctcctcttttccaaaggagggtgagtaacaactaagggtggtgaacaaccaagcagagtgaataacagtygatcaggaggctggtttcagttctaactctccctctttagcctttaaacattcattaacagataagacagtggaaaacactcattctgagagccagccttcccatactcgtgaacatt

SEQ ID NO: 532839 - DNA, 630 bp, Homo sapiens
gtgcatcttcaataagggcccactgctgtgctgcgggcctgcctgtcctgcttctgctagcaacatccaggcccccgccaatcatctagggtggtggccatggtaacttctgacacatgtggctttctgcagaggctcaggggaaccaacaggtggttgattctgcataatggcacgcacaatacacaggaacaaggtataggaacgaggccttcctagttctcagcagaacatactttctaggtgattctggctatgggatgaggctgtaagaagacacaccttactggcttgctccccacaccaaagcatccctgccagcccacactgtgtatctgagaggaagctgcccagcctcgagggctgcaggtccagcactgcggacagggctggaggaggagtccatccttcccttgcggcactcccacccaaacaaaccccttgtcacttggatgcaacttcctggggttgcaacatctgagccacaatatcttgatttcacaaccgccgyggcttcttacccaaggcggggagtatttatttatttttaattaaagcaagttaaatgaattgagtctggagggttttgcaatggcgctacaggtaagtgactatactgtaattgcatct

SEQ ID NO: 532840 - DNA, 425 bp, Homo sapiens
tgaaagagaagcacggctccgactactccaaggtaagctgcaacctttccagcctgggagtggctgtgtggcccagcagttagaggcccaactcaggagccagactacttgggttcagattgtgactcaggcacttaaaagtgtgaccttgagcattttacatacacctcctcctcagtttttcatctctcagccagggacagtggctcacgcctgtaatcccagcactttgggaggctaaggcaggtgaatcacttgagtccaggagttcaagaccagcctgggcaacatgacgagaccctgtctgtacgaaaaaaatacaaaamttagccgggtgtggtggcacatgcctgtggacccagctactagagaggctgaaatgggaggattgcttaagcccgggagtttgaggctgcagtgagcca

SEQ ID NO: 532841 - DNA, 425 bp, Homo sapiens
tgaaagagaagcacggctccgactactccaaggtaagctgcaacctttccagcctgggagtggctgtgtggcccagcagttagaggcccaactcaggagccagactacttgggttcagattgtgactcaggcacttaaaagtgtgaccttgagcattttacatacacctcctcctcagtttttcatctctcagccagggacagtggctcacgcctgtaatcccagcactttgggaggctaaggcaggtgaatcacttgagtccaggagttcaagaccagcctgggcaacatgacgagaccctgtctgtacgaaaaaaatacaaaacttagccgggtgtgktggcacatgcctgtggacccagctactagagaggctgaaatgggaggattgcttaagcccgggagtttgaggctgcagtgagcca

SEQ ID NO: 532842 - DNA, 505 bp, Homo sapiens
ggcttctcagccctgtggagctgtgcaggccagcagcacctgggtagagcctgactcctgggcgccgggttctggaaaatgcacctgggcctgtggacctccacccatctcaccctcctgctcacaggtctgaatttcagagtycttcctcatggcttgacccgggcaccccaaacacagtttgcccatctctgaactcagcctttcccccggcccaggccttctctacccttccctcaactgcccaaaccagagaccaacaggggtgggggtcacccgcccctcccgcaccccacatccacccagtggctgtcctggctgcccctgagcatcgctggatgctgcccccgccaccctggcccaggcctcctgttctctccctcagagagaacagggcatggctgaagccctgtggccggagggatgggtggctcttgttggctggcctggcactaactgcccactggtggagcagggtggcagctttggaggcaggtgtgtcatg

SEQ ID NO: 532843 - DNA, 505 bp, Homo sapiens
ggcttctcagccctgtggagctgtgcaggccagcagcacctgggtagagcctgactcctgggcgccgggttctggaaaatgcacctgggcctgtggacctccacccatctcaccctcctgctcacaggtctgaatttcagagttctkcctcatggcttgacccgggcaccccaaacacagtttgcccatctctgaactcagcctttcccccggcccaggccttctctacccttccctcaactgcccaaaccagagaccaacaggggtgggggtcacccgcccctcccgcaccccacatccacccagtggctgtcctggctgcccctgagcatcgctggatgctgcccccgccaccctggcccaggcctcctgttctctccctcagagagaacagggcatggctgaagccctgtggccggagggatgggtggctcttgttggctggcctggcactaactgcccactggtggagcagggtggcagctttggaggcaggtgtgtcatg

SEQ ID NO: 532844 - DNA, 505 bp, Homo sapiens
ggcttctcagccctgtggagctgtgcaggccagcagcacctgggtagagcctgactcctgggcgccgggttctggaaaatgcacctgggcctgtggacctccacccatctcaccctcctgctcacaggtctgaatttcagagttcttcctcatggcttgacccgggcaccccaaacacagtttgcccatmtctgaactcagcctttcccccggcccaggccttctctacccttccctcaactgcccaaaccagagaccaacaggggtgggggtcacccgcccctcccgcaccccacatccacccagtggctgtcctggctgcccctgagcatcgctggatgctgcccccgccaccctggcccaggcctcctgttctctccctcagagagaacagggcatggctgaagccctgtggccggagggatgggtggctcttgttggctggcctggcactaactgcccactggtggagcagggtggcagctttggaggcaggtgtgtcatg

SEQ ID NO: 532845 - DNA, 550 bp, Homo sapiens
agcaacagtactgtcaccaccatgacttcactgtgcctcctctctaatcctcctggtttaaagaccccaagaacatactgcttgtccatggtgaaactgggatgcaactccagacagcctgggcaacagaccaaggcaggagaatttttaacttgggatacacggcctcccaccaagaggtgtgtggatggaactgcatagaataggtttccttttaatgccatgtgtattttatttaagacatctaaaaacattcttttgaggagggggtctatagttttaccagactaattatttgccaccatttattgagctgtgggctatgtagcaggtgctgtgctaagcccttggcattattgtccagtccctgaatattcacagtgaccctyggtgtaccagttatctattgccatgtaacaaatcatcccagaatctagcaacttaaaacaacaaacacaaattatctcacggtgtctgtgagtcaggaatctgggagtggctgttctgagcttctggcccagggtctcctgaggttgcaatcaaggtgtca

SEQ ID NO: 532846 - DNA, 623 bp, Homo sapiens
gaagctatttttttttttttttatgagacagaatttcactcgttacccagactgcagtgcagtggcattatcttggctcactgcaacctctgcctcccgggttcaagagattctcctacctcaacctccccagtacctgggactacaggcatgcgcyaccacgcctggctaattttgtatttttttagtagagacggggtttcaccacgttggtcaggctggtctcgaactcctgacctcaactgatccacccgcctcagcctcccaaagtgctgggattacaggcgtgagctactgcgcccggcctgcatgtgggtttctatagtggatatctgttttatttttctgcccagaatccattctcctgtcttttcataattgtgccttcagtcaccaaagagggagggaaccaatctttcccctttctcagccttacatgttctgatgaggctctttctagctctgaatcctggaccaggcccatgaggttggcctggacaatcagggtatctccttttgcctggctgctgtgattgggtgaaagagacataagaccctagatgagccaatgagagctttccctggaacttttgctggagcccttggaaagaggcctctctttc

SEQ ID NO: 532847 - DNA, 462 bp, Homo sapiens
ttcctccctgacaacctccaggctcaaagactgcccagcccagaacagaaatccaagcaccattcccacccgctggtgacatgcatgtgcgcgcacacacgtatacagcccagctccctggatttcctggcatacrgccccaccacacctgtttccacaggtgctaacagctcccggcctctccttccccagcagagggatataacatgcatgacataattgctttccgctggccctggggtacatctgcgaaaactgtgtgccacccagggtgggcttgggtttgggctgcatggttgaagccctgagctgggcccaggggcctccctgggtccctgggggatgacacacttacagacagccggcttccacgttggggcccctcacgtagaacgggaccctgatgtcaaactcatatggcatggatttccctttcaccaggccaaactggccgatgtggta

SEQ ID NO: 532848 - DNA, 568 bp, Homo sapiens
ccacacatggcttcactggcwgaagcagggctgtcctgtggccgagaacccctcttccagccctgcacgggtcccctgacccctaggcctgcaggcattcacatacccccctgcaaagcccccaaccctccttgggcaaggacaggcacagcttcaggacatcgtcctcctgccctatgtgggcagagttgagaccccagagctgagagggaggctccccaatacccatctccccgataatggccaatgctccacaaagggtcacttccaaagaatgccaggtggcaggcaccaggttttggcatctgatatgctcccatccgctccctgggtccaaagcattcatcctttgtaatctctgacggggaacaactggctgttgtcctttaattagcaggggacacactaagctatggtctcctgcaggctccataaacatccgtgaaatcagcctggtgactccaagctcggtgcagactgcggggacccatagtggccaagaccccgtccctggtctggctctgcgaacagcctccaggagaaactgccaagccgctgggactcgtgg

SEQ ID NO: 532849 - DNA, 442 bp, Homo sapiens
cagatttgaacagcggtagcaccagctcctgtccaggtctccagcttcacgatccttaaactagaacagcagtaccgccgcctccgtaggtttccagttccatgatcctaagacatgaatgaaagaactgggtcaccccagggctccaactccaagacccacagatttgaacggcagcaccggctcttcctgggatctgcagctccacagccttcaaactagatcagcagctccgactcctccctgggtctccagctacacaatcctcagacatgaacaatagcaccggctcctccttgggtctccagcttcactacygtcaggctagaacagcaacaccggttcctccctgggtctccagctcaatgactctcagatttgaaaggcagcaccggctcctcacaaagtttctggctccaaggccctcaaactagaatagcag

SEQ ID NO: 532850 - DNA, 596 bp, Homo sapiens
tggcaccgaagtggccgggtagctccagcttccgatactccaggtcccacctgtgaaggggtcgggtaaaatttcctgcttcacctggacaagaagacatgtgccagttgctggtggcagccacattgtgacatcccacaacaggcgagggagactggtggtgttgcagagccactgaatcaacccaccctgaagtccacctctgttatgggagataacatactccctcactgcgtaagccagattcattaggggtttcagtcacttgcagccaatagcaagctgactcacatacaatccctcctaaaaagacttctctgaccctctccgttctctggaccctgcgacctttctcacygcaccaacccactgcatcctgcgtgccatttatgtccgtgtgtttctcccaccagccatgggcccactgaggatgagctctgtttcttcactcttctccttagcccagggttctgcgattagtaggtgctttgtaaattccatcgcacaaaaacatattttattgcggttgctttagaaagctggatagatgggtggaaagcactcttttgttttttgtttttcagaaactcaccact

SEQ ID NO: 532851 - DNA, 566 bp, Homo sapiens
gcgactgtcccccattgctctgcctgtcctgctctgctggtcctgaaactcaaatcctctggcttttggccactgtgcaccagggctgtgggcgakgactcttctccaggcctctgtgccctgatttcatgtgtcccatctgggattcactcctgcagagggagaggcaagacctcaggggcctcagcattggtgactttgcccatgaccaaacacaggcagggaaacagattttaccctccagggagccgggagggcagattgttgtcactgcttgctgctgctggtagtgtcatgtgcttttctcactttcagactcactggacgaagctcagagtggatgtgggacttggctcggtccttacagcttcactcagcctaggccctcccatctgtgaatgtgggtgatggtcgctcacactctctggccttgccatgccgaggcctgccaggcaaacaaaggcacatggtggccccagttaagtcataaaatgccacggtagtgagcggctactgttacagtaacatggtcatgggttctggggaaatgtgtgcgtgtgtacatg

SEQ ID NO: 532852 - DNA, 545 bp, Homo sapiens
tctccccagtgttaggccacacaaccccacttcccactgctaggggagctgccctcactgggacccttgctcctgatctctggtgttgctgagaccctcagttgcccacaaatatctctttctccttcttcctctgatcaggctgtgactttattttcaatgcacccagctaggaaacatttcccagattcccttatggccaaagatgtgccaggagcctgcctgccgccttccagccctgctctctgtccagttctccaccccagggcactggcctggaggtgctggttcaacaagccccttygctctctgggctttgggttggatttgactgacaagggcccctggcaggagatcggagaaagaagagagtgaggttggtggacagattcctccaccttcctctctgtggtgccaacagagggtgacagctcttgtggggtgaccctctgtgtccctgggttccagtaacctcttgtcccactgttgctaattagcctggggcactgccctatccctagtggtttcctcgcacttgctcacac

SEQ ID NO: 532853 - DNA, 545 bp, Homo sapiens
tctccccagtgttaggccacacaaccccacttcccactgctaggggagctgccctcactgggacccttgctcctgatctctggtgttgctgagaccctcagttgcccacaaatatctctttctccttcttcctctgatcaggctgtgactttattttcaatgcacccagctaggaaacatttcccagattcccttatggccaaagatgtgccaggagcctgcctgccgccttccagccctgctctctgtccagttctccaccccagggcactggcctggaggtgctggttcaacaagccccttcgctctctgggctttgggttggatttgactgacaagggcccctggcaggagatcggagaaagaagaragtgaggttggtggacagattcctccaccttcctctctgtggtgccaacagagggtgacagctcttgtggggtgaccctctgtgtccctgggttccagtaacctcttgtcccactgttgctaattagcctggggcactgccctatccctagtggtttcctcgcacttgctcacac

SEQ ID NO: 532854 - DNA, 504 bp, Homo sapiens
tggtctaggctgtttatccggggggttaagccagatcttcatctcaagggaagatgaatctttaattgcctttctctatttgaactttgaatactacaattgcttttttgtctttatttctgatcataaaagcagcaagagacatccaattgaatactctgagtttgagatgtgatctttccagccctaattgtgtagcagcagtgctatcttttcatgctaattaaggtttattaactttgccattatagtaactcctttcttatcccttttttgcttgctgatcaactggcatgaggcacccagagtgacagggtgccatagccttaratttaatagaatcattaatctgtccccaagctgaaagcatttctcactgggaatccagccctttaatgcagcagagcctgtttgtggaggaaggaagcacatattcttcaagaatgtcacttgtgtgatgatgttaatgggggtaaatcttatgcctcttcattcctaaaccta

SEQ ID NO: 532855 - DNA, 574 bp, Homo sapiens
  misc_feature (1)...(574): n = A,T,C or G
attcttttttttttttttttttttttgagacagagtttcgctcttgttgcccaggctggagtgcaatggcaccatctcggctcgctgcaatctccgcctcccaggttcaagcaattctcctgcttcagcctcccaaatagctgggattacaggcttgtgccaccacacctggccaatttttttgtattttcagcagagacaggcttcaccgtgttagccaggctgatctcgatctcccgacctcatgatctgcctgcctcggcctcccaaagtgctgggattacaggtgtgagccactgagcctggctgggtcctacattctttttctgcctaggnatttttttattgattaccagatattatgtatagaaaaacagtggagactggaaaatatggttgcattattttgttttttttcccagagagcaggagttcctccctgtatcaggtagctaaaatgacaagatacactggatttccctgagtggttatttgatcagtaactagcttcggcttcaagagrctgagtttaagcctagtctccaaccttcagtctttctgagaggtgaaacca

SEQ ID NO: 532856 - DNA, 499 bp, Homo sapiens
tgttaatctcacccagtgaattttttttcaaatgttacatttttcaactccacaagtcctttctacgatctatgttatgtttccctccttattacatacatgttttcctttaaatccttgaacgtatttagaacagcaggtttcaattccttcaggtataaacccaggatgagagcaggtctcacaatgtttccttcccttctctcagggactacagtcttgtgtaaacagttggttaatacattttgtttatttttctagttgttcatagcaggagagcaagcctggtaataatgactacaacatgcctggaagaggaaattgcttgtaagcttttaacacactatctaactatgtaaatttcttcctccttcctctttaatttttagctgcctttactagaatgtaagttctaaaaggtcagggacttcagtctgttttayttctgctgtatcttcgttacccataatgtaccataaatatttgttgaattatcgaa

SEQ ID NO: 532857 - DNA, 619 bp, Homo sapiens
ctcaagtgccccagcctagagctgagatcagctgacaataatgagtgctggtttaagccactgagttgatggtggattttttaaggcatctatacacagtctagctgcatactactccagattcccaggctttgggtatctgaccctaccatccaagctaccatcatcctaaatgtaaagagtatgtatgccatacacatactcaagtcccttttaagccgttgaataggatagggctgttctgtaaccctcatggaacagctttccaaattcataattcaatcagcagtctaaccagaccagttagttataataaattaataattgctgacttttattgagcacttactatttgcaacgccctgtcttaagcatgtggtatgaactatctcatttaatccccttcactctatgagtcagatgatataatccctattttatgatgagcacaatggtgaacacatggcytgaggaacatacccaagtcacacagctgtgagtgcagctggggtcctccctgacagcagcaccttcaatcctgggcacctcattcccacccatcgaatgctgaccacattccaggagagcctggcacatggctttgggggagttgagaatc

SEQ ID NO: 532858 - DNA, 604 bp, Homo sapiens
atttcaaagcaatggatccctactcactaagccctgggctgcagcaattctgcttgccctctcctggtggcctgtgtcctctcccaaaccctgccatctaccactgaggcacagcccacagctggcagctcacattttacattagagagtggggtccccacattttacattacagagcggggtccctgagctgcaggaggagagcctgcagggctcttgggtagaattgcacttttgcaataagggaaacgggagcaatgtttcagcctcagtttctatttataatactgacacaaaaagaatattgctggatacatagcatggatctagatagagcagctccaggagttctcacggtgacagcccccctcactcacagacaccatgtgataytaatagggcttagacacaaagcactgaattcccaaagcattgaagagaaagacagctctcagtctgagtaaaaccgtattgagagaagaaaagaggttgaaagaatcttaaagacaaattcagattacatgtaacattggtcaaattgaccagaaaatattcttccaaagaagttcttctctaaacaccaaaagtgcacagctactctcag

SEQ ID NO: 532859 - DNA, 267 bp, Homo sapiens
gaatagaaagggatagggctgaagaacacaggtcgctgcatttagaaaggaggcggggtcagaggaatagaaagggacrgggctgaagaacacaggtcgctgcatttagaaaggaggcggggttagaggaatagaaagggataggcctgaagaacacaggtcgctgcatttagaaaggaggcggggtcagaggaatagaaagggataggcctgaagaacacaggtcgctgcatttagaaaggaggcggggtcagaggaatagaaagg

SEQ ID NO: 532860 - DNA, 267 bp, Homo sapiens
gaatagaaagggatagggctgaagaacacaggtcgctgcatttagaaaggaggcggggtcagaggaatagaaagggacggggctgaagaacacaggtcgctgcatttagaaaggaggcggggttagaggaatagaaagggataggsctgaagaacacaggtcgctgcatttagaaaggaggcggggtcagaggaatagaaagggataggcctgaagaacacaggtcgctgcatttagaaaggaggcggggtcagaggaatagaaagg

SEQ ID NO: 532861 - DNA, 267 bp, Homo sapiens
gaatagaaagggatagggctgaagaacacaggtcgctgcatttagaaaggaggcggggtcagaggaatagaaagggacggggctgaagaacacaggtcgctgcatttagaaaggaggcggggttagaggaatagaaagggataggcctgaagaacacaggtcgctgcmtttagaaaggaggcggggtcagaggaatagaaagggataggcctgaagaacacaggtcgctgcatttagaaaggaggcggggtcagaggaatagaaagg

SEQ ID NO: 532862 - DNA, 433 bp, Homo sapiens
ttgtaaataggaccattttcccttttctctctcccttccattcacagggcttctcattcyctctgtttctgcctccgtttcagagatttactcacctttttctctctcactatgtctgccgtggtctccataagagtgtgccacataaaattgccccattaaaagtcatgaattgagtggattttagtatacctgtggttgtgcacattcaattttaattcgcgatccattttagaaggttttatcacccccgaccagagaaacaccctgtggacattagtcactcctcattctgtctcaaaccctctccctgaccctcagccctaggtaacaactgcatagagggatcaaccccatatgcatagatttccatattgtggacatttcctataaacggaattgcacaatacgtgagcttttgtgactgacataa

SEQ ID NO: 532863 - DNA, 433 bp, Homo sapiens
ttgtaaataggaccattttcccttttctctctcccttccattcacagggcttctcattctctctgtttctgcctccgtttcagagatttactcacctttttctctctcactatgtctgccgtggtctccataagagtgtgccacataaaattgccccattaaaagtcatgaattgagtggattttagtatacctgtggttgtgcacattcaattttaattcgcratccattttagaaggttttatcacccccgaccagagaaacaccctgtggacattagtcactcctcattctgtctcaaaccctctccctgaccctcagccctaggtaacaactgcatagagggatcaaccccatatgcatagatttccatattgtggacatttcctataaacggaattgcacaatacgtgagcttttgtgactgacataa

SEQ ID NO: 532864 - DNA, 226 bp, Homo sapiens
ccacagctgcagtggcaagaagcctgagggctgatggcctagaccaaataatagggaattgggctgagttgtttgaatcrttttccaataactgatttataaaatagatcagactcattgaaggacctggggaatgggagcccacccctcggtctccagcctccccaaactatgtgtttctccagagtaagcttgagcctctcccagcatggattaaaacccatgg

SEQ ID NO: 532865 - DNA, 406 bp, Homo sapiens
gctgatggcctagaccaaataatagggaattgggctgagttgtttgaatcgttttccaataactgatttataaaatagatcagactcattgaaggacctggggaatgggagcccacccctcggtctccagcctccccaaactatgtgtttctccagagtaagcttgagcctctcccagcatggattaaaacccatggctcttccagatctaaaatctgaggctctacaatttaagtcatagttaggcacttgcatacctgtaatggtaacatgcttaaatactcagtctatcattgtttaatattgaatgaaagacacatattttgtttacttattatgcagmagctagtctgtgttcacctgcattgtctcagggttagctctttatttccaagcatcctgtccc

SEQ ID NO: 532866 - DNA, 244 bp, Homo sapiens
attgtcatgaattcgttgaggagcttctggaaagtgcacattctgactyagcaggtattggagtctgcatttctcatgagcactcaggtgatgtttgtgctggtccttggacacagctctgaatagcaagggaatagccttcctttagagaaatctggaaaaagaaccactggagagcaatttaaaaaataacagaatccagggaaagctttaatttccttttatttctgagcatgattctagc

SEQ ID NO: 532867 - DNA, 577 bp, Homo sapiens
tcatattttaccaaccatattgcttctaaatagttgatgactgtgaaattatttgccataataatgaaatactctaatttctaatattagtatcttttctgggatcttgtgccccatgacatctgttaaatattagaataagaaagtctctgcatgagccataaagttaaaaatggaaataacacaggygctattctagtaagagtgctatgacgatagactttataacaggagaaagcaaaaaggaataaatttgatccttctgtatgcttcgatgcatatcactgaagttcagtactttcgagaaattggtaagctgtgatttggggtcacctcttctagagagctatttgtctcgtacatgatgcagccacttggccagtgacttatgactagacaagctgtgttatctggctgatagtcacatatcttttacatctggacttcagtaagccagtcttatttgcacagtgacccagaattcctaataaaatattatttatgtattatttaaaatactacagatttttaaactttgaaatgtgatatattggaaaaacagtaaatgggaagagct

SEQ ID NO: 532868 - DNA, 544 bp, Homo sapiens
tcaaataatactttcagaaaaactgtattattcttaggctagtttaatgtttactaaatyactcaaaataggtcacattttgatgaaggtatagtagttattacagatatgatttaaattactcaacccaatgatttaaaatcccttgaaaatgagtttaaaagcaagataaaaaaaaaagcattaaggtgataatttagagaaaaaaagaattgaacctagtttcttttcaaattctatgtgttactttattttaaagtaaaataattaaaatgaggctagatgacagcttctaaacaaaacatccactgtacatcccccacctttgctttttagttaaccacttgataacacttaaccactctcacagtaataattaagactacctcataacagaattctggtctttgcttatacatcagtatacttttgaatacagaaattcaaaagaaatttcaaataatcattataaaattagagaatgggtgtttcttcttttccaacaaaatagtatatccttggctggccaggtttacagagtgtg

SEQ ID NO: 532869 - DNA, 544 bp, Homo sapiens
tcaaataatactttcagaaaaactgtattattcttaggctagtttaatgtttactaaattactcaaaataggtcacattttgatgaaggtatagtagttattacagatatgatttaaattactcaacccaatgatttaaaatcccttgaaaatgagtttaaaagcaagataaaaaaaaaagcattaaggtgataatttagagaaaaaaagaattgaacctagtttcttttcaaattctatgtgttactttattttaaagtaaaataattaaaatgaggctagatgacagcttctaaacaaaacatccactgtacatcccccacctttgctttttagttaaccrcttgataacacttaaccactctcacagtaataattaagactacctcataacagaattctggtctttgcttatacatcagtatacttttgaatacagaaattcaaaagaaatttcaaataatcattataaaattagagaatgggtgtttcttcttttccaacaaaatagtatatccttggctggccaggtttacagagtgtg

SEQ ID NO: 532870 - DNA, 464 bp, Homo sapiens
agatatatattccaaatccaaagactaatccactcatattttattacatgaaattccattaatattagcaaaaatctaaaattcctagcagaatggcaatacaacaagaaacataacataaattttaaattatttatatttgcaattttttcctatatgttatttaaaaatcacttaggacagtaatagaattagcacagtttcctttatattcttttttgttgtttgtttttttacgtaatggattttcttctctagttttactaagggataattgacaaataaaaatggtatgtatttaaggcatataatgtgatgttttgatatacatatacattgtgaaaggaatcacaatcaagttacttaacacactgatcatctcacagttactgtgtatgtgtgtgtgtgtgtgtgtgtgtgtgtgtgcatgcgcgcgygcgcatgtgcacgtgggggagacgggg

SEQ ID NO: 532871 - DNA, 286 bp, Homo sapiens
caagaggcagaggttgcagtgagccaagattgygccactgcactccagcctgggtgacagagtgaggctccatatcaaaataataataataataataataataataataataataactattttctgtgagtccaaagataaaatagcattacagaatacctaataatcctgagcttggttttcttggttttattttttcatttagttttgctcaccttgaccagtgggctggtggttcttaggtgcaccaaggttttcatttttcagttcaagattttaaaacctt

SEQ ID NO: 532872 - DNA, 286 bp, Homo sapiens
caagaggcagaggttgcagtgagccaagattgtgccactgcactccagcctgggtgacagagtgaggctccatatcaaaataataataataataataataataataataataataactattttctgtgagtccaaagataaaatagcattacagaatacctaataatcctgagyttggttttcttggttttattttttcatttagttttgctcaccttgaccagtgggctggtggttcttaggtgcaccaaggttttcatttttcagttcaagattttaaaacctt

SEQ ID NO: 532873 - DNA, 286 bp, Homo sapiens
caagaggcagaggttgcagtgagccaagattgtgccactgcactccagcctgggtgacagagtgaggctccatatcaaaataataataataataataataataataataataataactattttctgtgagtccaaagataaaatagcattacagaatacctaataatcctgagcttggttttcytggttttattttttcatttagttttgctcaccttgaccagtgggctggtggttcttaggtgcaccaaggttttcatttttcagttcaagattttaaaacctt

SEQ ID NO: 532874 - DNA, 582 bp, Homo sapiens
aacactatcaaattttaggtgactttttgaaaaaatagtatctcttgttgcaagaaatggtccatctgtgatttcaagtctctcgcttgagtgaattggatggaagtggtgaatttcagccaaagtggccaaagaaatcctgttcctgtgataatgacgccatcagcctctgcatctctgtcttcccttctgccacatgttgcctgttctccgtgactttggtaagagcttccttgtgtatgaggatgatgtccaggatgttggtctggtgtccctgagacagcactaacaggtccatggctgggtccaggtcattcctggactcattgkcaaagagcttacctgatgttcttaaaggcatctctggtgaagtggatggcctagtcaagttccaaggcctggctgaagctgaagaaaaactggccaccttctgatgctctttttaaaagcctgtcactgtcatctgcttgcttgtcaactcattggctgtgaggatgagctgagtggcctgtgtccatcttcttggggaagcatttgaagccatcagtcttgctctcccacccctaaaggttgagggtcacc

SEQ ID NO: 532875 - DNA, 592 bp, Homo sapiens
gcaccaggtgactaaggcctgttttgtgatccaggcaacacaaatatatcaactacccagctgaacccaccacaccaaaatgcagatccacagaacttcaaacaaataaaatggtggttgttttttataagctagtaaggtttaattagttccttaaacagcaaatattaactgttacacctaagtgaatagaattcaatatgtttttaacgaaattatgtagggggagaaagtcttaaattacaaatsaaatgcaatcaatagaacttcacaatctatgctaaatttggtgatggactaggtttaatatatctcagacactggaaacaacaagctaagtttgaaggaatgggactgtatttggagagtatttcaatcttttcaagtatgacaggtcactcctgcaccccagaccacactttcaggccccttcaaataaggaatatttcctaggtccttgcctgttcttctcagctgaattcacctcaaccttctgaaagttcttccaaaccttccactatcacctagtctttgcaaatcttgtgcattctagggagtagaattaatatttcctgagcgaggaaaactggga

SEQ ID NO: 532876 - DNA, 592 bp, Homo sapiens
gcaccaggtgactaaggcctgttttgtgatccaggcaacacaaatatatcaactacccagctgaacccaccacaccaaaatgcagatccacagaacttcaaacaaataaaatggtggttgttttttataagctagtaaggtttaattagttccttaaacagcaaatattaactgttacacctaagtgaatagaattcaatatgtttttaacgaaattatgtagggggagaaagtcttaaattacaaatgaaatgcaatcaatagaacttcacaatctatgctawatttggtgatggactaggtttaatatatctcagacactggaaacaacaagctaagtttgaaggaatgggactgtatttggagagtatttcaatcttttcaagtatgacaggtcactcctgcaccccagaccacactttcaggccccttcaaataaggaatatttcctaggtccttgcctgttcttctcagctgaattcacctcaaccttctgaaagttcttccaaaccttccactatcacctagtctttgcaaatcttgtgcattctagggagtagaattaatatttcctgagcgaggaaaactggga

SEQ ID NO: 532877 - DNA, 592 bp, Homo sapiens
gcaccaggtgactaaggcctgttttgtgatccaggcaacacaaatatatcaactacccagctgaacccaccacaccaaaatgcagatccacagaacttcaaacaaataaaatggtggttgttttttataagctagtaaggtttaattagttccttaaacagcaaatattaactgttacacctaagtgaatagaattcaatatgtttttaacgaaattatgtagggggagaaagtcttaaattacaaatgaaatgcaatcaatagaacttcacaatctatgctaaatttggtgatggactaggtttaatatatctcagacactggaaacaacaagstaagtttgaaggaatgggactgtatttggagagtatttcaatcttttcaagtatgacaggtcactcctgcaccccagaccacactttcaggccccttcaaataaggaatatttcctaggtccttgcctgttcttctcagctgaattcacctcaaccttctgaaagttcttccaaaccttccactatcacctagtctttgcaaatcttgtgcattctagggagtagaattaatatttcctgagcgaggaaaactggga

SEQ ID NO: 532878 - DNA, 592 bp, Homo sapiens
gcaccaggtgactaaggcctgttttgtgatccaggcaacacaaatatatcaactacccagctgaacccaccacaccaaaatgcagatccacagaacttcaaacaaataaaatggtggttgttttttataagctagtaaggtttaattagttccttaaacagcaaatattaactgttacacctaagtgaatagaattcaatatgtttttaacgaaattatgtagggggagaaagtcttaaattacaaatgaaatgcaatcaatagaacttcacaatctatgctaaatttggtgatggactaggtttaatatatctcagacactggaaacaacaagctaagtttgaaggaatgggactgtatttggagagtatttcaatcttttcaagtatgacaggtcactcctgcaccccagaccacactttcaggccccttcaaataaggaatatttcctaggtccttgcctgttcttctcagctgaattcacctcaaccttctgaaagttcttccaaaccttccactatcacctagtctttgcaaatcttgtgcattcyagggagtagaattaatatttcctgagcgaggaaaactggga

SEQ ID NO: 532879 - DNA, 416 bp, Homo sapiens
tggaagttactgcccatttctagctatttctgagtaacccgccccttaattagcatgtcattaaaagtgaattataaaaatgactacaagccacmcctaggctgctactctgggagcacaacccacagagggctccctgccctgcaggagcggacgcagggctgtaacaccgccaatgtctccatagagctgctttattccaccacaggcttgcttttggattccttcctgagcgacgccaagaacctgcccttcctcagtgtgactcttgcctaaaatctatccctggttttctcttttcctaagcatgccctgacttgttctttcatctcctctgaacttgcaattgctcctcagtgactctattctgcagatccagaaaactcaaccttaatcttcccagagccctgttgtct

SEQ ID NO: 532880 - DNA, 416 bp, Homo sapiens
tggaagttactgcccatttctagctatttctgagtaacccgccccttaattagcatgtcattaaaagtgaattataaaaatgactacaagccacacctaggctgctactctgggagcacaacccacagagggctccctgccctgcaggagyggacgcagggctgtaacaccgccaatgtctccatagagctgctttattccaccacaggcttgcttttggattccttcctgagcgacgccaagaacctgcccttcctcagtgtgactcttgcctaaaatctatccctggttttctcttttcctaagcatgccctgacttgttctttcatctcctctgaacttgcaattgctcctcagtgactctattctgcagatccagaaaactcaaccttaatcttcccagagccctgttgtct

SEQ ID NO: 532881 - DNA, 246 bp, Homo sapiens
tggtccggttctggcttttgtgtgtctgtctgtatttttggtctaaatatttggcccaacagaggttaaaggctttgatgttctcagcaaaagccttgtgagatctctagtttatctgygtgctcaattggaacaaagagactccataaactagaaaaacctaaagaaaatggcacgcgtgaaaaaatgagagccaactcctgtttgttgttctgtccacctccctctctcactcctccttctgcc

SEQ ID NO: 532882 - DNA, 246 bp, Homo sapiens
tggtccggttctggcttttgtgtgtctgtctgtatttttggtctaaatatttggcccaacagaggttaaaggctttgatgttctcagcaaaagccttgtgagatctctagtttatctgtgtgctcaaytggaacaaagagactccataaactagaaaaacctaaagaaaatggcacgcgtgaaaaaatgagagccaactcctgtttgttgttctgtccacctccctctctcactcctccttctgcc

SEQ ID NO: 532883 - DNA, 246 bp, Homo sapiens
tggtccggttctggcttttgtgtgtctgtctgtatttttggtctaaatatttggcccaacagaggttaaaggctttgatgttctcagcaaaagccttgtgagatctctagtttatctgtgtgctcaattggaacaaagagactccataaactagaaaaacctaaasaaaatggcacgcgtgaaaaaatgagagccaactcctgtttgttgttctgtccacctccctctctcactcctccttctgcc

SEQ ID NO: 532884 - DNA, 246 bp, Homo sapiens
tggtccggttctggcttttgtgtgtctgtctgtatttttggtctaaatatttggcccaacagaggttaaaggctttgatgttctcagcaaaagccttgtgagatctctagtttatctgtgtgctcaattggaacaaagagactccataaactagaaaaacctaaagaaaatggcacgcgtgaaaaawtgagagccaactcctgtttgttgttctgtccacctccctctctcactcctccttctgcc

SEQ ID NO: 532885 - DNA, 493 bp, Homo sapiens
ctgtgccgcgaagcagcccagttcaggtactgcctgggcctctgaggcagtcccaggtgcccccgtccacctcctcgctgtgacccctctcataaacactccaatctccacacacacatcccccacaggtgctgagaggggagggagagtttgcggccacacacaacacgcaagcacgccttaaacacacagatatagacatgacactgggcaggtcatgggtcgggggccttccagtgccagggacctgtgcccacgtggtctcaccccaccctgtgctacctcatcttcccgggaggaagctccttcagacaaggtgagctcctggaggccacggggacagagaggccagagagggccattccctgctgccttgagggtgctgtccccacctctggtggaaagtatgacctacgcctgggctacaggcatagatgggccgtccttttgtttcccttkttaacggatgcctggtggccccttctgagcctaa

SEQ ID NO: 532886 - DNA, 530 bp, Homo sapiens
cactgggcctacatacgtgttgcctggctggccaacttttaaattaggtaacccttcccaataactttcacgattagttaacattttctacattcctatgtattttcccctttttaatacaaacacatgcccattaaataagcaaaataggaaaaaaaaaatttaatcacccaaaaccctaccatctacttaccagagagacaataatggcacagggatatactgccaaattacattaattttggtaatccaaagcaatagaaaaatctccagttttcaatttattctttttagatttctaatcaagaaaacctattttctacactaaagcaaatatatacaaaaggaaaagacacacttatgaagcaaagggatgaactggagtcctaatgttatgagaggctggtagtcattcatttstcatcactgaggtattttcagaaaatatccatggttcccagaactttaacaagcacaataatccactcttagatacttgaaagtcagataagaagacatctatcccttaa

SEQ ID NO: 532887 - DNA, 636 bp, Homo sapiens
tgaaaccatctagacctgtggaatttttggggggagttttcaaatgaaaaattcattttccttttatggtattagaaggatatgcaaactattttatattgtgtgaattgtgacattttatgtttttgcaaagaatcgatcattctaagttgtcaaatttatgttttgagagttrtagttttttttattataatttgatgtcagcaaggtctatagtgaaatcccatttcatttctgataatggtaatttatatcttttttcctgtcatgctacaagtcagttttattgactgaactcttcaaacagtcaaacttttattttattgatttttctctattgtttaactgctttaaatttcaatgacttttacttcattacttattccttctgctttaagtttattttgctttttttcccccttggttcttcaggttggggattagattaagatttttttctatttttctcaggtaggtatttaatgctataaagtcccctctcagcactgcttttgctttatcctgtgaatttgaaatgttgaatattcattttcattcagttcattgtattttttaaaatttcactagagatgttggctttaaaccatggatgttttagaaatggtctggttagtt

SEQ ID NO: 532888 - DNA, 668 bp, Homo sapiens
gaagagcaatgtaggagattgcagtggactaggatagatttatagaatgagctcactttaacagacatcaggtttatgagttttcttgagagagagagtgcttttttatttactcagagggacaaaaacaatcataccataatatcggaccaatattaccaatgggaaaagagtagctgtagtaaaaatgcactttgctgcatgaaacaaaatgtttatatatgatgaaaaaaattgtcttaggaaatgaaatgagaagccccaggggactcagaaataaaaacactggaaatcaaatatcacatactaaagtcctttaattagtctttgtttactgaaaggtatcttgcagtaacagttttattaaaacagacttttaaaaattgtgttctaaagatgaaataaaatagtaaatacttcatgtgaatataactcaatatgacacatctcactgaccaagaactaatttaagatcttttttactattatggaaaatcaaatgtatgcatccttaagtagcataaaatagcgacccacaaaattcaaggtatgatttcatacatcttttcagagccttatgcaaggtagttccggcccacagggaagaaatgtactgttaacattactataaytgtgagttagtgaaacaaatgctttatagaagcttt

SEQ ID NO: 532889 - DNA, 699 bp, Homo sapiens
actccttctgcattggtcttgctgggagctgcacaccagagctgttcctattgggccatcttgcccaggagtccatatttgcatttttaaaaaatttctgctgcgaaacataccagaccagtaaacatgggctgtggcagagtgctggagtcctgaatcacctttgtttcttctgtgagtctatagagcttcccagactgtgaaaagataactctagtggatggatatccatctgaatttctcttcttaaagtcttgttttggtgattactgttccttrtcatccctgaaaaatcataagtcttcttttctttgttgcatgaatggtagtagaaacaagtattacaaaagtagaaaataaactagtactactactagtagtagcctactcttattaggctactcacaaagaaatagtaggctactcacaaagaaaatgaacaacacatttaagaagcatattcttatgaaaggaaataactaccatcagagttcaggaaatagaaaatagatattcttaaattgctcgttcaattagacacatttcttcaaaatttggaaatcactccaaagaatcataaagtactgtccttgtaaaagccatagaaaatagttgcatcacatgaaaaacaaagcaaagcaaaaattttatttttaagataacaaagaagcataaaaaagccaaacccaggtattttac

SEQ ID NO: 532890 - DNA, 699 bp, Homo sapiens
actccttctgcattggtcttgctgggagctgcacaccagagctgttcctattgggccatcttgcccaggagtccatatttgcatttttaaaaaatttctgctgcgaaacataccagaccagtaaacatgggctgtggcagagtgctggagtcctgaatcacctttgtttcttctgtgagtctatagagcttcccagactgtgaaaagataactctagtggatggatatccatctgaatttctcttcttaaagtcttgttttggtgattactgttccttgtcatccctgaaaaatcrtaagtcttcttttctttgttgcatgaatggtagtagaaacaagtattacaaaagtagaaaataaactagtactactactagtagtagcctactcttattaggctactcacaaagaaatagtaggctactcacaaagaaaatgaacaacacatttaagaagcatattcttatgaaaggaaataactaccatcagagttcaggaaatagaaaatagatattcttaaattgctcgttcaattagacacatttcttcaaaatttggaaatcactccaaagaatcataaagtactgtccttgtaaaagccatagaaaatagttgcatcacatgaaaaacaaagcaaagcaaaaattttatttttaagataacaaagaagcataaaaaagccaaacccaggtattttac

SEQ ID NO: 532891 - DNA, 648 bp, Homo sapiens
caatccatcactaccagtttaacatcatctctttcagattaactcagtctcatttgggcaaataattaatcactttttattcaaatgctctagaaggattgttatctcttccttctcagtggatctcacaacctgatctttccttctaatacagtgtttgggaacaggtagaagtttatgttcttacctacatattgttctctgctggctcccagtgacctcaagttcagatataccctaccagggaaaactctaattttgctgcatctattgctgatgggtcttgtgtaatttatagtctgtccttgctgaattgtctttctttgggggtcttggtgttgaaattcctcctctgggacatggcaatgattcccattcaacctagagcctgagtgacccaccytacaggcctcttctacaaaatcaccacattctttactgagagtcctttggtggagtcataagtcagtttcctggggcatgcaggaaagtgaattctctgtaaagcattctcaggctaaggcaggcgaaataagctttcttggtatttaacactatcatgtgttcatttcttttcttttttgacatctccctgttggcataggactcatcttaaggtctttaaatgttctaggatctgctggtaaa

SEQ ID NO: 532892 - DNA, 510 bp, Homo sapiens
atttctgtcatcacagaaagttatgttggatagcattcctctagaagctgcttccgtgaagctgtgtgccagctttctaagtcaagttctgtcgatcctatttgrtagaaaatatgataaatgttttagaaaatcacaagaggacttttatttggctgaaatttaaacatatgcatgcaatttcttaaaatatattttacatatttgaaggttcagttcaccttggaaagccaaatttcacatctacaatatgaacaaaatttcaacttcctggagctcagtgataattatggattataggttaaaaataaagttaataactcctaacaagagcatgagcaatgtaagactttttccaggtaacattagaagcaagaaataactaaaaaaggacattgcttatttttaagggtattatctccaagtacatatcattttaaagaataaaattttgtgttatctttttcaaagcacagatatttcttgtacatgttaaccttctaagctgca

SEQ ID NO: 532893 - DNA, 544 bp, Homo sapiens
tgaaccattttggaacaaattttccatcaccttccttccctgtgtggttcaggcctttgcaaaccctgagtatcatgaatctgctggttctctactggcaaagatgatgacgttttcttgtttgtttttgttttgctttaatcatgccgtgagaaaatcctaagggaaaaaaatctcattatcctattcaaaatacatttagggttatctggtcatccctagcagatttttatgtacccaatgtttatgtatctcaaattacactctgttacctttcccagagcaagatgaagaacctctaagaacctctcaaacagcatcattttcacaacaagcactagcaatggaaaacattgtcaccaccaccagctaatcytgtagggtccatggtattttctgtaatgccttgaaacagtctgcctctctcttcttgtctgtcatttttatagatgtcagtgtggggcatcagcagttgaaaactcagaataccaagccagtccttccctgtgactgctacatagcttttgcctgcaggataagcctc

SEQ ID NO: 532894 - DNA, 572 bp, Homo sapiens
caaactgaagtgctgcctggtttggtaaaattgaaactgcttgtttgagccatttcaatgattagcctacaagaaatctatcagtcctgaaataaaaatgtactcaggcagtacacttattggaatgctagactctaggttccttcagcaatcataactttcaggtrgaaagttaatctctagaagtattttgttctgtttttgttagtttttaaaacaattgttggaaagccatatcctctttcctgccttaaagatgtttcctggctacaagtataatcctttgcaatggtatttttgagggcatgcaaggaaatatggaaactttatggaccattgtccagtctgaattggccattcactgtaggaatattacagatttgatttccatttgagtgaaagattggattataggagctctaagatctaagagtccttataactgtgatgttctttaacaggtgtaaaaaataagtggtcagtgtatgtgtggaaattcaaagatatataagaagctaagagtagagattattcaatttaataatgatcatcattatgcaccccataccagt

SEQ ID NO: 532895 - DNA, 626 bp, Homo sapiens
aatcttaactattttggggagtcaggagtctaaactttaagtagaaagactgttgtttggtgaaaagagcaccatgaaattcacatccattggtattgcatccttgtcccctctagagactgtgtaataaattccattaaattagatttcccacatgcatcagattatgtgcaaacaacagtgcccaatatcagctatacacactctgtgtgaaaaaaaggatttgaggtatactgaatccttctactttccttcaacaatgatcatttcaacaaaggttcctctcatcaaatggagattattgtgcagaactgtcatttgtttttaaggcaaatgtattgcaccagaaaaatgaaggcaagtttttgttacakagttggcttttcctaattccttcccagaatatcttaattattttaaaagttaaaaagtaaaattatataagaaagagattatgtccttgaatatgcttataatggcttagtcctcttgtggaagtgcatatgcaagtgcaaatatttaattaataatataattttctgagaaaagtagagcccttggtggaggatattctttctttcttttttttttttaatccttttggagaatttgttttaccatttggg

SEQ ID NO: 532896 - DNA, 305 bp, Homo sapiens
tcggtttaagagctcctcttgaagcaatgattctggcaccttgcagagtgcatggcctgccaccaaagacatcaaattaataattcatacttagcatttaggtaccactgtcatgctggccaagtcattagtacatgcattttctatttctgccagggattgcttcccagagacattattgccgtgttgctgataataaagccagcgctgatgagaactggcaaggtggaattcacctcaagttaggggmagagcagggctccagagtttagcctccaaagatacacaaacatggtgaccatcga

SEQ ID NO: 532897 - DNA, 305 bp, Homo sapiens
tcggtttaagagctcctcttgaagcaatgattctggcaccttgcagagtgcatggcctgccaccaaagacatcaaattaataattcatacttagcatttaggtaccactgtcatgctggccaagtcattagtacatgcattttctatttctgccagggattgcttcccagagacattattgccgtgttgctgataataaagccagcgctgatgagaactggcaaggtggaattcacctcaagttaggggaagagcaggrctccagagtttagcctccaaagatacacaaacatggtgaccatcga

SEQ ID NO: 532898 - DNA, 537 bp, Homo sapiens
gaacccgccctcaacaggaaaggcaaatggatggtttcaaagcagcagctcgagcagtctgagttcttggcccctgcccacccctccagccccacagataagggcagcatccagaatggctgtaaattgctctgaaagtgygaggtgtgtattaataaccctgcggagctctctggtgctatataaatgctaagtagaacagaaattactttggagtgttctcgcacctgaatgatctcccagatataactgcttttgatcagtcatcaacacaacttttaaaataaagccgtctcagccctttcagttctgaccacaagatgaaacatatcgaaccaaaggttaaactccaattgattaaggtctctctccggctttttcctcttctgggtcctctttatagcagtgaatctaagattagacaccaggttgcttttgttgctgtggttgctggtgctgttagaacagatattcccctccccaggtgaatagaccagaattggattttacatacattatttgaactaaggtgaacaa

SEQ ID NO: 532899 - DNA, 537 bp, Homo sapiens
gaacccgccctcaacaggaaaggcaaatggatggtttcaaagcagcagctcgagcagtctgagttcttggcccctgcccacccctccagccccacagataagggcagcatccagaatggctgtaaattgctctgaaagtgcgaggtgtgtattaataaccctgcggagctctctggtgctatataaatgctaagtagaacagaaattactttggagtgttctcgcacctgaatgatctcccagatataactgcttttgatcagtcatcaacacaacttttaaaataaagccgtctcagccctttcagttctgaccacaagatgaaacatatcgaaccaaaggttaawctccaattgattaaggtctctctccggctttttcctcttctgggtcctctttatagcagtgaatctaagattagacaccaggttgcttttgttgctgtggttgctggtgctgttagaacagatattcccctccccaggtgaatagaccagaattggattttacatacattatttgaactaaggtgaacaa

SEQ ID NO: 532900 - DNA, 604 bp, Homo sapiens
tatgagacctaaacaatacatgatattggatgtttagtaggactgttgtcctgtaattagcactgggggctacagataaaaataacaggctttaagtaccctatattctggagaaagctgccaaacattggggccagcacytccctagtagaagaccatcaaattagccctgctcctccctaccgtcatgccaacaactacctgccttactgccaacccatatgaggaaacaactgggagaatgaaagttggaagtcttcgggccttgggaagtgtccaaagctcatagcaacaagcctttgaggttggagaccagaaagacttgttttctggtcatgaccctgctgacccaaacaggatctggtccagacaggacaaagtaaaaaaaccatcaggaaccgccaggtggcgacaaaagtgatccctagctgccctcattgctcattagcatgagacactcccaccagcaccatgatcatttataaatgctatggcaacgacctggaagttaccattcctttcctagaaagttctaaataacccacccctcaatttgcattaacctgtcccttaatttgcatataattgaaattgagtatcaaca

SEQ ID NO: 532901 - DNA, 580 bp, Homo sapiens
cctcttctgcacactgtactttcattatcctccaaggcattgtgcttgttcctaacatcctgctactacaaaagaagaagtctaatacgtgcatccttaattttagcgagagcccatgcttggctccgatacaataccattttcaagttgcctgcatatgttaaaatgagaattttattgtcccatcccaccacaacccattcaatcccgcagtagtttttagaaagaccaatcatttgggaccagaaagagcaatgcgtcttcccaaggatacgatgcacccaccttccttctgtccrgtacctcaccacaccccgtcttactctggggcttttcttttccttgcaactgagaactacagttctctcaatttttattcaacttgggggttgtcaccagtgttggcatgactccagcattgggatttagaaagggcagggagctgttgaaggggaaggggctggtaatcgggtttggggatggtagaggacaggaacaggctcagcagcatctctccagccccacaaccccacaagaattaaagggcggtgagcagggtggcatgcagtcatgatggagg

SEQ ID NO: 532902 - DNA, 580 bp, Homo sapiens
cctcttctgcacactgtactttcattatcctccaaggcattgtgcttgttcctaacatcctgctactacaaaagaagaagtctaatacgtgcatccttaattttagcgagagcccatgcttggctccgatacaataccattttcaagttgcctgcatatgttaaaatgagaattttattgtcccatcccaccacaacccattcaatcccgcagtagtttttagaaagaccaatcatttgggaccagaaagagcaatgcgtcttcccaaggatacgatgcacccaccttccttctgtccggtacctcaccacaccccgtcttactctggggcttttcttttccttgcaactgagaactacagttctctcaatttttattcaacttgggggttgtcaccagtgttggcatgactccagcattgggatttagaaagggcagggagctgttgaaggggaaggggctggtaatcgggtttggggatggtagaggacaggaacaggstcagcagcatctctccagccccacaaccccacaagaattaaagggcggtgagcagggtggcatgcagtcatgatggagg

SEQ ID NO: 532903 - DNA, 400 bp, Homo sapiens
ctgttggaggggatcactgaagcccctagtggctgtgtacatagttattttacttttgactctctcaagtcttcccgtttaacacaaacagaggcaattatgacaaagtcaaaaaataacagatgctggtgaggaaacagaaaagagaatgcttgtacactactggtgggaaggtaaatcagtacaacccctatggaaaatagtatggagatgtttcaaagaactaaaaatagaactaccatttaatccaggaatcccactactgggtatctgcccaaagggaaagaaatcattatatcaaaaagatayctgcactcatatgtttattgcagcattaatcacaatagcaaaaatatggaatcaacctaagtgtccatcaatggatgactggataaagaaa

SEQ ID NO: 532904 - DNA, 171 bp, Homo sapiens
tgtttccctttgcaagatttcttaaatttcagtatatttcccacagaatctttccaagtttttgctgaagttarcattcttttcattcatatagttgatatctgcacagtcattgtaaggacatctctgattacatttgtatcattttccaatttgcttctctaagctgtt

SEQ ID NO: 532905 - DNA, 171 bp, Homo sapiens
tgtttccctttgcaagatttcttaaatttcagtatatttcccacagaatctttccaagtttttgctgaagttagcattcttttcattcatatagttgatatctgcacagtcattgtaaggacatctctgattacatttgtatmattttccaatttgcttctctaagctgtt

SEQ ID NO: 532906 - DNA, 574 bp, Homo sapiens
tggcaaaaaaggccaggcaacaacactatttggaacagggtgtggctgacttgacygctgtactcggaatctcaggtaacctgcttttcacgtgtcagccatgttgggcgtctgttccatttgccaggaaagtataaaaatgcatccttggtcagaatcctattctgtttctctctgcctctccatgtcactagcattattttttcctcagtacaaagtattgtgaaagaactgttatcattacttacagagtaaaaaataaataaataaataaatcctccattgttttaaggggggactggattcagcttccactttgtttcaagtttatctttacaaaatgctgcatttacatcagtataatttgctggtaacttttcaatatcaaatgttcacttgaaaatcaattttgaaactatttaccaattttctgtgataaaataatcaccagtatcatatccggatgacacattttcactagtttttaattttttaccttgaaaacacaatatataatgttactggtttcattatgtgcttaagtgccttaaaattacaatattgtatttaagtc

SEQ ID NO: 532907 - DNA, 574 bp, Homo sapiens
tggcaaaaaaggccaggcaacaacactatttggaacagggtgtggctgacttgaccgctgtaytcggaatctcaggtaacctgcttttcacgtgtcagccatgttgggcgtctgttccatttgccaggaaagtataaaaatgcatccttggtcagaatcctattctgtttctctctgcctctccatgtcactagcattattttttcctcagtacaaagtattgtgaaagaactgttatcattacttacagagtaaaaaataaataaataaataaatcctccattgttttaaggggggactggattcagcttccactttgtttcaagtttatctttacaaaatgctgcatttacatcagtataatttgctggtaacttttcaatatcaaatgttcacttgaaaatcaattttgaaactatttaccaattttctgtgataaaataatcaccagtatcatatccggatgacacattttcactagtttttaattttttaccttgaaaacacaatatataatgttactggtttcattatgtgcttaagtgccttaaaattacaatattgtatttaagtc

SEQ ID NO: 532908 - DNA, 574 bp, Homo sapiens
tggcaaaaaaggccaggcaacaacactatttggaacagggtgtggctgacttgaccgctgtactcggaatctcaggtaacctgcttttcacgtgtcagccatgttgggcgtctgttccatttgccaggaaagtataaaaatgcatccttggtcagaatcctattctgtttctctctgcctctccatgtcactagcattattttttcctcagtacaaagtattgtgaaagaactgttatcattrcttacagagtaaaaaataaataaataaataaatcctccattgttttaaggggggactggattcagcttccactttgtttcaagtttatctttacaaaatgctgcatttacatcagtataatttgctggtaacttttcaatatcaaatgttcacttgaaaatcaattttgaaactatttaccaattttctgtgataaaataatcaccagtatcatatccggatgacacattttcactagtttttaattttttaccttgaaaacacaatatataatgttactggtttcattatgtgcttaagtgccttaaaattacaatattgtatttaagtc

SEQ ID NO: 532909 - DNA, 577 bp, Homo sapiens
tgattttgcagattcctttattccttaggattctgtgttttttgttttaaagtccagcttcttttttagatagtatattcatgtgccaatttgataaaggtgctaaataattttgcaaggttaaaaggcaatgtaatgtgcatacaaatcacttggctttgccatattataaggacatggggaatgacctaattatattttctgtcattcctgctctgtgaatatcagatcagcaataatacacaacaggtttaattattatttaaataatttatattgccctagatagtcaataggtaaaygtaaacaaatcttttacagggtaataattattcaagtgtctatccaaactacctcaaatagtttagtttattcgagtgggtagatttatgtctgctttgaaataaaaaataactctttgaaaaattattttttctattttatgatgcaaaagttgttaaaagttggtgagttagataaacactaaatgactaccattaccacttattgaaaattttctttttaaggtaaccaattgcctgctaatttttatagccaaaggctaacattatctttt

SEQ ID NO: 532910 - DNA, 528 bp, Homo sapiens
tgtcaacctaattaagccagatgtgtgttcaatgtaaacggacctcccaagaggaataataacagatttcaggctctggaaagagacaaaagatgggggaggggatgcatataagaaggtaaggctaagatctatagaatgtttctgatgtcaatgtcactgctacctggaagactgttagctcattagtgtcaccttgattgaacttgattgaaacagttctatgggtgggtgagaaaagtggtttaagtgaagtctggatacattttcatagtcaataaactgatatttgctaaactctttcatcttcaacacatacacacatgcacgcacrcacacacacacacacacacaaaaccttagcctgactttaaatccttagtaatttaaaaaatgacatttaagccatgccaactttgacagctcttcaagggagtatgtgagccatgagccaagaaaaggacaccaacaggctttcagatgcgctcagattacacgcgattcacaaatcaggatgcaagttagtta

SEQ ID NO: 532911 - DNA, 482 bp, Homo sapiens
gacagtttcgcattcgttcacactcaccttccaggatctcaggcgargtccccagttgaaacaggaaaaattcctttatccccatggcgggtcttgctatggggcagcggagtggctcgctttttcagtgccccgaggctcagacctctagggcagcatacaggcgggcaggctgtggggctccaaccccagggcagtgtctaggggtgaatgttaacagctccggaagccccagggggaatgtgttacagggtactcttttagtttagctaggtatacacagctcgtgttagctcaattagacccctgccttatcacaaggacagagggctttgtgcatcccagggttcttgccttggtgtaccagaagcagatcacatcatgggcttggagaatgagcacaaggttgtattgagtggagatatcacatggcggaagccaaaaggggatggagtgggaaggtttctcctggatcccggcag

SEQ ID NO: 532912 - DNA, 540 bp, Homo sapiens
ctggaaattcgggcctcaaattcagacaaaaatgtgggtaatatttttggaagtcatttccatattgtaaaaaatactcattcagcactctggaaaagtatatgcctgaatcagaagaggtggcatcttggaaaccacctaagtttaaaggacaggagaaaaaagataagtcagtgatccagtaggaactctctttccttattccattttcttcagccacggtacaacctgaaattttaaataactaagcatacaaagaagatcctaaaaggttctagaatgctgcaagcaagtaaacaaatgaaaacaggtcaaataygtaggaaggaaataagactaggactggatttctcagtggcaacactgaattccaaaagataggcaagaaatggtttccaaattctgaagcgaaattatttccagtgaagaaatgattatgttgctaatcagacaaggatagaaaatggacatttttcaaacatgcaagtgtctatacatgccatcttagaaagagactgcaagatgtgcttttgcaaaacc

SEQ ID NO: 532913 - DNA, 578 bp, Homo sapiens
tgagaaggttaaatgggtaatatgcataaaayattcatcatagtgcttggcatttagtaagccaaatatctcagtaaacattagcttattattattaatattatcattattttacataggctataaatgaatttcacatagctgtagaaaatcttttaaatctttaaaaataagttatgagatcaataacaatatatacttgtagaaaatataaatattagacatcaattttaagtatataaaagcaaattaaaaaataagttcaatcttacatttcaatcacatagttcagtcgtagggttagtattttcaatgaaaaaaagtagtttttagaaatagaaagatttccaatgaactccaaaatgtcatcctatactaaaaataatcactaccctttttgcaatgaagacattttccttaaccaaatcctgcatttttgaacatctagtccaataaatctacatacacacaattcttaagataaatttggtcatttggatttctttctacttggttagaaatatgaagggaaaacacaacagaaatatgaatagaaaatactttctaaaaatgtagga

SEQ ID NO: 532914 - DNA, 578 bp, Homo sapiens
tgagaaggttaaatgggtaatatgcataaaatattcatcatagtgcttggcatttagtaagccaaatatctcagtaaacattagcttattattattaatattatcattattttacataggctataaatgaatttcamatagctgtagaaaatcttttaaatctttaaaaataagttatgagatcaataacaatatatacttgtagaaaatataaatattagacatcaattttaagtatataaaagcaaattaaaaaataagttcaatcttacatttcaatcacatagttcagtcgtagggttagtattttcaatgaaaaaaagtagtttttagaaatagaaagatttccaatgaactccaaaatgtcatcctatactaaaaataatcactaccctttttgcaatgaagacattttccttaaccaaatcctgcatttttgaacatctagtccaataaatctacatacacacaattcttaagataaatttggtcatttggatttctttctacttggttagaaatatgaagggaaaacacaacagaaatatgaatagaaaatactttctaaaaatgtagga

SEQ ID NO: 532915 - DNA, 599 bp, Homo sapiens
gtgggactcctgaatttgcaaaggcttagctaagcctgactagctaattgctagatsgtctttctttgcccatatatggaactagagtatgtttggatttttggcccttagtacacctctgactttaggaattacagtatatcttatgtaaactcaaaaaacaaatcaactcttctccattttaactttgctgatcaagtatattctcaaaagtccaacttcctcatctttccactaacaaagctaaccaacaaatatttttataaatgagatgtattatagtcagttcagacaatgacaaatgtgccttgatatgaagattactgagaaacaaaatattaagctatatgcttagttttctgtattttataactttaaagaaagtatctgattatcatttatttcatcaacaaatagcaatatctaaaatgcacttttataattccagtgtttatttggtaatgttctgcttgcttgaattttatgttaaaaaccatgaaaacttcaattagaattgacaaacgttctgagggttaattttcactttagaaatatgaaagcaagacctttttgatgtaattactaattaaatggccaga

SEQ ID NO: 532916 - DNA, 599 bp, Homo sapiens
gtgggactcctgaatttgcaaaggcttagctaagcctgactagctaattgctagatcgtctttctttgcccatatatggaactagagtatgtttggatttttggcccttagtacacctctgactttaggaattacagtatatcttatgtaaactcaaaaaacaaatcaactcttctccattttaactttgctgatcaagtatattctcaaaagtccaacttcctcatctttccactaacaaagctaaccaacaaatatttttataaatgagatgtattatagtcagttcagacaatgacaaatgtgccttgatatgaagattactgagaaacaaaatattaagctatatgcttagttttctgtattttataactttaaagaaagtatctgattatcatttatttcatcaacaaatagcaatatctaaaatgcacttttataattccagtgtttatttggtaatgttctgcttgcttgaattttatgttaaaaaccatgaaaacttcaattagaattracaaacgttctgagggttaattttcactttagaaatatgaaagcaagacctttttgatgtaattactaattaaatggccaga

SEQ ID NO: 532917 - DNA, 424 bp, Homo sapiens
atacgtaatagaaaatatttaatttttaaaatgcactacgtgggccacaggtcaatttgccattacaattgaatcatcaaatactgtggcctaaatatgggctaatttttctctgaagtaaaagcctggaatgagagatttagcactgagggaatgatgttggcattgccatcgtcaaaaccaggcttccaagtttgctccaattatcaccatttcttagacagtatgataggaaaatataaagtcaagagcaagtggcttcatctgttagaagacccagaaataagccacatcaytgtggtatgtgataagtgccatttgcattttatttcccataaccctaaccctaaccctaatcttaatgttgtcatttggcttcattaaaccattagagaattgagaatttttatccttacctgaattt

SEQ ID NO: 532918 - DNA, 600 bp, Homo sapiens
ttttcattcgcggatccagagaaagaggattttcttcttcttacggaggtcaaaagttcctttggatcattttgtaagtagggagcaaagcatatttggaagagtgaaaggcrtccagaggtgatgatcacagcccttctgttcactttacagaaattcggtgaacagagaaggccaggaaaagtgggagtcagggcattggtagggactttgggaagtttagcagggtccaggggaatagggcttcaacctcctacctttacttaggtctgcaagctctgaacataatccaaattatcttgagtaggaactgtgactctgtgccaatgtgcaaagctgcactcaaaatgtatactttaaaacctctgctctgatttagacagccgtcttcactacagagagagtgattttgacttaggattaaggtcaaatacttaaagagagtccccaagttctgtggaccctcatttttgcccatttactccttttgcaagatcagaaataaggccttgtataataacacttgctctttttcttccctctctttttgtttctgcctccttctatgcttctcctctgtattatgcaatattcattgaa

SEQ ID NO: 532919 - DNA, 555 bp, Homo sapiens
ctgctacaaatgaatatgtgtgtgtgtgtataacacacacacaaacagatgcacatatacacttcrgtcctagactgaatcaccaggtcctttttcatctgtagactttgggtgccaaagagcactgaattgagaggccaagaatgaggtgtgaactgccgtaaatcactgactttgagcttcagcttccctgtctgtaaaaacacagcccataaataactttaggtataaggtttgactatgaaattctaggatagattctagaacctatcgctatgtcaccatactcaataggatgaaaaaggttttcagtcagaaggcctgattccaaatcttgatttctgccacttcctattaaccaggtaccttgtgcaaatgatttagccaccctgcacctcagtttccccatctgcaaagcgggagaataacagtgcctccttctcagggttgttctgagttttgagggaaaaaaaaaaaaaaaaaaaaaaaaaaaaatatatatatatatatatatatatatatatatatatatatatatatacacatacacacaca

SEQ ID NO: 532920 - DNA, 596 bp, Homo sapiens
tcagatgggtatagccggtcacagtgcccactttagcctccccaggtcccccaggcgcttctgggctggcctcattcagggccatgcctgctggcccatcagtctacttctgcactaaggaatccaggttgctggaagggcctgcatgcattgaaggggatgggagggtggcagggcgctgtgaatgcaattagattcagcctccaggtgagaacagatgggcgggacaggggcaagatgagcaggtgaaaggcaccagggccttcaacggcagcgggcgggggcagrcggtgcagcagagggttgggggggatggtggcaccagactccacacttttccttacagctcttgcacctcccagttgtgtgacccaggacacatctctctacctccgtgtgcctcatcttgaatcggcacagtaatgacagcacctgcctcgtagggtagcgtgaggtgtagtaagcaagttaatatattaacacacagtgcttggcacatgctaagtgctggagagacacagggaacagatctgacccatggcctggaaaggtcactttggcacagaataggccctaaagagtcactgggtcaatgg

SEQ ID NO: 532921 - DNA, 606 bp, Homo sapiens
cctctttccaagggctccagcaaaagttccagggaaagctctcattggctcatctagggtcttatgtctctttcacccaatcacagcagccaggcaaaaggagataccctgattgtccaggccaacctcatgggcctggtccaggattcagagctagaaagagcctcatcagaacatgtaaggctgagaaaggggaaagattggttccctccctctttggtgactgaaggcacaattatgaaaagacaggagaatggattctgggcagaaaaataaaacagatatccactatagaaacccacatgcaggccgggcgcagtagctcacgcctgtaatcccagcactttgggaggctgaggcgggtggatcagttgaggtcaggagttcgagaccagcctgaccaacgtggtgaaaccccgtctctactaaaaaaatacaaaattagccaggcgtggtrgcgcatgcctgtagtcccaggtactggggaggttgaggtaggagaatctcttgaacccgggaggcagaggttgcagtgagccaagataatgccactgcactgcagtctgggtaacgagtgaaattctgtctcataaaaaaaaaaaaaaa

SEQ ID NO: 532922 - DNA, 520 bp, Homo sapiens
aatgaaatgagatctgtacccagcatttgagaattgccacatgcaaggagatatcaaaaaagcaagttgcaaactcatccaagtagtgaatgtagatgtgtactcatttctgaaggacaatcagtgttcagattacagggttttctttatgacacccaaatgcagctacttctctggagaactatttatagcattatttttatctcccctgatagttagggaagccaaagtttaaaggactattgaacaaatgaatttgggaattataacattgagttcaattaaaaagcctttttagctgaaacaattgtttatagcgccatatttaattcctataaaactgtattctgaactatcttctgagagacatttcagtgttacattaaaagtttttgcctttggtaattactggttcatttgctttaaagcagcatstcattttcttggcttaagagaaagattactttttgtgcagggataatgggcttataaatctagtataaaacatatttaaccagtt

SEQ ID NO: 532923 - DNA, 623 bp, Homo sapiens
agaaggaaaaaatcatgtattactcaggctgtcaacttacattttaacctagttcatgtgtttctacttctacataattaaagcaaatagatttattatttttttaataaaggcagactggtggaaattgaaggaggagtttgtatcactaactctcatgtatagacctacatgttgataaacaattaggaaacccaataagcactgaataatctcatatgtttaaaggaaaatttagatccagatagttcacacagagagaaaggttaaaaggttggtcacatgcacattttaagataaatatttgttatgacaaatggcaagataatgagacacagtctgctaaaaacmaaataaaatgatccctctttattacaggctctctactgcaccagtacatataattaagacagaagtttctgtctattaaattgtccgtggatttgcttgattatattctgcttttaagcaatctgcaatctattcagaatcattttagagatcttggatttgattgttttaattataactctgagcttcatgtaaaaaaactttgtttccttttctgtagtggtgggaaatcgaatggcgtatgaagacacacacacacacacctacacaca

SEQ ID NO: 532924 - DNA, 618 bp, Homo sapiens
caaaatccaaataccagattgggcatttaagttctatgtagtacctcttgactgatcaaatatgtcatgttgattacacagttagtgacctcttgcttttaatatttttctgtcaaagctgtgtatgtgcatgtgtgtgtatgtgtgtcagagaaacacacaaaagagacaaatcagaagatccccatatactttgtccaattaaaaagaacacaaagcagttacagtataagaaattatttacttttctcatcggaaaactaatatgaaattgacaagagtgtgaggtatgaattttatgatggctatttctgagaccagaaacagatggaaagagactattaaaagagtcagagaatattgctaatgtgtttctattttgctttcatttcaaaaatgcagcaaacaatggacagctaaatagaattagattagaaagggaaatattccatcaatttgaaaaatttccaagtactgttataaaaatgaatccttttccatcagtgcctcagttatctgagcataacaaattataactctgaagatcatgcaccttgaggtgcacaaatttttmtgcctttcacacctacttggcttattgccagtagaaaatccaca

SEQ ID NO: 532925 - DNA, 589 bp, Homo sapiens
gtgggaagaatgaactgaagaagtcttcttgacatggtgtctcagtcattatcagttcatcaacatttgtacttcagcagcatgctatttgtcatctatctctagccttttccttcagaagccyggaaggattctgaataattgtctttggctctagtaccacaagcaaaggtttagggatatgttacatcctaagagacagggaggatctggttttacaacactcacgagcacactgggctttctgaaactcaatcaatccaagacagatctcctcagagacttataaaagcaaaggtgaacgaacacaggctttcagcttttccacaaagtcttctgttgggtctttgtgaatctggaattcacattgttaaaagtgctttgattcttctctccatcatggctatgtctggctgtgctttcttccctcatatttgatgtgaaacaaagggaggtttagtgcaccttgttaggctatttatcttaaaaatatgaaaccattctacaaatgtcataaaaatccgtaacgtcatacagttcgttatattctttaaaaagtacatcgattcagcattatccttgtgtgtct

SEQ ID NO: 532926 - DNA, 469 bp, Homo sapiens
ccctgggattgggatggttttgggagagcttttgctatacaccccagggtatcgccagcccggcaccacttttcctatcaatttcttgacyatgtggatttttgaaaaatggaacaccagttcaggcccttgcttataggtacttggggctggtgtgacgacagagcagcttctttgttgatcacctgtgctgacgggcagtttatttcccaattcctctcattgagggtatggccctcccagatgtttctggattctgagggaaagcagtattgattcccgaggccctgtgaggtgggccccgtggaggacaggactagagctggaccatttgaggctctgggtctaatcctcatggactggactgacttctggggtcctgctcagggaacgcacggccctgcagcctccggcagagcctgatctggggcagggactcccgctgtggtctggctaatactgagcagta

SEQ ID NO: 532927 - DNA, 469 bp, Homo sapiens
ccctgggattgggatggttttgggagagcttttgctatacaccccagggtatcgccagcccggcaccacttttcctatcaatttcttgactatgtggatttttgaaaaatggaacaccagttcaggcccttgcttataggtacttggrgctggtgtgacgacagagcagcttctttgttgatcacctgtgctgacgggcagtttatttcccaattcctctcattgagggtatggccctcccagatgtttctggattctgagggaaagcagtattgattcccgaggccctgtgaggtgggccccgtggaggacaggactagagctggaccatttgaggctctgggtctaatcctcatggactggactgacttctggggtcctgctcagggaacgcacggccctgcagcctccggcagagcctgatctggggcagggactcccgctgtggtctggctaatactgagcagta

SEQ ID NO: 532928 - DNA, 353 bp, Homo sapiens
atgtcatgttcactctgcaggcatcttgctaagatgatcaactgaattcaagggatgtctctaggatatcttcagatagaaaccatttaccacatttgagttcttggtgaaaattcagagacataacacaatatttatcaaaaatactattggtagagatcaygccataaaaatttgctaaaattaaacagactaattaccttggtaattaacatcaatagacatgaggccatctagattattcataataaagtgaatactgaaattgtacaccactcagattgataaggaaaactgatttagaatactaatattctcaataatactcatagaaaaaaagtgttatttttatt

SEQ ID NO: 532929 - DNA, 641 bp, Homo sapiens
cttttaattttttggaagatttttttctaccaagatgttgcagttatgtatcctttaacttgcttttcattttgacacattggctactgcaacttgctcaaatatattgtctttccctcttcccatttagtgttattttaaaaacacggagaatgartgttatgggctgaattgtgcactggcttccaaacgtatattttgaagtgttaaaacctcagtacctcaaaatgtaattatatttggagataagatccttaaaagataaattaagtaaatattagtcttgtagggtgggcctaatctaatatgactggtgtgtttttaagaagactaagtttgtacacacagtgacaccagacatgtacatccacagaaggatggccatggaaagacacagtgaggcctcagaagaaactaagcctgccaacaacttgaccaggacttctagttttcagaactataaaaaagcaatttctgttttttaagccaccctatcagtggtattttgttacagtagccctagctcactaatacagtgaggatgtttttttgggacacatagtatgtaccaggcgctttctttgtggaagagtggaagaatttagcaaattccaggaaatatttttgtgctttctatctgg

SEQ ID NO: 532930 - DNA, 641 bp, Homo sapiens
cttttaattttttggaagatttttttctaccaagatgttgcagttatgtatcctttaacttgcttttcattttgacacattggctactgcaacttgctcaaatatattgtctttccctcttcccatttagtgttattttaaaaacacggagaatgagtgttatgggctgaattgtgcactggcttccaaacgtatattttgaagtgttaaaacctcagtacctcaaaatgtaattatatttggagataagatccttaaaagataaattaagtaaataktagtcttgtagggtgggcctaatctaatatgactggtgtgtttttaagaagactaagtttgtacacacagtgacaccagacatgtacatccacagaaggatggccatggaaagacacagtgaggcctcagaagaaactaagcctgccaacaacttgaccaggacttctagttttcagaactataaaaaagcaatttctgttttttaagccaccctatcagtggtattttgttacagtagccctagctcactaatacagtgaggatgtttttttgggacacatagtatgtaccaggcgctttctttgtggaagagtggaagaatttagcaaattccaggaaatatttttgtgctttctatctgg

SEQ ID NO: 532931 - DNA, 450 bp, Homo sapiens
gggcccgctttggaaagttcacaagctttgtgttagagatggagggattttaaagtgagatgtgtcttggaaagggcatttctttaatttacacccatgttatttccgctctgycatgagtatgacaaaagccagctaatgcggagtctgccaacatacgtggactagattgtgtccacatgaggagctgagtctgtgcaattagcagtgacactttgtgattagttaggatgcagaagtggaaattctgggtctgttgcatattagaatggaaaatcgtttcttctaacacaagtacaaaaatagctattcaggtggtagcttatgctgaggaggaatcatataattccaaattttaaacacaaatatcattgcaagtattttgagacaatgtctaattatcctacagtaatcaagatgtttgagaagattctacatcatgcctaacgg

SEQ ID NO: 532932 - DNA, 450 bp, Homo sapiens
gggcccgctttggaaagttcacaagctttgtgttagagatggagggattttaaagtgagatgtgtcttggaaagggcatttctttaatttacacccatgttatttccgctctgtcatgagtatgacaaaagccagctaatgcggagtctgccaacayacgtggactagattgtgtccacatgaggagctgagtctgtgcaattagcagtgacactttgtgattagttaggatgcagaagtggaaattctgggtctgttgcatattagaatggaaaatcgtttcttctaacacaagtacaaaaatagctattcaggtggtagcttatgctgaggaggaatcatataattccaaattttaaacacaaatatcattgcaagtattttgagacaatgtctaattatcctacagtaatcaagatgtttgagaagattctacatcatgcctaacgg

SEQ ID NO: 532933 - DNA, 618 bp, Homo sapiens
taacaatgtgagtttggtgaactctgagcatattgtaaaggaagtccggtaagagataaaagatagaagcccaggaaacatttaaaaaaaaaaaaagctgagttaaatactaattatttcactattcaatgtctataacaatttaatatgctaacatctattggaattaactgaacataaagaaaagcataaaggaagcagaattttccaaacctgtttgatttgggcacctcattttcaaggaacacttcattgaaccaatttttaataaaacacattttaggatatattagcttttataawgacgtggtgagccaaaattagtatgtagaatcaatttccaaaaattacacaaattaagatgtgctcaaattttaaaaatcagcattaagtattttagtattgtattactaatgctttaaaagaaatttgagattgcctaaattgactcctttattatttgtagagatgagaaaaaaagatgttcagaatggttatgtgggttcttacagccatacatttatttaatggcagaagtagttctatgaccaagtttattggagatggcaaagaatcaaagcaacagtttggcaatttacaatgcaaagtatgccaagc

SEQ ID NO: 532934 - DNA, 651 bp, Homo sapiens
tatcacttagtattggatattgaatgataaataaatataatcattaaccattgttaaagatatctcctgtatttgttttcacaatactcatgaaacttttatgttttctttcaaaaattctatctggtatcaatttgattaccggctcccaatcctgctttactcaaggcccttcaaagtttctcattgctctcagggtaacgacaatactctccaccaaggcctttaacatttggcatgatccgcctgctgcctgcctatccacttccacttcataccatgttttccctctgtctactcactcctctcagccacaatctccctcctgcccagtactcttgcacatgctgctctatgtaagtcatacttcccttccatgttcacccactaagcatgttgtttttagatgtatgatcaataatcattcttaggaaagcatgccttaatttacttgattacatcaaacatcccactcttaggcactcataaagccaaatattrctcctacatacataacttttggtgcaattgcacttttacatgaacttacatgatttaatggctgggcttctgtctgtattttcctctagactttctcatagctgtttttacctgccactgtaccatccattcatagcacagtgtgtggaa

SEQ ID NO: 532935 - DNA, 572 bp, Homo sapiens
gacaatactctccaccaaggcctttaacatttggcatgatccgcctgctgcctgcctatccacttccacttcataccatgttttccctctgtctactcactcctctcagccacaatctccctcctgcccagtactcttgcacatgctgctctatgtaagtcatacttcccttccatgttcacccactaagcatgttgtttttagatgtatgatcaataatcattcttaggaaagcatgccttaatttacttgattacatcaaacatcccactcttaggcactcataaagccaaatattactcctacatacataacttttggtgcaattgcacttttacatgaacttacatgatttaatggctgggcttctgtctgtattttcctctagactttctcatagctgtttttacctgccactgtaccatccattcatagcacagtgtgtggaagaagtaaatctttctataaatgtttattcrttaaataaataaatgtgtagtgaatcaacaggtttttataaatgcctagaaatggaaaaatcaaaggtaaattatattataaccttaaatgta

SEQ ID NO: 532936 - DNA, 572 bp, Homo sapiens
gacaatactctccaccaaggcctttaacatttggcatgatccgcctgctgcctgcctatccacttccacttcataccatgttttccctctgtctactcactcctctcagccacaatctccctcctgcccagtactcttgcacatgctgctctatgtaagtcatacttcccttccatgttcacccactaagcatgttgtttttagatgtatgatcaataatcattcttaggaaagcatgccttaatttacttgattacatcaaacatcccactcttaggcactcataaagccaaatattactcctacatacataacttttggtgcaattgcacttttacatgaacttacatgatttaatggctgggcttctgtctgtattttcctctagactttctcatagctgtttttacctgccactgtaccatccattcatagcacagtgtgtggaagaagtaaatctttctataaatgtttattcgttaaataaataaatgtgtagtgaatcaacaggtttttataaatgcctagaaatggaaaaatcaaaggtaaattrtattataaccttaaatgta

SEQ ID NO: 532937 - DNA, 449 bp, Homo sapiens
ctggcaagcagtggggccagatgcttgtgggcggggccagcctcgcactcagccggtcagtggagatccctgcaacgggaggaaatccgaatgattctggtttattttggagttgtgtccagtgaaagatctcctgactgccgtaaagcaggtgtgtatacacaaactttgtaaaggaccaggcagtaactgttctgggctttgtgggccatagatggcctcttgcttatttctcttcaggctgccggcccctkctctgatggaacgttgaggctggaagattctccacttgtgcagtcttcactgtggagagtgtaattgtcctcgtaggggctgctttcattcactgcagcagtgactcgcctggttccttgttggtatcccaagtttatataggaaaataggatccaatcccaggcttgtaagaggtggctgattccacagtaagc

SEQ ID NO: 532938 - DNA, 540 bp, Homo sapiens
acttaacaagcaagcaaatattgtaatggggtcaatgttgtaccggagttgtgtgccaggtgctaggggaagggaaaaacaaataaattcaactctctttggcagacaaggtacttttcctgggggaggtacctttgggtggagagtgagtagggtaggagttctccaagtaagaaaggcaaaaaaggatattccattcctcagcactcctttcccctaaacaaacttgaagatctgaattcattcagtcaaacagttggagattctggggaagtgagggacttgatccaatattaacatgtgttctttacgttgcacgatatggtcaaaacccactttttatagactgctcttgcctgcatctatctctctggcctgcctggggrgtataagctgatgatgcttcacaagctgagagcaatgctgcaaagtgaaccagggaagtgcttgcttacaggcttgctgccataccatgaaccaggtaacaactcaaggatgggaactgtggcttcagtgtctcacttaccctacaaatccctt

SEQ ID NO: 532939 - DNA, 616 bp, Homo sapiens
tgctgtggtctgcatcccaactccaccgattggcagctatgtgactggagcaagtgataaactccccgtgcctcggtttccttttctgtaagattgggagtaataatggtgtgcacgtcacagggttcttaggagaactaagggagtaaatatttgtaaagcccttagaacagtgccagacacatggttaagtgctgtaaagtgttgttatttctgctttagaatttcttccacttgttttttaagttggagaaaaaaaatgcttgttctcacttttctgggtttcgaytggaagaattagaaaacagtacaagactttgaagttctacacaggttcagctaaccaccataaattgcatccctgccgcccccgcccctccccctcacaactatttgaggatgctgccctctcgtggtcactcggcactgcttctatagctcagccagtttgaattatatcagaattttctttgtctccaccttcctttaacttaaaggctcatttgtcagaagttagagtattgccctctgtgcattactcaaagcatatctgctaataacagaaacaaaggtggatttcaaaaacttgaatgccaaatataattgttatttcaat

SEQ ID NO: 532940 - DNA, 504 bp, Homo sapiens
ggtaaaaaaaagtttataggcgagttggatctggggtcttcacacactccacaatgttggcgaccaatgcttgttttaatgagtcacggattgcctgtttatcttctgctccctgctgtttctgcattttctcttccagaacaatcctagaaacacatgctgctacagacgctggagcaatgtgtgtagacatttgagccaaattattataaagaactctttcttctctgatattaaaaaaaggagcgagaattgcacattgcctagcaaatcgttatctcagatgttcactgtgacatgctcaatatggcctaccagaaaaagttggagacatttgaaaccttaacaactacacaaaatgacactgtaattggcgggttttgttgttcatgttctggctcagctaaaactgctctaaacactttgtttaatgatgttacattatgacaacacatggcttctatacagcaagtcatcaygtttaacatgcaactacacaggaaa

SEQ ID NO: 532941 - DNA, 631 bp, Homo sapiens
tcttccaaaaagtaagttgaactcttacttttaagctatggttaactgaattaagcttcttttgatctcttcagaaataatcatattggacgttctaatgcatttcagcattgagtataaagttttgaaattatttaagttcaacacaaacatggtgaaagaaatcctcctttgcaatggagaaagtttccccagtgaataggaatctaaataatacagaagttaactacagaggaagcctcactggatggtgtttagaacaccagctatggagccaaattagttattacttactagttaacttggcttaggggaaatatttaaattttctgaactttagccttgttggcaacaacataggtatgaaactatagacttcatacaattattgttgtgaaggttaaaarggtaatatgtttaaaggtctatttagtataatgcctggtacgcagtaagaacttgttaaagaagtattttttttatcttgattttgggattcaaattcttttaatataaagaagataacctaatgtataaagtgtagattgtacctaataaatccttaaatacaattttaagagtttaagcttactcaatagtcatcctggctactgattcaagggaattgtag

SEQ ID NO: 532942 - DNA, 631 bp, Homo sapiens
tcttccaaaaagtaagttgaactcttacttttaagctatggttaactgaattaagcttcttttgatctcttcagaaataatcatattggacgttctaatgcatttcagcattgagtataaagttttgaaattatttaagttcaacacaaacatggtgaaagaaatcctcctttgcaatggagaaagtttccccagtgaataggaatctaaataatacagaagttaactacagaggaagcctcactggatggtgtttagaacaccagctatggagccaaattagttattacttactagttaacttggcttaggggaaatatttaaattttctgaactttagccttgttggcaacaacataggtatgaaactatagacttcatacaattattgttgtgaaggttaaaaaggtaatatgtttaaaggtctatttagtataatgcctggtaygcagtaagaacttgttaaagaagtattttttttatcttgattttgggattcaaattcttttaatataaagaagataacctaatgtataaagtgtagattgtacctaataaatccttaaatacaattttaagagtttaagcttactcaatagtcatcctggctactgattcaagggaattgtag

SEQ ID NO: 532943 - DNA, 514 bp, Homo sapiens
tcagtctgatccagtagtctttatttcttatttaaatagaagttcctatccattttgaaatcactgcccagattttttttatcttgaatatatattatattctggctaggcacaaagtgtctttaaacattttatggaacgttttgcctaactccagtagagtaaagtagaagacagccagtagaggtatttttttcaatgcagaagtttaatgagtaggttcaaagtattctggaagatattgttcgaaatcttgtacttaacttctgaatttaaagatcctgaagatagggccggacgtgttgtcttacatctgtaatgtaatcccagcactttgggaggccgaagtgggcagatcacgaggtcaggagatcaagaccatcctgtctaacacrgtgaaaccccatctctaccaaaaatacaaaaaattagccagccgtgggcacctgtagtcccagctacttaggaggctaaggcaggaggatggcctgaacccagggaggcagagcttgca

SEQ ID NO: 532944 - DNA, 411 bp, Homo sapiens
tatattgacccgactaaattatctctcattcacaaagtgttgtctttcatcaactgcctgacgaatgatgakttttgagaattaccaatagtctgggaattctgctgcttacctgggagaaaggggtctctgtctaagaagcagtgaacaatatttggatggatctggaattagtatcacgcccttgctaggaagaagcaaatctgtggctctttcctgcaatcccccaaaaaaaaaaaaagtttttttaagaaaatagtttcattgatatgcaatttatataccacaatgttcacctatttaaaatgtacaatttagtcaatggttttaatatatctacagagttttacagaggaaggaattcaaaggcttcaggaagagtggagttgtcatttaagacctactcaccca

SEQ ID NO: 532945 - DNA, 411 bp, Homo sapiens
tatattgacccgactaaattatctctcattcacaaagtgttgtctttcatcaactgcctgacgaatgatgatttttgagaattaccaatagtctgggaattctgctgcttacctgggagaaaggggtctctgtctaagaagcagtgaacaatatttggatggatctggaattagtatcackcccttgctaggaagaagcaaatctgtggctctttcctgcaatcccccaaaaaaaaaaaaagtttttttaagaaaatagtttcattgatatgcaatttatataccacaatgttcacctatttaaaatgtacaatttagtcaatggttttaatatatctacagagttttacagaggaaggaattcaaaggcttcaggaagagtggagttgtcatttaagacctactcaccca

SEQ ID NO: 532946 - DNA, 462 bp, Homo sapiens
ctcgttgcccaggctggagtgcaatggtgtaatcttggttcaccacaacctctgcctctcaggttcaagtgattctcctgtctcagcctcccaagtagctaggattacaggcatgtgccaccacgccctgctaattttgtatttttagtagagacggatggggtttcaccatgttggtcaagctggtctcgaactcctgacctcaggtgatctgcccctattagcctcccaaagtgctgggattacagtcatgagccaccgcacctggccccaaacttttttttttttaagcaaagaaattgtttcctggataacctcacataaagcatcccagtatgtaaagcagataatagtgttggaagtgacaacctggaattctgtccatggggactcttctccttgtmctcccacacacagaaacccttcagcttatgcttccaacgtcagtgtccaaagaaactt

SEQ ID NO: 532947 - DNA, 583 bp, Homo sapiens
gaagccctaatcacacatgttgctctatatgtatttatttagttctttgatttcatttccatctcttttcctaggctctatgagggcaagggccacgcctgattttgcattcaatatatccacagagcacagtatatagttgaggcttgataggtatttattgaatgaatgaaagatcaaatgaatgaatgagtagtcaaacccagagactaggacttgaccaacaggaaagactccttagaattagtcacttccaagcacgaagccatggagacacctgtcattgtaatgaaaatcaagcactcggataaaaagcttgtcttgttctctcaacatgtgccratttcttcatctgaaaacaactctcattgttcaggcacaaatgcttccctctcctcgagttagtgaccacccccattcctcccttccagagcacagactccagaatctgttacagtaactcttcagaactgcatgttttaaccaaccttgtctcaacattctcatctggaaacagggtgcatgtggcttgcttggcaggagatgtggcctacaaagtgatgaatccatagcctggtgccca

SEQ ID NO: 532948 - DNA, 583 bp, Homo sapiens
gaagccctaatcacacatgttgctctatatgtatttatttagttctttgatttcatttccatctcttttcctaggctctatgagggcaagggccacgcctgattttgcattcaatatatccacagagcacagtatatagttgaggcttgataggtatttattgaatgaatgaaagatcaaatgaatgaatgagtagtcaaacccagagactaggacttgaccaacaggaaagactccttagaattagtcacttccaagcacgaagccatggagacacctgtcattgtaatgaaaatcaagcactcggataaaaagcttgtcttgttctctcaacatgtgccgatttcttcatctgaaaacaactctcattgttcaggcacaaatgcttccctctcctcgagttagtgaccacccccattcctcccttccagagcacagactccagaatctgttacartaactcttcagaactgcatgttttaaccaaccttgtctcaacattctcatctggaaacagggtgcatgtggcttgcttggcaggagatgtggcctacaaagtgatgaatccatagcctggtgccca

SEQ ID NO: 532949 - DNA, 583 bp, Homo sapiens
gaagccctaatcacacatgttgctctatatgtatttatttagttctttgatttcatttccatctcttttcctaggctctatgagggcaagggccacgcctgattttgcattcaatatatccacagagcacagtatatagttgaggcttgataggtatttattgaatgaatgaaagatcaaatgaatgaatgagtagtcaaacccagagactaggacttgaccaacaggaaagactccttagaattagtcacttccaagcacgaagccatggagacacctgtcattgtaatgaaaatcaagcactcggataaaaagcttgtcttgttctctcaacatgtgccgatttcttcatctgaaaacaactctcattgttcaggcacaaatgcttccctctcctcgagttagtgaccacccccattcctcccttccagagcacagactccagaatctgttacagtaactcttcagaactgcrtgttttaaccaaccttgtctcaacattctcatctggaaacagggtgcatgtggcttgcttggcaggagatgtggcctacaaagtgatgaatccatagcctggtgccca

SEQ ID NO: 532950 - DNA, 606 bp, Homo sapiens
tgttcagaacatttagacatcaaagaaaaacacaatgaagcacagctttcaaaataactacttaaggatgataaagattgtcactgttaatgatgacccaacggtgtttattaatattgcttatgcctgtggctcttagactgtgtgtcaagrcacccagggttgctgcagtaaacatccaagaatatgacaggctttttttttttttttgagacggagtcttactctgtcatccaggctggagtgcagtggcatgaccttggctcactgcaacctatgcctcctgaactcaagtgatcctcccatctcagcctcctgagtacctgggactataggcacatgccaccacatctggcttttttttttttttttttttttttttttttttttttttttttaggtagagacaaggttttgtcatgttacccaggctggtctcaaactcgtgagctcaagcgatctggctgccttgacctcccaaagtgctgggattacaggcatgagccactgtgcccaaccaacagaatattttaaaattttgaaggaaatacaaagctacttaacatctgtcagacactcagtgaactaatagctgagcagaattca

SEQ ID NO: 532951 - DNA, 507 bp, Homo sapiens
tttgctttctggccagcaaacattgccaagaagggttgaaaggtcagcataatcagcccccaaacacaatcccttcccccttctggcctttgcagaygggccacagtgctccacggattcttttggaggtttgattataacaaaatgttgctctagctgcggctttgcacaaaccctgccaggagacggaagccagagggatacgcccagtgggaaggaggcagggtttctagggctttggtcctctgtgattttgttctgtgctaaaaacagctttgcaggtccccacaacttgcttttctcagaaatagttcccaatgcaatggaccacagagacatcagaccttggttcccttggcgtttctttaggagagaccgcaggagaaagagatgtcagggcagtttctccatctcgccactattgacattttgggctagtctctcttgtggtgggctgtactgtgcgttttagatttaacatcatcccggccatcacctacaagatgc

SEQ ID NO: 532952 - DNA, 402 bp, Homo sapiens
tggtgacatgtccttgctctgagaaatcacagcactgcactctcacatcgacgaaaacaagtatcacatcacagcacagttatttgggggatcgctgtctcttgacctggactcagcattctctgttttgcttgctattgaatacctagcccagtacttggcacctagcatagtgcctcacacagaaaaatagttgctcaataaatgtttgttgagagatatatgattaaataacagaatggaattacacaatgggtaaaatgttgaatcactgctttttttaactgaagtttaaattctctcttgggcttgaaatgataggatttcatgcatccctttaaaaagttagtagactatgacccaggaatgaacmgaaaagactaggctttgccatcctctgga

SEQ ID NO: 532953 - DNA, 455 bp, Homo sapiens
tgtgtatcattttgtattccgcacattatctggggggcttttaaagggctattttaattctttgaagccttgttctccttagttcttacaggtaattcagttattacatgtagatcaacaattggcacaatgtatggaaaataagctgtgacttccyaagtaagagagggcctggatgaatttctttacatctagtttaaagatatgtttgttcccatacaaaattgtgcacagccgtgacactgcagcattttaatatcagaaaaataaggctggtgttcagtgatggttttttttctctcaggtttttaggtgtgcttattcaaatctcattacattgaggatattttcttttaacctttggggtatgattgggtgatcacctcaaatggtgttccttatgctctcttttaattatgtttatctgtgcttttaactaaccttaaaaaaagatt

SEQ ID NO: 532954 - DNA, 572 bp, Homo sapiens
ctgctagggggccctgtctgtcttcccttgtcttcctgagacagaacatggttcaggctcttaaccgttcagtcttccaaatcctgagtggctcgcttttgtttgtttgaagttttcaacatcctttagccaaactctctaaaatcactgcatcgcatgaaaaaaataaactcacaaaagcatccgctgggtgtgacgtggatgccccaagttcttcaccttctggctcccagggagttttaatggtggtccttaaaggatgcgtgcaggaaaggatttcagacggaattaccatgaaacaatttctctgcatggatattcaagrgatgatgagggtgagtttactattcagtgctgattaaaacacacaagtgaaagacaatcccaagtacagccacctcatctcgtaaataaaacccaaatgcaaggctgttaatttcctcccggaatctcagtctctctctctctctctctctctctctctctctctctctcctccagtattttcctcagctccccttggcgccccacccacccacacatccaagctgcccttgggtaaaccccatgct

SEQ ID NO: 532955 - DNA, 572 bp, Homo sapiens
ctgctagggggccctgtctgtcttcccttgtcttcctgagacagaacatggttcaggctcttaaccgttcagtcttccaaatcctgagtggctcgcttttgtttgtttgaagttttcaacatcctttagccaaactctctaaaatcactgcatcgcatgaaaaaaataaactcacaaaagcatccgctgggtgtgacgtggatgccccaagttcttcaccttctggctcccagggagttttaatggtggtccttaaaggatgcgtgcaggaaaggatttcagacggaattaccatgaaacaatttctctgcatggatattcaagagrtgatgagggtgagtttactattcagtgctgattaaaacacacaagtgaaagacaatcccaagtacagccacctcatctcgtaaataaaacccaaatgcaaggctgttaatttcctcccggaatctcagtctctctctctctctctctctctctctctctctctctctcctccagtattttcctcagctccccttggcgccccacccacccacacatccaagctgcccttgggtaaaccccatgct

SEQ ID NO: 532956 - DNA, 597 bp, Homo sapiens
ggttgcaaaggcaaattcacatcacgaggagaaccaggaaattgaatctaaattcatattcttaaaaataaaaatctcactttttgacacatggtaaakaacacagcagtcaaacaaaaggggttgctaggtaagatcttggtttggttatttgttctcagtgtactcctttaattggttcatgcaacatttcctgtaggaaaaaatattttttgatgtttctagataataacctaagatgttcaagtttattggtgaaaatagccacatttgaaatgcgtcaagttcagtacacttgtattatcaagatttccctttcctacttcctagagttccatttcatcactctttagggtcagactgagaagaaccaactcatattagtgggctcttctcatggggattctggccagcccagaagaaaatacttctggacccttccaggccaatttagacaactcgggaggtccagataaacatcttcatttgaatttttgtctccactgcttctcaagtatggcttgcctgatctttactcatctaatccaaaataataattttgcccttttaaggacattgcagggcataatataatat

SEQ ID NO: 532957 - DNA, 512 bp, Homo sapiens
tgggtcaataaagggcggggagaaaaatgaaatgggtttcctatcatttttcacaaagtttgaaaaacagagttggcaaggaagaaaaaaataaaacaggaagctggattgcacatataaattaaatattttcaccctaaccctttttagatagcccaggggtattaaaaacgtgtgtgttttggatggcctcagcaagcattccaacagtaaatggcttcctgttcagcatgttcgaagtcaggctgttttttggggttggtttaaaaatatgtgtgaaatatgtacttttattttaagccaagtcaaatgttttcaatcatccccccttacttgctgcttctgtcttcccatcctattatttcttgcccctcagacagtaaaatatacccccaaacatgtttttttttccaaaaggaagtttagtgattaattgtgagttacatgtaaacrtatattattgccctcaaaggtattcaccaagaacctggccagtgtcattcctggctggc

SEQ ID NO: 532958 - DNA, 273 bp, Homo sapiens
ttaaattacacagaaaaattgtgaccagatttgtatattaaaaatcagtaatatgggtcatgtgtgtaatataatatttgtttctgctgtgggagagtcaagcaggactcagtcttctgtatctagatctgtaaagggctccaataatgagagaaggagcagctgtcactggtcctactctgttgttaaatatatctatgggtgctaaggactrcttgaatgaataacctcaggtgttaagaatttgctagatggatttatgtttctgagctg

SEQ ID NO: 532959 - DNA, 480 bp, Homo sapiens
agtcacccattctcctggagctgttgtggtccaaaaatcagtcccagtgagcagtatccccaggcagtgttcccaggtttcttcccctccagcccagcttctgtgtcttycctccatccactctcagtgccttgcctctgaggatctgttagaagcatgccagttatctgggtccctctgtgggagctgttccacctggctgtgtctattgggctatgtctagccagctatattgcattcccccacttgcccccatatctgtatgtcttcttttgagaaatgtctatttagatcctttgccctgtattttaatcaaattattagattttttcctatagagttgtttgagctccttatatattctggttattaatcccttgccagatggtgtttggtagatcagctttcatgaaacaaaccttctcttcctctttgctaagctacctgtcttcctgaaatcctcggcctgagtagtgacac

SEQ ID NO: 532960 - DNA, 552 bp, Homo sapiens
ctggcctcctgcctgccggtctgatttgacaagcatgttcccacctcaaggccttagcctctgctgcttccaatgcctggaatgctstaccagacattgcaagtctccgttgctcacgacctgtaggtttcctcaaatgtcacctcctcccagagccctgactactctctatcaattgcaccaccatcactgcctgtcccttgcctgtctaatttgtgttcatagccctgcttatatacgtattatatttccttctttgtactactatttctaccactaggacatctacttcatgagagcagggacattgtcttcgtcactgctagatccccaaggtctaggacagtgtatgccacttaggaggtgcttaatccttattcctggctggctggctggatggatatgtaagtgaatgaatttgttgggcacccagtgtatgccaggctctctgcttgggactccagacatgagaacacctaccccagtgagtcctcggaagcgaacctccccagagctgagcagcccccgggtgctacatggtttctcccgcag

SEQ ID NO: 532961 - DNA, 415 bp, Homo sapiens
gggtgtggggaagagcaacccccttccctgcctgtcttgtactatggcccacaggcggcaggctggggccaggtggggcggggctcrgtgtgcaggagcagaaaggctgctctgtgtcatcacagaggacattccagttgtgcaggaaggacatatccacaggcctgccaccttgtgacttttatttctgcagtgtcagccttcacagagtcagcatgatgaggtggaaacaacaggggcattggagggaggcagatctgaacttgaatcctggcacttctgccctgggctatggggctgggccggtggctttttctgtagtctctgtttcctgatctgtaaaaggaggaagatgcattataccttctgaggctgctgtgagaacccagtgccatgatgcactgaggagcccagt

SEQ ID NO: 532962 - DNA, 589 bp, Homo sapiens
ctttttctaattgagcatgcaaatacattagtttaagcatttcaaaggtattccattttcctaaataagggcaagagatggtgccrtaagtatggatcacgagtctagctggagtttctaaaggcgcatctctccttaaggaacacttggtattagatggcagattgcctgctatttgtattctcctcttaagggaccaaaggttgaaagggaaagatatttttaatcatgtgtactgcttatgggaatggcttcccccaggggtcacccttgggttggttcttccctcttacgtgccttggtaaaaccccggaattctgggcatttaaagcactgggagatcagccccttatgtatgcccatcaatttaagcaaatttctctgcatgttcttctttggggactccttatgggaccatttctcatcataagcaataaactctgacactcctatgagaccttagtcacctaaggtgtcttttggccagaaggatctgtgtctctcatatttgtgacttatcatgtcctcataaacttcttctataaatttttctattctttctttttatgaaagaagaatctaaatgtgg

SEQ ID NO: 532963 - DNA, 564 bp, Homo sapiens
aattagaaatcagacccaagatcaagcccaagactagaagcacaatacccagtttcagttaagtgagaagccaccatcggaaaacaaggcaagaagccagaagccaaggagaagaatagagagtgcaagaaagagtgacggattcgcaacacagacagcaacataagcaacaatgacaaggctcactcatggtgggatgaatggcatggaggcagttttgccagtttagaatacaggattgggccagacttatatttccgtgctctgcatgtctgcaagcagaaaccatgacataagccatgtcaatgcgatgtggtcttctgctasagtggcaaacacaagtgtgatgtggaatcacagagacagagctgtcagaggattcttggggaagatgagacttagactaagtttcaaaggagagctaagtgagaaacaaaagaagatatattctaggaagaggaacagtgcaggcaaagacctctgccttggttgtaaagccggtcagagaagccaacggtgtgggggaagcttttggagatagggctgggattgattatgttgctg

SEQ ID NO: 532964 - DNA, 629 bp, Homo sapiens
ctattgtccttctccataccataggcctggagctggtccagagctggctcagcatgtaaattcctccccacctagcattgctggcctctttgaagggagtgagggctctgtccaagggagctttctgtcatgggctagtcatgggtaaagggcaccaagaccttgtctacctagtgtcagatgagtggctgggagtggaggatgtcgcttgactgatccttggtggagagggcttctggcttcatggaaggtttgtctcactatcatttaaggaacttaatgataktagcttttctcctatctttaataaaactaagtgtagtaaaaaaaaatggataaatggataagtggatggataaatcctaagaaatcggaataaaacattataacaagaaaaagagagatgaatcctgctctggaccctagagaaagcaggaacagtgggaggactgggaaagtccaggagaatttggcgacatggacctcgcctctctgtgagcacacaggtttatgtttggtgaaaaatattttgaatgggatgccaggtattttcacttagattaagctccagcttctagaaccttctgtacttctcatccccttcagttttctttgaaccttaatagaga

SEQ ID NO: 532965 - DNA, 597 bp, Homo sapiens
tgtctcaaaaaaaaaaaaaaaaagaaagaaagaaagaaagggaaaatgaagacagcacaaagtaagaaaacaaggaagaytcggagctgatctcatacctcgctgcatttcctaaaaccagacccagagttacagataaaaagcaaagatgagcagaactttcactgtgttccttcttgcctgagtcaacctacacgtgataggccttatcaatcaagctcccatttggtagaatgacttccctctgctcccacgacttactcttcccaccagagctcatctgacacatttgcttctgagtgtttaggaagccccttgtttctgaggatgaaggatagcaagtctcgtgggacaggtaggaggcatgctccagaacccaggatgaacgccgtgcctattttaaaagacaattacaatacatatagtgttcacgtcagtcatcccggtgttttatttattgtatctggaagcagatggtcttcaaagtgtttaaacacatttgaacatgcaagatccattatttattgcatgagatagtgaatagaggcagaggcgtggggccattagcaggtacagaaggctgggaacgccaaaagg

SEQ ID NO: 532966 - DNA, 597 bp, Homo sapiens
tgtctcaaaaaaaaaaaaaaaaagaaagaaagaaagaaagggaaaatgaagacagcacaaagtaagaaaacaaggaagattcggagctgatctcatacctcgctgcatttcctaaaaccagacccagagttacagataaaaagcaaagatgagcagaactttcactgtgttccttcttgcctgagtcaacctacacgygataggccttatcaatcaagctcccatttggtagaatgacttccctctgctcccacgacttactcttcccaccagagctcatctgacacatttgcttctgagtgtttaggaagccccttgtttctgaggatgaaggatagcaagtctcgtgggacaggtaggaggcatgctccagaacccaggatgaacgccgtgcctattttaaaagacaattacaatacatatagtgttcacgtcagtcatcccggtgttttatttattgtatctggaagcagatggtcttcaaagtgtttaaacacatttgaacatgcaagatccattatttattgcatgagatagtgaatagaggcagaggcgtggggccattagcaggtacagaaggctgggaacgccaaaagg

SEQ ID NO: 532967 - DNA, 470 bp, Homo sapiens
gagttacagataaaaagcaaagatgagcagaactttcactgtgttccttcttgcctgagtcaacctacacgtgataggccttatcaatcaagctcccatttggtagaatgacttccctctgctcccacgacttactcttcccaccagagctcatctgacacatttgcttctgagtgtttaggaagccccttgtttctgaggatgaaggatagcaagtctcgtgggacaggtaggagkcatgctccagaacccaggatgaacgccgtgcctattttaaaagacaattacaatacatatagtgttcacgtcagtcatcccggtgttttatttattgtatctggaagcagatggtcttcaaagtgtttaaacacatttgaacatgcaagatccattatttattgcatgagatagtgaatagaggcagaggcgtggggccattagcaggtacagaaggctgggaacgccaaaag

SEQ ID NO: 532968 - DNA, 634 bp, Homo sapiens
tagtcaagtacttcattatctcccctctctgcacattttgctccaggtaataaatgcccaaacaagagagccttctgctgcactgtctgtgaagttccagggtctgggccaattctgcagataggctccgtgccctgggagggcaccacttttcatccctcgcctgcagtgccccccaatctccgtttagtcacagcggttcgctaaccgtgagccgctgataaccggccgrctggggagcccgggagcccttgcggaggcgtgggctggctcgggtgcgcaggcctggcccagcgggggcgccgggagagccggcccaattatgatgttgggagggatgttgtgatcctcggaggcggctctcgctaacaggcaggggcctgggggtcccgaggcaaggccggtctcacaatggacaggcaaaaatgtagatctctaggtttggtgggcaaagccacagggaggaatttttaaaacataatcaagtggccacccttgaaaagtcaggtcaggctaaatcacgatgtgaactgtgtggccctatccccttgctagtagatggcccgaaataagaggctccttcagcttcagaagtaagatccaggttgagccctccaaatgcaaacacattttc

SEQ ID NO: 532969 - DNA, 627 bp, Homo sapiens
tccataaaagaccccagaagcaaatgctgtattaatttgctcactatttcagaccatatacccactcaatcttttaaagctcagattttctcaggaatgggtagctttaggacaaattaaacatgaaacatttgagaaattgacttgttggcatctaagattagcaaattaattttcaagagcaaatggtacttactgcaacygaacaaaaaatgtgggggaagatgggtagaaagctaaagtaaggaaatattcttggtagattccattttcaatccttttcacataagcattttattcaaagtatatttgtaaaggacaaagtcaaatgtaaatgtctgcatgataaatccatgaacaccaaaaatgaaaacacagaggcaaaattaacttgaccacctgccccaaaaagtgaatataattgaatgatttacatatgaaaatatgttttttcagaggttaggttttgtttttctcttaatgcatacatacaaaattctttcgatgaatcacaagttgaattctacatgtcattctttaattcagaatacatggtattaaccatcacaaataaatctactccgctgtaaggatagccatttaaagctcaataggctttccagctca

SEQ ID NO: 532970 - DNA, 657 bp, Homo sapiens
agatgaacatggaatcactgggcgatcacttacctcatggtttatttcctgaagggcttgactcttataagatccaagatgtcacgttaatttttaaaaatgtattctcagtagtcatattgattctgttgttgtttttctggaaagcattaatagcagaaaggccacatgagttcagtggtcacccagaccatttgagccccaaaccttgcttaatcttsaatggcctgagaaaggttagaggtatttgactattttcttaaaaataaaatacctgagttattgataaatacaaaaaaaatggagtgaaggggaagaatgaccaaccgtaaattggaacttatttacttatttcctagcattactcattttaggataatgcctatttgtgtaaacagagttgaagaacatgaggatattcttcctgctactatatccaggtcaatgtgtgatgctccctttgctcatcatatttgtttaaaagattggaagattattccaacaaattgacctagagacccctttttcacagcccaagatacttgtaaaactctccttttaaaatatccctacaagatctcatttgacataacattagtgttaggttgagtgggagctcaggtctttccatgatggttgtgtgtgctgggtgagtta

SEQ ID NO: 532971 - DNA, 436 bp, Homo sapiens
aaaggaagcttgttgtgacaaggtttttggcccatgttcactaaaggatgatgttttcagaggaaaaaaaaaacttttttgcatgaatttccattctcttaaattttgcaaatacgtcctctgaagtkggtgcaccacacctgctgacaggagccaaccatgttccctggcaggatgaggtgaatgcaagcagcaaggcttgagccatggtgcgctttcagcaccagggccgtgggctcacagacgctttcctcactgccaccatccaggaatttacattctagacaaccctttcttatgccctagagctgtgtatctttggatgccttggcttaaattcaaatatcccttaaggcatcatgaaacctagaatatatatagtcctgaaagactatttatccaagagtctataggtaattacaaaattgtttataaa

SEQ ID NO: 532972 - DNA, 597 bp, Homo sapiens
ctgcgtgacaaagaatgatgcttgacttctgggatcatttgagttgcaagtcgcattagtcactattcttcacagaacatcattggtacttggaagaatgactgacagcagatsatggttattctgatttggttacttggcagaaacttttcaaaaagtcaaccaaataaatctgtcaggtcaaggtaaacaactggcaatatttgttgccaatgataaaattcaagaaaagcaggaaatacactaaacaaattggacttcagaacaaacagaaatgcctctacttgtgaagaccataaatttcagtagcaaaatttcgtaccagaagctttcttactaaaggtagacctgcccaaagcatatgcattaacccagaacattttgcagtttgctctgctgttagcaagatgttcccctcactacaggtgacatgagcaaggagtccccagttttctgggcctattcagaggcccatttggtgtggctaaggatgcatccaacagagcttggcagaaccttccctgcttctagccagagacgcttcgacaggtaaccctcctcaaagctgagctcagccctggcctattgaaaacaaaa

SEQ ID NO: 532973 - DNA, 487 bp, Homo sapiens
tctcttaattaaaaattcctggctgagaaacagacaaaagcactcgagatgtgcatagaatgccttgacctccacaaactggcaccaacctacatttccaccactctacacacccatcattgttcctctgttccagccatataagacagcttagttggggtctctttggatttactcagaccagcagacataataacagttaccctctggcttccccactgtctattatatacactttttcctaatatgtagtgtccgatttgtaataatttcaacttcatgatatctcttattcataatgtccttctctacctcatttctcctggtgcacacatcttctcagcttcactttccaaacctaactgccgattttcttcatttcaggatgcaattttttaggaatgagactccarccaacccagttcttccctatttgtgcaaagctttccaggtcaggacccaggccagccataggttggctgctttt

SEQ ID NO: 532974 - DNA, 549 bp, Homo sapiens
ttgcagacagcagatcgtgggacttctcagtctccataattgcatgagccaattccttgtaaacctcatgtgatggatagatagatagatagatagatagatagatagatagatmgatctatagagcatatcctatttgttctgtttctctgcagaatcatgataaatataccttttctttgccttttttcctctgctaatgttctgatcactaacaaaacacaactcttgtcatgggtatttgtttaatagcaggcatttgtggtttactgcccactatccacacctgttccttctggttacagagccgagttttcagttcagaagtttggatggtgttgtcccagttccaaccaatagaccatgatagtcttactttagtccagattggccatctgcctggcaagatgatttcttcaaggataacataaacccagccaaagaaaagttaccactcttcttttggacttggtagtgggaggacaagaggcagaggggtgtaggttgcttcagccttcttggcctatgaaaggagtcactgagtgaagg

SEQ ID NO: 532975 - DNA, 547 bp, Homo sapiens
atcacatgccacagttttgtgctgtgggacttgaccatttgatcaaaccactgtaaaggaggtatgccatgtggtttctagcctaatctgacaaggtagaggtcaatgtggcctcagtcatagtttgcctaccctggggacaacatgaacctagtgattagtgagaggaacctatgtttttgtactttgaaggggatgagggtgtaagctaccaccttgaagattctgcctgatgacgcagaatttttagaaatctttcagactgattaatgaaccaagctcactcatgcttcctggtcagtcaccttagtgagcaaaagttctcttccaaaattaaaaaatgtcattcccgatagcgatcrccgaaaagcttttaagagctaatacaataatatagaattatgtcaaaaatcttctcatctgaagttgttaaattttaaaatcaatcccaacatttgccaagcaaaagtgggatagatttgacaataagatatttaaattactttatatcaaaccaaaaaacagtaataattccacaaatgagaaa

SEQ ID NO: 532976 - DNA, 547 bp, Homo sapiens
atcacatgccacagttttgtgctgtgggacttgaccatttgatcaaaccactgtaaaggaggtatgccatgtggtttctagcctaatctgacaaggtagaggtcaatgtggcctcagtcatagtttgcctaccctggggacaacatgaacctagtgattagtgagaggaacctatgtttttgtactttgaaggggatgagggtgtaagctaccaccttgaagattctgcctgatgacgcagaatttttagaaatctttcagactgattaatgaaccaagctcactcatgcttcctggtcagtcaccttagtgagcaaaagttctcttccaaaattaaaaaatgtcattcccgatagcgatcgccgaaaagcttttaagagctaatacaataatatagaattatgtcaaaaatcttctcatctgaagttgttaaattttaaaatcaatcccaacatttgccaagcaaaagtgggatagatttgacaataagatatttaaattactttatatcaaaccaaaaaayagtaataattccacaaatgagaaa

SEQ ID NO: 532977 - DNA, 566 bp, Homo sapiens
cagctgctgtgtcagaaagttgcttaatatttctaccatatgaggagtttatacatgtcaataagaaaaacactacgataccaataattaagttaaggataggaatgattttacaaaaaasaaagtttagcaacagtaagcataacaattattaatctcaaaaattatcaaagaaatttaaattaaaaatattagccattttccctcatcacatacctattttttaaataataacttagtaagggttttctaaaacaggtgatgtcacatatttttggcatgaaaatgtcttatagcagctttggaaagaacttcagcaaaaattatcaaggatctaggaattttatttctgagaatttatcccaaggaaaaaacttaaaattgggaaggtggacttctatgcatacatgtttactaaagtgttctttgaggaagagacagattgcataatttaaatttttttgtgtgattactaaaaaattaagaatagttaacacttttgacacttacactgtccctgaaactgtcctaaaagtttatgtgattgaatcgtttactgtcataaa

SEQ ID NO: 532978 - DNA, 566 bp, Homo sapiens
cagctgctgtgtcagaaagttgcttaatatttctaccatatgaggagtttatacatgtcaataagaaaaacactacgataccaataattaagttaaggataggaatgattttacaaaaaacaaagtttagcaacagtaagcataacaattattaatctcaaaaattatcaaagaaatttaaattaaaaatattagccattttccctcatcacatacctattttttaaataataacttagtaagggttttctaaaacaggtgatgtcacatatttttggcatgaaaatgtcttatagcagctttggaaagaacttcagcaaaaattatcaaggatctaggaattttatttctgagaatttatcccaaggaaaaaacttaaaattgggaaggyggacttctatgcatacatgtttactaaagtgttctttgaggaagagacagattgcataatttaaatttttttgtgtgattactaaaaaattaagaatagttaacacttttgacacttacactgtccctgaaactgtcctaaaagtttatgtgattgaatcgtttactgtcataaa

SEQ ID NO: 532979 - DNA, 566 bp, Homo sapiens
cagctgctgtgtcagaaagttgcttaatatttctaccatatgaggagtttatacatgtcaataagaaaaacactacgataccaataattaagttaaggataggaatgattttacaaaaaacaaagtttagcaacagtaagcataacaattattaatctcaaaaattatcaaagaaatttaaattaaaaatattagccattttccctcatcacatacctattttttaaataataacttagtaagggttttctaaaacaggtgatgtcacatatttttggcatgaaaatgtcttatagcagctttggaaagaacttcagcaaaaattatcaaggatctaggaattttatttctgagaatttatcccaaggaaaaaacttaaaattgggaaggtggacttctatscatacatgtttactaaagtgttctttgaggaagagacagattgcataatttaaatttttttgtgtgattactaaaaaattaagaatagttaacacttttgacacttacactgtccctgaaactgtcctaaaagtttatgtgattgaatcgtttactgtcataaa

SEQ ID NO: 532980 - DNA, 654 bp, Homo sapiens
tgcctgaagggcctgtgtttgatgcatgaactataggaggacctcagaaatgagtctaattatatcagtatctgaatgctttgcggaggcaagatgcattattcataagactgcacctctgtataaggaaaaaatagtccatcatatgtactgccactttttaarcagcactggtcaatttttatgtttattatgtttattatctgccttccgaacactggactgtcagttgctagaaggcaaagaaattttttctgtttcagttagtgatggagccataactactagaacaaagcctggtacgaagttggggatcaaggaataaataaatgaatattagcttttaatatttaccatgaaattaggttggttatagacaaaccatgtgtgtctaaactattctatccaatgtaatcaagtgagggaagcatcttcctcctaaactttgtattgaatatattattatcaggtagccaaacgtcaccaagaaagtgaagagaaaaaggcaatatactgtttgtggaaactgttgatctgaagagctccaaattcctgaaaaagagctgaatttgaagatgcccagcctggagtatgtgtatatttttagtgattactgcattaaaagaataataatgaaataaaattatatcaata

SEQ ID NO: 532981 - DNA, 654 bp, Homo sapiens
tgcctgaagggcctgtgtttgatgcatgaactataggaggacctcagaaatgagtctaattatatcagtatctgaatgctttgcggaggcaagatgcattattcataagactgcacctctgtataaggaaaaaatagtccatcatatgtactgccactttttaagcagcactggtcaatttttatgtttattatgtttattatctgccttccgaacactggactgtcagttgctagaaggcaaagaaattttttctgtttcagttagtgatggagccataactactagaacaaagcctggyacgaagttggggatcaaggaataaataaatgaatattagcttttaatatttaccatgaaattaggttggttatagacaaaccatgtgtgtctaaactattctatccaatgtaatcaagtgagggaagcatcttcctcctaaactttgtattgaatatattattatcaggtagccaaacgtcaccaagaaagtgaagagaaaaaggcaatatactgtttgtggaaactgttgatctgaagagctccaaattcctgaaaaagagctgaatttgaagatgcccagcctggagtatgtgtatatttttagtgattactgcattaaaagaataataatgaaataaaattatatcaata

SEQ ID NO: 532982 - DNA, 629 bp, Homo sapiens
gagcatcgaacaactgcgtcctacaggctgcagttccttccaatgactttggaaggattggctgtcctctgggaagtgcaatggtttctctcaagggtcagcaaacttttctacaaaaggccagatagtaaatactttaggttttgctgtccaaacgtagtctctgttaaatattcttgttttgtttcattttgttttttacaaccttttaaaacggtgaaaataattcttagtttgaaagctgtactaaagaggatatggggtagatttggcccacaaggaatggtttgccaaaccctgatttatctcctggtaacactggaaagccagctttttcgattcaattgtcttgatattagttatctatttctacataaagaattatccccaaacttagcagctgaaactaayatttgttattttacacttccatgagccagaaatctaggtgcaggtcacctgggtgcctctgcctctatgttgctccagaggtcagttgagttgatagtctgagctgctgtcccatatgaagatttgactagtggggaggatccacttccaagattactcatgtattttttttgtaggtcttggtctcttgacacattaaacctccataaggctgcctc

SEQ ID NO: 532983 - DNA, 487 bp, Homo sapiens
gaagattgacgacaaagccattagcaaagctatggtgaagttttccacattttggtaatgtaaggactattcaaggagattgttaactaggcaggtatttgaagagtttgtgttctaactccttttgtttcctctgatagaactggtagatatggatacatggcagtcttccctggggtcagcttgcttgccatttgaatttaawaagcctcagcttaccataaagtcctcatctgctaaataacaggttcttgttgccttttctgaaggttattatgaactttcatcttgggaagggcactgaccattcaaatacaaaccctccatacatgccctggggcagtgatttgtatgaactagtcctctctgtaaatttagaagctgtattgaagcccccaccactaaagagtttggtaatttaagtatgaaagtgaggtggctgaaagaccagggaagcaatggaatatgacttgaaaatgtgcctact

SEQ ID NO: 532984 - DNA, 619 bp, Homo sapiens
ctgcacacatatcaggatgctagtaagacctgacttaaacaccaatcctacgaaagtcttaggggtttcctctgactttgcactcctatgaacatgtaatgaaaagtggctgacaaaagcttgtgtaatcttaggcataagccaggacaaggtagataaaggtcccactgcattttagatatgttagatctagaccggagttaactggacaataaaatgaatctgttttgttttttaataaaagagaacaacaagttgagttcagaagtggaggtctttcatgtggtagagatttgtgaattttggtggctcagtatctactgtctcaattctctgtgtctctctctctcttttcttcttctttctcttgataacagcaccatattttcttatgtgtaggacatgagacaagtgtcccacaccagattttactgcacacactctttctctcttctactgttgctttccaatcagtgtctcctgrgcctggtttgctattcatatagatttactgggtggaaaatccggagtgctcataagctgcttcacttgtcagccactaagagccctctcagccaacaaaaatgcaggtggctgtgttctgaccaggtctgttgtt

SEQ ID NO: 532985 - DNA, 505 bp, Homo sapiens
aaatcatgtaaataaagctgtcagggcaatggatgacacataatggcagaataagtattaataattattattactgttagtaccattgttactgctattatttcccacttttattattattactattactgatatctcaccaattcacctctgggtccccataatgtttggcagtaaaatttataaaatcaacaatgctcactcttcattattgaagaaaatcaaaaggtagcatttcccttctgggagaaagcatcctcaaacattactgaatgttgaatctcacttaatgagtagaggaaaacagtctaagccttctgggcctgcagattggaggcaacaagtgccatgggaacctctctgtgcctgaaccaaggtcctgaggcacaacaatgtttcccactgggctgagatagcactaaagatgagctaaagttgatgctaatcaatttatagatttatttggcagtacaggtccatgrtctctttcccacaattgctgaaa

SEQ ID NO: 532986 - DNA, 599 bp, Homo sapiens
tatttcgtaaacagagtatataagtttatcttggttccctctctatccatctgtctcagcccatgttatgctgctataacagaataccacagactgggtaatttatttaaaaaacagaaatttattggctcatatttctggaaattcagaagactragagcatggcaccagcatgtagacagggatttcttctttcttcatcttatggcaggaagtggaaggtagaagttgaaagggcaagagagtgtgttcacaagacagaagggaaggcagctaaactgattattttatcaggaaccggctcccaagacaatggcattaatctgtacataaggccagagccctcatgccttaattctctcctaaaggtcccacttctcaccactgtagcattcgggactaagtttctaacacatgaactttgggagaaaaattcacactataaccctgtctgattattggtagagttctcaacagatctcgggcagaaggcttttgaatacatccagccctttatcaattgtagataattagaagtgatacacatctttaccaggcttaacgccttccttctgccaagcttacattcctaaacataa

SEQ ID NO: 532987 - DNA, 643 bp, Homo sapiens
ggtcaaatgcagaatatttcagtctgcaatttcccatttaattcttgtcctcgtttgattatcatattggactccatttcagcagcaactgagctgacactcgatcctctattaccaatgactgtgtagaaccatctgcttgaatgattttcaccatatgtgttttaaaaaagacaatgttttatacatgcttgctgtaggtaatatttgacaatcataaaagaagagcaaaatcagagtcagctgtaaaattgraaggaaaaattaaaatcctatacatatatttgaaatcccaagagttaatatcggtgtattttctataatttctaagtcaattcaagtacaatttgaagatattagtttccaaactgaaaagaaaaaattcatcacagatcatgatctgtggttaacattttaaataatttagattaacattttaaaaattgatcaagtcaattatgatttgagataattttttattttcagtttactgagaggattgttaaataatttccttggccatacagaatttagtttggcttcctccaaaatattttagtaacataaaaataaaggttatttaatttaaatcttttagcagatattgttctgtaactcaaatacaaataaattttctgatttc

SEQ ID NO: 532988 - DNA, 564 bp, Homo sapiens
aacttttgtataagttccaaacatttaacaggaratattttgttaaatatagaaagcaaaatgacaaaacagtaatgcttttctccttaaaagggtcgtataattaaatctgtaagaatagtcttatgcatatgattacctccatttcacgtttaaggaagcagagtcacataattgaaatgacttttcaaacatcacatatttcagcagtggtggagccagacgctaagcctctgttttctcattcaaagtccactgcttcctttaccatagcagttgttcttatgttgacaattaaggcttagcattatagacaatttcacaagcaataggaatattttatttcaaatagtgctagaaagataatagacataaaatcaaatgtgttaatcacttaaaccacaaaaagagaagcttgcgtttccagaagtatggaaaatgcaaacctgtcaatgtgcccccatttctatagaacatgtggtttagcaggattactgggagggaacatacacagtgacgacaaaaggagcttgcccttggaattttcctgtttatttgaattta

SEQ ID NO: 532989 - DNA, 580 bp, Homo sapiens
tgctctctctaaagaaggaataacataactcactgaaaaataatgctaaaacagtgtgtgataagtgccatgagagaggtatgcagaccactgagaaggggtccccagttcagtttatttatttgtttttttaggataatgagtattctsaaatgcttctatgcaccttttgagacgatcctgtgcattttgtcctttattgtattaatataatgcattacatgttattgattcttttatatgttcaaccaacattgtattcatggaataaatctcatttgatcgtgatgtataattctttttacatatagctggatttgtttttctagtattttgttggaaattttgagaacttttgcattcatattttattctgaagtgtttgatttttgtattaatttaaaaatgacctcataaaatgaaaaatgttctcttctattttttttggaagagtttgtgaaggagtagggctggtttctctttaaatgtttgggaaatttcaacagtgaggccatctggtcctgagcctttctctatgaatacttttctgttcctgattcagtttaagatggaggttgga

SEQ ID NO: 532990 - DNA, 553 bp, Homo sapiens
ctgctttcaatttacatcataaaagaaatgcatcatattcttctcagtgtcctggtagtgcattttcctttagtttttcagtgaattctgttgtaagtaaaatggataagattgttcattattttggattattttgctgaagatgaccagctctgagatgtgaggagtaaataagaaagtaacagtagaatctggaatatcttttaaaaattaagacatcatttttaacagcagagtagccttaaatgacctgattccacagaggagccaggaaacagtatgaaactacaaatttattttgtagaaatatggaaaccttaatactattaagatgtaaatcttaatactattaagatgcaaatcttaatastattaagatgcaaatcttaatagtatttttataaagtgaaaacaatatgatcacttaattactcaagtggagctgaagaaaatttcagagaaaaaaaaataaagcttggaatgcactttagaaaaacacaaaagggaacacaaatgcttcataacaaatctcttaggaggccaatattgaaag

SEQ ID NO: 532991 - DNA, 474 bp, Homo sapiens
ctaattttttttttttttttttttgagacggagcctctctttgtcacccaggctggagtacagtggtgcaatcttggctcactgcgacttccgcctgccaggttcaagtgattctcccacatcagcctcccaagtagccaggactacaggcatgtgtcaccacgactggctaattttttttttgcgtgtgtattttttgtagagacagggtttcactrtgttgaccaggctagtctgaaattcctgacctcaaatgatcgacccacctcagcttcccaaagtgctgggattacaggcattagccaccagtcctggtctaaattctttattatatacttaacgtattatattactattatacatttgtcacaactaagaaaccgcattggcgcataaccaattgcattttaattgtttacatgcgtgcccacgtccactaccaagaaaatgaaaactcacggacagacaactctg

SEQ ID NO: 532992 - DNA, 508 bp, Homo sapiens
tagcagtggtggcttaaagcaacaagcttaaacagttcttgaggttcttgaggttagttcttaaactgagttctgtcagttcttgaggttagacgtctgaaagcaaggtgcaggcaaggcaatgctgtctctgaaggcactagtgaagggcctttcctcgcctctcccagtttccgatggctctgtgtgttgcttgacttgtggcagcctcccaatctctggctttgtcttcacatcgccttttgcgtgttgtctccttttctctgttacagttccctctgcctctttcctgtaaagccacttgtcattggattcagggcccacccagataatccaagatgacctcaccatctcaagatcctttgcttaattacatctgcaaagactcttctcccaaataagctagcattcacaggttccagggaattgatagggagtctcttttggtgatgatcgggtcaccattcaasctgcttgagtaagcctgggaaatcatgcacgtatcatc

SEQ ID NO: 532993 - DNA, 517 bp, Homo sapiens
aaacaaaaaaattatcgattagcaatcccaaccacttatcacttaaactggataatttattacctaagtcaaaaagacacgtatcagtagagatgagctacagtgattattagcttcatactgtcctaccttgcctgcatgtctgcacttgtgacctgctgctctctttcttctgaatggagacaagaaagggaccatcagatgctggggttctgctggtagacagcgagcagagctatagtccctgactatgatggttgcttcactgctttagcttgtctcctgttactcttgctgcagcatggaaggctgcaataatactattcatttctaaatgcttgccagygaagatggagtgctcaaatcatctaatgggtggatttaagacagcgagaaggagaaggcttgttgccatttccaattttttctggttctttaagatggcatgagagggaaataattaatcttggatagattttagcaaaacgaaacacccatgttcctaatctttggtaaa

SEQ ID NO: 532994 - DNA, 612 bp, Homo sapiens
gtgtatttctacctgggtacctaaaggttgccgaagacaatcacataacttttctcactcttcttacatatctcaaatgggtatttctatttccatccagttctcttgtagcttcactttcttactgtttcagaaggccattgcacacctctatcttatcttccagtctctaaaacccattttcagcccactgccagttgatgaccgagtgataattcattgaagaaaaatagatgcaaccatgggtcaataatctcatcatctaactgcaaaaccaaacagctctatacctaactctgccttctctcttgttgcaatgcaaattgcatctttgttctcatgaggggtaacccttatacttttgctaggattccatcttttcttttgtcctgcaattttttgtttgtttgtttctctgttgtttcatcattttttcyctttctactggctaattcttaacattccaatactaataaatgtataaacaaatgctcctcctttcagccccttcagctaaagccatttccctgtttccattaagggaagaataactaactctacacatttttatcttctcatctttcatcatcttctcaactcacccctttaaca

SEQ ID NO: 532995 - DNA, 594 bp, Homo sapiens
acgagtctggactagaggagacaaactattttgtgaagctgtcaccctgtctgaacttctgaaagrcctttgactttggagtttcgtttctttccatgaccctatccatgtgactgccttaggttgtcacagaatgagtgattcaacatagagacttccaggaatctggactctctgagtatcatttacatagaaatacgtttaaaccctttagccacaagcattaccgggcctatcagtggatgaatggccctacccactgttaatcaatgagccaacgatgccctctgtgaatcggcccctaggttgtttgtttcttcactggaggttgagaccaattatctcaaaagctttccggtgccaaactcaaattttaatacatcaaattgttttaaacataacacacaacaagcagatttttagccaggtacactttgcctcttttgcacaccctgtgaaacctatcttctgcttgccattgataaactagagcctatggccataagatcccaagctgctactgcccttaagagctctctgactcagagacgccctgctgcactgctgagcaacatcatctagtaagtcccctct

SEQ ID NO: 532996 - DNA, 594 bp, Homo sapiens
acgagtctggactagaggagacaaactattttgtgaagctgtcaccctgtctgaacttctgaaagacctttgactttggagtttcgtttctttccatgaccctatccatgtgactgccttaggttgtcacagaatgagtgattcaacatagagacttccaggaatctggactctctgagtatcatttacatagaaatacgtttaaaccctttagccacaagcattaccgggcctatcagtggatgaatggccctacccactgttaatcaatgagccaacgatgccctctgtgaatcggcccctaggttgtttgtttcttcactggaggttgagaccaattatctcaaaagctttcyggtgccaaactcaaattttaatacatcaaattgttttaaacataacacacaacaagcagatttttagccaggtacactttgcctcttttgcacaccctgtgaaacctatcttctgcttgccattgataaactagagcctatggccataagatcccaagctgctactgcccttaagagctctctgactcagagacgccctgctgcactgctgagcaacatcatctagtaagtcccctct

SEQ ID NO: 532997 - DNA, 331 bp, Homo sapiens
gcccttaagagctctctgactcagagacgccctgctgcactgctgagcaacatcatctagtaagtcccctctcccattccctttcccctgggaattcacttgccctcctccttgactggtggcccctttgctgtgagcctcaggacagtcttatgccataggagactttcactatcattcaattctgcccaataaagcttgtcatgcattgctmtcatatccttctccttgatcggtcaggaaatcccttgaaccctataccctgctaccagggtttgtgttatagggcaacatgatctatcctggggagctgggaaaagctttcataaag

SEQ ID NO: 532998 - DNA, 601 bp, Homo sapiens
taagctgatctttgttctaggtttttggtagatatcctttattaggtttaggaattcccatagattcctaatttgataagagttttatttcttctattcccagcatgcgtgaatgcatgtagaatttgacatatgtatatttttctttgtctgtgagataatcatgccatttttctcagtctgttaatgtgatggattatattttttcraatgttaattctagcttgcattctggtcaagtaaccacacttgatcatcatgtattatgatttttgcatgtctttattgtcatgtaaacacatgcaaagatcataatacaaaataaaaactaatttttcttttatttacaaatcttgttttaattaggaattaaggatacatacctgcattgtaaaataaatgtaagggtaggctctctttataggtttctctgaattgtttttaaggtctgggcacacatgtttctataacccattttgcttaactactgtgcacctctcccatatttgggtatatgtttttaaattgttctttttaatggaggcgtaattatttactgatgggatatcaatcttgtcgatccacagtgtgagagatgaga

SEQ ID NO: 532999 - DNA, 532 bp, Homo sapiens
aactgggaagcgtgatctttgactcattcatccattacccaaactaatcagcactgcatagcttgggtgttcacagtgtgtcaccgcacaccagagccacacctctccatggctggaacagcttgccttgctggctcctgaagcatttagaggatgtttgttgactgggaagaaccagtgccttgactattacctaatgagctgtatccaccagtcatgtaactctccagtgtgagaatttggttgtgggctgatgttgtgtcttgggcaattactttggatttatctggagccacccctgttgacagtggctagcactcacacctaggattaaagtctacttattatcagagggcaaacacctgtcctcacagtgaacacaactacaattacagtcagggaytcatatctcattctctttcagcctctcaagtgcacaatttatttttggccttgctatttttctgtctgaattatttccctgctatccaggcactccagaacccaacattattctgttccatcccaccac

SEQ ID NO: 533000 - DNA, 630 bp, Homo sapiens
aactgggaagcgtgatctttgactcattcatccattacccaaactaatcagcactgcatagcttgggtgttcacagtgtgtcaccgcacaccagagccacacctctccatggctggaacagcttgccttgctggctcctgaagcatttagaggatgtttgttgactgggaagaaccagtgccttgactattacctaatgagctgtatccaccagtcatgtaactctccagtgtgagaatttggttgtgggctgatgttgtgtcttgggcaattactttggatttatctggagccacccctgttgacagtggctagcactcacacctaggattaaagtctacttattatcagagggcaaacacctgtcctcacagtgaacacaactacaattacagtcagggattcatatctcattctctttcagcctctcaagtgcacaatttatttttggccttgmtatttttctgtctgaattatttccctgctatccaggcactccagaacccaacattattctgttccatcccaccaccaccattattgtcatgtctgtaaatacaccatcgaaccataaaaattggcactacagacaagacaatgcacagaaggcttgtccaacataaaacagaa

SEQ ID NO: 533001 - DNA, 319 bp, Homo sapiens
tgcaagcaactgatgcaaatcaaccctagtacattccagagtgtttattgggagactaggtragttgaaggtgaatttctacttgtagcgtctataagtagagcatcttgtagcaggcccagatttcagggttgcttttgtttggtccatttctacacatggtgtttctatatttgctagagttatccctgcactgttataagagagacaacatgttaatagcctggagtatggaattagattgccagggtttgaattttaggatgaccaaccatgctggttgtgctgggactgaggagttctataaggatgcaggact

SEQ ID NO: 533002 - DNA, 545 bp, Homo sapiens
atcttaaaaaatcatctgagtgtaactgatggtctgattgttactcttttttgaaaaatcattgctggagatatattaaaattaaagactagctccgtgtatgtggttccttttatgctaaaaagattgatatttctgtattgtttgcatgtttttacaatgagcattttaatgtttttttttgagayggagttttgctcttgttgcccaggctggagtgcaatagcataatatcagttcaccgcaacctccgcctcccaagtttaagtgattcaccttcctcagcctcctgagtagctgggattacaggcatgcgccaccattcccggctaattttgtatttttagtagagacagggtttctccatgttggtcaggctggtctcgaactcccaacctcaggtgatccacccatcttggcctcccaaagtgctgggattacaggcgtgagccaccgcgtccagccttaaatcttatttaaatattttcttggaggaaaaagccacataaataatagctaaaaattgtatagtacttaatagttta

SEQ ID NO: 533003 - DNA, 654 bp, Homo sapiens
tacaaacatctgcatcagatgtaggttcgcccaactaagttaaactgatctttcctaagttatagctcaatcaaaatttaactataaattgtagctacattccttcaggctccattctttgctttcagctcagaaggaaagtaagctatttagttaacgtgattaattaggcaggcagaatctttttcctcctggctaagaayataggtggactattagaacctgttctaatgttttttgtccggccttcaccttaatttcttttacaatttgttgttattgtccgggtgcgatggctcatgcctgtaatcccagcactttgggaggctgaggtgagcccaccacgaggtcaagagatagagaccatcctggcccacatggtgtaaccccgtctctaccaaaaatacaaaaattagctgggcatggtggcgcacgcctgtagtcccagctacttgggaggctgaggcaggagaattgcttgaacccaggaggtggaggttgcaagctgagattgcgtcattgcactccagcctggcaacagagcaagactctgtctcaaaaaaaaatttaaattttaaaaatttatatcccagtgcataaagcaagctattcaataggtatgcagtagaaagaggataggactaggagtcaggg

SEQ ID NO: 533004 - DNA, 622 bp, Homo sapiens
ttcccacggctctttaagtaaaacccggtctttgccatggcctttcatattctagcccgtgcctacttctcctgagccaatgtcccggcctcccctccctagagcactaaactccagccactctgcctcctgttagttcctctcatgtgccaagcttctaggcacttgcttttccttcmtctgaaacactcttcatgcagctggctccatgtcttccttcaaaacagacaataggagaaaatgcaaaaacaatgcttaaaaagctagttattgaaattaaaaatggggctacattttgatatccacaaccacacactggtctatgcgcacttaaatcagtatttatcttggacttgctattgcttttctttatttgatggccttaagtgatgaacacatttgccctcagtgataaggaaataaaccaatataaattacaaaatctcagcctttaggatacacgtctttaagtccttaaacttaactctccctccaaataaactatatactattacacaaatagatgaacaaatacaaacatagagcacataactttaatctactcagggtacaatcatccattactgttggcctaattgtccacttccgagcacaccatctg

SEQ ID NO: 533005 - DNA, 543 bp, Homo sapiens
tagatctctacaatgttactccccagacccaaggcttctataccataggggaagggcatatgtacaccagcaagataattaaaggcactttccagaacaggcaagaatgctatgtgcataagagctataatttgtgcaataacatcaaggttggcttgttctttcactagggacagtacataaagtggaaaccaggaggaattcacgggactgggattaatcagacgttarcatggcagatcagcatcaaagatggagttacttttgtctccacaccctccactttgagaagctggggccaggactctacacatatttctgctttactagctggctccctatcgagtttttccaaaagcatgcaaaatgtagactgaacagcaggaaaaagaatgaccaggagactggctgctttctgctttgtttcctcttcctgccagcatcacccaagccacagtttttcacccagtaggggtaggttacagtttccaattttctacattcctagaaccttctcagtatccacaccagccagtcagcagc

SEQ ID NO: 533006 - DNA, 543 bp, Homo sapiens
tagatctctacaatgttactccccagacccaaggcttctataccataggggaagggcatatgtacaccagcaagataattaaaggcactttccagaacaggcaagaatgctatgtgcataagagctataatttgtgcaataacatcaaggttggcttgttctttcactagggacagtacataaagtggaaaccaggaggaattcacgggactgggattaatcagacgttagcatggcagatcagcatcaaagatggagttacttttgtctccacaccctccactttgagaagctggggccaggactctrcacatatttctgctttactagctggctccctatcgagtttttccaaaagcatgcaaaatgtagactgaacagcaggaaaaagaatgaccaggagactggctgctttctgctttgtttcctcttcctgccagcatcacccaagccacagtttttcacccagtaggggtaggttacagtttccaattttctacattcctagaaccttctcagtatccacaccagccagtcagcagc

SEQ ID NO: 533007 - DNA, 587 bp, Homo sapiens
tattcaagacacagttatttattcacttatacatggtttgctggtgttcatgcccattccaccaacaacttacctgcagtgtacttctgtgggactaaattttttggcttgtgttttgcttacttgctgcccagtctgtataccagcgttactgcatcctaccaaaacaaagctttgctgcattggtgttcagaaatatttcactaaataycttaaagttctaagagcccaaggcatttgttgactaatcattaggtcagatttcttattcctcttgtcctacttcccttcatgtttctggttaatgcttcttaaaattgctaaaaccttggcttttgagtctttactgcccatttagcttttaatattatgctcaccgactcttaggcaatccaacaaatttatccatatggctgcttctgacctcacaaccatctttgatatttctttttcctgctagccatcaagttacacataacagtggaaaacagcacttatccaaagtaacattgaaatatttctcttagaagacaagcaaatttttgtttattattgtgtagaaaccattcagtactggtattttttca

SEQ ID NO: 533008 - DNA, 587 bp, Homo sapiens
tattcaagacacagttatttattcacttatacatggtttgctggtgttcatgcccattccaccaacaacttacctgcagtgtacttctgtgggactaaattttttggcttgtgttttgcttacttgctgcccagtctgtataccagcgttactgcatcctaccaaaacaaagctttgctgcattggtgttcagaaatatttcactaaatatcttaaagttctaagagcccaasgcatttgttgactaatcattaggtcagatttcttattcctcttgtcctacttcccttcatgtttctggttaatgcttcttaaaattgctaaaaccttggcttttgagtctttactgcccatttagcttttaatattatgctcaccgactcttaggcaatccaacaaatttatccatatggctgcttctgacctcacaaccatctttgatatttctttttcctgctagccatcaagttacacataacagtggaaaacagcacttatccaaagtaacattgaaatatttctcttagaagacaagcaaatttttgtttattattgtgtagaaaccattcagtactggtattttttca

SEQ ID NO: 533009 - DNA, 573 bp, Homo sapiens
tgcatgcctgcttttcattgaagcatatgtatatttgtgtatatatgtgtttgtatggcttccaatagcatagtaataatttcaggggaggaaatagaaaagaaagcaagataaatgtattacatttttgtatttcctccttgcatttttttaaagataagactctgttgtaaaawataaactggcaatttgatcattacttgttattcatttgaactagttcagtcaacagataatggacagtgaacagagagacctcttttggtaagccatgtagtttttccaggggtgattgttatgctatgtgtatttagatagaagcttttccctgtgtaatcagcttgctgctgcccattttactgccaaacattccttctctatggtagcataatactgttaccaagggaacagcttatggccgacacatacagtagtgccacaaattaatttcacagttatcaggatataaggtgataacagtaacgtgagctactgtgaaattaccattgttcccacagagttagtgtaattattacttttgtggtaactaagcaaataattcacatcactact

SEQ ID NO: 533010 - DNA, 522 bp, Homo sapiens
tcaagaagtatccatgatttcttccctgtggcgtcaccaggtgctgtagtgcctggaggagttaaacgtggcactagcttttacagatgtcatcattgttatccacatgtaagaactctcttgattaaaactttgggcaaacagcaaatcagtaattaaactaagcattatgttattgtgcatgactttttaaaaaatttattgttcttttgtccatgaagtttaaacaagttttagtgaattttcagtgttcatgacatatggaaaagtttactgaattgtcaacttttttctcaaaacaacaatgtcgaagtcttaatcatagcctttatttgttcatcagtttctaatttttccccatttatgatttaactgcaactgagcattttactgaaatgtttttgttagtaattctgcttaattcraaaagaacacaaaggtgattacaaaagtacagtacaataagttaatactctttttcctcaattccaagacatcactgatttaaaaattgcttttgtg

SEQ ID NO: 533011 - DNA, 559 bp, Homo sapiens
ctgtgatgccagtgggatgcccccattagtgataccatccatgcctgggcaactctcctaaaccttggaagactggcccacaatgggtcttaggctcctgttttccctactatctatctgtaagtaataaacctgcttcatgcaacttgttgcatgtaagcatgttttgtctcaccagacccagacaagctggtaactgtgcacaatgagtctgcttcacagagctctctgcccaaccacatttaattcacccccactgtaaacaaatcatcccttctttcaactgatctctcttcttttatccacacwccatacatttgatacccaccacaacacaatatcataaaaggcagtatggtttaatggattctggatttaaatccagctctattattagctttgtgatcttgagaaagttatttaaatcctttgtgtcccagtttcctcatctaaattgctaattatagtctagacatcataccattatagggaggattaaataaataatatatgtggaacatttggaacagttcctgccattaatgagtgctcaataatg

SEQ ID NO: 533012 - DNA, 591 bp, Homo sapiens
ctggtttagcctattatggccttctgacttgaattaattgatcaaatarttaaacatttattaaattatgcagcatcctctatgtcccatgtcctgtgtaggggcttaggaaacaaggatgaggataaacaccctttccttgagaggctgaggagcattaaatgtgaaaaaacacctgcagaaaaataaaaataaaaaaactatcgttccacccactgcaaaaaagaagaaaaaaggctatcaagtgattgttttggagttgatacattattggtgattgaatttttatgagtgtgatgtgtagctacaaaaggcccagatacgtaaaaaaaaaattccaatatgaatcttcctgaggcctagacttggcttatatcttctctctggttcctaaattttatttaacaactttttctcagcctgttgaatttcccacatgaagaccccttcaatccacagttcaggctgtcaggagtctaatcttcctggaagacagtgacagccacaaattcaggttgaatcttttattcccccctacacagaccaatgccactggaaagaactatatttaccttaactcattggcaggga

SEQ ID NO: 533013 - DNA, 591 bp, Homo sapiens
ctggtttagcctattatggccttctgacttgaattaattgatcaaataattaaacatttattaaattatgcagcatcctctatgtcccatgtcctgtgtaggggcttaggaaacaaggatgaggataaacaccctttccttgagaggctgaggagcattaaatgtgaaaaaacacctgcagaaaaataaaaataaaaaaactatcgttccacccactgcaaaaaagaagaaaaaaggctatcaagtgattgttttggagttgatacattattggtgattgaatttttatgagtgtgatgtgtagctacaaaaggcccagatacgtaaaaaaaaaattccaatatgaatcttcctgaggcctagacttggcttatatsttctctctggttcctaaattttatttaacaactttttctcagcctgttgaatttcccacatgaagaccccttcaatccacagttcaggctgtcaggagtctaatcttcctggaagacagtgacagccacaaattcaggttgaatcttttattcccccctacacagaccaatgccactggaaagaactatatttaccttaactcattggcaggga

SEQ ID NO: 533014 - DNA, 557 bp, Homo sapiens
gcctgtctttggggatgaacaccaaaatgttaccttcaaagcatcagtagatgtactgggcctattggtctctacttctcttaaagaaaaagattcctttaattttagaatttttcaaaagtagaaaatgaaaagaaagttgaggcttttcctatcttcatttatttcttacctataattgttgggaggttgtataaccataggagacactacaccaataatctcagggatgggttatacttctctttagagcagttagaggaaagcaatttaccacccctctttgtcctctagtgtgctttggaaggacatagtgttaagggaattgctgattcctggcctatcttctatctggatgtcttgactagactgtagatccaaatgccarctactagaaccaaccctggctgtagttttgtgcatgtttttcctgaagggctgagatgttgtcttagttcatttcaaattccttttttgacaaccctactgcaaaccaaaaacaatgtgctgaaatttgtacttttagtaaatattattaattaaccttgataaaaatc

SEQ ID NO: 533015 - DNA, 471 bp, Homo sapiens
ctacacggtgacgacatttccatttctccccacctattctgaagccttcctctctcatacatggtttatgctccaatcccaccaaatcacacctggatcatgtactccacaaaccctgtgctcctgggtgtgctttcagtgcctggcaccacacagcaacacacacacagagatacacactcactcctgtgcccataaaagtcccatagacgctttttcatgatscatttcaaacactgcctagtcaaggatggcttctccccaactcaaccagttatgctctcacccactgaactccaggagtgtagcgatccaacaaatataactgagcacatggaccccgcaggcatccatggcacagagatggacaaacagggatcacaacattcgtaaactcactgactctcatcctgagattgtcctggcattgcaacccaccccaggatcctgccatcctgatcttcttgagac

SEQ ID NO: 533016 - DNA, 582 bp, Homo sapiens
tgtatatactagccaacgctctcagttcttagaccmccagttaaggcaggtacaggtctgcacatctggctcacttcattcctctgcctggaactttgtctgccttttctttaccatcaattcaaatacagaactgactttaaagcccattttaatccaaccttccatggcacctttggaacctactccaccccaaagggaagtgcctttgcttctaactcactgtctataataaccattgaaaattgcatacgtgctagtttatgtatagataatgctcttgcatcagggtttatattgcgttggctttttctaaccctgtttccactttagactgccaactaatatgaatttcctcaaaactctttgtattctagaaccccagaagtactaaggattaaataaataatgtcttcatcagtttatttcttctgaggaactacagctatattacctagcttacactattagtgtttcattcatttactgttcaacaaacatttattgagtacccgtgatgttctaggaactgcgctacttactgctacccctacagctactattactactaataacagcagc

SEQ ID NO: 533017 - DNA, 630 bp, Homo sapiens
gctgatcttgaacaaaggacaacccctctcagcttcgatttccctatcagttaactatagataataatagcaatgatccaaaaggcttatgatgaggctcaaatgagaaaatgcatcaaagttcttagcatggtgattggcaagaagaaaacatttagtcaacattatcagctattactgctatgattactattattctcatctttatccttattgttgtcaccattgccatatttattttgatgggaagcattattcyttctcatatttgcaataacttttctgagcacttttatgtcacttatttaacaaattacatataggctactgtccctaatacatcaagtcctaaattctcatcctgacatttgaggccttcttttatttatctttaaccagaatggttccaccttacttcccacgttatttaaccctactcacctgcctcacactccaaagttccctcctcacacctagcctccatactttcattcaagctggttcccacccaccacagaatgtcctccctcttgactgtaataaaatatgttgagtgcttacactgtgccagccatcagggtggacacttcatatatatgatgccgttaatcgtcaacccaaagtaactga

SEQ ID NO: 533018 - DNA, 536 bp, Homo sapiens
gggacccccaattctgagctgaacatctagacaccattctataaattttgattagttaagtgagtgaacattcaaatatttctctatacaatgtgttagaaacactaggacaagcattaccctaaaacaccaaggagatgtgagccgcattgagtagagaaatatggaagtgcgaagggaaagcagtgtgcatgattggtggcattggttgatggtatcggacatrcctttgggaccagagagaattttcaaatgaaaacacttaagtaaaaaccatgttcttcctttcaacagggcgttgttgctggcgctcgttccaaaggagaacacaaacagaaaatctttttaaccatctcctttggaggaatcaaaatctttgatgagaagacaggggtaagtaaagcaatcacatggcattgtgaaattttatccattgacagatgtacccttaaaagcctctactctctgggcaggaatatacaacaagcataaaaacacataaagcaactgacaaacttgatcaactctgatcatcc

SEQ ID NO: 533019 - DNA, 537 bp, Homo sapiens
ctgtctcctctttaattttatagtaacacccgtaaaatgcccttatttctgattcccttaggcaactttagggttgaaagttttgtacattgacttcagcttaaatgtgatttaacatttaatatccactctcctctgaaactgacgggagaaaacacacttgtttcattttagcacaactgaaaataaagaccagtgataggccacatcctacttatctgatctcagagacaccttataatagaaagttcagggttctgattgttcaatattctaaagsagtcattcatgtaagttccatcagaaagatatgaaatagcttgtagtaacgtatcttttcctcagtcaaaaagaaaaaaagcttgaactgagtgaagatcactatgtcattaatctacttaaagattaacctttttaaacagccaagatgtgtaacgtacttgttcttattcaaagttcaattgtgttcagcaccatggaaagttttatgattgaatatatgtaattatagtatatagagattaaaaataactcaag

SEQ ID NO: 533020 - DNA, 555 bp, Homo sapiens
ttgaggtaattgaatctcacaaacatrtaaggaaaagaaaccagacacaaaagagcagttaccaaatgatttcatttatgtggagtttaaaatgggagtaacaaatccatattatttgaaatcaagacagaaattttctccagtaatatttttatcctatatctcaactggggtggtagttttgtgaatgtgtatatttgtctaaagtgtaactgtatacttaaaatgtgtgtatattataaatcctacatattataaatacattgttaatttttttaagaaatgcaaactcactctgaaagaaactataggataagcatttggtaatatttctatgacaaaataagatatatcatataagaaatactaaagacattttttatgcccaaattacttttaatcaggtagcctttgggaactaaaaaccttatgaagttaaccactggaaaagaatagctggtacctagataaaaatcttggctggaaaccagcttaaagaaaatgaatggctaggggcataaacaaatgcatttcactctgccaacttgccagcag

SEQ ID NO: 533021 - DNA, 539 bp, Homo sapiens
gcaaacttaattcctcctctcatttccctcagtcatagttgttagttattattgtactttgacatagtacaatggtgccctcagaagacagtttttttctgagacaaagttttgctcttgtcacccaggctgaagtgtagtggtgtaatctcggctcactgcaacctctgcctcctgggttcaagcaattctcctgcctcagcctcctgagtaactaggattacaagcacaagccaccayacctggctaatttttgtattttttttagtagagacagggtttcaccacgttgaccaggctggtcggaactcctgatctcagatgagccgaccacttcggcctcccaaagtgctgggattacaggtgtgacccaccatgcccggccccagaggatagttttgtagacctttctgccccaaatgaagtggtcccatagaactgtacttttagttcttatttcttgttttacagctctcccatcttgctttcccactggtaggctacctttgtcaattctaatggccatcagtaagaaatga

SEQ ID NO: 533022 - DNA, 215 bp, Homo sapiens
tgtttttaataacactgatgttttggttgcatataataactatttcattaaatctaaattaartgcatggttaagcatatttaaaacatgtaaatgtaatgtgttgctagtgtatttcatttcatgtttccatgcagttctaacaattttccaaattcaaattgactaggtgtagggaagtccttggtcgttgatatgataccttttttctgata

SEQ ID NO: 533023 - DNA, 473 bp, Homo sapiens
gtgtgtgtgtgtgtgtgcatgcacgcgtgcacacgtgctgttgacaaccaagcctggcctggtgcatgcactgcataagtgtagctctgggggttcccaggccattgggggcatgtggtcagagtagtaagttctcactggtcaaggacagactttccaggggcccattggagcctcaccctgcaggaaaggccagatcctgggaaggagagcagrgcagggagagttggcgctcatggagggcacagactgggggtgtggaaaaggggccagggactatggctggggttgggggcttgaaatgaaatgtcatctagtgggcagtggggtgcctttggggctcctggagaggggcacctgatttgccatgggcgtcagtttcccaggagcagtgtggaaaaggctgaggtatctagaagcggacaagtgaccctctgggcctccaactccacctttctggaaggggcctgccc

SEQ ID NO: 533024 - DNA, 475 bp, Homo sapiens
ttccaagtaacccaagaggctgtcggagctctttagcaaagcagtgttctggtccatgtcaccctccagaaggacctctctctggctgctgggggaggctgggattgggggtgggggtggtggtggaaggtggaggagcaggggatgagtgaaggctgctgtggtcacctgacaggtgatggcagctggacggggcaggtggtccaaggcagcatggaggtggaggttgagccaggggctgctcccagggaagggaggaggcaagaggagtcatccaggaggcctcccaggcgggggctatgatgtcagggcgggaggaactccatgttccgctgaggccccattagaccccaagtgcagaagtggcgaggggagcaggatccacaagtctggagttcagaagagaggtccaagctgagccwggggagtggagaggtgcgggcacgtgcagggccttgaagtgctgagggcggat

SEQ ID NO: 533025 - DNA, 516 bp, Homo sapiens
aggctgggcacggtggcttacgcctgtaataccagcactttgggaggccaaggcaggtggatcactttgggagttcgggagttcaggagttcgagaccagcctggccaacatggtgaaaccctgtctctactaacaaaataaaaattagccaggcctggtggcatgtgcctgtagtcccagctactcaggaggctgaggcaggagaattgcttgaacctgggaagtggaggttgcagtgagccgagatcacaccactgcactccagcctgggcaacagagcgagactctgtctcaaaaaaaaaagaagctctaaaagcctcaggagctctaaaagccacactattctctgtmttgaagcatggaaaatagctttgtgatggcaagtgggggatttggctgaaggagtgagcaggataaagacctcagaagacctcacacaccatctaaggcactcagactggaggatcctgatgataacagggagtcagtacaaacgcagaatcaagaaagagaca

SEQ ID NO: 533026 - DNA, 459 bp, Homo sapiens
gagctatccctaacgagcctccctgtgagcaggatggggcagacacgcctctaggctccttccagctcacttctaaggcattaactttacactctgcctccttcagggtcattctttgggttctcaaaatcctttctctccataaagctgagcacttggctttcaaaattattcatgcgrgtgaccacattgaggtctagtttggaagttgaaaaactaaatgttgttttttccccttcctttgtgcattcctactataaaaatactaattcttgaggcaatggaatgcctctggctgacgagggaaagggtcacatacaaggaagtgtggaaaagaaacagacaaatactagtatttcaagatgttttcctattacacataatcaaataattgaaaatccagtctagtaggatctctggttaggggtgatggagtttaagggctgcagtgaagaaagc

SEQ ID NO: 533027 - DNA, 557 bp, Homo sapiens
gcaccaagcaggggcaggtggaggggggctcatgctctgaagctgcaggggttctctcgggggacccagccctgcctgagccccctttatgtggggtaccccggaggcctctggggtcatgctccccatctcgcagctctttcctttctgcacatggtacctgccctgccctagagcaatctctcaagcatccaggctggcagacgcccttctccctcccctactctcccttcagatgggctcagtcaaggatttcttctctgcaaccccaagccgactgtatctctgtgtccctgccatcatggcacatatcccataccctcatcttccccaaccaggcagcacgttcctcaaaggccaggattgtgtcttcatcatcttcgtccccctgggatcagacagtgggcctggtgtccagtaagtgtccaatacatatttgctaaaatgacacgaatgcaggactctgggagaggttcctcttatcgaaggaggttgtacaagttagctttgggctgcaaggaatrgaaactcagctcacactgatttaaagcataaaa

SEQ ID NO: 533028 - DNA, 521 bp, Homo sapiens
cagggccatctgaggagaagcccaaggaagctgacgctggcatccttgaacagctgagctgagtgccgcaaggaggatcckcccaggaaggccccggtgagaggaagcccgtgtgcttggagaggtggatgtggtcacaggtggctggagtgctggagagagtggaaacgtcaagaggtcggcctgggctcggccacttactgtgtgaccttgggcaaacttcaccgcttttctgagcctcagtgtccgcatctgtaaaatgggaataggatagcagggtacctcctggggtggttctgaggatgcgacgcgtcactgcgtgtgaaggtcagcgcctggcatcgggaagggctgcattggtgtgagtcggtcttgttgctgtgattatgatgaatacgaagcatcgcgttgtcagcctgcacgccacctccccttccaatcagctcctcagatgcagaagccgtgaagctcccacaagttcatggggacaacccgtgtgagaccagtgaggaccccctgcc

SEQ ID NO: 533029 - DNA, 518 bp, Homo sapiens
gactgaaaaaagccaaactcaggtgctgcyagggctgggcaagcagcactcatggtgaagtggtgggagaggggtgcaggcctgtctaaaggggtggacgctgctcagtttctgccagtgtcgccccgtgggaagccgggactgacagtttttcatgagaagctgtaaatctagatcggggtgtccaaccttttggcttccctgggccacacataaaatacactaacactaacgatagctgatgagctaaaaagaaaaaatcgcaaacaaaatctcatgttttaagaaacattatgaatttgtgtggggccgtattcatagccatcctgggccacatgtggcctgttgttcgcgggttggacaagcttgatctagattgctatatgaaacctgttgatatttaaatgttagggcaaatatcaggccaggtttggcctgaaggccgtgagtttgaggcctctgtgatactgcagcccttctattttgcaggtaaggagctggcggggagagttagcaca

SEQ ID NO: 533030 - DNA, 518 bp, Homo sapiens
gactgaaaaaagccaaactcaggtgctgccagggctgggcragcagcactcatggtgaagtggtgggagaggggtgcaggcctgtctaaaggggtggacgctgctcagtttctgccagtgtcgccccgtgggaagccgggactgacagtttttcatgagaagctgtaaatctagatcggggtgtccaaccttttggcttccctgggccacacataaaatacactaacactaacgatagctgatgagctaaaaagaaaaaatcgcaaacaaaatctcatgttttaagaaacattatgaatttgtgtggggccgtattcatagccatcctgggccacatgtggcctgttgttcgcgggttggacaagcttgatctagattgctatatgaaacctgttgatatttaaatgttagggcaaatatcaggccaggtttggcctgaaggccgtgagtttgaggcctctgtgatactgcagcccttctattttgcaggtaaggagctggcggggagagttagcaca

SEQ ID NO: 533031 - DNA, 420 bp, Homo sapiens
ggtcctataggaagaactgttaacactgtgagtttcccatcaccagaggtgtgcaaatagacctggataacagcccttcacctgcttagagattacagagaggttcaggcggatgggagaccacttgccttctagctgtgtgattccacaggacctcggaacaatccttagctcaagcctcagttttcccgactgtaaaattgttttttgtaataatcagagtgacctcattaaaaggacaactttgttgataaaattctcctgcatttatccagscctcgcttggttccccagtgctaagagacagctctagccctcaccatggcccgcacatcctgtagccctggtccctggggccttccctcccaccccctgattctccccttcctctctctgctgcaaccacagacttcctccctg

SEQ ID NO: 533032 - DNA, 361 bp, Homo sapiens
ctgccaagcctgccctccctcccaggggcccaccggcagccagggatcatcccctctgggcccctgaccagctagggggtgatgggcgagacacacaacctcccttggctgtgccagggatcaagggaccgtgtggtttccagggaaccttcaggctctggagggataggggcaggccagggtggtgggagaggggtcgaagtggccttgtattcaaccacggcctgccaccaaatcactggtgacctggagcagtccctaactgtaactctaagttacggtytccttatctggaaagtggggataatcacagccctgacctcacaggtggctggaaggactctgagaagatctgtgtaca

SEQ ID NO: 533033 - DNA, 541 bp, Homo sapiens
tgctgcattacatgcattaaaaacaaaaacacacacacaaaaagccccagaacttttaaaaggaaaaatttagcagaaagaaactgatgtcatcactttgtgattattccagcctccctctcttatccgtgacctctgtggcactcaagacgcctgtccatcctgccttcctctccagcctccaaaccctctgcctggaagccagactctggccagacttactcaccaggccctcaccacaccacctggaatgcgttcctcacagctcttttccaaaatcagtcttctccttggcatctgcgtggcttgggagagcatccttggctctctgtcattgtctcacaatcttcgataagtagtgttcggaaagtgcccccctggcccatgtgcccagatgggctctccaagtctaaatgcttcaaaatggtacagaactaaatgtgtgaatttatgatggggcttcatttctggtcctccttcttcacacttgcgtggccgcccttcccatccrctctccaattttctttcacgtttctgcttt

SEQ ID NO: 533034 - DNA, 566 bp, Homo sapiens
tttacaattatattaattaggagacatgtgctaacttatgccaagcatttttaaaatgtccattggagacaaatttccatcaccaaagatttgttgcattgtcacctttggcaaaaatgaaggatgagtttttctgtttgttcgtttggtttggttttgcaagtcttgatctccaggttaaatacacagccttctttaagacttaaacccagggtttgaaagtgctgtgtattttctcagtgttcaacacaatctgcagtagaagggtttggagcagcaatatgatgccttatgcactctaaagctgctgacaggtttagacataatctaaaatgtaagtcactttgtgtatcaggcagttcagtccttcgcatttgttttaatgtttttcctaaatactctaaatatttcaaaatgagtctttccttaaagattctacatagctcaaaattattttatttatgtatgcatttattaaawatcacaagtgaggtcctgcattgcattagaaatgcagtgtattagaaaggacagctagcttcaattttgaattcataatttgtctc

SEQ ID NO: 533035 - DNA, 542 bp, Homo sapiens
gtaattgcattgttctccaaataagtttatttcaaaatccaattaaaacacaagttttagtacatggctgatgcagtattcagtggaggagactttgttttactaagttgagttgttttactcactcaagcagcaatttaaagacagatttcatttctgagctgtactattcattatcctaatttatatttattgcaacctctgagaccactattttgtctctttgcctacagtcttcagaatctttaagttactgtttcataggaaaaattattggagaaatttaatagaaagagcttttatgaagtacttaagcatttataccacaaaaaaagataagatagctttagatcattttgaaagtttataaatgttcacggtccrtttcaagattactaatctcttccacctgatttcttatgttacaccttcaggccttccctgtaagcaactgactgcatctctactttcaaatccttagagtgctttccaagactgaaataatgagagttacagagcacacggtgtccactgcaggctag

SEQ ID NO: 533036 - DNA, 366 bp, Homo sapiens
aaaggacgggtaccaccaaagtgatggaataatagaaccagaagaggttatgatcagagagtggagtccaggattttacaattccagggtaattctaagtaatgaaatataaaatctagggtgtcacgtgaatgtgggtggcttaaacatattgatggagtcaaggcagaaatggaaacgactgttgaagctaaggcgctggctgagtcttcacatggacattgaagtcactcagagtgaggccagttcttggagagaagagtggagtcagggagcaaagtcacggggaatgagcgagtgactgatgaacagattgacagaaggacagaagacagcyacagggagagtgggtgacagcatggttta

SEQ ID NO: 533037 - DNA, 517 bp, Homo sapiens
cctctttgccatgtgcaagacacattcccaggatctgaggattaaaacacaaacattttgggggccattattcttcccactacacatcctaagaggattttaaggtgaaagcatccaaaactgcagaggaaaatgatgccagtagctggcgagaatgacccgatttctctgtgggattggcccaagawgtctgtgctttgcacacagtaggtgcatcataaagatttattgttgggaaaaattacgacagtctacaatgaggacaaacatttcttaggctaatatatgactaataataaatcaggacatgtttttagctcaaataaagaatgttcttcccaattttttcattcttttcatgtgctgtccttataatatctatggggaagtttcttccaacgttctgctcattttctaagttgggttgtttattttcttattgtggagttttgagagctctttttatactgtcagatatcatgattggaaactggtttcttccagccttctcttaaat

SEQ ID NO: 533038 - DNA, 535 bp, Homo sapiens
cttataaaattgaagcttccctcctcccaaaatgcagaaagcattttctggtctttcatttagaacttctttgttcctcagtggtttgcagatggtcacaccctgtccagccccrgccactccctcccggcccacccacacccctgcgtgcaggtcactgcctcagggcagactctccagtcctttggagggaggaaggggagctgagaggatgccgatctcacgaagagggggcgggacccaaggctccagcgcatccctgcggacttccatgcctcctttcaggccaggccgtggggaccccccacgcatctcccttggctgtgtctgccacagggaaccctttccatgcccaacgcaaaagcaagaaaccacaggagaaaaggtgggtaaaactggccatacagaaatcaaaagcaaactcaccaaagtatctcaatacacatggtaaactgagggaagaagaagtatttgcagcacatgaaaaaagcgaatttcctaacttctaaagctcttctacacatcagtaaggaaa

SEQ ID NO: 533039 - DNA, 663 bp, Homo sapiens
ctgcatccgccagcagccaagccagtgcagaaaggaaacgtggtctgtgtgtatggcaggatggtcctcagccttagaaggcagagatcctacactttgggaggcccaggcaggcagatcacgaggtcaggagttcaagaccagcctggccaacatggtgaaaccccgtctctactgaaaatacaaaaattagctgggcatggtggcgcacacctgtaatcccagctactcgggaggctgaggcaggagaaytgcttgaacccaggaggcagaggctgcagtgagccaagatcgtgccactgcactccacttgggcagcagagtgagactctgtctcaaagaaaaaagaaaaaagaggcagagatcctgagcacgccacagtatggaggaacctggaagactttatgttaaatgaaatcagccagacataaaaggacaaagattttatgaatcctctcatatgagctccctaaaacaggcaagcctcaaagacaggaagctgcatggtgcttcccagggacctgggggaggggaagtggggcacgagtgttgaatgggtcccgtttcactggggaagatgaaaaagttctgcaggcggatcgtggtgagctgcacaacaatgaagacaccgaggctgctgagctgggtcctgacacatggtta

SEQ ID NO: 533040 - DNA, 663 bp, Homo sapiens
ctgcatccgccagcagccaagccagtgcagaaaggaaacgtggtctgtgtgtatggcaggatggtcctcagccttagaaggcagagatcctacactttgggaggcccaggcaggcagatcacgaggtcaggagttcaagaccagcctggccaacatggtgaaaccccgtctctactgaaaatacaaaaattagctgggcatggtggcgcacacctgtaatcccagctactcgggaggctgaggcaggagaattgcttgaacccaggaggcagaggctgcagtgagccaagatcgtgccactgcactccacttgggcagcagagtgagactctgtctcaaagaaaaaagaaaaaagaggcagagatcctgagcacgccacagtatggaggaacctggaagactttatgttaaatgaaatcagccagacataaaaggacaaagattttatgaatcctctcatatgagctccctaaaacaggcaagcctcaaagacargaagctgcatggtgcttcccagggacctgggggaggggaagtggggcacgagtgttgaatgggtcccgtttcactggggaagatgaaaaagttctgcaggcggatcgtggtgagctgcacaacaatgaagacaccgaggctgctgagctgggtcctgacacatggtta

SEQ ID NO: 533041 - DNA, 503 bp, Homo sapiens
tttactttgcttaagtgagcacagtgggaaatagtaccttaagagaagttgacccagaaaatttggaaaaatagcccctgattccttggatagcgaattatctaaaaggcaggagctctatttagggctgctctgagtcatgttttatcataacatccagatggaaaaacagtagcaacttctgacttacattccttgcttcttttaacaaaagtccctaaaaaacagaagatggaaaggttatttaaagctagcaaatgtatatattttttgcataataattttcctatcaggtcctttagaaacttatattttaatcaaataaaaaaatcagctacaataataaaataaagaygaaagattgatcatttcaatagtagatgaaaatacaatgaatgacgattgaatgtaatacatattttctgttaatggagtatataattctccaaatgaaacaatggtcattgttaatgtgttagaattaacaatgttaatgtatcaca

SEQ ID NO: 533042 - DNA, 612 bp, Homo sapiens
ttacacattttataaatattaatcaccatatagatattggttattatctcttaataaatggatgtcttatttaaatctcattattttaagaaagaaatggtgtgtytgttacccgtctttgtaataaactcatattgacttccagtgatctccatttaatttttcaagtacttataaaccatccatttttaaaaattcatccaaaaatttttccaagggaagtttcagaaatcctttgtctttcctactacttttgaaaataaggactttttggcatgtctccagttcttaataattccatggagattattggcatggctgaatgatcacatttagaattatttcaagtttcccgatacattaataattagagcctaaagacttgggcataagttttgctatctggttcactcctcaactaacctgtgcttttcctacatcaagggaaacacacaaacctccaagccatgtaggtttgctcctcttcagtttaaagataatattccttaacacagaagagaagacaaatggaaagttaagagctttgctttctcttaattttcttgtaatagcatagcttgccactaaaagtgagctgtttcttccccgttt

SEQ ID NO: 533043 - DNA, 612 bp, Homo sapiens
ttacacattttataaatattaatcaccatatagatattggttattatctcttaataaatggatgtcttatttaaatctcattattttaagaaagaaatggtgtgtctgttacccgtctttgtaataaactcatattgacttccagtgatctccatttaatttttcaagtacttataaaccatccatttttaaaaattcatccaaaaatttttccaagggaagtttcagaaatcctttgtctttcctactacttttgaaaataaggactttttggcatgtctccagttcttaataattccatggagattattggcatggctgaatgatcayatttagaattatttcaagtttcccgatacattaataattagagcctaaagacttgggcataagttttgctatctggttcactcctcaactaacctgtgcttttcctacatcaagggaaacacacaaacctccaagccatgtaggtttgctcctcttcagtttaaagataatattccttaacacagaagagaagacaaatggaaagttaagagctttgctttctcttaattttcttgtaatagcatagcttgccactaaaagtgagctgtttcttccccgttt

SEQ ID NO: 533044 - DNA, 612 bp, Homo sapiens
ttacacattttataaatattaatcaccatatagatattggttattatctcttaataaatggatgtcttatttaaatctcattattttaagaaagaaatggtgtgtctgttacccgtctttgtaataaactcatattgacttccagtgatctccatttaatttttcaagtacttataaaccatccatttttaaaaattcatccaaaaatttttccaagggaagtttcagaaatcctttgtctttcctactacttttgaaaataaggactttttggcatgtctccagttcttaataattccatggagattattggcatggctgaatgatcacatttagaattatttcaagtttcccgatacattaataattagagcctaaagacttgggcataagtttygctatctggttcactcctcaactaacctgtgcttttcctacatcaagggaaacacacaaacctccaagccatgtaggtttgctcctcttcagtttaaagataatattccttaacacagaagagaagacaaatggaaagttaagagctttgctttctcttaattttcttgtaatagcatagcttgccactaaaagtgagctgtttcttccccgttt

SEQ ID NO: 533045 - DNA, 641 bp, Homo sapiens
gctgcagtcatgcttcaattcttgcagttctagaacttcctctctccaaatcyctttgttcatgctgctctgtctccctgcctacattctctccagttctttacctggaaaactttcattcaaagttgaagactctgtccaggggtcacttcctctaggagtcattccctctccttctcccattcttagctaggtgcattcctttgcacccacgacatctgagcatcttgtggcaatgcacttctcagaccacaccataattaatcatctgtttatggtcagtctcccctagacccttgctactcaaagtgttagaaatgcagaatctctatgcccacctcagacccactgaatcaaaattttaattttctcaggatcccacatgattcctccgctcatgaaaatgtggaaagtctgctttaacagttagactgtgcagatcctcaggaggtgggactgtctttcatctctgaagccccaacaatagcacagtacttggcacatcatagggctgaatttggcatcatgcctgtgtcctgatccccacctggcctcttggattggttttctatcctgtcagaagaggattagagtcagaagctcttttcaagggaggccttgtagaatttctgctacaaaca

SEQ ID NO: 533046 - DNA, 619 bp, Homo sapiens
tcatgcttcaattcttgcagttctagaacttcctctctccaaatctctttgttcatgctgctctgtctccctgcctacattctctccagttctttacctggaaaactttcattcaaagttgaagactctgtccaggggtcacttcctctaggagtcattccctctccttctcccattcttagctaggtgcattcctttgcacccacgacatctgagcatcttgtggcaatgcacttctcagaccacaccataattaatcatctgtttatggtcagtctcccctagacccttgctacwcaaagtgttagaaatgcagaatctctatgcccacctcagacccactgaatcaaaattttaattttctcaggatcccacatgattcctccgctcatgaaaatgtggaaagtctgctttaacagttagactgtgcagatcctcaggaggtgggactgtctttcatctctgaagccccaacaatagcacagtacttggcacatcatagggctgaatttggcatcatgcctgtgtcctgatccccacctggcctcttggattggttttctatcctgtcagaagaggattagagtcagaagctcttttcaagggaggccttgtagaa

SEQ ID NO: 533047 - DNA, 648 bp, Homo sapiens
cattacagaaaaagtttgccaatctctgatcttagacatgaccctaaggaaaattaggatcatttcaatatggctgcctgaaaaaaaatcatccctatggaagttactayttgctaactttatcaaattcaggttaatatattcaaaacaaaaacaaaaagtctcctcattgttggtgtgcattattacagtggttgtgcctgagccatagatggaagagtgatgagaactgaatcccaacggccaaactggactgagattagagaggaaagtcattagagttaccaggagtttgcctgagttggatattgcagttggaagctggactagatgagtttctcaccaggacttttcacctccttgaggatttgttatacaaatctgctcagtgtttcataatcaacctggatacaaatataagccctcattgcctcctgttaaaatacatccattcatacatacattaaaaaggaaggaaagattggctctccatgttgaagaaaaccccccgagttttgccatctactttcccagcttattgctgctggaagtatttcacttacaactgtgatttttaaaaaatgttttgaatttctccttagacgtttcataagcatttaaatagaattggctttctgggtgacttac

SEQ ID NO: 533048 - DNA, 504 bp, Homo sapiens
tgggtagcctcagaaaaaggctacatttcaataattaaaattgctaatattcagtattagcttctatacttaaataaaaatgaatcatgtcctttgcttggtttgaatattgtttgtgccctcaaactcatgttgaaattgattgctattttggtacggttttgaggtagggcctaatgggaggtatttcggtcatgagggcagatcccttggaaatagtctcaagagagtgagttttcactattgcggggctggattagttaacacaagagcaagacgttatagatcaaggtgaggttcctccttaggtttgttttctctttgtacatactcgcttgcttttctgccatgttttgatgcagcacatagtactcaacagaacccaagcagatgcyggtgccatgttcttgggctttccagccaccagaattataagccaaataaaactcttttctttatgaattactcattctcaggtgttctgttacagccaaacaaagaaaa

SEQ ID NO: 533049 - DNA, 421 bp, Homo sapiens
aaccacaaataaaataatacggtgaaagtcaagatgtgagcaagctcatggtcacacttcctctgcatgacaaatactggagtaccataatagataaaatcagtcgtctctggattagcttttttatagatttcaagaatggcatctgaaaaaggaattaatccaaacataacatatcccagagaggatattttaaaatctgcattccagaagctataactgcctgctaaaaccagaagctgtaaccaagcctacacaaatcaaggggaatttggcagaaaaaaatatgtactctttatgaacttgacctagacattgagatatgacatgcatagggacttattggaaatttgagktaatcagtaagctcatggtatttacttggtggtatcaagcaggttatattccagcaagacatcag

SEQ ID NO: 533050 - DNA, 568 bp, Homo sapiens
cctaaataaatagaggtataaattgcatttgatgtttgtgatttggaagactcaacagtgtaaaaacgtcaattttctgcaaattagtttacacattcaaagaaatcccaaacaaaatattagaaaagagagagagagagggagagagagagagagagagagagagwgtgtgtgtgtgtgtgtgtgtgtgtgtgtgtgtaccgacaaactatttctaattttatatggacaagtaagtaagaggccaacaggatctaaagcatctaaagaatgaaatctgagaagtaccctacttgataccaagacttttaggcccacaagaattaagacagtatggtactggctcaaagacagacaagccaattaatgtaatcatgaactgagggcatgcaaagattttctaaaacgaataaaagaaaacaaaagcaaaaacaactaatcataaaatttgaaagttggaaaacagtataattatgaacttctattaatcaaaaactttaaaaaattgaaaaggcagaccacagacataaagaatatagctgaaatatactgatcaatggattcacac

SEQ ID NO: 533051 - DNA, 594 bp, Homo sapiens
tgctcagcaggctgaggtgggaggatcccttgagcccaggaggcctaggcagaagtgagccatgattgtgccactgcactccagcctgggtggcagaacgagaccctgtctcaaaaaaataaaaaccacacaaataataataataataaaatacccatacaagaaatattattttaaatgttgtatgccaagatttagcctcaatgatatttatcttgagattgtttataattatcataaattagaaacagccaatatggccaacaatattttttaaatggctaaataaataatggtcaactagaccatgacatgatatgcagcgattacaaattatatatacaactctactttccaacagggcagtaagctcatatatatagttaagttataaaatgcaaattataaaaactacagactgtgtgataacaatctggttaaataattcatacagatagatagatacagatgtatagaacaatatgttaagaatttacaccaaagtgttacaagtagttagcttttaactatgaaattttaggtgatttaatgctctgctyttctctaatagttttgagattttctccaataaga

SEQ ID NO: 533052 - DNA, 485 bp, Homo sapiens
ggggtctcgtggagtctctgggcctcccacactagcaggaggcaagtgaggaacacctacacaatgacacccttgcagcagttgtgtgtccttggggcggtcactccccactgcagcctgttttctcattggtagggtcgccctggaaagagcaagcattctgttttcaccttcacgactaccctgtatgaagtacctgtgattgttatctcaatggtatgggcagaaacctgctgcacagaatgacggtgtatmtttcccaaggccacacagcatgtgagtggcagagcggagctagaatccagtgtctgaagctctggctcaaaccctctgctttagctccagcctgagctgaactgaggtcacagtcccagggtcacaggctgctgggacctttactccttgccgcagaaatggttccagcctaggggacagacccttcctaactcacatgcaccagtgacatgagggacagtgaggtcaca

SEQ ID NO: 533053 - DNA, 511 bp, Homo sapiens
gaaaatttaatgaaaacatacacatacacawtttctatttcatttcctgggggacctcgggtcccaaaataagactccctgagctagcggcggggccatcttcagaggctgccgtggagcccatgcagctcagctgccctttgaggttccagtacccaagccctttgcatctttggaagccagagctcccaaagtgactccccacggggggccaggctgacccctatcagcttgcacgctgccctctcacacttcaccggggccctgctcagacccatccagagccaccgacaccctttcctctgagttctccttcaaaagtccccagagccaagcccctcagggctgagctgatgctgaggttcacagcatgaggtctggagtcagatctgcccgcgtaaggaccgggttccaccacctcctaggggtgtgaacctggggaaacctctctgctccagagcttcactgcgaccatctgtaactggggacatgagagctcaagtccctttgc

SEQ ID NO: 533054 - DNA, 604 bp, Homo sapiens
actgggtatatacccaaaggattgtaaatcattttactataaagacacatgcacacatatgttgcttgcttcactgatcacaatagcaaagacttggaaccaacccaaatgcccacaaatgttagattggataaagaaaatgtggtacatatacaccatggaatactatgcagccataaaaaaaggatgagttcttgtcctgygcagggacaaggatgagtctggaaaccatcattcttagcaaactaacacaggaacagaaaaccaaacccgcatgttctcactcgtgagtgggagttgaacaatgaggacatatgagcacagggaggggaacatcatgcaccagggcctgttggtggttggggggcaaggggagggatagcattaaggaaaatacctaatgtagatgacggactgatgggtgcagcaaaccaccatggcacatgtatacctatataacttgcatgttctgcacatgtatcccagaacttaaagtccaataataataatagtaataaaaacagtgaaaaaggggagtcatcagtccaagctttaaatttatcttcagagctaaaattcagagcagatgtttttatgccctact

SEQ ID NO: 533055 - DNA, 555 bp, Homo sapiens
ggaaccaatcgcggatgcagctactagtggaggggagaggggagaaattctgtagcttctcttccccccagtctcctgtctcctgacaggaccttgccttggtaggagaaaatgtagtttgtacagggtgagaaatgcatctcagagctaacctgcaaatgactggcattcaccaggaagccctggggctaaactccagattcctggaactggtcataaggccacttctcatattagaactttcttctttggatgctctctcctttcaygtaggggaagcaaatttaaattctttcttctgtgtcctccttgcttgccgcctgccctgcagttggttggattctttatctggtgtggtgatgcaagtcatcattcctgagaggccaggccatggtgggcctgcggtcaggagcttcacgaggcctccattaactcttaccattggatgtgtgaagcactatcccaaggcaggcttctcactgtgtgtgtgcatgtgtgcctgttaatgtatgcatgtcatggacctctatagcagtctagggaagctagtgggaa

SEQ ID NO: 533056 - DNA, 652 bp, Homo sapiens
tgctttgcagggagccggtgttcctggtgaacactgtgtcctgtgrggagcattttgacaaatctctctttagctgtcttatacatgtatgagacataagaaatttatgagtagctagagtgtaagaaattaaatgacatagtgcttacttccactttctttagcatattcccagaacccctcatatactacttttgcatagacgagatgctcagcaaaaggagtaattaatataaaaacattctcctttcttttttccttctcactcaatgggtccacgttggtttcatactaaagtagttcagaagtcaaattgtgtagctttactattgccctttctaaaggggctcaaacctacatatgaaagcaaatcccaatatgtaagcctttgtgtggttaacatttctgtctactctctcaatagtatggatttaagtgatatttttcatggtgcctggaatgagatgtagtgattcactgtcattgtttcacagaactaagatggcataaatgctgtgctgatcctatttttagttgccttcacctgtcctcccatcatgtaacaagtctacataagaacattttaaatatgtgcatctgtttgtgttcctagtttgtacaagtggaatgacagagtggagtaccagttaga

SEQ ID NO: 533057 - DNA, 534 bp, Homo sapiens
atagctgaatattctgaaggacttttaaattatttttaactcagaaaaaaatttcagaacctaccatgtgtcagacaccatgtactgctctgcagatatgatgatggccgaggcagatagggtgtctaccttcatgaaacttagagtatgaggaaaggactggtatgatttatggccagtgtttacaaggtaaatgcaaaatagtttaaagagtgttctgataaagggtgaagaagatgggggctattgggttagctgaggtctgcccatgcaaarcttgcacatcattttaaacagttcttactttatcctaaggaaaataggccactttcaaggtcaaagggatgaagggacaaaatattagaaaacacacaatataagcatgtcactgaatataaacaaaagcttgaacaaaataacttcacagtttttcctgtggcaaaaatttactcagactctaattaattttttgtttcagtgaagttttttttttttttttttatgtatcacaaatgtgtttgtgccttccgttgc

SEQ ID NO: 533058 - DNA, 451 bp, Homo sapiens
ttcatgcccaaagtgatttggggggacagtcttccaaggccaggatrgggacctgagtcactgggagaaccttctagtggtctgccttgactttacaggctgcaggcagggattggagcagataccaggaagacctttcatcttgagaagagatgaatgatgatggggcttctgaatcccttgtctccttggtatgcaagggcatggctaaaggactggagctaggggaactgcccagatgcccttctaactgaaggtctctgtgaatcagctaattgctgaatgtgagtgaggagagtcccttgagatcatctggtacgctgtacttattttattgatgaggcatccagagcctggggagaaagcatgttcctggagaacgacctcaagttcagatccatcccctgtcatttactagccgggtgactaaggcaagttacttcacctctct

SEQ ID NO: 533059 - DNA, 627 bp, Homo sapiens
tgttattgaaagtgggttgctgaaatattcaactattattgttgaatgttttattctcatcccccactgtgcagcagagctgagttctctgagttaaatacaaaacatcaccacagtctgagawtagagattttgtagtaatctccaagttcaaacaaaatattgtctgtgctctgggagtgatgctttgaagggaactccagaagaggttaaatctcattgtctgcagtacttctgtatttttgctactgtgccattgatctggggtaaaaaggagtgatacgagtagaaccacagatcttgctgtcatacttacattcaatattttctctaggatcactctaattactagagttctgctatggcaggttttaggttgttttgctagtacttttatagttttagagagagagttcactgaggtcctcattatgtcatactgtatgtatatgattattgaacaatagtagtgtctgggaaaagaaagctttttaaattctttactggagctaatgagtcttggttccatatcctaagattctctaggagttgttaatgtcattatagttgcaattaacaaaataaatatggcttctgaaaaatctattatttagtttacagaagtaa

SEQ ID NO: 533060 - DNA, 627 bp, Homo sapiens
tgttattgaaagtgggttgctgaaatattcaactattattgttgaatgttttattctcatcccccactgtgcagcagagctgagttctctgagttaaatacaaaacatcaccacagtctgagattagagattttgtagtaatctccaagttcaaacaaaatattgtctgtgctctgggagtgatgctttgaagggaactccagaagaggttaaatctcattgtctgcagtacttctgtatttttgctactgtgccattgatctggggtaaaaaggagtgatacgagtagaaccacagatcttgctgtcatacttayattcaatattttctctaggatcactctaattactagagttctgctatggcaggttttaggttgttttgctagtacttttatagttttagagagagagttcactgaggtcctcattatgtcatactgtatgtatatgattattgaacaatagtagtgtctgggaaaagaaagctttttaaattctttactggagctaatgagtcttggttccatatcctaagattctctaggagttgttaatgtcattatagttgcaattaacaaaataaatatggcttctgaaaaatctattatttagtttacagaagtaa

SEQ ID NO: 533061 - DNA, 532 bp, Homo sapiens
cgggagtctgaggtgtcctcttccagcatccagcagtgctggtcagagtatgcaaatgaggaagcagtgaagacataccccggaggcttttaacgtctttactattaacttccttcygaccacaaagaaaacttttcttggcacaaacctaggactttgttcaagatgtccatccgtctctactactagtaagtaaatagttctttagcagtactttcttcctggaatcaacttaagattttaacatttggttgataaaatctacaagtgtggtaatgaaagatatttgttccatattttgcttcttacaaatgctcatagctcttatcatattctcataaataccacaaaagtccagttattttcttgcacaagataaagatttatgctttccaaagactgtgaatatatcatgtcatttttttcatcagtctcatattactaaaaactacatctaagacatctaattaaatgcaaatgaatacaatttaacataaaatgctatttcattgatagtacattttaagatttc

SEQ ID NO: 533062 - DNA, 532 bp, Homo sapiens
cgggagtctgaggtgtcctcttccagcatccagcagtgctggtcagagtatgcaaatgaggaagcagtgaagacataccccggaggcttttaacgtctttactattaacttccttctgaccacaaagaaaacttttyttggcacaaacctaggactttgttcaagatgtccatccgtctctactactagtaagtaaatagttctttagcagtactttcttcctggaatcaacttaagattttaacatttggttgataaaatctacaagtgtggtaatgaaagatatttgttccatattttgcttcttacaaatgctcatagctcttatcatattctcataaataccacaaaagtccagttattttcttgcacaagataaagatttatgctttccaaagactgtgaatatatcatgtcatttttttcatcagtctcatattactaaaaactacatctaagacatctaattaaatgcaaatgaatacaatttaacataaaatgctatttcattgatagtacattttaagatttc

SEQ ID NO: 533063 - DNA, 543 bp, Homo sapiens
actaaaaggagttactaagaattcagaactctgctgttggtttgcttggctatgctttgctgatgtgcagaaaggctggcatacttagttgagaaaacaatatggaaatatcattacataagacacaattaatatcaatatatttcttttatatattacatacttcctagggaaaaatcactcaaatacaagcattagattcaaaactacaagctgatataggagtgtttacattaattaccagtaacgaaatttgaattggccctcatggccaaggtaaagtgcaactgaaccccaatacctgagcttggtttttcctcagccacatttcaacaggtgcctcttatccttccawtcagggaggaaaaatggagtagcccaggaatcctttggaacttcctaagccttcaattagaacaatatttcacaatgtttttttcatgttgtggcaaaatagaatagtacactatttgaagttcatggaggaagatgctcctgcctggactgggctgggttgagcaatttcatggataaagtagttaa

SEQ ID NO: 533064 - DNA, 543 bp, Homo sapiens
actaaaaggagttactaagaattcagaactctgctgttggtttgcttggctatgctttgctgatgtgcagaaaggctggcatacttagttgagaaaacaatatggaaatatcattacataagacacaattaatatcaatatatttcttttatatattacatacttcctagggaaaaatcactcaaatacaagcattagattcaaaactacaagctgatataggagtgtttacattaattaccagtaacgaaatttgaattggccctcatggccaaggtaaagtgcaactgaaccccaatacctgagcttggtttttcctcagccacatttcaacaggtgcctcttatccttccaatcagggaggaaaaatggagtagcccaggaatcctttggaacttcctaagccttcaattagaacaatatttcacaatktttttttcatgttgtggcaaaatagaatagtacactatttgaagttcatggaggaagatgctcctgcctggactgggctgggttgagcaatttcatggataaagtagttaa

SEQ ID NO: 533065 - DNA, 466 bp, Homo sapiens
cgtctcattttacaattcaaatttgtctratttcattttatttcagatccttatgcctgtcctttaaaaaaaaatcttactcctttcttaaggtttttttttctagaacctgactgttctctttttattaaatcaaagtatgcaatatggatcctgaacagtcataggcaagctgtgtgtattgattagcaaggtggagcttgtccctgaactgattttctattggcaaattcagggtaaggccaagtatgaagtctgaatcccgtgttttctcttttttcttttttttttttttttggcttcccctctttttgtgacattcttgccctcactcttcaacctccttgtcccacttagacccaactcaagaatgttttttccattggtgctggttttcaaccagtcaggatctttggtcttctgacaaaatctcttatcatataaaagtaattgtgtgaaattattt

SEQ ID NO: 533066 - DNA, 466 bp, Homo sapiens
cgtctcattttacaattcaaatttgtctaatttcattttatttcagatccttatgcctgtcctttaaaaaaaaatcttactcctttcttaaggtttttttttctagaacctgactgttctctttttattaaatcaaagtatgcaatatggatcctgaacagtcataggcaagctgtgtgtattgattagcaaggtggagcttgtccctgaactgattttctattggcaaattcagggtaaggccaagtatgaagtctgaatccygtgttttctcttttttcttttttttttttttttggcttcccctctttttgtgacattcttgccctcactcttcaacctccttgtcccacttagacccaactcaagaatgttttttccattggtgctggttttcaaccagtcaggatctttggtcttctgacaaaatctcttatcatataaaagtaattgtgtgaaattattt

SEQ ID NO: 533067 - DNA, 568 bp, Homo sapiens
gctatttgaaagactgaatagaaaagaaaatttaaaaaaagattgcttaccttaaaaccccagcccagaaataaaacctagttatttaatgagtgggttatggataaacattcagatttgataaaaccccagatatcctgataatctatataaaagagaaatttccaaatgggatgaaaatgatatagcactctgtttgatatgttaaccactgtatcaactagaagtggttaagaatgttatggggtgatgctatctttctgaattgactttggaagatccaagtacctttttmcaaaacaattccccctcttttaaataaggcatataaaatctcaatatccttctcatgtagaacttactccttgtgatataattgatctcactcccttgtgtatctgtattataggttgtttgcactgcaatttaaaatgtattctttaatcatatgtttttggctaattcactgatgtatcaataattgaaaaatgttggagataatgtaattatgaataaaatagtcatgatattttgtcctcttttagaattgttacatttttatttgata

SEQ ID NO: 533068 - DNA, 658 bp, Homo sapiens
gctgcatcagtagtgacagcattcgtcaattctctctgggctttaggaaagagagcagagtacagctaaagcattgctgtgcaatatgaacataatatgagttacataggtaagtttatatttccaagtagccatgtttttaaaaagttagaaggaaaaaataattttaccactatattttattgaaccaacatataccaattgtagtgatttcaagatgtaatcaatataaaaacaatcatggttttcattgtttttatctttttttttgagatgaaatctcactcttgttacccaggctggagtaaatggtgcaatctcatctcayggcaacttccgcctcccgaactcaagtgattctcctgcctcagcctcccaaatagctgggattataaggatgcgccaccatgcccagctaattttttgtatttttagtagagacggggtttcaccacgttggccaggctggtctcgaactcctgaccttaggtgatccaacagcctcggcctcccaaagtgccaggattacaggcgtgagccaccgtgtctggcctgtttatcttaagttttcaatatcctgtatgtatttcatactcatagcatatatcagtttggactagctgtattccaagaactcattaagcacacatggctagtg

SEQ ID NO: 533069 - DNA, 627 bp, Homo sapiens
tcttctgtgaagtgtcaatgtcttggtattctttttttccctaccaaaattgtgcaygtatgtgactccagctttccttacaaggggggttgtgaccccctgagggcctccatctgtctgcctggaacatgtggtctcatcagtgtggcagttcactgtggctagagctcattagagaatgtgctgacattgactaccggcccctacgttcaattcttttcttgaggctccttgtcttatacattgagggaatctggggtataaaaaaagaaaacaaaatttcatgtgctttaagagactctgatacaaaaacgtagatcacaagtggctcagggataggagatggtgtgacttctgaagctgaacttgaatagaagacaagtctattttaaacatttctttgttacaaaatattcaatagacctttccccttgaccaaaagctaccacctccaactccaaataaataggtaagtatctgggtattctcaaagtatgtcaaagtgttttgtgtttttttttgtcagaatctgaaaatccatatttttagtcacatctgattcaaagcatgactagaaatagcatgagtgctgacatactgggacattttaattcctaaaacttccag

SEQ ID NO: 533070 - DNA, 609 bp, Homo sapiens
ttggataaataactgctactagcagtgccaagaactttaaacgtgacattgtatcttacatatgyaccaacaagtttacctccaacagtttcatggatgccagcagaagatatgaaactcttaggcaaagttggacaccatgattatccccacagttgcatcattccccaagccccaattcccacaggtcaatgagataagggctgggtgacaccaccaccatagtgaatttcgttagagcaaaggagtcctgagtttggattacccgaatttcagtggacagtaagcatgtttgttctttgctctgaagtgagaggctatctctgtcttccaagattagtcactaaacaaccatctttgaaaggacagtctgcaacaaaaagctctgctcacaagacattcagacacacgaaagacggtcgagaattgtctcccaatacaagacattcagaaacacgaaagatggtcgagaattgtctcccaatacaagacattcagaaacacaaaagatggctgagaattttttcccaataaaggaagcccaagaaatggatcactggcagagtaaaacaggcttacagatcatttcatcttgatagtatgctaaag

SEQ ID NO: 533071 - DNA, 609 bp, Homo sapiens
ttggataaataactgctactagcagtgccaagaactttaaacgtgacattgtatcttacatatgtaccaacaagtttacctccaacagtttcatggatgccagcagaagatatgaaactcttaggcaaagttggacaccatgattatccccacagttgcatcattccccaagccccaattcccacaggtcaatgagataagggctgggtgacaccaccaccatagtgaatttcgttagagcaaaggagtcctgagtttggattacccgaatttcagtggacagtaagcatgtttgttctttgctctgaagtgagaggctatctctgtcttccaagattagtcactaaacaaccatctttgaaaggacagtctgcaacaaaaagctctgctcacaagacattcagacacacgaaagacggtcgagaattgtctcccaatacaagacattcagaaacacgaaagatggtcgagaattgtctcccaatacaagacattcagaaacacraaagatggctgagaattttttcccaataaaggaagcccaagaaatggatcactggcagagtaaaacaggcttacagatcatttcatcttgatagtatgctaaag

SEQ ID NO: 533072 - DNA, 643 bp, Homo sapiens
ggtgatcttgcttctggaaatgttggtccattcagctgcacctgcaatggcagttcactgtggcatgcagcagatacatgtgtgagtgtctatgttcagctgtgctcttgagatttcctaagttactcaggagggagccctaagaaacaaactattttgaaaagtcatattcttcagatgggtcactgtcagtcaggaaggtccaggatacagtaatctgagtcattcaacagcaccccagcattcactggccatgactgtccacttaaaaatctgtatgtgatcccaagagttccagtcttccacatcaaaattacaacacctacaacttctccagrgtgtttttcttataagttctcccaatcccttaaaagcgattaaggaacaattgctctgaaatttatcttccacctttccatctcaaaataacaaattccaattgcataggagtttctggctttgggttttctacctgctagacttggcagagaggaatgaatgaatttgctgcctcctgtttttttttaactttttctttttcaagtgctggcattcaggttcagagaaagaactgaggcaggactgacctagcaatttctatagcctgacatagtctcactgaggacttctacaccatgtgttc

SEQ ID NO: 533073 - DNA, 643 bp, Homo sapiens
ggtgatcttgcttctggaaatgttggtccattcagctgcacctgcaatggcagttcactgtggcatgcagcagatacatgtgtgagtgtctatgttcagctgtgctcttgagatttcctaagttactcaggagggagccctaagaaacaaactattttgaaaagtcatattcttcagatgggtcactgtcagtcaggaaggtccaggatacagtaatctgagtcattcaacagcaccccagcattcactggccatgactgtccacttaaaaatctgtatgtgatcccaagagttccagtcttccacatcaaaattacaacacctacaacttctccagggtgtttttcttataagttctcccaatcccttaaaagcgattaaggaacaattgctctgaaatttatcttccacctttccatctcaaaataacaaattccaattgcataggagtttctggctttgggttttctacctgctagacttggcagagaggaatgaatgaatttgctgcctcctgtttttttttaactttttctttttcaagtgctggcattcaggttcagagaaagaactgaggcaggactgacctagcaatttctrtagcctgacatagtctcactgaggacttctacaccatgtgttc

SEQ ID NO: 533074 - DNA, 619 bp, Homo sapiens
tgaaggtggcagaactaggattcagcccaatgccccctggacccaattccagttctttcccaactccaccctatataaacgtgtattaagtcacccaggctgctttatcactttgaaagatggaggatcattcactttgtctcacctccttagtttttctttaatcatttcgttagaaagcaatatattttgaaaaaatttctagtctgtcaaagctagttacacttctcagtattcayacattatgattttccataaaactgaatagtctctgtatttagtgtgttcttccttgctgagtctgagagaaaaggtgtctgtcaatgtgtcaacattgctataattctctgaggtcatggctatttaaactctcacatctataaattgcttcactgtctccagggattctttcggtaaaagaaaaaaaaatgcaactttaattttcatatccaacatccaaattgagaacagggtgggtaatttccatcatccaactgctgctacaaaatgaaccagttcaccaaaaatttctcattctgtggcattttgtttcctgtagaaaatatttcaaaaaccacatttgcccagaatccttttctagaaacaactgcaccatcct

SEQ ID NO: 533075 - DNA, 633 bp, Homo sapiens
ctctgcctgtctgtgacatggggagtgtctgtttcgtatgagtatcttcacccctttccagcacttgtcaagcttccttttcaacaaagagagcagccgcaggctcagacccctggcagacacacggtctccccacaatttaatcacttttatctggttcttgtttctgtttttactktccttctgtgtaaggtaagcatccattttccattgaaagtagtgacattacagtttttgaaagcagaacatttttatataaattgggtcatttcaagataaataaaaagtacatgatccattacaaaattgccaaggtggaactcaggcgaatgaagtgagagactcgctgacccagtatatccctcattctacaaagaggaaccagaggtctctaaaagacctccgtgagcctaagctgatgtccacctgcttgctgtcctgtgtaaaagtcatcagcaatggaccctaggcaggtgaagaaaaagcactagagctgctatggccaagacatgaaatgaaactttccagtgggcagtgatgtgtcactagcaccgcggcagcagcgctgggggatgcagagcaggaggggagaagtaccagtgccctcctggcatgcagcttacctgggcacca

SEQ ID NO: 533076 - DNA, 672 bp, Homo sapiens
agggtatccctatctccagcagccacctcctcatccagaagcccccaacgacagtgtagaccttccatagccaagggaggagtttgtttgcaagttcaggagctccctgagctacagacctcattataaacmtgagctaaagatttgttgaatgaaaccaagaggattggaatatttgctctgagccaagcactgtatatgaaatagatttcttgtgatgatatattggtattggggggacaccagggtggaaattgtgactggtaagcactgccttgggtaccaagtttctttactgcgtgcctctgcgtacttccacttgcctctctgcacttcctttgtccattcattaaacagggatgaaaacatagattcctaaaggactttcaacttttcaggtgacagtcattaggtgccaacataaaatgaacacaaactgcagagtgtgtgcacatcttccccaagaatccctgagtggtctctgagggctccaacttcagggctcatttaatatccccttttcccatttatatgcaatgcttcatatttctcccgatcaatgcgccctgagagaaagttctattctctgaggtgtactaattacacctgctaattgctaaatcaagctactgtatcaacacagtttagtttgagtcaattcctaatattgcc

SEQ ID NO: 533077 - DNA, 672 bp, Homo sapiens
agggtatccctatctccagcagccacctcctcatccagaagcccccaacgacagtgtagaccttccatagccaagggaggagtttgtttgcaagttcaggagctccctgagctacagacctcattataaacatgagctaaagatttgttgaatgaaaccaagaggattggaatatttgctctgagccaagcactgtatatgaaatagatttcttgtgatgatatattggtattggggggacaccagggtggaaattgtgactggtaagcactgccttgggtaccaagtttctttactgcgtgcctctgcgtacttccacttgcctctctgcacttcctttgtccattcattaaacagggatgaaaacatagattcctaaaggactttcaacttttcaggtgacagtcattaggtgccaacataaaatgaacacaaactgcagagtgtgtgcacatcttccccaagaatccctgagtggtctctgagggctccaacttcagggctcmtttaatatccccttttcccatttatatgcaatgcttcatatttctcccgatcaatgcgccctgagagaaagttctattctctgaggtgtactaattacacctgctaattgctaaatcaagctactgtatcaacacagtttagtttgagtcaattcctaatattgcc

SEQ ID NO: 533078 - DNA, 597 bp, Homo sapiens
tacccaggagaaattgactcactaaatcttagaggcatgcgttcttgggtgattctatcatatttacttggaaaaaatggtcattaagtcaccaagtggggaaaggggttaaaggtgccagagggcctcaagttatataatcttggctaccctgtttaagccccaatttttacactcatcacccagtgatactaattaggtacttgttattaagcaatgaggtattagattgggcaccggtggctcatgcctgtaatctcagcattttgggagcccaaggtgggygggtcatttgaggtcaggagctcgagaccagcctggccaacatggtgaaaccccatctctactgaaaatataaaaaaataaaaataaaaaatgtaatgaggtattaattacatcataaggttatgatgatgagtactgagataatatgtcaaagtgtccggattaggggcctgcatttactaagctgccttccccatcctctttgcgaaaggagaacaatatgatttagttcattgtggtcatgactatgaggatagtcatgatattttgagtttgtttgcatgtaccatctcatttaatctcctcaagagc

SEQ ID NO: 533079 - DNA, 625 bp, Homo sapiens
gcgaagctgtattttttttttttcaatacctttcatttgcacaacaaaatttttactcagcacctgtatatgtccatgaatgtaataatgaacaggataagaaactatattttctcagtgtttcactatatcatactgcctcacatcccgactcaaaaactacacagagcgaatctttactaaacacattctaagtgctggacacaacattggttgaagataatatggtagtaaacaaaagaggaatgactatcttcctcatggggctgacactccacaggaagtagatatcacaaaaatatatgtataaatacaaactatgctaaggctttgaaggaaagtttagartaacagtggaatatggccaaggctccggggagtcctacctagtctgggacgtctggaaaatttttcctggggggcattttaaattttgctctaaagtgcatataagaattatctagttacagagggagaagaaaaagagtcaagcagagaaatctgtgtgactgaggtctctgaggcaagagacagcacagcctattctaagaaatgaaagaaggccatgtcactggaaactagagaacaaggtaatggtggtataagtcagacaagaggaaggtgg

SEQ ID NO: 533080 - DNA, 633 bp, Homo sapiens
agcttgacttctctttgtggccatgaagtggatgaaaacttcacagtacaattccacaaagtcttattttccaccactgatttccaaacagaaataaaaatatgactgtttccacctaggatatctacttttcttccggagaaaaagaaaatcactatggctaggataatgccatgtcctgactagtttcagccaactagatctgtggctaaaaataagtgtaagatcaatctgtggaaactccagaattgccacacaatgggtgagggctagaatgaatactggagacatgaccacaatgtccactayagaatcccattgtttatcaaaatctccttcgtgcacacaggtagtcagtatttattctagtaaattaccacttccagatccaagctctatgtcattctcaagatgcaattatgaactaactatgaataattatgaattaattaagcatgatttatagttttaagaaaattggcaaaaaaaaagtgaaaacaagagaaatcccctatgaacataggtaagtcccagaaatcatagaaatgtaaccagaaggaaaaacaaacaacctacaaacatcattttcagaagaattctggaaattaataaaatttcagattcatataagag

SEQ ID NO: 533081 - DNA, 633 bp, Homo sapiens
agcttgacttctctttgtggccatgaagtggatgaaaacttcacagtacaattccacaaagtcttattttccaccactgatttccaaacagaaataaaaatatgactgtttccacctaggatatctacttttcttccggagaaaaagaaaatcactatggctaggataatgccatgtcctgactagtttcagccaactagatctgtggctaaaaataagtgtaagatcaatctgtggaaactccagaattgccacacaatgggtgagggctagaatgaatactggagacatgaccacaatgtccactatagaatcccattgtttatcaaaatctccttcgtgcacacaggtagtcagtatttattctagtaaattaccacttccagatccaagctctatrtcattctcaagatgcaattatgaactaactatgaataattatgaattaattaagcatgatttatagttttaagaaaattggcaaaaaaaaagtgaaaacaagagaaatcccctatgaacataggtaagtcccagaaatcatagaaatgtaaccagaaggaaaaacaaacaacctacaaacatcattttcagaagaattctggaaattaataaaatttcagattcatataagag

SEQ ID NO: 533082 - DNA, 362 bp, Homo sapiens
aagaacatgactatgtcctacacctcacaaccttaatttttaaactgaatctttaagttaaagaacatctttacctatgtgctaaatttgaccaaaattagtaaattttctggaaaaatacaattgaaccrcaatctaacacaaaatgggaagaattaattttaaaataaatttttactttggtaaacaagtattccatatgaatttctgataaattattaaattattatttttgttttgaaaatatttggctatgtagacattgtcattggttatacttcaggctttccattttgttttctaaagacctctcacaattttctgtttcttgtatcacctctcacaattttctgtttcatata

SEQ ID NO: 533083 - DNA, 531 bp, Homo sapiens
atgatattcccaaatcttaatttgcatatttgcttcatcaaaataaaactttatttacagaaatactactcataccactaattatcctacttgaaagcatagtgtgaggttcacctgaatactgaagtttatatgcttaatgctatgaagaatacattatwatttttgccctattgaggtaggaagaacactttaaagaagtaaacattttggaaaaaaaatgaattacatctaaaaagtaatatcaataacagagagggaaaaataagaagaaaatactgggtggtcagtatcaaaattatgttcatctaagtgtacagttcatgctgtttcccatgtaagagatcaaaatacactgcccccagataggctgctttggcctatttgttatttagagtaaaaaacatttgaaaaacagcagatgcaagaagtgcactctgaacttcctttttcttcctgaaagcaggagattaaattcctatgtgaaagacatgcttatcactagggaagtggaggctgacaaaaatctac

SEQ ID NO: 533084 - DNA, 531 bp, Homo sapiens
atgatattcccaaatcttaatttgcatatttgcttcatcaaaataaaactttatttacagaaatactactcataccactaattatcctacttgaaagcatagtgtgaggttcacctgaatactgaagtttatatgcttaatgctatgaagaatacattattatttttgccctattgaggtaggaagaacactttaaagaagtaaacattttgraaaaaaaatgaattacatctaaaaagtaatatcaataacagagagggaaaaataagaagaaaatactgggtggtcagtatcaaaattatgttcatctaagtgtacagttcatgctgtttcccatgtaagagatcaaaatacactgcccccagataggctgctttggcctatttgttatttagagtaaaaaacatttgaaaaacagcagatgcaagaagtgcactctgaacttcctttttcttcctgaaagcaggagattaaattcctatgtgaaagacatgcttatcactagggaagtggaggctgacaaaaatctac

SEQ ID NO: 533085 - DNA, 624 bp, Homo sapiens
ttacagtgggtactttaacttcccccaccaaccccagtttggaagaataaakctaagaaagaccaagaaattatagttcattgtatctgcttgtagagtttagcaatcttggctaatcctcactctgtggaaggaaggtaggaagacagttggatatgccagaatggatacactaaaagactgggaacatggaactgagtagttagtgtgtgaactagagattgaagagaatattagaaagcagagatgcttcagaatagaaaatttaaaaacgtgatttgtatgttggatgactttaataaataataaaagtattttataacaaagaaaggttattgcttttttgtaagaatgtgaacttcattaaacctctctagattacattttctctttcagttaaatagtaggattcattcttcctgtggattacccatagatgcacagcaaagaataattaatatattattaataagagaaaggtgacaggccacaaatgatgtagaaaagtgatttaagcatgagagacaatgccacttatgttaatttatcagcacccttaattgtgaagaagtgtcagtattcattggtgtttttttccctcatgttgcaaattcaaatgaggag

SEQ ID NO: 533086 - DNA, 624 bp, Homo sapiens
ttacagtgggtactttaacttcccccaccaaccccagtttggaagaataaagctaagaaagaccaagaaattatagttcattgtatctgcttgtagagtttagcaatcttggctaatcctcactctgtggaaggaaggtaggaagacagttggatatgccagaatggatacactaaaagactgggaacatggaactgagtagttagtgygtgaactagagattgaagagaatattagaaagcagagatgcttcagaatagaaaatttaaaaacgtgatttgtatgttggatgactttaataaataataaaagtattttataacaaagaaaggttattgcttttttgtaagaatgtgaacttcattaaacctctctagattacattttctctttcagttaaatagtaggattcattcttcctgtggattacccatagatgcacagcaaagaataattaatatattattaataagagaaaggtgacaggccacaaatgatgtagaaaagtgatttaagcatgagagacaatgccacttatgttaatttatcagcacccttaattgtgaagaagtgtcagtattcattggtgtttttttccctcatgttgcaaattcaaatgaggag

SEQ ID NO: 533087 - DNA, 493 bp, Homo sapiens
ccatgtaaaggagaaagatattctatttatattggaatgtcttgaataattagatttttttagagaaacaccgtgattactaataaattaacctggagaaaggcttaasccattccacataatatgccaaagtcaagcctgatctggacaagtgaagatagaaaggttttcatgtcttaatttcatctagcaattggtactcatattaccatgttaccaccatcaccaaaaagtataatatctaaatgtttattgttgaaaacacattagccttaatttagaatgtgtcagtttactacttgaacttctatgggcctctgtttcctcgtctgtaagggtttactctaagactcagtcacaatattctcttaaatttttagcatatggttggttattgaggagtactgagagtactgaaggactcaatctaataacagaagtcgagggctatctgaagagcttattattgtgactattttccggaacctgaagt

SEQ ID NO: 533088 - DNA, 595 bp, Homo sapiens
tgcctccatcttcctcccctctgcaacatggtctgggtggagaatgtgaacaaccgggcttccccttctctgttatatactgttagggtccttgaggtttggctagaggcctcagggaggctgctcatggcctatccgggtgtcagagcatgagctggggccatggggcaaggtaggatgggacaggccagccctggagatcccaggagcagaacggtaagatccctggtcctcctgtgtggagaaggccccccatctcctccatgggggtgcagcattgggttgggaggagcactgaatgataggaggagcttgaaagagtattttaattctgagctttctaagtctttctctaagtgaaacatggcctgggktgtttcttgatttctttggcatgattgatactatggggtcaatgaaatctcttgagttgttatccacaggcctcaaggcagccataatttacatctccctaggggagaatggtcctctctcttccctcccagaagaagagtcaggaggggaccttactatcattcattctatcctgggcccagtctggccttgtccacaaccagcatccactttccaaccc

SEQ ID NO: 533089 - DNA, 583 bp, Homo sapiens
gttttgaattccactccaaacatgtgtgtgtgtttgttttaataatataaaaatgttccaaattattccccagttgttactggtctcctcaccacaaattaccaaccactgagtaaaatcctccaggaaataaacaatgtggctcttcgcatgctastgtcacacagccaaggactgtgagcacacccatttgagaagcaggtctccaaaggaatggcttggacaggagaggcgtaatgcatcccccacgtctcacgggtacaaccatgtctaaaggaattgctcccctgagtgaaagcatctaaaaacctcccacccgagttattcctccccaaaccgcatttctgttccctggcaagagaattcttcctatgtttacggatgcacattctcaatacagagatccagagagagataaaaaataaaaagagatcatgtcagacctggatgaccttagcgctggtccgacctcttcgttgtatagacgggaggaagctttccaaagccaggactgactggagtctaaccgcagacagcaattgttagaaaccttcctcacttgcctccaccacctctttgccag

SEQ ID NO: 533090 - DNA, 589 bp, Homo sapiens
tgtttctatccctctggttctgttgctgggtaggggctttggctgctgcaggcttcagaccctgagggtgtgcagtatggactcacagcaagtctccaaaagacctctagcacgataaagatgaattactcgtgacaattcttccctcccttatcatgcctgagactgttaattggctcagcattcaggcacatttgagacatccaggcatgggatagagtgaaggcttagaggcccttccgccattgtgtttcaactgtgtaacaagactcggatgctacacatgtcaggtgttcagaggaggaagtatgaggaaaggcaggcaggtttgggagctgggggatatcacagatgtgctggccgttggcagaagggccaggctaggcccggagtgtttaaggctttcctgagatggggtggggctccgatgacacagcctgcagaggagcctctgtggcttgtctgagtgaccttgaggataccagggtgacggttttcaacatgtgacgggaaagcttgggcaagggctggtgtttagtgaatgtcagstccaggattttgacactcattctccaagtctaaatggggc

SEQ ID NO: 533091 - DNA, 645 bp, Homo sapiens
tttgaggacaagaatggggagagttcacagtctggaatgacatcttcttgaggaagtggtgtttgagctgaattctaaaggataagctagaattaaaaggaggagagaagggagaaaggttctcagcagagagaagagggtatgaggcatgatgagggaagaggtatgaggaagagaggcatgatggagaaactagaaaaaggtcagtgtggctgaagtgctgctgagaggcagagaggacgggcccaagaggtggtcagcaaggctaggtaggccagaccctgcaagggctctcaggccaggtatgggagctgggtctgcagggaagggcgatgggaagcttccaagaagtggggctgaaagactggagacaagctgtgagaggatggaggaggccagacagggctcttagcaattgcccgggctggggacacggcaggctcagcacaggggccagcattggaggaggacagagccggcgattcatgatgtgtttgggcagaaaaatcaacaagacttgatgcttgatgggatrtagaacttaaggaagagagaagaaaattctggattaggtgactggaggatgatggtcccattcatttgaggtgggaacataggaggagtggaaaggaggagttcaggttt

SEQ ID NO: 533092 - DNA, 575 bp, Homo sapiens
tgcaaattatgtattttcatattttacataactgctctacactactgtttgacctgatctttttcygggggttagagagaaatctctctccatattgctggtcctcttaccgaaatgcttttataaagaaatgactggtgacatttattcaccaaaggaattaatgtactgggtcaaagattaacaatgctatactatacagtaattgagttttttataacaatattttaacatacctctctctctacatacaaataccatgaagtaaactaaatgaaacaaaggaatgtaggggaaaatgaaataattttggtacatcttatggcttaaagagaagaaagtaagatgaaatatcctaaaatataggagcacaaacattcaaaattcataatcagattaacagcactctcttgaatctgggaatcattaaaaactccctgcacttagatttaatttatatgtaagttacattattaaaagtcataaggcatttatctgagtcattgctctacagagggcaattaatgaatggcttgtaataataaaaagaatacttcggctgggcacggtggctc

SEQ ID NO: 533093 - DNA, 575 bp, Homo sapiens
tgcaaattatgtattttcatattttacataactgctctacactactgtttgacctgatctttttccgggggttagagagaaatctctctccatattgctggtcctcttacygaaatgcttttataaagaaatgactggtgacatttattcaccaaaggaattaatgtactgggtcaaagattaacaatgctatactatacagtaattgagttttttataacaatattttaacatacctctctctctacatacaaataccatgaagtaaactaaatgaaacaaaggaatgtaggggaaaatgaaataattttggtacatcttatggcttaaagagaagaaagtaagatgaaatatcctaaaatataggagcacaaacattcaaaattcataatcagattaacagcactctcttgaatctgggaatcattaaaaactccctgcacttagatttaatttatatgtaagttacattattaaaagtcataaggcatttatctgagtcattgctctacagagggcaattaatgaatggcttgtaataataaaaagaatacttcggctgggcacggtggctc

SEQ ID NO: 533094 - DNA, 575 bp, Homo sapiens
tgcaaattatgtattttcatattttacataactgctctacactactgtttgacctgatctttttccgggggttagagagaaatctctctccatattgctggtcctcttaccgaaatgcttttataaagaaatgactggtgacatttattcaccaaaggaattaatrtactgggtcaaagattaacaatgctatactatacagtaattgagttttttataacaatattttaacatacctctctctctacatacaaataccatgaagtaaactaaatgaaacaaaggaatgtaggggaaaatgaaataattttggtacatcttatggcttaaagagaagaaagtaagatgaaatatcctaaaatataggagcacaaacattcaaaattcataatcagattaacagcactctcttgaatctgggaatcattaaaaactccctgcacttagatttaatttatatgtaagttacattattaaaagtcataaggcatttatctgagtcattgctctacagagggcaattaatgaatggcttgtaataataaaaagaatacttcggctgggcacggtggctc

SEQ ID NO: 533095 - DNA, 575 bp, Homo sapiens
tgcaaattatgtattttcatattttacataactgctctacactactgtttgacctgatctttttccgggggttagagagaaatctctctccatattgctggtcctcttaccgaaatgcttttataaagaaatgactggtgacatttattcaccaaaggaattaatgtactgggtcaaagattaacaatgctatactatacagtaattgagttttttataacaatattttaacatacctctctctctacatacaaataccatgaagtaaactaaatgaaacaaaggaatgtaggggaaaatgaaataattttggtacatcttatggcttaaagagaagaaartaagatgaaatatcctaaaatataggagcacaaacattcaaaattcataatcagattaacagcactctcttgaatctgggaatcattaaaaactccctgcacttagatttaatttatatgtaagttacattattaaaagtcataaggcatttatctgagtcattgctctacagagggcaattaatgaatggcttgtaataataaaaagaatacttcggctgggcacggtggctc

SEQ ID NO: 533096 - DNA, 582 bp, Homo sapiens
ttggaaaatttataggcttaagtgtagggagtgcagggtaggagaaggcatcctctgtgcttggacttaggtcagcttctaggtgggtgatgaaagaaaaggaattaacaattactgagtaccactacataccaggttctatgattacctcatttattttttatagctctatgagttaggtattatcgctgttttacagattaggaatttggagaaactaagacagttgtccaaagccatacatttagttctcaccaaagttgagatgtaaagcaatttttgtctgtgtcagtaaatccatgctctttcccatactaggctacctcctaataaaggacgtaggttttcttgggatccacttaggacaggagtccaaggataccttagtaggatatcactttaaytggagagagtattctagctttatcaatgttttctcctccctcttctcccctctccataccttcttgagactagggagacccccacacatatttcattcattttataattctttacagaataatggaaatagcctaggctcagactagtcttcaactgagtctagatgagaaattgcca

SEQ ID NO: 533097 - DNA, 483 bp, Homo sapiens
tggaaaatttataggcttaagtgtagggagtgcagggtaggagaaggcatcctctgtgcttggacttaggtcagcttctaggtgggtgatgaaagaaaaggaattaacaattactgagtaccactacataccaggttctatgattacctcatttattttttatagctctatgagttaggtattatcgctgttttacagattaggaatttggagaaactaagacagttgtccaaagccatacatttagttctcaccaaagttgagatgtaaagcaatttttgtctgtgtcagtaaatccatgctctttcccatactaggctacctcctaataaaggacgtaggttttcttgggatccacttaggacaggagtccaaggataccttagtaggatatcactttaattggasagagtattctagctttatcaatgttttctcctccctcttctcccctctccataccttcttgagactagggagacc

SEQ ID NO: 533098 - DNA, 613 bp, Homo sapiens
acgaatgtggagactgctgatacctcatgtatcttttaaaatagatgtttagaactcaaaatattgtgaccattaataacgtgacttaaaaaatatttagaatcaatcattagtaagaaatcacatatagttaaagtgagataatatgattaagtagaactctataatttgttaacaggcttttgtgtttgcctaatatgactaaggagtttacattagaaatttgaagctatttgattgaaaaggcaaatttgcactgcaattttgagtttagattacttttcctaacttctctttatacttataccttgctgtggtagaacccataataattaaaaaaaatttaaagaaagaattaaccgatgttctggagagtgcgtaacatgcacattttgcmatggtttttttcatatgtaaattgatatcttatcatgaagcaacctacaaaagatgatttctattaatatgtttgatgtatattttttcccacaggttctcagctggtgtgtgttttcttcctctgtggattctgcccaccatcaagtaccatgtctcgcatatcatagacacagagaaataatagtcgctgaattataccatgctaaatctgata

SEQ ID NO: 533099 - DNA, 613 bp, Homo sapiens
acgaatgtggagactgctgatacctcatgtatcttttaaaatagatgtttagaactcaaaatattgtgaccattaataacgtgacttaaaaaatatttagaatcaatcattagtaagaaatcacatatagttaaagtgagataatatgattaagtagaactctataatttgttaacaggcttttgtgtttgcctaatatgactaaggagtttacattagaaatttgaagctatttgattgaaaaggcaaatttgcactgcaattttgagtttagattacttttcctaacttctctttatacttataccttgctgtggtagaacccataataattaaaaaaaatttaaagaaagaattaaccgatgttctggagagtgcgtaacatgcacattttgccatggtttttttcatatgtaaattgatatcttatcatgaagcaacctacaaaagatgatttctattaatatgtttgatgtatattttttcccacaggttctcagctggtgtgtgttttcttcctctgtggattctgcccaccatcaagtaccatgtctcgcatatcatagacacagagaaataatagtcgctgaattrtaccatgctaaatctgata

SEQ ID NO: 533100 - DNA, 593 bp, Homo sapiens
ggcagttggccaaacactgccttaggacagcaaatgatgaatgattgcctttctgaaggaaaatcagatcctcctcctgttgatgccactgaaacacaacaaagyatgccaagagggcctctgatgctgttgtgaaagcagaggtatacagtgataggttcgagatgagtatgttacagcaccatgagagtcattaggacctctaaaacgaatccttaggcttcccaggatactatgcagaccttcgctagtctatctagttcttaaaaggaaacaccaacatctgttctacctctgtagcatggcagtgagcaatcatacagaagtgataaagagcagttaaagctacaactagttaatccatttctctctctatttatgttaatataggttgacagactggaatgccaaccagtgtgtggacagtaaaggacatgctttaaggagggggttggcttgagtccactgggttgtgatgtgcccagaagggatgcccataagaatacacaagaatagaggttccaaggctgccaaattaagctcattcattactaatggaacttgggaattatcaactgtgaattagagctgga

SEQ ID NO: 533101 - DNA, 618 bp, Homo sapiens
ttatttagatttgcatttggctgcatgtgacagggatctgattgcaaagataaaaacaagtaggastttatttttcttatgtagaaaaataaatgcagacacagtcatccagaatggaatgtcagttccaggatgcctccagtacgcagtctcctttctgaattctcctgcagcctccctggcatagtgtggggctttctttctcatgctcatacggtggctgctgcacttctaggcaggaaacacctgaaagagtccagggtggaaagtggagaacaggaaatatgttcctttatttctggaaagaaatatatttttctcagttgtccacttagttaacttgtgcttatgtctcactgccaggaaataataggtcatgcagctatcactagctgtaagtgagtctggaataagcaatatttttaattgatgcattgctgtcctaaagcaaaatcaaggctcttttagttaagaaaggaagagggaatgggtattggtctgccaaccaacagtgtataaaactaaggtgtattgtgacttcctaaaaacgggaatatagtcttatgtgttatttcttcaccttgtttttcaagatctcctttgagaaggctttacagg

SEQ ID NO: 533102 - DNA, 618 bp, Homo sapiens
ttatttagatttgcatttggctgcatgtgacagggatctgattgcaaagataaaaacaagtaggagtttatttttcttatgtagaaaaataaatgcagacacagtcatccagaatggaatgtcagttccaggatgcctccagtacgcagtctcctttctgaattctcctgcagcctccctggcatagtgtggggctttctttctcatgctcatacggtggctgctgcacttctaggcaggaaacacctgaaagagtccagggtggaaagtggagaacaggaaatatgtycctttatttctggaaagaaatatatttttctcagttgtccacttagttaacttgtgcttatgtctcactgccaggaaataataggtcatgcagctatcactagctgtaagtgagtctggaataagcaatatttttaattgatgcattgctgtcctaaagcaaaatcaaggctcttttagttaagaaaggaagagggaatgggtattggtctgccaaccaacagtgtataaaactaaggtgtattgtgacttcctaaaaacgggaatatagtcttatgtgttatttcttcaccttgtttttcaagatctcctttgagaaggctttacagg

SEQ ID NO: 533103 - DNA, 297 bp, Homo sapiens
ttgaacacacagaataattaaacttttcctctagaaactttgtggtcttttcttgccattgccttaaagtattcagtgtcctaaagggagttgtcataamtgaaagtgcatagaaagaggtcatttacatattggattacagtggagtcttctgggaattttaagtccatcaaataggttcatgagaaatatgtagggccatagtaaatcgttggggcataacagtccaggtgtattgtttattttcccaggtgaaggcaaagtagtgagattctttatgaggggaatattataaaa

SEQ ID NO: 533104 - DNA, 297 bp, Homo sapiens
ttgaacacacagaataattaaacttttcctctagaaactttgtggtcttttcttgccattgccttaaagtattcagtgtcctaaagggagttgtcataactgaaagtgcatagaaagaggtcatttacatattggattacagtggagtcttctgggaattttaagtccatcawataggttcatgagaaatatgtagggccatagtaaatcgttggggcataacagtccaggtgtattgtttattttcccaggtgaaggcaaagtagtgagattctttatgaggggaatattataaaa

SEQ ID NO: 533105 - DNA, 297 bp, Homo sapiens
ttgaacacacagaataattaaacttttcctctagaaactttgtggtcttttcttgccattgccttaaagtattcagtgtcctaaagggagttgtcataactgaaagtgcatagaaagaggtcatttacatattggattacagtggagtcttctgggaattttaagtccatcaaataggttcatgagaaatatgtagggccwtagtaaatcgttggggcataacagtccaggtgtattgtttattttcccaggtgaaggcaaagtagtgagattctttatgaggggaatattataaaa

SEQ ID NO: 533106 - DNA, 628 bp, Homo sapiens
gctggatattaaaaaagcactaaagtcttcatctatttgatattaatttatcaagtatttatctaaaaatctacagtttaaaaagattatttgcttgtttcaaaatacataatgtttccttttcactgayctttgcccagtgggcgtttcctttctctggaaacctgtctttctgtctgctcccccggcaaaccaactaatttaatacatttacaatttacacaactttttttttttttccagtttccatggagatatcacattaacttaaatggaaaacagtgtttggtaactcttactctttaaagccacagtaaatatcgtagtttgagataaattgtttaatttctgtttatctgcctggttcaaagatttcttatttctttgccccctgtttagttagctgatttctttaaaagtttttggaaggacagtgtaagtcacaaatgagtgaggtgaacttcaatttttgtttttgtaatgattctacaagtcactagatttctaaaagaatcacattaattccaggtatcaaagcaatctaaaagttgggctattagaagcgtcacttgttaaactcttgatttgggcattaattttagagcgattgtgagttatcttagctgat

SEQ ID NO: 533107 - DNA, 628 bp, Homo sapiens
gctggatattaaaaaagcactaaagtcttcatctatttgatattaatttatcaagtatttatctaaaaatctacagtttaaaaagattatttgcttgtttcaaaatacataatgtttccttttcactgatctttgcccagtgggcgtttcctttctctggaaacctgtctttctgtctgctcccccggcaaaccaactaatttaatacatttacaatttacacaactttttttttttttccagtttccatggagatatcacattaacttaaatggaaaacagtgtttggtaactcttactctttaaagccacagtaaatatcgtagttwgagataaattgtttaatttctgtttatctgcctggttcaaagatttcttatttctttgccccctgtttagttagctgatttctttaaaagtttttggaaggacagtgtaagtcacaaatgagtgaggtgaacttcaatttttgtttttgtaatgattctacaagtcactagatttctaaaagaatcacattaattccaggtatcaaagcaatctaaaagttgggctattagaagcgtcacttgttaaactcttgatttgggcattaattttagagcgattgtgagttatcttagctgat

SEQ ID NO: 533108 - DNA, 543 bp, Homo sapiens
tgcacctgcatgggtgctacagcaagatgcagggcaggtgccgagagtgcccctaaggaggcagcagtggggacacatggtggacacgacgctcccctgcatgtagggtcctttctttgaagtagggcacttggccaggcgcagtggctcacgcctgtaatcccagcactttgggaggccgaggcgggtggatcacgagttcaggagatcgagaccatcctggctaacacggtgaaacccagtctctactaaaaatacaaaaaattagctaggcgtggtggcgagtgcctgtagtcccagctactcgggaggctgaggcaggagaatgatgtgaacccgggaggcggagcttggtggagccgagattgcgccactgcactccagcctgggtgacagagcaagactccgtctcaataaataaataaatagataaataaataaagtagggcactcatatggctaggaggccatgagtcctgaagagcccatcacagatggcasccctgtcggtaggcaggggagagcaagccccttcatcccagc

SEQ ID NO: 533109 - DNA, 599 bp, Homo sapiens
cttctcaaggtaacatgagtctttttattttttttaaacagtctttcttgctgtaagaactcttataatggagcctagtcctcctactgctaaggcctgtgggggcaggaaaagaaaacgtgtcagatgagacctggctggccaaggggagcctggcttgccagagacaggggggacattccctgacctagatcccgtcacagatcctcgaaagaggattcctgagatagagcacattctagggaaggagccctgtcctggagccgtggggtcccgagagctgttggctcttgggcagaactggcttgagaacactgtcaccagcacacaaagcagagccctcgagcttcccttttgagatggggtctcactctgttgcccagatcacagctcactgcacagccttgatgtcctgggttsaagccatcctcctgagtagctgggaccacaggtgtgcaccaccaggcccggctaatttattttttttgagacggagtttcgctcttgtcacccaggctggagtgcaatggcacgatctcggctcactgcaaccctgcctccccagttcaagcgcttctcctgcctcagcctcccgagca

SEQ ID NO: 533110 - DNA, 623 bp, Homo sapiens
aacataggctcacttgctcttcatgtaaacctggcacaactaacaaatgacatcattcaaatgatggatggggaagggcaggtataaaactagtccamgggggcaaaaagctactgctgtggcgttaactcagcaccacgcgtccagcaatcactcggcccattgatgggtgagggccttcagcagttgggagatgtggggcgcagggaggacctccctgaagtcacctatcatttgtgaagccggctgtcatacttggctggctttaggccttttcagagaacaggctgtggtgctgagggaatcctgcccagcccttgatctcctctagatcttcctcaatcacggcacaactgacactgtggacccaggattctctgacgtgggatcttagctgtgtgtcataggcctctgcccactggattccagtggcatccccaagctgtaaccatcaaaatgtctccagtttcctgggggtggaggggaagggtgcaaaatcgctcacaaccactgctctggacagagccctgatccagaagtatagaagctgcttcactgaaggggaaaggaactcatacttttaaatcgccacaaggtctcggatcctgtgccaggtgctttca

SEQ ID NO: 533111 - DNA, 623 bp, Homo sapiens
aacataggctcacttgctcttcatgtaaacctggcacaactaacaaatgacatcattcaaatgatggatggggaagggcaggtataaaactagtccacgggggcaaaaagctactgctgtggcgttaactcagcaccacgcgtccagcaatcactcggcccattgatgggtgagggccttcagcagttgggagatgtggggcgcagggaggacctccctgaagtcacctatcatttgtgaagccggctgtcatacttggctggctttaggccttttcagagaacaggctgtggtgctgagggaatcctgcccagcccttgatctcctctagatcttcctcaatcacggcacaactgacactgtggacccaggattctctgacgtgggatcttagctgtgtgtcayaggcctctgcccactggattccagtggcatccccaagctgtaaccatcaaaatgtctccagtttcctgggggtggaggggaagggtgcaaaatcgctcacaaccactgctctggacagagccctgatccagaagtatagaagctgcttcactgaaggggaaaggaactcatacttttaaatcgccacaaggtctcggatcctgtgccaggtgctttca

SEQ ID NO: 533112 - DNA, 357 bp, Homo sapiens
gggggctggccaaagacaagagacaaggacattggctaaggggcccaaagcccagggccaccaacagctcagccagaacagggccctaggatggcaggcagagccagggcctccaccccacaccagtacactggccctaaagacctctggttctgagtggccctgggaagggagactgggttgagagaacaagggagaccggggagatgggggagggcagggaggggagggcgtggttgaagtctgctcattcctaaaatggggctggcctgaragcacagcctgcctgatcacaactgaggtgttaggcaagggacggtgcctctctgagcctgtctcctcgtctgttaaatgggt

SEQ ID NO: 533113 - DNA, 536 bp, Homo sapiens
ctgggacaggtcatctgaccactcggagactgctagaaattagctcctcagcgacagtgaccaaggtactggagttatttaatagacattgttttggtgctgaaaggagggagaccagaggggaggcccattgagctatttgctttcaatatccatccaagtccttctgtacatttaagcccttaattcatcctctatttaggcctctttctttccctgataaatttttgaggggtgtttaaaagaaagactaatattctcctggcaaaatgtaattggcagtcccctccccactccaccattgttgaaaatctcttggttcagaagcctsggtttctatcaggggctgaatctccagagattatttggtggactcctggaagataattcaagctgtccctttaaatctatccctctgactttcagtttggccctatttaaatattccagacaatttaaagacttaataaagatgaatatgattaagattagggtttaataacagcattaagaaaagatttttcatttgatggagg

SEQ ID NO: 533114 - DNA, 534 bp, Homo sapiens
taaaaggtaaggctgaacagcaggagaaagggagaccacagagagttttgaataccccactgagaagtgtgrgtttgtccaggcaggcaatgaggggctgttagaagctttgagtgttgcatgaaccatggtagggccctcagtgaataaatggatgaatctgaatccacaggaaaatagcagctaagaagttaaggaaggaaaaaagaaagggaggaagtaagaaaggaaggaaagagaaataaagaaggcagtttctaaaaaagcccccagtgatcctcacctccctgtccctgtgtaatctccttgagggtgggcttccttagtcacttgtttctaagaaatcaaacgcagcagatatgatatgatatccaccctgagatgaggttacagcagactttgctatttctcctgctccactctcttgctctcctacttgcttgctttggtggagcaaattgccacactgtgagatgtaaaactgtgatgggtgacaaagccaagacttgaacacaggtctttccccaaaacctg

SEQ ID NO: 533115 - DNA, 623 bp, Homo sapiens
aattgtaaaaggtaaggctgaacagcaggagaaagggagaccacagagagttttgaataccccactgagaagtgtgggtttgtccaggcaggcaatgaggggctgttagaagctttgagtgttgcatgarccatggtagggccctcagtgaataaatggatgaatctgaatccacaggaaaatagcagctaagaagttaaggaaggaaaaaagaaagggaggaagtaagaaaggaaggaaagagaaataaagaaggcagtttctaaaaaagcccccagtgatcctcacctccctgtccctgtgtaatctccttgagggtgggcttccttagtcacttgtttctaagaaatcaaacgcagcagatatgatatgatatccaccctgagatgaggttacagcagactttgctatttctcctgctccactctcttgctctcctacttgcttgctttggtggagcaaattgccacactgtgagatgtaaaactgtgatgggtgacaaagccaagacttgaacacaggtctttccccaaaacctgttcttttaactattatgatacaataagtcagtcatttggtaaaaggagaggaagcaggcgaacgtaaggccgtaaaggtagatg

SEQ ID NO: 533116 - DNA, 652 bp, Homo sapiens
tgacaaagccaagacttgaacacaggtctttccccaaaacctgttcttttaactattatgatacaataagtcagtcatttggtaaaaggagaggaagyaggcgaacgtaaggccgtaaaggtagatgaatttgatagtgaatttggatgaaggaatgtgaatctgtgggtaatagagagacttcgggtgctcttggaagaggaaaggaagcaatggagccatagaaatgtgagccccttgactccttttagcaaccccttcctttgctcgatgcaccacaatcctggcatgttcagaagactgttgttgttgtatctgtgatttggttcttgcctctgcctcccaaatgccctccaagatatgatgtggaagaggcaccaaagcagtaacttggacgtaacttattcttgacttgactctttgccagggctcataatcaaccctgaaattggtctttttaccgttgtttggatgatcaggtataaatatacattttaatcatttaattaagtcagtgatttgctgctgatccaatatgtttgacaatattttggtgccacctgtttcctaattggacttaatcttcaaaatatgttaccaaaatagtcaccaaataattacatatacaaaaaaatcaagccacataaaacaa

SEQ ID NO: 533117 - DNA, 486 bp, Homo sapiens
gactttcaaccccttaaggcaggaactatagttcatcaatctttatagctgatatgcaatgtttggtacatagtagatactcaaaatattggagtgggcttttggaagtagacttccagtttagatctgctgtccaccatttactacgaggttttggaaaaagcattcaaaatttctgcacttcagtacccccatcttaaaaatgaaggtgagaataatatgtacctcataggactaatttgaatattaaactggttagtatttttaaattccttttgctagtgcttggtatacataagtatgcagtaaaggttagctgttattgctatcaccattactcatgaccatcgcagagtggaaggcttacaggaattagcatgaattataaccatcatgatccatcacttttatttgagcctttactactttcatcacattttacrttaacaatttaaaatgatcctcacaaccaattctgtgaaatcc

SEQ ID NO: 533118 - DNA, 691 bp, Homo sapiens
tgtctgcagttgcaaacagcccaagataactccagattctaccaggggtctgatctttgaaacgtggctaaatcctctggcttctgtgtatgccccacttttagaaatgagaatagcagagtaatagtggtgggtgggaaaatttaaaattgatgctagctggttattttgcgcattagttgatgcagtttcttcatagtgtcaaaaaccccatcgtctcagccccaaaactccttaagctgatgagcaacttcagcaaagtctcaggatacaaaatcaatgtgcaaaaatcacaggtattcctatacaccaataatagacaaacagagagctaaatcatgagtgaattaccattcacaatttctacaaagataataaaatacctaggaatacaacttacgagggatatgaaggacctcttcaaggagaactacaaaccactgctcaaggaaataagagaggacacaaacaaatgaaaaaaygttctatgctcatgaataggaagaatcaatatcgtgaaaatggccatactgcccaaagcaattgataggttcaatgctattcccattaagctaccactgactttctttacagaattagaaaaaactcttttaaatttcatacggaaccaaaaaagagcctatatagccaagacaatcctaagcaaaaagaataaagctggaggcatcat

SEQ ID NO: 533119 - DNA, 481 bp, Homo sapiens
tacagggtgtatagtaagatggcaaacatgccaagacagcaggaaggagggacatgtgatcctggacaggcagtcagggttctgatcctgtttggtctcccaggctattgtaaagatttggattgttacactaaaagcaatgggcagctgttgaaattttgtgaacatagagttcttaacgaggaaactatcagtattctgattttacagatgttgatattgatagtaaccaagaattgagtacctactctgtaccaggcaattatttccccacttatatcaccccagtaattctgaaatatttagcatttttatccctatttaatgaggaggagacgagacttagagcaggcaaacaacttaaagtcacaggtactatgttcttcccaatttatcattctagtcttagagaaagttrgacctcagtaaggctacaagggctgaaggtcattagagaaaaaacacaggcaaaggggaatga

SEQ ID NO: 533120 - DNA, 560 bp, Homo sapiens
ggttatcagcctgggagtttggttttcttcagagatgggctgagaaaattattctgcttgcctgtcacactagagcagtggtcataactctggctagcgattataattaagtagggtgctttaagaaagttctgagacccagatcccaaccccagagattctgaattgttatggggtatgacctggatattgagattttaaaaatttatgcagccaagtttgagaagcatttgtgttcytcttttctctgaagtatagggtactttaaatatgagacagatttctgttttgacaagactttgggggcagtatttagctgttttctttttgctggcaccttcctcctactatctaattttttggcccaactgtgattaagaatacacttgtattctcatctgagttcttaatcctcttacctatttggactttcctccaactgcctgatttctaatttagaatcccacttcattttacatttctaaaatagaaaaatagaaatctacatgaagtgggattccaggagcacccattccctgctctccctgtagaccaagccc

SEQ ID NO: 533121 - DNA, 560 bp, Homo sapiens
ggttatcagcctgggagtttggttttcttcagagatgggctgagaaaattattctgcttgcctgtcacactagagcagtggtcataactctggctagcgattataattaagtagggtgctttaagaaagttctgagacccagatcccaaccccagagattctgaattgttatggggtatgacctggatattgagattttaaaaatttatgcagccaagtttgagaagcatttgtgttcctcttttctctgaagtatagggtactttaaatatgagacagatttctgttttgacaagactttgggggcagtatttagctgttttctttttgctggcaccttcctcctmctatctaattttttggcccaactgtgattaagaatacacttgtattctcatctgagttcttaatcctcttacctatttggactttcctccaactgcctgatttctaatttagaatcccacttcattttacatttctaaaatagaaaaatagaaatctacatgaagtgggattccaggagcacccattccctgctctccctgtagaccaagccc

SEQ ID NO: 533122 - DNA, 559 bp, Homo sapiens
tttttctctctgtatatgcataactaattcagtctcaaggttcacattcagctctatgtttataaattccctgacctctcatttgaacttcaagttcatatctccaattatttaagatgtctctacttaggtgtccagttttcattgcacaagtccccctgtttccagaaacccagctctttcttcctacttattgaaatttgctgaagccacaatccatgtggactggcctgagcttggggtcacagcactggaacacatccagcagcaaaagtattttcaaaggggttaaaattatttttttatgattgttaaacatcatgacataatatgtgtccacataaatgcttcttaaaatcctattttcctttcctatctactttgcctgcataccatgcwgctattcccaagtatttcttttccataaaattccttcagccattctaggtcatttctctttctctcctctcttaattctgcatcatgaaagtctaaattgctgtttggcacaaagttgggaacatgtgtatgccaagtttgccattaacattacctattt

SEQ ID NO: 533123 - DNA, 490 bp, Homo sapiens
aaatatgcctttttattttatacaaacctttcacagatttggggcatgtgacaagcagcctagaaaataaaaaaataaaaacaaaggcagtggtgaaatttaaaaatatatcccttaatcaatcatgttaggtgacacaagacatgtcatcgtgggcagcatgctaatgctgctgttagggagacaaggagaggagcggaagactttaatgactacacttttaygtttttgatcgtctgaaatcaagctatatttttgtagtttatttctatctcaatatctctaccaacatcagttggtgaaagtaataagaaacaataggtcacagattgcaaaaaaaaaattgcagcataaaacactatgtttggccatttcgcccagtgtttattcctaatattttaggaatgattgcctgacccagaataatgcagctttgttactgaacaccaaagtgtagaagcatccactctggtaatgacatcaatcatcc

SEQ ID NO: 533124 - DNA, 490 bp, Homo sapiens
aaatatgcctttttattttatacaaacctttcacagatttggggcatgtgacaagcagcctagaaaataaaaaaataaaaacaaaggcagtggtgaaatttaaaaatatatcccttaatcaatcatgttaggtgacacaagacatgtcatcgtgggcagcatgctaatgctgctgttagggagacaaggagaggagcggaagactttaatgactacacttttacgtttttgatcgtctgaaatcaagctatatttttgtagtttatttctatctcartatctctaccaacatcagttggtgaaagtaataagaaacaataggtcacagattgcaaaaaaaaaattgcagcataaaacactatgtttggccatttcgcccagtgtttattcctaatattttaggaatgattgcctgacccagaataatgcagctttgttactgaacaccaaagtgtagaagcatccactctggtaatgacatcaatcatcc

SEQ ID NO: 533125 - DNA, 531 bp, Homo sapiens
agacatgtcatcgtgggcagcatgctaatgctgctgttagggagacaaggagaggagcggaagactttaatgactacacttttacgtttttgatcgtctgaaatcaagctatatttttgtagtttatttctatctcaatatctctaccaacatcagttggtgaaagtaataagaaacaataggtcacagattgcaaaaaaaaaattgcagcataaaacactatgtttggccawttcgcccagtgtttattcctaatattttaggaatgattgcctgacccagaataatgcagctttgttactgaacaccaaagtgtagaagcatccactctggtaatgacatcaatcatccctgaaacatttcttagatttggcaattcaaatgtccattctctagcatagagtactttatacaaagtaagcatgtgacacatacctgaccaaaattcactcttggactttaacctaggaaacaatgaattacttaggtctttgatctaaaggcctcagttattcaaatcaccataattgc

SEQ ID NO: 533126 - DNA, 413 bp, Homo sapiens
tcctggggatctgcagcaccctttgtgccacgtcaaaccatagaatcagacataaagctttgcctttctcctttatccacaaaaatttgattgccctggggattttgccatgctttgtcactcgactgaagatttgasggtgtcatggggagggatcacaggttttgccaactttatagactgcccagtggatatctaccagctcctttctcactccaacctgtggcttttcttgcagggagaactaccagtctgctttcctcagtctcagaaaattccaaggaatacaacattctccattttttcccttccacattaatcttcccaagagggttctgggctctttgaattcccagatgagttcaccgagggcagtgaaccagattcagactcaggatagagaagccctttct

SEQ ID NO: 533127 - DNA, 573 bp, Homo sapiens
tagtgccagaatatgattgcccctgagatgaagctgctggagcatacagttgagctcaaggtgctgtctgttctccggaacagaacaagcaagagtgtggcttcaaagagtataggttacagcaggccatctagtggaggcctgttgcctcagggtcagctcctgcctggttaccctgttctagaggttgaatatgctgtgatgtgcagtgtatgctttatttgtgcccttgggtctccacttctgattggtataggtctctgtttttctgcttctgacttggctgtcctaggcacttaggtttcttcatttgaactccttcctggccgatgccttttcactgtccacctgctttagccccttcacaccttcactaccatgagcttkccctctgtcattccagctaccatggttcagtccaagtcatctctcacctgcactgtggaaacagccacctgactaactcttcacctcaaagctggataagtggctatataatatgggaggctttcagtggacttcgatttgggtgagcctttgctgccctcttctggtctctagctgctatagccg

SEQ ID NO: 533128 - DNA, 573 bp, Homo sapiens
tagtgccagaatatgattgcccctgagatgaagctgctggagcatacagttgagctcaaggtgctgtctgttctccggaacagaacaagcaagagtgtggcttcaaagagtataggttacagcaggccatctagtggaggcctgttgcctcagggtcagctcctgcctggttaccctgttctagaggttgaatatgctgtgatgtgcagtgtatgctttatttgtgcccttgggtctccacttctgattggtataggtctctgtttttctgcttctgacttggctgtcctaggcacttaggtttcttcatttgaactccttcctggccgatgccttttcactgtccacctgctttagccccttcacaccttcactaccatgagcttgccctctgtcattccagctaccatggttcagtccaagtcatctctcacctgcactgtggraacagccacctgactaactcttcacctcaaagctggataagtggctatataatatgggaggctttcagtggacttcgatttgggtgagcctttgctgccctcttctggtctctagctgctatagccg

SEQ ID NO: 533129 - DNA, 573 bp, Homo sapiens
tagtgccagaatatgattgcccctgagatgaagctgctggagcatacagttgagctcaaggtgctgtctgttctccggaacagaacaagcaagagtgtggcttcaaagagtataggttacagcaggccatctagtggaggcctgttgcctcagggtcagctcctgcctggttaccctgttctagaggttgaatatgctgtgatgtgcagtgtatgctttatttgtgcccttgggtctccacttctgattggtataggtctctgtttttctgcttctgacttggctgtcctaggcacttaggtttcttcatttgaactccttcctggccgatgccttttcactgtccacctgctttagccccttcacaccttcactaccatgagcttgccctctgtcattccagctaccatggttcagtccaagtcatctctcacctgcactgtggaaacagccamctgactaactcttcacctcaaagctggataagtggctatataatatgggaggctttcagtggacttcgatttgggtgagcctttgctgccctcttctggtctctagctgctatagccg

SEQ ID NO: 533130 - DNA, 624 bp, Homo sapiens
ttattagtattaattctattataactaaaagtgacggaaaataatataaagatgagtgaatcagtttatctaaaagttgtacaaagtagtacaagagttcaaaagagaaactaatatagtatcaggatcagtgtaggattccyggagcaagtacagcaaagttaagggaaatctggttgccaaaatctccaaaggctttgagtgtcaagataatgggcttatagcttattcaatagaaaactgagaattatagaaatgttttaagtagggaggaccatgtcatatgatttttaaagtttagcttaaataatttggcagaaatatcactaagtcctagaacttttctatcttttgtggatgtagtagtgggaactctttaaaactggcagacatgctgtgtttttcagctctttctctccaaatctgaatgctggtatgaaatatattaaagagatatcaccaatgacccagaattctgtctattctaaagtacgggtgcactctgaaagtaagcacacaccctttggctcagtcaaatcatccccagtccttaaacagactgtggcagtgtatcagtccattctcacactgctataatgaactgcctaagtctgggtaaattat

SEQ ID NO: 533131 - DNA, 626 bp, Homo sapiens
gctgataagtgttagagccgcaatctagatcctggatttatctaaggcagacagcaggatgtgaaagggaccagaaaaacaaaaccaaacaaaagctctgataagtaatgttctgtcttaggtaaatagcaccttttctttaaatccatactattttgttaatgactggtatcagagactttcttggaagtaggtttcatagaatggaatgcaaatgaaartttatgggcaaatagattggggtttctggggagagtacattgaagttaagggttcaaaacacaacctaggtcagtttataatttgccatctaactagctgaagctgttgtatagaaattgagaagtactgattggtgaaatatcaaagttagccatattagcaatcactaccaagtatttttctgtttcccttaaggtttttttgatttcaccaaatatatgtctcatatatgcactgaaaatgttaagccctgaaaatgctaaaatatttgtgagcctaaccttgatggacatcaaaacttatgacagaaagttgagtaagttataagcttggaatttgcgtttattaacaaacacgtttgtttaccctatgacaagcactattctaaacaatttacaaataca

SEQ ID NO: 533132 - DNA, 620 bp, Homo sapiens
aagtgttagagccgcaatctagatcctggatttatctaaggcagacagcaggatgtgaaagggaccagaaaaacaaaaccaaacaaaagctctgataagtaatgttctgtcttaggtaaatagcaccttttctttaaatccatactattttgttaatgactggtatcagagactttcttggaagtaggtttcatagaatggaatgcaaatgaaaatttatgggcaaatagattggggtttctggggagagtacattgaagttaagggttcaaaacacaacctaggtcagtttataatttgccatctaactagctgaagctgttgtatagaaattgagaagtactgattggtgaaatatcaaagttagccatattagcaatcactaccaagtatttttctgtttcccttaaggtttttttgatttcaccaaatatatgtctcatatatgcactgaaaatgttaagccctgaaaatgctaaaatatttgtgagcctaaccttgatggacatcaaaacttatgacagaaagttgartaagttataagcttggaatttgcgtttattaacaaacacgtttgtttaccctatgacaagcactattctaaacaatttacaaataca

SEQ ID NO: 533133 - DNA, 543 bp, Homo sapiens
gataagataaatgtaagtaatgctacattcacaaataactatggaaaccacatagcctcaatctacaaagtttttttcttgcttatgttacttgtccattcatggataggcaggggcactctgttcatcactgtcactcagaaattcsggctgatggagaaagccttcctcctgaacatcaaaggccatagtgctagagaaaaaagagcttttcagtgtctcatattagctactaaataccatagcctggaggtgacctatatcatttccaggcataactcattggcccaaactaactacatagaaccttcagacacaagagtgccagagaatgcaaccctacatatgcttggaaggcagagagctggaaaatatttgatgactatattaatcattaattccatgtctcctctttgtaagaccctatttttatttttaagaaaaacttgggaaatttttgaaagctgtggccacactgttcagatgacatgagtgctttcgacatagagtttctggactataaataatttcatgtccaggagg

SEQ ID NO: 533134 - DNA, 666 bp, Homo sapiens
acttctagcaattcctacaaagtctcatggrtttcagggaggggcacacttctgtaaaaaatctgcttaagcctctctgcttgataatggtttctgtaaatacagttgagtgagatattataaatcccagtcacatctattctctttccaattccttgtttcaatccacatagctcagagttctctcctttaagtgctctacataaatacataaatacagagtagagacatgttaagccccgttgtctaaggtggtggtagaaaataagtgagattaaaattaaaatgtgaataaaaatgttacatatttagaagtgttttaatccttttaatatctgtgaccaagactggttataggaccactgaaaagttagagaaagattgttctttgatgtcctctgtaattcagaattcaatttcaaccactttttcccttcctactcactcctttcttgactctatgttggcccagttcctaggattgagtttccttcttactgactactcctgttttgatttcctgggaatggagctatgtaaatgcaacttcaagtcacctcccaaggactacctccctttccaatcatattccatgcctaacctctcctatacacacattctggctctggccatttagttagatgtatttactaattcattaagtta

SEQ ID NO: 533135 - DNA, 666 bp, Homo sapiens
acttctagcaattcctacaaagtctcatgggtttcagggaggggcacacttctgtaaaaaatctgcttaagcctctctgcttgataatggtttctgtaaatayagttgagtgagatattataaatcccagtcacatctattctctttccaattccttgtttcaatccacatagctcagagttctctcctttaagtgctctacataaatacataaatacagagtagagacatgttaagccccgttgtctaaggtggtggtagaaaataagtgagattaaaattaaaatgtgaataaaaatgttacatatttagaagtgttttaatccttttaatatctgtgaccaagactggttataggaccactgaaaagttagagaaagattgttctttgatgtcctctgtaattcagaattcaatttcaaccactttttcccttcctactcactcctttcttgactctatgttggcccagttcctaggattgagtttccttcttactgactactcctgttttgatttcctgggaatggagctatgtaaatgcaacttcaagtcacctcccaaggactacctccctttccaatcatattccatgcctaacctctcctatacacacattctggctctggccatttagttagatgtatttactaattcattaagtta

SEQ ID NO: 533136 - DNA, 666 bp, Homo sapiens
acttctagcaattcctacaaagtctcatgggtttcagggaggggcacacttctgtaaaaaatctgcttaagcctctctgcttgataatggtttctgtaaatacagttgagtgagatattataaatcccagtcacatctattctctttccaattccttgtttcaatccacatagctcagagttctctcctttaagtgctctacataaatacataaatacagagtagagacatgttaagccccgttgtctaaggtggtggtagaaaataagtgagattaaaattaaaatgtgaataaaaatgttacatatttagaagtgytttaatccttttaatatctgtgaccaagactggttataggaccactgaaaagttagagaaagattgttctttgatgtcctctgtaattcagaattcaatttcaaccactttttcccttcctactcactcctttcttgactctatgttggcccagttcctaggattgagtttccttcttactgactactcctgttttgatttcctgggaatggagctatgtaaatgcaacttcaagtcacctcccaaggactacctccctttccaatcatattccatgcctaacctctcctatacacacattctggctctggccatttagttagatgtatttactaattcattaagtta

SEQ ID NO: 533137 - DNA, 518 bp, Homo sapiens
gctggcccaggtgctaagtccctaactgcctggggccagcggtgctggctggccactccaagtgcagggcccgccaagcccacgcccacctggaactygcgctggcccatgagcgccacgtgcaaccctggttcccgcccgtgcctctccctccacatctccccgcaagcagagggagctggatccggccttggccagcccagagaggggctcccacagtgcagcagcgggctgaagggctcaagcgtggccagaatgggcgccgaggccgaggaggcaccaagagcgagcaagggctgccagcatgctgtcatctctcaaaataactgtatcttctagcccagccaaattgacacataaacttaacccttacacataacctcaaatgttatctatctaagaacaaatgaagcaaatgattgatcatgatctaaggtgcaggccattagccaactctgagtgttgaactagcaacagaaagatctgggtttagggtagaacatctgagaattgagtat

SEQ ID NO: 533138 - DNA, 354 bp, Homo sapiens
tggtaatttatacatcaactcaaaggggagaatgagggagaataagatgaccagcagcagtgactaactgtatgccaggtcctgctgtaggcgctagatcctcagcaagtcatctgaggttctccgtgagcccaggaggaggccactagcattatctccactaggacaagagaaagctggggcacagagaccttcagtgtctcactcagtgtcacaggtacaagtggcagggccaagatagagactgaggcagtttggcaccagaacttttcttctaaccacagcccccgactgcctccctaaagcattcatttgaatttctcctgtcaycaaagggggctcaggctgtggaag

SEQ ID NO: 533139 - DNA, 172 bp, Homo sapiens
agcaagagggagaaaatcccaggtgggcctgacctaatgaagggaacacttagaaaggaactggactttatttgacaaaagacatgaaaccagrgagatactcctgtatctctgaggaaggaaacagccttcttgtgaattacctaccgaggggtgcacctgtgaatgaggg

SEQ ID NO: 533140 - DNA, 603 bp, Homo sapiens
cctgctatttccagatataagcagtatgggcgctccgctgagggtgtggcttttctcacactggtgtgcctgggctaataaagggcctgagaattgcagatctgtcaatactggcacagaggagcacacaagtgtgctctccctaatatagtgggtatgaacatcatgcttggagatgcaaaaatgctttagaaaaagatcaactgttaaacttctagaccacccaaaaggccagatcatgccatgagcaccaaagrgagctgaactactgtgttcaggacatcttctgcccagggtaagaagtgctgctgctacttaggaatccatctgatcagcattcttgttcagcttcacttcttcagggagaaggttctcagaaagggaggtgggttcagccttggagagttcagcgcaaatcccactttcaggcccgggggtagtagaagcctcagagccctctagaagagagaggctgggtatgagcctctttcgtgtgtgcagctttacaaaactttcaagattgcgagcatggagattgcaattggaaatgaaatgtttgcttaccagaaattcttgatccataaagtagggcttttctgacga

SEQ ID NO: 533141 - DNA, 603 bp, Homo sapiens
cctgctatttccagatataagcagtatgggcgctccgctgagggtgtggcttttctcacactggtgtgcctgggctaataaagggcctgagaattgcagatctgtcaatactggcacagaggagcacacaagtgtgctctccctaatatagtgggtatgaacatcatgcttggagatgcaaaaatgctttagaaaaagatcaactgttaaacttctagaccacccaaaaggccagatcatgccatgagcaccaaagggagctgaactactgtgttcaggacatcttctgcccagggtaagaagtgctgctgctacttaggaatccatctgatcagcattcttgttcagcttcacttcttcagggagaaggttctcagaaagrgaggtgggttcagccttggagagttcagcgcaaatcccactttcaggcccgggggtagtagaagcctcagagccctctagaagagagaggctgggtatgagcctctttcgtgtgtgcagctttacaaaactttcaagattgcgagcatggagattgcaattggaaatgaaatgtttgcttaccagaaattcttgatccataaagtagggcttttctgacga

SEQ ID NO: 533142 - DNA, 524 bp, Homo sapiens
aggagaaaatgctccgtaattagtccatgcccagaaagagcaagagcccccttaggagcaacactcaggaggataagaggcttagtctragatttgtatttggtgactccaaacttatattcaggatttatttagatccttaggatttctcttctaggagctacttttattattgagtcctaaaaatccgtttttggctgggtgtggtggctcacggctgtaatcccagcactttgggaggctgaggtgacagatcacaaggtcaggagatggaggccatcctggctaacacagtgaaaccccgtctctactaaaaatacaaaaattagccaggcctggtggcgggcgcctgcagtcccagctacttgggaagctgaggcaagagaatctcttgaacccgggaggcagagcttgcagtgagctgagatctccccactgcactccagcctgtgtgacagaatgagagtctgtctcaaaaaaataaaaaataaaaataaaacatcatttttttgttctgtcatgtg

SEQ ID NO: 533143 - DNA, 524 bp, Homo sapiens
aggagaaaatgctccgtaattagtccatgcccagaaagagcaagagcccccttaggagcaacactcaggaggataagaggcttagtctgagatttgtatttggtgactccaaacttatattcaggatttatttagatccttaggatttctcttctaggagctacttttattattgagtcctaaaaatccgtttttggctgggtgtggtggctcacggctgtaatcccagcactttgggaggctgaggtgacagatcacaaggtcaggagatggaggccatcctggctaacacagtgaaacccygtctctactaaaaatacaaaaattagccaggcctggtggcgggcgcctgcagtcccagctacttgggaagctgaggcaagagaatctcttgaacccgggaggcagagcttgcagtgagctgagatctccccactgcactccagcctgtgtgacagaatgagagtctgtctcaaaaaaataaaaaataaaaataaaacatcatttttttgttctgtcatgtg

SEQ ID NO: 533144 - DNA, 524 bp, Homo sapiens
aggagaaaatgctccgtaattagtccatgcccagaaagagcaagagcccccttaggagcaacactcaggaggataagaggcttagtctgagatttgtatttggtgactccaaacttatattcaggatttatttagatccttaggatttctcttctaggagctacttttattattgagtcctaaaaatccgtttttggctgggtgtggtggctcacggctgtaatcccagcactttgggaggctgaggtgacagatcacaaggtcaggagatggaggccatcctggctaacacagtgaaaccccgtctctactaaaaatacaaaaattagccaggcctggtggcgggcgcctgcagtcccagctacttgggargctgaggcaagagaatctcttgaacccgggaggcagagcttgcagtgagctgagatctccccactgcactccagcctgtgtgacagaatgagagtctgtctcaaaaaaataaaaaataaaaataaaacatcatttttttgttctgtcatgtg

SEQ ID NO: 533145 - DNA, 524 bp, Homo sapiens
aggagaaaatgctccgtaattagtccatgcccagaaagagcaagagcccccttaggagcaacactcaggaggataagaggcttagtctgagatttgtatttggtgactccaaacttatattcaggatttatttagatccttaggatttctcttctaggagctacttttattattgagtcctaaaaatccgtttttggctgggtgtggtggctcacggctgtaatcccagcactttgggaggctgaggtgacagatcacaaggtcaggagatggaggccatcctggctaacacagtgaaaccccgtctctactaaaaatacaaaaattagccaggcctggtggcgggcgcctgcagtcccagctacttgggaagctgaggcaagagaatctcttgaacccgggaggcagagcttgcagtgagctgagatctccccactgcactccagcctgtgtgacagaatgagastctgtctcaaaaaaataaaaaataaaaataaaacatcatttttttgttctgtcatgtg

SEQ ID NO: 533146 - DNA, 583 bp, Homo sapiens
gccattgcccttaacttaccgagaaatttttggaaacagcaggggagggcctcggctcgactggcagtgtggacagacagggcagggtaaatggatggctctcaaacagtctctccaaagccgagaaggacttcacccagttgctcaaactgaactggaaacggtgcgttttaccagcagatcaggaggctacattgtagtgattgtcaaagtgcacttctcagttcacactggtcccaacagtcaaggaagcccaacttgggggtgccagcaattgtaacccacactctgttttcagaggcaccacgcgtgccccagayctacactccttgtatgggagggagtcaggtactaagttgcttttcttccccaaaacgtgctttcctttccccttacaccttatggattctcttgagaatggaagtcgacaccatcgatagaccgtgcagcactccgacggctatgcagatcgaaaacagagccgccgtgcttaccctcaccctgtgggcagtcagatatgatgggaatcacccagttagaaagatggcatggaatctgtccctgacttcaaatgaagtaatca

SEQ ID NO: 533147 - DNA, 578 bp, Homo sapiens
gttgcttggcgcgttggcccagaggggtgaggtaggaacacctatctgaacacttccctttctttcctcttctgccttccatgatcgctcaagctgagggattcagctttcaggtttccaccacttttacatcataccgtcctttctgctactcaaaagtaccaaagagtggaggtggagggaagagccctatgtcatttagaaagaagttccattatcttttgcttctctctgcttcatttccctcgatttgattattttttataccttcaatcttgctcttttagtcacatcccttcttgttttttgtatttttcatttgatttaaaagagtgttttcttagcatattcttacaacttgtgctgtaaaattttattcaaagattatcatgaatattaggaagaaaaccagataaattctaaaccatttttytgtcttcaagtataaaactaatattcagatattagtttggggatttttcacaatgttacaaagctagtgagtagccctaatggagctagaacctaggtctgctatatccagtcctttctttctattatagcactaaaactcttgc

SEQ ID NO: 533148 - DNA, 558 bp, Homo sapiens
gttatcccctaatacatgtcactactagattatttctcgcccttaaaatgtaagagaccgtttttcctcttttcttccatccgtgtctccagcttctaaactgcaggcgaataaacctcgaatgagtaaatgaacccacccagtcgctagttatttctgcatttccaatgttgtgccagcaagagcaaaggcaaatgggcaagtcaaagtaggcttcttgtaaaaggtcttccattactgggttttactagaggcccttgcggaccatcacatctcaaaaggggggaaagctcgtatgaggcagtgccagctacctttcgggaatcaccttgggcagaaggcctttttgcmaaaagactcggcagcccgggccccgtaggttcggcgcatgcgcagcgcgctcggcgcccgggttccttcctccgcgccacccggaagcctcggcgcgacccagtccccctccccctcccctcgccggctagggtggtgcgtgccggcaggccggtcaaggaggcgggacacgtcggcgctaccaccgccaccgccgccgccgcccct

SEQ ID NO: 533149 - DNA, 487 bp, Homo sapiens
ccaaatcttgctgcttctaattttaaaccatcatttgattctgtctctcccaaaccctacgctacttgcttaaaataggccttcatcatatcttctttggactattattgagacaggcctgtaatctgttcccttgataagtttttccccaccatgttctccatactgccactgtatggagagttactgagaagaaagcttatcaagccatttttccgtgtaaaagcttctattggttctataaacccatgaggttcaaactctgttgcttggctacaaagctcttaaccctctggtggcaatctacctctccatcttgtttcctttcctaccttcatgttctccaaacacattctaggtttcttgggcctcatatyctcactatgtctagcatataaccctgaactttcagaagtccatacgtgttttttaaagcaattcctttctctccgctccacccccattcacttgaaaaattcccccatct

SEQ ID NO: 533150 - DNA, 633 bp, Homo sapiens
cacttactcaatgtaatgtgagacaatggaaatgtcccttccctagagaggcctgcccaggccaggacattaggctcaggcttattgccatctgttcttgtaggaccgtttttgctgtgtgctggtgctccccatcagaacatcagctccatggaatctgcctgctgttgtaactccagtgcttggcacaaagccggggctcagagatacacgttgccctcgttgaggtggaaaccaagagggaagtgccctggtcactcttggacaatgggggcctagaaatgcagggaggtggctgtcacagacaggctacctgggcaaaggagacttggtctaccaaaggaggccagaaggatgacaccatgggagggtgcactgctggaatggggcttggggacaatgtccaccggtctcacccacagggctgtccgtggctcagcggtcagccccagcaggtcccctgtcctgccctgctctttagcctgactccgtggcacctctccgagaccaaagccgacaagcagatgggccttgaatcaggctcggagggtgagctggggtttccgtagcaaaggtagagggaagtgctcaggaaaatgatsaacatgtttccccaaaaactggcatagttgt

SEQ ID NO: 533151 - DNA, 623 bp, Homo sapiens
acaattttaggagacagaaagcaggatttgatcacccaaggacagaatctgaggcaaggaagagctggggggctctgtgccggtctgagyccttgaaacaaatcctacataggggattgctacggggctagcggtctcagggactccagggctgagtcctggccgtgaaccccgcgggcgcccgcatttcagcaccggggacaggggccgacctcggatccaggtgggtcctcagatccactggcggctccgtagctccactagttcctggccccctccctggccaatctcagcccgggcagttcccttggagacctccgtggcccctccatcctggacccccctggtgcccgtgctgcggctcccgagcacttggcaggtgatgcgacccgcggagccaacctggagcgccctcgggtcccggcagccaagatgggctctgcgatctggggtaggggcaggagaagacctagtctccccaccgccccccacgtttgtctcagcttggacagagtcttgccctccggggatggcgcaaaaaggaaaaccccgaggtgagagcagggaggcagccagaggcactctaaggagaagccggggccagcacaggtgcgggacgttgt

SEQ ID NO: 533152 - DNA, 601 bp, Homo sapiens
caagacccagagagcaagcctgccttgggaccatccctcctcccttcactggccacattcctcagggcttctarcacactgcaccctcagccagcctctgcaaatccagtccttcccactgccctattttgctgaccccttcccacgcctcaacctctctcgccactgctctgcccgctgagccctcctcacctcctcctgggaccctccctgactaactctgctggcccctaagggcaccatgactctgcccacttctctcccaactcagggctccgaccagtgactcctagaggccaggtgaggataaggatgaagataaaggtgatgacatagggactacattatccccattttacagatgtgtaagctgagactcagggaggttaactaggttgtttaagtttcacacagtcagggtatggaagagcagggattcaaactcaagactacagagtccaagcccccaggttctgctctgccacctgactcctgggtgtgccctgtgggggtctcatcaccagaatttgctacgggatgggagggtatagggggtggtgaggcactctgcagagtcactgtccctctcggaaatttcaca

SEQ ID NO: 533153 - DNA, 601 bp, Homo sapiens
caagacccagagagcaagcctgccttgggaccatccctcctcccttcactggccacattcctcagggcttctaacacactgcaccctcagccagcctctgcaaatccagtccttcccactgccctattttgctgaccccttcccacgcctcaacytctctcgccactgctctgcccgctgagccctcctcacctcctcctgggaccctccctgactaactctgctggcccctaagggcaccatgactctgcccacttctctcccaactcagggctccgaccagtgactcctagaggccaggtgaggataaggatgaagataaaggtgatgacatagggactacattatccccattttacagatgtgtaagctgagactcagggaggttaactaggttgtttaagtttcacacagtcagggtatggaagagcagggattcaaactcaagactacagagtccaagcccccaggttctgctctgccacctgactcctgggtgtgccctgtgggggtctcatcaccagaatttgctacgggatgggagggtatagggggtggtgaggcactctgcagagtcactgtccctctcggaaatttcaca

SEQ ID NO: 533154 - DNA, 601 bp, Homo sapiens
caagacccagagagcaagcctgccttgggaccatccctcctcccttcactggccacattcctcagggcttctaacacactgcaccctcagccagcctctgcaaatccagtccttcccactgccctattttgctgaccccttcccacgcctcaacctctctcgccactgctctgcccgctgagccctcctcacctcctcctgggaccctccctgactaactctgctggcccctaagggcaccatgactctgcccacttctctcccaactcagggctccgaccagtgactcctagaggccaggtgaggataaggatgaagataaaggtgatgacatagggactacattatccccattttacagatgtgtaagctgagactcagggaggttaactaggttgtttaagtttcacacagtcagggtatggaagagcagggattcaaactcaagactacagagtccaagcccccaggttctgctctgccacctgactcctgggtgtgccctgtgggggtctcatcaccagaatttgctacgggatgggagggtatrgggggtggtgaggcactctgcagagtcactgtccctctcggaaatttcaca

SEQ ID NO: 533155 - DNA, 260 bp, Homo sapiens
ctgacattagccccaggcctggggatctgctctcttgtgcatcagtgagcacagatgtgctttctacctaccaggtgctctacctgggttacctcagtagcacactgatcctgtcctccrcccatagcagcaccctctgtgaaggcttccttggatctgctctgccctcctcctgtcacttgctggggatcagggtgcctaacgccctgtcatcagtctggtccctcttcaattcaactcaccgggcttcatcatgggca

SEQ ID NO: 533156 - DNA, 622 bp, Homo sapiens
tgctgaaggtggcactgccaaagctcaggaaccgatgtggagaggggttcatctcttgccctctacctctctcctgagtgcactgctgatgacttggcagtggttcttcccactggggcccacagagtcaaggttgaaagagactgctggggtttctaaggcggctttaccccaaataaaggcaaacacactcaggggaggaagcttttcatgcttctcctttgcctccgccccaccccctctccctgcccgctcttactcttaagtgtcacctactggattgaagcctgaattacaccatcaaacaaaaatatattgctgcaacaagcaaagcctgagaaagccactgcacgaacctatctgcagccaaagaacctgcacagagccttggcaccctgaragcaccccaaaatgaagccaatccatacataaaatactctacagtcatattcccaagggaaaacaagaatagaaaatcaaaaggctttattcagatgatagcaaattcaataaaaaagtgtcagctttctcagatgagaaagaaccagcacaagaactccagaaatacaaaaagccagaatgttttgttaactccaaagaatcccactagctcccaagtaat

SEQ ID NO: 533157 - DNA, 622 bp, Homo sapiens
tgctgaaggtggcactgccaaagctcaggaaccgatgtggagaggggttcatctcttgccctctacctctctcctgagtgcactgctgatgacttggcagtggttcttcccactggggcccacagagtcaaggttgaaagagactgctggggtttctaaggcggctttaccccaaataaaggcaaacacactcaggggaggaagcttttcatgcttctcctttgcctccgccccaccccctctccctgcccgctcttactcttaagtgtcacctactggattgaagcctgaattacaccatcaaacaaaaatatattgctgcaacaagcaaagcctgagaaagccactgcacgaacctatctgcagccaaagaacctgcacagagccttggcaccctgaamgcaccccaaaatgaagccaatccatacataaaatactctacagtcatattcccaagggaaaacaagaatagaaaatcaaaaggctttattcagatgatagcaaattcaataaaaaagtgtcagctttctcagatgagaaagaaccagcacaagaactccagaaatacaaaaagccagaatgttttgttaactccaaagaatcccactagctcccaagtaat

SEQ ID NO: 533158 - DNA, 553 bp, Homo sapiens
tttgttattttgtgccttcaggattcctatattcacacactagatttttaaactgtaatatatgaaaaaaatagctcttaattgatgcygtttaaacaaaattttccttggtcaaaaacttttgagaaattcattcttattttttttttcagggcatgtcaaaatctacactaggataaaaacctgtttaactttgtttaaagacttgacaatacattagctacagtaaaaaatgttttgcttgatatattaggttgacataaaagtaattgcattttttgccattaaaattaatggcaaaactgcaatcgcttttgcaccaacctatacttactgcaatttcttaactaagaatgaattttttattctttgggaatgaaagtccttgataagaagcaaaacgtagtctctggctgttcttagttataatttgtgactttttctgagtactactaccttagataccaattaaatcagaatacttctagagcagaaagcgataaaatactaaaggttttaggagtcatcaatgctaccatgtatatttgatctt

SEQ ID NO: 533159 - DNA, 597 bp, Homo sapiens
caagacatggacttcagttacaatggcagcaaatataatacatgctactaactatgaatttttaggtaagatgaaatgcttcttaaaagaytgttggtcagaaatctggagattggtactttttctcagaaagaaaatcagctcaacctaatggctgtatactgcattgtaacatttatttttatttaaaagttggatttttatgatttaaaaaagtaatgtgagtcttcatttaaaagtttaaatggcataaagacagcaagttttcatatagtagtaaaattgtatgaattttagacaatgattgatggcctctcttgactgtatcttaaacaaaaggacttactgcaattttttcattatcagtgttatgcaaatataccagtaaacgactgctttctgagatcttagggaagtaatgattaatgaagtataaaaatgtaattgtaattatatcacctaaattatgccaaagagatacattggtgacatacttatgctaaaaagagagagagaaaaaaagactccctctctccccaaatcttacaacacattaaatctgtcttctgttgcatgttgaatataacagtatcagga

SEQ ID NO: 533160 - DNA, 392 bp, Homo sapiens
tttgaattcggggctacagaggcaaactctgaagtgctgaccttcaagaggctttccaaggaaggggagagctttgaccacaacctttgatttcagatcatagatttatttttaatacatggaaagtggaaattctaatcttctgagttggaaggtgacccatacttccctttctacttaatcttgtttatcccttgctctgagctacttctttcttaatgcttcctgctttagacttacttacaaaatatcacactgatatatcctgaccctcatatgactcattccactcgaaaaactggttctgagaagtacatgtactttayaagttattatgaaccgtaacagatcctaggggattcaattctgcattcacttatgaggtgagtctg

SEQ ID NO: 533161 - DNA, 558 bp, Homo sapiens
tcccatccccgataaatccattcctggtttccccaacaccaggggaacttgctcttctctgtcattttgttgctctgagggaatcctagtgtacatcgtttagttacctgcttaataggcaggacactttgctcccaaatcactgtaaaagcttttataggctgcattcttgtcttagatttttttgtagcttccagagrcctcagcatctagttttgttctattttcatttgggaagaaagttctgctgacaatagttaacacatttattcattccccagacgcttattgatttctcagtaagtgatgatttaattattaagtctgctttttttcttatcttttcatttcattcccaccatgtaactatgctcaaagatattcttttggacaggaacagttttctaccacgagaggaatagggcattcttctgaagaaggtgaggctggtgtgtaaacagcaaggcagtccagagcaccccctccacccaccacaggcctgccttccctctgtgctgcctggataaagcaccacagcaataatttctgtagttagtg

SEQ ID NO: 533162 - DNA, 610 bp, Homo sapiens
acccaaggtgatggaattaggaggtagggcctttggaaggtgagtaggtctcggggttgagccctcatgaatggtattggtaaccttatagaagggatgcaaaaaggaccccttgcccttctaccatgtgcgaacacagcaagaaaataatgtgtctgaactaggaagtggccctcaccaaatctgatggcaccttgatcttggccttcccagcctccagaacttgataaataaacttctgttgttaatatgctacccagtttatggtattttgttataggagcctgaacaaaagcacacacaactgtatttcaaatactgaataagttttttatcttttcctataataatcagaatttaaaatccttcttccgttatttcccaacgtatttctgttactaatccaactaagatttatgaycttttctactctgtaaaaatacagttgtataaaggttaataaacagtgtttccaaattaaacatcaagttcttgcagcaaaaaattcaaaaaatttccaaaatctagcaagtcaaataaacatatgtatagtgacttcagcctaattttttttccaaaggaaaatggaaaggaattatagttatgttat

SEQ ID NO: 533163 - DNA, 305 bp, Homo sapiens
aacattctgacactcctcaccagttagccaatctagctccacagacctaggggaakaatggaaactgaggctgggtcacttggtattctgaaattctgccttcctctaagggaagtcattgaacattagacctcttcatagctcagtgtcttcatggtaacaatggtaatgacactaaaatgatgcatcgaattctctaaaatataccatatcttgtgaaattattatattttgagaaaggcagaagatgacattatacagtgctggcccaggaacgctgaatgactagagtagtaaggtagtct

SEQ ID NO: 533164 - DNA, 549 bp, Homo sapiens
tttcactgcttaacccaagagtagctacgctggctggctcagaattgcatgacactggtcaggtatgtaagcaactcagtgcctttcctattcccagaagtgccaaagacataatgaaaaaggaatgcagaagttttcacctgtgataattatctaaaaaaccctgtaaaatgaaatctttgtcatcttccaagaagaggtcacttgtacgtgtcagtgattacatgagctctttatgtgaactgaaggacctgtataattggtgtgatacagcaagaaaatctcatcgacgttgcataaggtgtctataattttctaatctcccacatcctagttccccagacatgacactctttatttaccctgcacttacgtttctttcctgaataggcaggagaactagacttgtactggcccctctgtaattagtggaatgaggggcagtgttgtggggagctaggatacagtgagtctttgtgaaacttgccatctctgaattttcctgttattcyacaggttaaaaatgaaagagtaaatgaacaccatagg

SEQ ID NO: 533165 - DNA, 611 bp, Homo sapiens
tattgggctgtagagaagttgagtaatgattgggaagttccatatttaatcactgcttggctgcctagcactgcataggtmatggactctagacaggtatttttggattacaacattcttagggaagaataattacatctcagaattttatcctatccttctattgcccccttaccttaaagaagtggaaatactagtgacattttgccccaaaatgtgaaagtttaccatgacaatattttagtctttccaaactgggagggatttttttgccatttccaacaatatatgtatgtgcttgtgtatgtatacatatacacacatacatatagttgaatacatatgtacatgaatacacatattgttttgtacatatatacacatacatatacataaacacatatatatacattcatatacatgtctatgaataatgcacatttttttaaacagtagttcattttcttttctttgatctcctaaggaatagtgcatataaattagaaggccacctgaactggtgtaatatctcctctggaaaaagaagcatagtctagaaatttataaatggctctgaatataactgacctgaacccttgttacttaggaag

SEQ ID NO: 533166 - DNA, 566 bp, Homo sapiens
aattgaaatacctatctttataatttagattttaagtcaaataagcattgattattgcaagtccagcatagaggccagatttataatgggagagcatttcmaaaatatatctgcaaaaaggaagggaaacaaaggctggtggaaaatagaatttccccccaaaattcctaagaggaagggaaaaattttttcctcacctaattatttctggtttaccagtggaaagaaagaaaatagaagttaacaaaagacagccctacaggctgaacactgattagatgaatgtgattgtgccttgcacttaggaaacacataagatttgttgaatgaaagaatggatgggtgaatgaatgatttcctaggtgtattaatttccttttgttgctgtaataaattatcacaaatatggtggcttaaaacaacataaatgtattatcttatagttttggaggtcagaagtccaaaatgggtctccctgactaaaatcaagatgtcagcagggctgtgtgcttttctggagctgtaggagaaaatctattttccgcattttccaacttctagaagct

SEQ ID NO: 533167 - DNA, 646 bp, Homo sapiens
gaaatacctatctttataatttagattttaagtcaaataagcattgattattgcaagtccagcatagaggccagatttataatgggagagcatttcaaaaatatatctgcaaaaaggaagggaaacaaaggctggtggaaaatagaatttccccccaaaattcctaagaggaagggaaaaattttttcctcacctaattatttctggtttaccagtggaaagaaagaaaatagaagttaacaaaagacagccctacaggctgaacactgattagatgaatgtgattgtgccttgcacttaggaaacacataagatttgttgaatgaaagaatggatgggtgaatgaatgatttcctaggtgtattaatttccttttgttgctgtaataaattatcacaaatatggtggcttaaaacaacataaatgtattatcttatagttttggaggtcagaagyccaaaatgggtctccctgactaaaatcaagatgtcagcagggctgtgtgcttttctggagctgtaggagaaaatctattttccgcattttccaacttctagaagctgtccatgttcttttgctcatgtgcctcttccatcttcaaagccagaaatggccactcaaatttttctcatgtcacatcacggtg

SEQ ID NO: 533168 - DNA, 646 bp, Homo sapiens
gaaatacctatctttataatttagattttaagtcaaataagcattgattattgcaagtccagcatagaggccagatttataatgggagagcatttcaaaaatatatctgcaaaaaggaagggaaacaaaggctggtggaaaatagaatttccccccaaaattcctaagaggaagggaaaaattttttcctcacctaattatttctggtttaccagtggaaagaaagaaaatagaagttaacaaaagacagccctacaggctgaacactgattagatgaatgtgattgtgccttgcacttaggaaacacataagatttgttgaatgaaagaatggatgggtgaatgaatgatttcctaggtgtattaatttccttttgttgctgtaataaattatcacaaatatggtggcttaaaacaacataaatgtattatcttatagttttggaggtcagaagtccaaaatgggtctccctgactaaaatcaagatgtcagcagggctgtgtgcttttctggagctgtaggagaaartctattttccgcattttccaacttctagaagctgtccatgttcttttgctcatgtgcctcttccatcttcaaagccagaaatggccactcaaatttttctcatgtcacatcacggtg

SEQ ID NO: 533169 - DNA, 579 bp, Homo sapiens
ctttgtgacactaagaacattaacaaaagaacatattgctctttgattcagcttatctcaacacaaccataaaagcagttcctatcagatgattcatttcacaacatcctgacattgatctacatagaatcaataagtaaaaataatgcttcaattctgtggaacttctagggaagtctctgggctcttagaagcctagactctttccactatgttcagttgagcctctgatgcacaattgaatgcagtatatattatttgtaatagtgaaacaaaggctttagaagacagaagggaatgtatatacttcatagcaaatgctggtcttgtaacatattttgaaagaaaatggttctgttggtcaactagatttggagaccctgcatactctatcactgtcttaaaaactcaatttatacatgagaaactaatattagagatwctgagaacttctgcaattaaaagcatcataacatgtttaattcaggattctcaaaacttacttcagcaaggaatactgcctttcctttcttactagtgaacatccagtttgcagagcatattatgctgaatgctggt

SEQ ID NO: 533170 - DNA, 610 bp, Homo sapiens
gttagccctattatttatgtattttttcctttctcagctctaacatatttttttaaacacatgtcgacttctacagggattataaaatccttggacaactatatgatttgggagcaaagtttccatgtgtaaggattgygtgatgtataaggaatgtgtcacatcaggttgagttttaaaatgaacgtactccattcttaggttttatctctacagatggataggggcccagaggcccctggaagcattttggtaccattgcattacttacggttaagaggcaggctcgcattggttgtgcctagcttgttggcagccacacaggtataattgccgaagtgctcctgtgtcacgttggtaacagtgagaatggatcttgtgctaaaattttgaataataattccttgttggccattgaagagcctagaagacaaaataagctctaggtaaatatgtattgtgaataccagtttcatttttttatcttagctggggttgtcatggcaacccatagacaattcaactacgctgacgttagcatataacgtgataatggtgcaatttacatttcacttacattagtagatttgggggaggtgaggttgcatgt

SEQ ID NO: 533171 - DNA, 610 bp, Homo sapiens
gttagccctattatttatgtattttttcctttctcagctctaacatatttttttaaacacatgtcgacttctacagggattataaaatccttggacaactatatgatttgggagcaaagtttccatgtgtaaggattgcgtgatgtataaggaatgtgtcacatcaggttgagtttyaaaatgaacgtactccattcttaggttttatctctacagatggataggggcccagaggcccctggaagcattttggtaccattgcattacttacggttaagaggcaggctcgcattggttgtgcctagcttgttggcagccacacaggtataattgccgaagtgctcctgtgtcacgttggtaacagtgagaatggatcttgtgctaaaattttgaataataattccttgttggccattgaagagcctagaagacaaaataagctctaggtaaatatgtattgtgaataccagtttcatttttttatcttagctggggttgtcatggcaacccatagacaattcaactacgctgacgttagcatataacgtgataatggtgcaatttacatttcacttacattagtagatttgggggaggtgaggttgcatgt

SEQ ID NO: 533172 - DNA, 610 bp, Homo sapiens
gttagccctattatttatgtattttttcctttctcagctctaacatatttttttaaacacatgtcgacttctacagggattataaaatccttggacaactatatgatttgggagcaaagtttccatgtgtaaggattgcgtgatgtataaggaatgtgtcacatcaggttgagttttaaaatgaacgtactccattcttaggttttatctctacagatggataggggcccagaggcccctggaagcattttggtaccattgcattacttacggttaagaggcaggctcgcattggttgtgcctagcttgttggcagccacacargtataattgccgaagtgctcctgtgtcacgttggtaacagtgagaatggatcttgtgctaaaattttgaataataattccttgttggccattgaagagcctagaagacaaaataagctctaggtaaatatgtattgtgaataccagtttcatttttttatcttagctggggttgtcatggcaacccatagacaattcaactacgctgacgttagcatataacgtgataatggtgcaatttacatttcacttacattagtagatttgggggaggtgaggttgcatgt

SEQ ID NO: 533173 - DNA, 610 bp, Homo sapiens
gttagccctattatttatgtattttttcctttctcagctctaacatatttttttaaacacatgtcgacttctacagggattataaaatccttggacaactatatgatttgggagcaaagtttccatgtgtaaggattgcgtgatgtataaggaatgtgtcacatcaggttgagttttaaaatgaacgtactccattcttaggttttatctctacagatggataggggcccagaggcccctggaagcattttggtaccattgcattacttacggttaagaggcaggctcgcattggttgtgcctagcttgttggcagccacacaggtataattgccgaagtgctcctgtgtcacgttggtaacagtgagaatggatcttgtgctaaaattttgaataataattccttgttggccattgaagagcctagaagacaaaataagctctaggtaaatatgtattgtgaataccagtttcatttttttatcttagctggggttgtcatggcaacccatagacaattcaactacgctgacgttagcatataacrtgataatggtgcaatttacatttcacttacattagtagatttgggggaggtgaggttgcatgt

SEQ ID NO: 533174 - DNA, 620 bp, Homo sapiens
tgtagattgttcctgtgggattatttgtgctatataacaaactgagcttggatagctacatgtcctatttaggcactgttacatattttagaaaatgaaacataccataccaataatatctcatctattaaagtcaggaaggagtttaagggaaataaatataaagattccacggaaagtacaaactgatggtttctaggtaagctggcgagagtatgtctgggtcatttcagacattattaaataactcccttgaaagttaaccctacaactgtgataggatagttctgagtccagagtcaacaccactttactcttgtacaacccagacagataacttccattaaacctaaaaagagacagtcatatagtattggagatagcatttaaagttgagtcccatcactgtcacattttaggaatgtgccatggaaagactttaaaactctctggacttcagcatgggattcagctatacccaaattcaaactaattgtccaacagtctctggatttaccaccagaggccctcactctgaaataggctgacatggcttcaccattctcaatgcaygttgtacctacttctgcttcaccctttttctaaatctgtagcctatc

SEQ ID NO: 533175 - DNA, 644 bp, Homo sapiens
tctggtaaacctaacttcagtttgaaaacatgtggagtttgataagctcttcagaagagtcaatatcaaatgaagagataygtagaatgatctggggcttagaggagaaagctagcctggggttatgaatgcttgagtcacccatgcaaaagtgttaattgatgtcatgggtgggatgagattttgagatatcgtgtccttacttttaatatacaccttaagaatgcttcatattgtgtatattttgtcatattttaggttcttgatctgggataactatcattttataaaatgatgtttataaagttaaaaaaatcaagtaaacacttgacaaataaacaatagaagtaactggtattttaaaagtgctttaatctttctcatatacatataattatctatactatatagcaatagataaatgtttcatcgttttaaaatatttttgaatagcaatcctaagagtggtattgttagggtagacccacaaataactaaacattttgttaaaaatatattacaataagtcctaatgaagaaatattgttggccttgccaaaatggaaagtaaataagagaaggaactaaaatatccaagagatgtgaagaaaatcatttctattttaactagttccagggaaatt

SEQ ID NO: 533176 - DNA, 644 bp, Homo sapiens
tctggtaaacctaacttcagtttgaaaacatgtggagtttgataagctcttcagaagagtcaatatcaaatgaagagatatgtagaatgatctggggcttagaggagaaagctagcctggggttatgaatgcttgagtcacccatgcaaaagtgttaaytgatgtcatgggtgggatgagattttgagatatcgtgtccttacttttaatatacaccttaagaatgcttcatattgtgtatattttgtcatattttaggttcttgatctgggataactatcattttataaaatgatgtttataaagttaaaaaaatcaagtaaacacttgacaaataaacaatagaagtaactggtattttaaaagtgctttaatctttctcatatacatataattatctatactatatagcaatagataaatgtttcatcgttttaaaatatttttgaatagcaatcctaagagtggtattgttagggtagacccacaaataactaaacattttgttaaaaatatattacaataagtcctaatgaagaaatattgttggccttgccaaaatggaaagtaaataagagaaggaactaaaatatccaagagatgtgaagaaaatcatttctattttaactagttccagggaaatt

SEQ ID NO: 533177 - DNA, 644 bp, Homo sapiens
tctggtaaacctaacttcagtttgaaaacatgtggagtttgataagctcttcagaagagtcaatatcaaatgaagagatatgtagaatgatctggggcttagaggagaaagctagcctggggttatgaatgcttgagtcacccatgcaaaagtgttaattgatgtcatgggtgggatgagattttgagatatcgtgtccttacttttaatatacaccttaagaatgcttcatattgtgtatattttgtcatattttaggttcttgatctgggataactatcattttataaaatgatgtttataaagttaaaaaaatcaagtaaacacttgacaaataaacaatagaagtaactggtattttaaaagtgctttaatctttctcatatacatataattatctatactatatagcaatagataaatgtttcatcgttttaaaatatttttgaatagcaatcctaagagtggtattgttagggtagacccacaaataactaaacattttgttaaaaatatattacaataagtcctaatgaagaaatattgttggccttgccaaaatggaaagtaaataakagaaggaactaaaatatccaagagatgtgaagaaaatcatttctattttaactagttccagggaaatt

SEQ ID NO: 533178 - DNA, 505 bp, Homo sapiens
cactgggaatgtgttgctggctgtttagcgggtkgggggtgcagggaggctgcagagtttggggagcaggtggatgatggaaccgtccgacaagaaagctgtgctcaggcagcagagcccacatatcagtgggacggcccagccgcaggaggggtctgtcccaagtgtgttgcaggcaggagctgctcccagcccaaggctgcccgcccaccctggcgtttgctggtttccgctgaggcccgtccgagaagccctctagtggggacaagcgggaccacgctcctgtgccacgagctctggccttgtccctttggcccccatgctctctgtagaccctgccccagcgggagggcagtgacatggaggggcgttggggtcttctctgcagggcacatgctgctctgttcacctgccagggctttggcggccagcagaggggaccaccatgtcctttgcaaagaaccagaccagggccttctgcagatgctgggctgccttgtggaca

SEQ ID NO: 533179 - DNA, 605 bp, Homo sapiens
tgagggaacaaggaatacgaggtgtatgcygcacttacctctactttcatcagccacagaatagacatctcctacaaccagcagttagaactctgttcaagcctggttccccacttactagctgggtgaacctggggctcaacttcctcatctgtaaaatggggatgaacataatgcccaccttgaagggttgaggtgtgacataaagcaattagcgcatgccgaacatctgatgaactgcagcacttattgctatgaactgcaccgagcttgactctatagcaaacataagaaactatcttctcgaagtggacaatcggcaatagtagacagatattccatgaaatattaacactaataaacagccatataaacgatgctgaacatgcagtgtggtatttgctatagtttaaaggatgctcagatgtgccttagatccatcagaccaagctcagaggtttgactgggccaccaaggataggcgaagagagcaggaaaacagtccagagggaaaggtgtgacaaggcccagaagcaagaggcaagaggcctgtcatgaggcgacacccaattagcctaatggcaggggcaagaagttcaagggag

SEQ ID NO: 533180 - DNA, 613 bp, Homo sapiens
ccaaagatttgtgctccttccttagtgtagaagagtcactggaaagtagctgcccagccaggccttcattcccatgcctcattacattgaggtgaggtcacatgacttattcttaccaatgaaatgtgggtgagaggtgatacctgggtcggggctctaacaaatgagtgtgccctgtccatactctgtccccttccacyagctaaaatggtggtactatgggatggaagagcctagatccctgaatcactttccctcaaggtagagggaagtcccccaccaaccaggaacacccactctatactgctacatgaaataagaaataaggctttacaataccaggccactgaaacttcgagatgtgttaccacagctagcattattctaacacaacagataaaatcactgtgggataaaaatcattaaccccaccccaagagaaagcctgtttatgaaatacaaaacaaaacaggaagctgactccaggagaatggagtagggtccaaagagtttaggaaaatctgaatcatgtcttccaggaggaggaaccacaaacaaagccaaaaattcacattggcagagtcagtccctgacaaaacatcaccctttgact

SEQ ID NO: 533181 - DNA, 613 bp, Homo sapiens
ccaaagatttgtgctccttccttagtgtagaagagtcactggaaagtagctgcccagccaggccttcattcccatgcctcattacattgaggtgaggtcacatgacttattcttaccaatgaaatgtgggtgagaggtgatacctgggtcggggctctaacaaatgagtgtgccctgtccatactctgtccccttccaccagctaaaatggtggtactatgggatggaagagcctagatccctgaatcactttccctcaaggtagagggaagtcccccaccaaccaggaacacccactctatactgctacatgaaataagaaataaggctttacaataccaggccactgaaacttcgagatgtgttaccacagctagcattattctaacacaacagataaaatcactgtgggataaaaatcattaaccccaccccaagagaaagcctgtttatgaaatacaaaacaaaacaggaagctgactccaggagaatggagtagggtccaaagagtttaggaaaatctgawtcatgtcttccaggaggaggaaccacaaacaaagccaaaaattcacattggcagagtcagtccctgacaaaacatcaccctttgact

SEQ ID NO: 533182 - DNA, 509 bp, Homo sapiens
aaaaactcagtcttttcagcagcacccaaaaagccacccaaacgagctttgcgaaaataaccaaagccaaactaagtggcaagtaggtggcaacagtggaaacaaacaaagctcctgcttcttcaaatatcccactggggcagagtagggcaaaatcctcctgtcagctccaactcgacttggattcggaggacgaggytggagacaatagcaagaggtggggggacaatggcaggggccctgctgggcagaaccattgattctgacctgtgtaatccaggcccagtgtgaggagaggcttgcaagggcgctcaggacggtctgtccagattttgtcaacgaggttctccttgacaggaatgaggtgatggccggcacttctcagaactttggccattttcttccaataatctgagaagacacattgtggcccagccatgagccgaacgcccattgcagcagggcagggagcagggccttgaaagtccagaaccttcagaaaggtggtc

SEQ ID NO: 533183 - DNA, 440 bp, Homo sapiens
gaaacaaatttttttcttataatattttgtacttaagcttaccatgactgagaaataatttttttcagctagttagsgctgatgatgtcatctgggggaataattgaaccaaaatacttgaacacctattatatgagagtttcatatcaaacaactacaaatgattgagggaagaaaatcataaacattattagaactttaatttcaaaaaatagaaattcatgaaattaagaatacattgaattttaatttccaagaatgcatatttggaaatcatatttttgaaagaataacttcaatgttataagagaaatctagtgataagtagctacttttgaaatatgagttttatatatattatagagccttgattttatacaggactgaaatattcttgtgctgtcaattttcagattctgctagttaaaatgaggaaagtg

SEQ ID NO: 533184 - DNA, 440 bp, Homo sapiens
gaaacaaatttttttcttataatattttgtacttaagcttaccatgactgagaaataatttttttcagctagttagcgctgatgatgtcatctgggggaataattgaaccaaaatacttgaacacctattatatgagagtttcatatcaracaactacaaatgattgagggaagaaaatcataaacattattagaactttaatttcaaaaaatagaaattcatgaaattaagaatacattgaattttaatttccaagaatgcatatttggaaatcatatttttgaaagaataacttcaatgttataagagaaatctagtgataagtagctacttttgaaatatgagttttatatatattatagagccttgattttatacaggactgaaatattcttgtgctgtcaattttcagattctgctagttaaaatgaggaaagtg

SEQ ID NO: 533185 - DNA, 590 bp, Homo sapiens
tggctactgggtttgcagtcttcaggcagcatgataaataattcctctctagagaaagtgagagagtttgacagttgaatttccccaagaaaaagctcagcaagattatcaaacagagaacatctgcagttaatatatatataaaagacaaaaagatactgtttataaatatagaaaaagggattaagaaaaagaaaaaatatttgaaatttaaaatatattagaaaaaattaaaaactcaatagtaaagtgttggaaaataaagttacaaaacttctcagaacagaaatggaaaaaaacatgtgaagagatgacaaaaccagatgacccacacacaatacataaacaataggaatttcagaagaaataataataaaaasagaaacaatatgtcagtgacactggaagctagaattctgcatcaaatataattacttatcacatgtgatggtagaataatgctgttgggtgtttgcatactgtagggctaaaacacaaactttagagtcagatttcaggggttttaattctggaacagcaagcttctacatatgttggggcttaaatttcaatttcttaagtttttattt

SEQ ID NO: 533186 - DNA, 621 bp, Homo sapiens
aaaagagaaacaatatgtcagtgacactggaagctagaattctgcatcaaatataattacttatcacatgtgatggtagaataatgctgttgggtgtttgcatactgtagggctaaaacacaaactttagagtcrgatttcaggggttttaattctggaacagcaagcttctacatatgttggggcttaaatttcaatttcttaagtttttatttttcccaggaaatcaataattaattctcttactgggttgttttgaggattaaataagtaaacacacataaaatgcaaagagtagagtatggcatctaagaagttctcagaaagttgttgtcacaattatttttttaacaggcacacaaatcctcaagaaatttacttttcttcaaataatttccaatgtgctactataagatatagcccattaaaattaaagccataaattaagagtaaagaagaaatgaaaacaaaaaaggggggaggggttcaatgcaggaaggagttgataggaattgctaggatgaagttaaatgtcaatcccaaagtgacaagacataagctatcccacagaattcgagaataaacttcagattagagaagaaaaggagagggcctcaagaa

SEQ ID NO: 533187 - DNA, 590 bp, Homo sapiens
tggctactgggtttgcagtcttcaggcagcatgataaataattcctctctagagaaagtgagagagtttgacagttgaatttccccaagaaaaagctcagcaagattatcaaacagagaacatctgcagttaatatatatataaaagacaaaaagatactgtttataaatatagaaaaagggattaagaaaaagaaaaaatatttgaaatttaaaatatattagaaaaaattaaaaactcaatagtaaagtgttggaaaataaagttacaaaacttctcagaacagaaatggaaaaaaacatgtgaagagatgacaaaaccagatgacccacacacaatacataaacaataggaatttcagaagaaataataataaaaagagaaacaatatgtcagtgacactggaagctagaattctgcatcaaatataattacttatcacatgtgatggtagaataatgctgttgggtgtttgcatactgtagggctaaaacacaaactttagagtcagatttcaggggttttaattctggaacagcaarcttctacatatgttggggcttaaatttcaatttcttaagtttttattt

SEQ ID NO: 533188 - DNA, 590 bp, Homo sapiens
tggctactgggtttgcagtcttcaggcagcatgataaataattcctctctagagaaagtgagagagtttgacagttgaatttccccaagaaaaagctcagcaagattatcaaacagagaacatctgcagttaatatatatataaaagacaaaaagatactgtttataaatatagaaaaagggattaagaaaaagaaaaaatatttgaaatttaaaatatattagaaaaaattaaaaactcaatagtaaagtgttggaaaataaagttacaaaacttctcagaacagaaatggaaaaaaacatgtgaagagatgacaaaaccagatgacccacacacaatacataaacaataggaatttcagaagaaataataataaaaagagaaacaatatgtcagtgacactggaagctagaattctgcatcaaatataattacttatcacatgtgatggtagaataatgctgttgggtgtttgcatactgtagggctaaaacacaaactttagagtcagatttcaggggttttaattctggaacagcaagcttctacatatsttggggcttaaatttcaatttcttaagtttttattt

SEQ ID NO: 533189 - DNA, 621 bp, Homo sapiens
aaaagagaaacaatatgtcagtgacactggaagctagaattctgcatcaaatataattacttatcacatgtgatggtagaataatgctgttgggtgtttgcatactgtagggctaaaacacaaactttagagtcagatttcaggggttttaattctggaacagcaagcttctacatatgttggggcttaaatttcaatttcttaagtttttatttttcccaggaaatcaataattaattctcttactgggttgttttgaggattaaataagtaaacacacataaaatgcaaagagtagagtatggcatctaagaagttctcagaaagttgttgtcacaattatttttttaacagrcacacaaatcctcaagaaatttacttttcttcaaataatttccaatgtgctactataagatatagcccattaaaattaaagccataaattaagagtaaagaagaaatgaaaacaaaaaaggggggaggggttcaatgcaggaaggagttgataggaattgctaggatgaagttaaatgtcaatcccaaagtgacaagacataagctatcccacagaattcgagaataaacttcagattagagaagaaaaggagagggcctcaagaa

SEQ ID NO: 533190 - DNA, 619 bp, Homo sapiens
gaggtgacaaaagtggggctgatccgctgaagactccagttatacccactacctcaccctgccccaccccatcctgccacttcagaagctgcagctaaaactagtgtccacatctccaagttttgcacatgtatatttcatcagtgatcagctatctggatgtagataatcaatgatgaaggacacagcctagaaactgtgataacttaaacagcactgtggaaaaaatagctagtacaatttttaaaaagcaaaaaaawtttttttttcttttaagacagagtctgtgttacccaggctaaagtgcaatggcataatctcggctcactgcaacctccgcttcccaggttcaagcaattcacctgcctcagcctccagagtagctgggattacacatgtgcaccaccacacccggctaattttttgtatttttagtagagatggggtttcaccatgttgccagcctagtctcgaactcctgacctcaggtgatccacccatctcggctcctcaaagtgctgggattacaggcatgagccaccacacccatccaaaaaaaacacgtttttgacattgtcatggatggcattatcattactcaatgagatcatgagtaaca

SEQ ID NO: 533191 - DNA, 492 bp, Homo sapiens
ctgcggactcagcacagctattagccgatggtgtcgctgctcaagatacacaacacccatcccaccggtgcccgtcaaggcaaaggagtggacgtgaccgtctgggcacatgtctcctcccaaagccaagtgtcccatgaagaatgacctttctcaagtatctaggaagcccatccygcagatgttccaaagagactcgcaaagtgactaacatctccataaggacccgaacagcaaagaagcgaaacacggaaacacccagcatagtacccggcacactgagacaccaaaaaatgtttccgtcatggtctcggagagagagatgatgggccttcaggttaaaaggaaagaatcaaataccaattctgctatttccttgggcacatcacttcaattttctgaatcttgttttttcttccatacagactgcattatctgcctccctggattgtaaagaggatccctctgggaaaagaatatcaaatgcctttg

SEQ ID NO: 533192 - DNA, 535 bp, Homo sapiens
tttcaattaagagactttatattagcctcagatcaacagttcctaagaaacaatagaagctttatcaaataatccacttatcatctctgacaaaagaacatatatattgtctttcctaaaaatataggattgttgtaatatgtcaatctctctattttcctaatatgttcattagttcactcttcatatcccaggggataaaatgtcttgattacctgattaggaaatatatttgctcattattccctgaaaacattttgcactgtgtatatttaatgctgtttatacaaaagaaaggcctatttttttttwaatctactccaacaatatgtttgttcttaaatcttctggcataacattctgtattttccctgccccagacatgaagttaaccacttctcgaaggctccttttgttgaaggaaggtagttagaagtaaagatctgaggagtagatttgctagttggtgttgctgtccaccattttggtggacaaagctaaatttatttttatgtctatctatgtgtttgttgaa

SEQ ID NO: 533193 - DNA, 522 bp, Homo sapiens
gcctggcctagaggacagtgggtctggcatgctgggctgagaggcagtactgggagcgattcttggggcctccttgcygacaattgggtgaaaccagcggatacgatcgtagcgtctctgagcccccattgcctccttgtttctctgcccatagtagaagaatgtctctgaaattactggatgagtttcagtcatactttcacatgggcacaatttcacattcaagctccttatcctaggctaattttatattatgttaaatcacttgtttttgttctcacggcttcctgcctgctataggcataattacgaggaagcagaacttctccagaagcaagcgcacatgcgttccaaaataagagcaaattcgctctaaacacaggaaaagacctgaagctttaattaaggggttacatccaaccccagagcgcttttgtgggcactgattgctccagcttctgcgtcactgcgcgagggaagagggaagaggatccaggcgttagacatgtatagacacaaaaa

SEQ ID NO: 533194 - DNA, 470 bp, Homo sapiens
actgtcctgaccaacctactctctcrtttcctaggctcagcgggattacttcggggctcacacctatgaactcttggccaaaccagggcagtttatccacaccaactggacaggccatggtggcaccgtgtcatcctcgtcatacaatgcctgatcatgctgctcctgtcaccctccacgattccacagaccaggacattccatgtgcctcatggcactgccacctggccctttgccctattttctgttcagttttttaaaagtgttgtaagagactcctgaggaagacacacagtttatttgtaaagtagctctgtgagagccaccatgccctctgcccttgcctcttgggactgaccaggagctgctcatgtgcgtgagagtgggaaccatctccttgcggcagtggcttccgcgtgccccgtgtgctggtgcggttcccatcacgcagacaggaagggtgtttgcgc

SEQ ID NO: 533195 - DNA, 290 bp, Homo sapiens
gtgggttcgaatctctgccccgccaacttgtgatcgtatcgactcggcccagacgcaattttcttctctgcaaaatcgtcataagaataatcacttgtcagggtarctgcgggcatcccattcgttcctttcatcagcgccgggcatatggggcgtcagaggctgagaacgttgccgtgaagaggcttaaaagcaagacccggagtggcgaccttaaagaggacggactgaagaaacgcgggaatgagctccagacgcgggagtttcctctctacaaagttacactgcag

SEQ ID NO: 533196 - DNA, 459 bp, Homo sapiens
gaagtgggtattaatgtcatgacaagcagatattgtcaatcacgatgagatgacacgtgatatttgtctatttagcagaatgtaaaggattaatttggccaaattatggagaataatttctgtgttgartttatcttttaacttagcagttgttcagtgaggactcaccatgtgtgctggccagtttgctagttattaaggatgcaaagattcctatttattcctgcttacaaagtacctgtgtattttgtggggaagttagaaatggaagaagggtgtaatcagagtaatatattattgaatcgagcttattatctcaaattacctttcctagcaaagataaaaggactagaatgagaatttgagtccaacttgtgagcaagaagcagactccagtttaaagggtgttctttgtggctgggcttggtggctcacgcctgtaatcccagcactttggga

SEQ ID NO: 533197 - DNA, 576 bp, Homo sapiens
ggagtgagagaggatgcacttctccctctggttattcctctcaggcgccatcctgggagacccagccacacacaggtaccrggagagatagttctttatgcattaaagagcaaaagaatataatccaatgtccctctcttctcccacatgcagaagccagatgcccctctaatacccaaataagaaatatttaagcccacagtccctgctcgtccctgctggtcacctatggctgtcttaaacctggcattgtcccatctttccctaatcactttactgaaagtctgggcactgctcatgggttgactttcacagagagctgaggcttggcagtcacatttggcaaggtctcccaaaggctggtgtagcagaaggagcatgcaggcaaaggccttggagcaaagggttccacagggtctgcaggagactctgtctgctgagcaacaaccccgacccagcctgcaccctgtcacagcagccagccccttcccccctgctggcatgttcttcacatgtactcgccccactgggaagccagatccagagagcagggaaggatccaggcacccccagaga

SEQ ID NO: 533198 - DNA, 576 bp, Homo sapiens
ggagtgagagaggatgcacttctccctctggttattcctctcaggcgccatcctgggagacccagccacacacaggtaccaggagagatagttctttatgcattaaagagcaaaagaatataatccaatgtccctctcttctcccacmtgcagaagccagatgcccctctaatacccaaataagaaatatttaagcccacagtccctgctcgtccctgctggtcacctatggctgtcttaaacctggcattgtcccatctttccctaatcactttactgaaagtctgggcactgctcatgggttgactttcacagagagctgaggcttggcagtcacatttggcaaggtctcccaaaggctggtgtagcagaaggagcatgcaggcaaaggccttggagcaaagggttccacagggtctgcaggagactctgtctgctgagcaacaaccccgacccagcctgcaccctgtcacagcagccagccccttcccccctgctggcatgttcttcacatgtactcgccccactgggaagccagatccagagagcagggaaggatccaggcacccccagaga

SEQ ID NO: 533199 - DNA, 632 bp, Homo sapiens
tcattctagacttgtcatctttgttctgcagggtcctgctctgctcctccatttctggagtgagagaggatgcacttctccctctggttattcctctcaggcgccatcctgggagacccagccacacacaggtaccaggagagatagttctttatgcattaaagagcaaaagaatataatccaatgtccctctcttctcccacatgcagaagccagatgcccctctaatacccaaataagaaatatttaagcccacagtccctgctsgtccctgctggtcacctatggctgtcttaaacctggcattgtcccatctttccctaatcactttactgaaagtctgggcactgctcatgggttgactttcacagagagctgaggcttggcagtcacatttggcaaggtctcccaaaggctggtgtagcagaaggagcatgcaggcaaaggccttggagcaaagggttccacagggtctgcaggagactctgtctgctgagcaacaaccccgacccagcctgcaccctgtcacagcagccagccccttcccccctgctggcatgttcttcacatgtactcgccccactgggaagccagatccagagagcagggaaggatccaggcacccccagaga

SEQ ID NO: 533200 - DNA, 470 bp, Homo sapiens
gtgcagggggcgaggccgggcccaggagggtgcagtggtagagctgcacatccagctggtagtgggtgccaggcgtgagtcccgtcaggagggcagtgcgggcctggggggatgagacgttctcccgccgctcctgcccccgtgtcccgtcccacaggcgcagcaggaaaccgtcgcccaccagtggcccgggcaccaagggcaaggaccagctcactcgcagccggtcagtgccttccacatgccagccctccaaccacggctgcaacaaaggctctggggccagaggtcaggggtcagaactgtccagtaggtacttggggctggacaggacaatgatccccagtgaacaaggaagaacaacctccagtgggaaaggcaggggtccctggggtcgacrggaaagtaacccttggggggacaggaagggatgactcttggcctctcaccaggacagtctgtggtcatga

SEQ ID NO: 533201 - DNA, 594 bp, Homo sapiens
tgctgtatgcctacccgcggtaggtgctggactgtgccccactccccatgtatctgtccctgcacttagctgagtcccactccagcagctttcctgcctgtccgaggaccactctgaatacaagccctaagtacctactttttgaacagatgtgctttggatgtatgtgggccccagctccagccctacataacccctaatcccacctatcccaggcagtgagaagaaaaatggcagtactagagacagaagttgggcatgggcccaggtctgggtcctcagggctccgcatggtggctgtgtaggagggacctcttctatgccaacagggagaagccccgtgcttgccccctgagttcccagagcatgccccactttggaacccgatacgtgtgccagtttccagaccaggaggaagtgcgtctcttctttccgctgcacctctgggtgaagaatgtgttcctaaaccagactcggactcagcgagtcctctttgtggacagtgtaggtaagagccatcctcctgtcaccctgccccctccacttgctgccccyagtccagctcccggaatcagacttgcctgtgcccttcca

SEQ ID NO: 533202 - DNA, 567 bp, Homo sapiens
ctgccctcagtgtgctggttataagtttccaagtgatgaataaaagatttcctaaggcatcagtttccgtgatggtgtgttcttttttttctcttgggcacaagggaatgagcagagcaggtacacctctgggtttgttttgtttgtttttagcttatgtacaaaatcaagctctgtttttcattgaaatatctttttttcttgtatcagagaagagttgtaaaagactcattgtgggttcagggaagaatgttttaacatgcaaggaaatgttgcaaaattggaaagaggacataattccacaaaactaaatacaactgggggaatttttaggatactctgagttaatcttattatttgcatcctgctaaccccaatcaaataataatttagawttgtttaatttactaaactgcacattcaattgactaaactgtagaggatgagcaagtgtcaacaataattaccctccttatgggctaacacaacaggctccagtgagtcataatacacacattcagaggtggtccaatgcagtcccaccatagaaatccttcccatgcttag

SEQ ID NO: 533203 - DNA, 654 bp, Homo sapiens
tcacagtatttaatgactagtatggcatggatatcaaacaatcacaaatgctggccatagggctacagcatggtcctggaggccttctgcagatccagaggccatcttttagwttgggaggttgcaggggtttctgatgcaagggccagaactgggaggggataaagtatgtatttgagtggttctgggtagtggctatgcattattaaagaaaaacagtactcactgataagtgggagctgaatggtgagaacacatggacacacaggagggaacaacacacactggggcctgtctgagggttggagtgggaggagcaagagcatcaggaagaatagctaatggatgatgggcttgatacctaggtgatgggatgatctgtgcagcaaaccaccatggcacacatttacctatgaaacaaacctgcacatcgtgcacacggacccctgaacttcaaatagaagttggagaaaagaaaaaacattaaaaaaaaaaaaaaagaaagaaaaacactattgctatggcagcacttgtacaccagaccagggtgtcacccttaaaagcaggtaactgattcaaatgaaaaatgaaaaattcaatttccatttcaaagctactgcaggagagagttactcctttatctgttgcccttgg

SEQ ID NO: 533204 - DNA, 544 bp, Homo sapiens
actgaggtgtttgcaaagtaccaagcatagtgcctgtatttgttctcttatgatgttatggttctgtaggttagaagttggatacaggtctcactgagctagagttcagctgggctgcattcctagtttggagactctaggggagaagtggtttccttgtctgttctagcttctggagacctcctgtattctctggctcatgtcccctttctctttcttcaaagccagcaagtgtcatctctctgacctatcttttgtactcacatctctttctgaccacagtcacaagaggttctctacttctaaggacacatgtgattagctcagaatccaggataatctctacatctcaaggcccttaattcagttctatctgtcaactgttttttaccatgtaaggcagcgtattcacaggctgcacagattaggatgtggccatctttrggggcctactaccatgcctaatactttatggtaagtctaacatcatcattatacaagctattttcatcattaccattctatttgacatatgttaggagct

SEQ ID NO: 533205 - DNA, 544 bp, Homo sapiens
actgaggtgtttgcaaagtaccaagcatagtgcctgtatttgttctcttatgatgttatggttctgtaggttagaagttggatacaggtctcactgagctagagttcagctgggctgcattcctagtttggagactctaggggagaagtggtttccttgtctgttctagcttctggagacctcctgtattctctggctcatgtcccctttctctttcttcaaagccagcaagtgtcatctctctgacctatcttttgtactcacatctctttctgaccacagtcacaagaggttctctacttctaaggacacatgtgattagctcagaatccaggataatctctacatctcaaggcccttaattcagttctatctgtcaactgttttttaccatgtaaggcagcgtattcacaggctgcacagattaggatgtggccatctttgggggcctacyaccatgcctaatactttatggtaagtctaacatcatcattatacaagctattttcatcattaccattctatttgacatatgttaggagct

SEQ ID NO: 533206 - DNA, 544 bp, Homo sapiens
actgaggtgtttgcaaagtaccaagcatagtgcctgtatttgttctcttatgatgttatggttctgtaggttagaagttggatacaggtctcactgagctagagttcagctgggctgcattcctagtttggagactctaggggagaagtggtttccttgtctgttctagcttctggagacctcctgtattctctggctcatgtcccctttctctttcttcaaagccagcaagtgtcatctctctgacctatcttttgtactcacatctctttctgaccacagtcacaagaggttctctacttctaaggacacatgtgattagctcagaatccaggataatctctacatctcaaggcccttaattcagttctatctgtcaactgttttttaccatgtaaggcagcgtattcacaggctgcacagattaggatgtggccatctttgggggcctactaccatgcctaatrctttatggtaagtctaacatcatcattatacaagctattttcatcattaccattctatttgacatatgttaggagct

SEQ ID NO: 533207 - DNA, 306 bp, Homo sapiens
cagaacccagttttaaaagtatgataaactggggtagggttgggggcagaagagaggatgttttattktatgacatcgttaaaattaaaaaagaaacttttctattattaatttttgaaatgttcttatgttcgatggagccagctctcacaaaacagggctaagggatagcaacacagcatctggttcagacacattacaagtctgcagacttcacactgacacacagcaagatgccttgtgggggctgagactgactcaggaaaatgtcagaattacatctcgccgagtgagcaagcccaattt

SEQ ID NO: 533208 - DNA, 645 bp, Homo sapiens
tgtcagaacccagttttaaaagtatgataaactggggtagggttgggggcagaagagaggatgttttattttatgacatcgttaaaattaaaaaagaaacttttctattattaatttttgaaatgttcttatgttcgatggagccagctctcacaaaacagggctaagggatagcaacacagcatctggttcagacacattacaagtctgcagacttcacactgacacacagcaagatgccttgtgggggctgagactgactcaggaaaatgtcagaattacatctcgcygagtgagcaagcccaattttctaggccttcctacagaaatagcccaaaggcttgacaaacgtaaattctttgtatgttcgacactttcagataatgaaacactcccctccactaaatcacaaactcactatgatgcatctatgctctaactttgacaccccatgctccccgcagtcacagttcacatcactggggactttgttttcactcttgacagaatttaactcttgcttaccgaaccctgttgtgcattatttgctgaggcaacaaagaacaaaatcatggtctggttctcaggcagcttaaaacccgcaagcaaaaacaaaaattggacctgttataaatgtgctttacc

SEQ ID NO: 533209 - DNA, 645 bp, Homo sapiens
tgtcagaacccagttttaaaagtatgataaactggggtagggttgggggcagaagagaggatgttttattttatgacatcgttaaaattaaaaaagaaacttttctattattaatttttgaaatgttcttatgttcgatggagccagctctcacaaaacagggctaagggatagcaacacagcatctggttcagacacattacaagtctgcagacttcacactgacacacagcaagatgccttgtgggggctgagactgactcaggaaaatgtcagaattacatctcgccgagtgagcaagcccaattttctaggccttcctacagaaatagcccaaaggcttgacaaacgtaaattctttgtatgttcgacactttcagataatgaaacactcccctccactaaatcacaaactcactatgatgcayctatgctctaactttgacaccccatgctccccgcagtcacagttcacatcactggggactttgttttcactcttgacagaatttaactcttgcttaccgaaccctgttgtgcattatttgctgaggcaacaaagaacaaaatcatggtctggttctcaggcagcttaaaacccgcaagcaaaaacaaaaattggacctgttataaatgtgctttacc

SEQ ID NO: 533210 - DNA, 603 bp, Homo sapiens
ctgtgggttaccctcattgtctccccatttctggattacacaagtctgtgatggatttctgctattcacaaccaaaagaggccttactatcattgcctcgtaaaacagaaatgagagtgatgcaatcaacaattaaatacttacaggtaagggaagaggcctcattttctttattgagactagaattataaaggatagagaaacagaaacagaaaaaaattctctagagtattagattacaacaataactagcatttgtgtagtgctctacagtttttaaagtacttccataatcatttctttcatttgaccctcacaataattctgcaaaatggagaatacagtgtataattatccacatgttgccaacatagcagaatggtgaatggaagtgyttcctgtggttctggaattatagtgaaggctcatggatgaagacaaaggattctgcattttgtgttttatattttgagtccaagggacccccaatttgggggcctagccactttctctacagttttactgggaagggccagttcagagaatccacaaaataaactccaaacccaaagggagtcaagaaaatctcatgtgaatattggg

SEQ ID NO: 533211 - DNA, 561 bp, Homo sapiens
caggatgagctcaggcacgttgggccctccagagaagggctctgggtagccgtacggcagcccaggctgtggggggctggcataaggctccgggtactcagacttgatggcacggccaggaaaggcagggtagaggtagccagccagtggcccgtgggcaccgggcacggccatgggcagtgctggggccccaaagtcgcccagtggcccagcaggtggaccggcggccaggcccttgggctcaggcccatgcaggctgggaggcagcacgtagtccggtgcgggagggggcggcgggggcacccccatcgggggccctgtctccagcttgaagccattggcccgaatctgtgccttcttctgctgtttcagggcccggtcccgcttgtacatcggcccaaacttgttccggccacccctcatacggtcagcgcgcacggctgtgggcaggggcagagggtcagactcaccctctctaagcccccttccatgctgccccaccacagatcctttccaaacaaatctgaccrctctctcccctgctcaacaccctttcatggc

SEQ ID NO: 533212 - DNA, 561 bp, Homo sapiens
aaataagatttgtttaaacaartaagatttaacaattaaatggagagtcaccattgttcacctctagattggacttcttccttccactccacgctccagacccttgtattcaattatccattggacctctccactaggacgacccaccaccacctgttattcaacataccccacactgaacattgtttttcccaacacctgttgctcctcccgcatcctctatttcagtgagcagcacgcgatctcaccagtcaccaaagccagacacacatgtcctggagaaaaccctacaacctctgctctggggccaccacactgtaaatcatatatttcatcttctttgatgtggagcatgaaatgattaagctgcaatgtcctgagccactgtttcccagtgattgtgacccaggcagggtcacgacagccatatttctgtccccaaagcggggccatctaggttgggactcaaaacacaaagaaattctgccacaaaggttcaatgtcactttccttggccccaaaagagaaactggagagaccagagtgctcagattaggtagg

SEQ ID NO: 533213 - DNA, 561 bp, Homo sapiens
cgggaatccagaacaacacggtatggacccctctgtaggccgcgcagaaaaagcagtttcaccactttcatagactaggaatcagcaggccaggcaacttcaccaaatagccaggcattcagaagagmacgtgtgcaaggcacattctgaaagagaagacatctctttttttttaaatttctttttttaattaaaaagtaaactttaatgtcaaaaatgcaaacttggggaagacagaaaagatcacacacaaggctgtcacttcacacttggaaggttgcacagaggccgggcagaggcgctcctcacttcccagacggtggggcggccgggcagtggtgctcttcacttgccagatggggcagaagcctggcagaggcgctcctcacttcccggacggttggcggccaagcggaggcgctcctcacttcccagatggggcagcagccaggcaaaggcgctcctcacttcccagacggttggcagccgagcagaggcgctcctcacttcctggacggttggcagccaggcagaggccctccttacttcccagacagttgg

SEQ ID NO: 533214 - DNA, 494 bp, Homo sapiens
tagactaggaatcagcaggccaggcaacttcaccaaatagccaggcattcagaagagcacgtgtgcaaggcacattctgaaagagaagacatctctttttttttaaatttctttttttaattaaaaagtaaactttaatgtcaaaaatgcaaacttggggaagacagaaaagatcacacacaaggctgtcacttcacacttggaaggttgcacagaggccrggcagaggcgctcctcacttcccagacggtggggcggccgggcagtggtgctcttcacttgccagatggggcagaagcctggcagaggcgctcctcacttcccggacggttggcggccaagcggaggcgctcctcacttcccagatggggcagcagccaggcaaaggcgctcctcacttcccagacggttggcagccgagcagaggcgctcctcacttcctggacggttggcagccaggcagaggccctccttacttcccagacagttggcag

SEQ ID NO: 533215 - DNA, 561 bp, Homo sapiens
acgggaatccagaacaacacggtatggacccctctgtaggccgcgcagaaaaagcagtttcaccactttcatagactaggaatcagcaggccaggcaacttcaccaaatagccaggcattcagaagagcacgtgtgcaaggcacattctgaaagagaagacatctctttttttttaaatttctttttttaattaaaaagtaaactttaatgtcaaaaatgcaaacttggggaagacagaaaagatcacacacaaggctgtcacttcacacttggaaggttgcacagaggccgggcagaggcgctcctcacttcccagacggtggggcggccgggcagtggtgctcttcacttgccagatggggcagaagccyggcagaggcgctcctcacttcccggacggttggcggccaagcggaggcgctcctcacttcccagatggggcagcagccaggcaaaggcgctcctcacttcccagacggttggcagccgagcagaggcgctcctcacttcctggacggttggcagccaggcagaggccctccttacttcccagacagttg

SEQ ID NO: 533216 - DNA, 561 bp, Homo sapiens
acgggaatccagaacaacacggtatggacccctctgtaggccgcgcagaaaaagcagtttcaccactttcatagactaggaatcagcaggccaggcaacttcaccaaatagccaggcattcagaagagcacgtgtgcaaggcacattctgaaagagaagacatctctttttttttaaatttctttttttaattaaaaagtaaactttaatgtcaaaaatgcaaacttggggaagacagaaaagatcacacacaaggctgtcacttcacacttggaaggttgcacagaggccgggcagaggcgctcctcacttcccagacggtggggcggccgggcagtggtgctcttcacttgccagatggggcagaagcctggcagaggcgctcctcacttcccggacggttggcggccaagcggaggcgctcctcayttcccagatggggcagcagccaggcaaaggcgctcctcacttcccagacggttggcagccgagcagaggcgctcctcacttcctggacggttggcagccaggcagaggccctccttacttcccagacagttg

SEQ ID NO: 533217 - DNA, 584 bp, Homo sapiens
tttctgaactgaaaatgagtttgtacttctgcatctttatgtatgccacctaagaaaacctttcattcttctttgatataccatactcaacatccaagtgttgcttcagtccctgttttgcagatgaaggctaaagtcacccagacagatagatctgacttggctttctggatatggaagtccatattctcccccttttcatttttatttcagtgcctgagtcatataagttaattgaagaattcattttgatgtccagcccaactcagtccagctttaatttaacttcatcttggtataattccttgcatgaggctcttttgaggactgactctgaaatgccacctggatgattggcttccaccaggcttcctgctaacttggatccatgtgtcttttttccttccagtctctaattgctagagatgtgcatgtctcctttctgcttccctcctctrtgttcaaatacagcttaggggatagatgttctggccatgaaaagagacaggtgggaggctgtgggcttccctcctgtctatgtcttcctttcttgggcatcattaacttattacaaaccagtggaa

SEQ ID NO: 533218 - DNA, 661 bp, Homo sapiens
atgctttggggtttattcctatcactttatctttcactttttccttgctcaggctttctctctacttgtatcccaccccacctgaccccctacctggagtcatcatgacaccagcttctgaactcatagcttggctttgcatttcttacaacttatatctgcattccttaagcccggggggcttcctttctttacttttgggatgaatcttaattttttaaaaagtatattttgtccaacatttattttgtgtgtatggaacaggaagaaggctcatgttagctttgtcagccatattgctgaaagtttactacatgacttgcctgttttctttccatgtaggaatgggagcttttgytatacacacacacatacacacatacatacatgtgcaattgcagaattgagatttttctatcaaaatattgaagcccaatatataaacatagaataaaagcttgattaaaaagccctacctattcagccacagttccccttccccttctccctgagcacctatttgtggcatgcttgaaaacatctgctaacggcccaggcagtctatctcatatcctcactatgtttaatcatgtatatctcaatcatgggaaattgtaaagcttctctttgtagtcttctaagtgatttatgcagttgatta

SEQ ID NO: 533219 - DNA, 596 bp, Homo sapiens
ttagtagaattattacattattttacattggttgaagaaaaggtaaaaacaatgagcataccaccaccaataaggttgaaacagctcaggtccacagatatccttagagcagagagatgagcttaggaatcagtggtcttgacttcytccacagacagaagcctaggaaggagcttcctaagggctggagtcatgtcttgctaacccctgacaccccagagaaccacactgttcctagaatctacaatgtgtattaaatgaataaaagcataaaatttcagagctttaagaggcctctgatgcaatttcttcaaacatcacacccaaatgtaatggatagagagccaaggggactttcccaaagctctccagcattttagctcctgaaccagagtagaggccactttttctaaagtctactccaattagaaaaggcatatggcaaatttgcccaatgggagctgtggaagaaaaatccttcgccagtgaaacacagaatgggtttgactgagtgacttggggtactgcacattgttatgcatgctgaatgccttgcattgttagttacaaatctcccctgaatccacttgtcctgc

SEQ ID NO: 533220 - DNA, 577 bp, Homo sapiens
ggcagttcttgcttcggggtgtctcatatagttgtagccaaacascaggtggggctgtagtcatctgaaggctcaactgagctggacatcaaaaatggccccctcacatggctggaaatgggtgcagttgttggctaagagctccaatggggatgttgactggtgtgcctacatgtgggctctccaaaatgctaatctctgagtagtcaggtttcttggatagtgactggtttctgtcccaggagaactaagtgacattgcatggccttttctgacctggccatgcaagatacatagcctcaattctgtcattttcttttagtcaaagcagtaacaagccctcccagattcaagtattgaagatcctgtatctcagtaagaagtatgtcaagaatttcagggctatgtataaagctaccacagtaacacagaattaaaaaacaaaacaaaacaacaaaaaagcctcaaacttaggttttctgactctaattcaataattttttgctattccatgattgatatataacatgaattttgaatatacaaaacaattcagagctaatgcagtgtatcaatg

SEQ ID NO: 533221 - DNA, 577 bp, Homo sapiens
ggcagttcttgcttcggggtgtctcatatagttgtagccaaacaccaggtggggctgtagtcatctgaaggctcaactgagctggacatcaaaaatggccccctcacatggctggaaatgggtgcagttgttggctaagagctccaatggggatgttgactggtgtgcctacatgtgggctctccaaaatgctaatctctgagtagtcaggtttcttggatagtgactggtttctgtcccaggagaactaagtgacattgcatggccttttctgacctggccatgcaagatacatagcctcaattctgtcattttcttttagtcaaagcagtaacaagccctcccagattcaagtattgaagatmctgtatctcagtaagaagtatgtcaagaatttcagggctatgtataaagctaccacagtaacacagaattaaaaaacaaaacaaaacaacaaaaaagcctcaaacttaggttttctgactctaattcaataattttttgctattccatgattgatatataacatgaattttgaatatacaaaacaattcagagctaatgcagtgtatcaatg

SEQ ID NO: 533222 - DNA, 569 bp, Homo sapiens
gcatgctggtgtctcatctacctagggagagagtgagttttctaaggaagaatccatatctaattcatctttaaaatggcatctctaagcacagcgtttggcccttagcrtgcaatcagtaaagcattttgaatgaatgaatgaatggagtgacaaatggtgctttaaggcaactatttgcagaatattgccatagatgttatcaaacggaaacaaaagagacaaaccccacagttccctccccacactctccagtggcgcttcaggttggggtgcagtggagcaatcatctctcaatgcagccttgaactcctgggcttaagcaactgtcccacctcagcctccttagtagctgggactacaggtacatgcaacaatgcctggctaacttttaaattttttgtagagatgaggtattcctatgttgcccaggttggtcttgaacacctgaactcaagcaatcctcctgtcttggcctcctaaagtgttgggattgcaggtgtgagccaccatgctgagcctttttttaaatgtgaagtttctgacatagaaaataggttgggttctat

SEQ ID NO: 533223 - DNA, 538 bp, Homo sapiens
atgctagcgatattccttcataaaaagcaaatgggaatacattgtataaattccttataccttacaaatccattattacataccactgaggatatttttggggaaaagaaatcagccaagctctgcttacagaacaagatttccaaatgttttggttttcattcaagaatttctagagctctttgtcctctctctttccaaagaaatgatataatatttagacaggaaagtgtgtatgtgtgcagggtaggagtggagatttgtgtgcatatatttacaygtataataagatactcccaaataaatattccagtgtttctatttcgatagtgtttcctccttttatgaaaataatatagctggagctttggctcaagttatctggccttcagccttggcctctatccagctataatgttcaatctgctaatcatgcctaactcattgaaatatagtcaatctctgcaaagagcactgtcctcaagatgcctgttggctctatactttgggtctctcaaaacctccgggaaaatcaaac

SEQ ID NO: 533224 - DNA, 566 bp, Homo sapiens
ccagatatactttccattctgatgagtttaaaatggtttgttgcatagcacagaaactatatagcatcctgattaagaaaaagagtataggttgattcaaaaccccactccaccacttggtagcaatagaacttgggtaaattctttaatctttctgagccacagtttagcttatctgtaaaatgggaataatactagtattacctcattgttatgaaaattggcttaacatataaaagcctttagaacagcatttgaacttttcatatttttctgagaactcctatgaggagagaaaccacaatgtatgaattatatttcacctgtaccagaactactttctactttatttttgctactgcacatttctaatacatcttgtcttacataratttaatcaagtgaactggaaaaagtaacctgcaattaaagcactgttttggtgtagaaaatgtgttccagcatttcaattttcaaagtctttcgagataagattatcataaatgggagacttcctacaactgttctaattgttacaacattttgttttctttcagatgcctgtg

SEQ ID NO: 533225 - DNA, 610 bp, Homo sapiens
gcagctggcttcacaggatcacactgtgaattgaacatcaatgaatgtcagtctaatccatgtagaaatcaggccacctgtgtggatgaattaaattcatacagttgtaaatgtcagccaggattttcaggcmaaaggtgtgaaacaggtatgtatcaactcagtgttattaataacaatactaacaatagtaatataataacaataataccaattttgcctgcaccaagcagtgtccgtaggccaaaaacgatgccaagcactttgtactcatttaatcttcacagccatccaacaaactaggtactactactattatcctcagtggcacagatgatgaaattaaagcttaaaatttagggggggaaatagagaaaattgaatttagtagaactcttcatgtctactatttataatagaaatgaactttgataagccgctgacttcagaggtgagactccatggacatgtttgagaatcagcagatcaaatctagatactttctcaggagactggagtcttttagctgtaagacttgttttattgagtggtctgtgcaggtttggggcagagctgaattgctcatgaaatagggaaaagccagagcctt

SEQ ID NO: 533226 - DNA, 612 bp, Homo sapiens
gatccacccgcctcagccttccaaaatgctgggattacgggtatacgtcaccatgcctggccactatgagacttgaaattcatatttacaggttcagaattacatattgtcaagtctccagatatttctgataaataatgagagggctcagatggttctgccttaaactgaatcttgtcctacagcaatacaatctataataagactttagtgagtaatattttaaatccaggaaagagtaattctcttattcacaaacatttcaaattcatggcaccattttccattaattcctatcrtaaggcaattttcctctttaacacttagaaatgtacacacattcacacacattaaagaagtctagaataaaattaaaacttactggcacagtctggccattcagtggtatatgttggtttccagacgccatcttcataagcacaataatacttgtcagtagacccttctgtgaaatcatagccctccaagcaagttaatgtacagttgactccagtattatctggagtgcatataaaatccccatttacaggtgtgaatggaatttcacagggagaacctgtgtaaaaaaaattgtactattcatatatagtg

SEQ ID NO: 533227 - DNA, 574 bp, Homo sapiens
atcccattcccaggctggatgcttgctgggcagaagaaatccatagattcaccccaatgtgaggagtgctgggtgaggccgacacccatgccttggagtttaggggcacatatgaatgtagacaggtggctgcatctctcctggtgaattttgaaggcaggaggcttatttgwgcaatatggacagactgggaggaaggctgttctgaaaatgtgtcagcctgcactcccagttgttggcatggtgaagtgacataggctgaaaggggagatggtagtacttgagttgttctgccctacactctgctctaggggttttgagaggttgtgggatgtatgacagtgcttggagctaaggggaagggcagcagaggtcctgccagaatgcaccttcatggcagggaactgtaaggggttggggagggggtggtgcttctacagggcctcctgcagaatgtgcacatggactacacaagagagataattttttttttgcttctcagagtgcatcagcaatacaaagagggccacacagccttaaacaaatgaaagacttttgaacctttcctcaaaaa

SEQ ID NO: 533228 - DNA, 574 bp, Homo sapiens
atcccattcccaggctggatgcttgctgggcagaagaaatccatagattcaccccaatgtgaggagtgctgggtgaggccgacacccatgccttggagtttaggggcacatatgaatgtagacaggtggctgcatctctcctggtgaattttgaaggcaggaggcttatttgagcaatatggacagactgggaggaaggctgttctgaaaatgtgtcagcctgcactcccagttgttggcatggtgaagtgacataggctgaaaggggagatggtagtacttgagttgttctgccctacactctgctctaggggttttgagaggttgtgggatgtatgacagtgcttggagctaaggggaagggcagcagaggtcctgccagaatgcaccttcatggcagggaactgtaaggggttggggagggggtggtgcttctacagggcctcctgcagaatgtgcacatggactrcacaagagagataattttttttttgcttctcagagtgcatcagcaatacaaagagggccacacagccttaaacaaatgaaagacttttgaacctttcctcaaaaa

SEQ ID NO: 533229 - DNA, 645 bp, Homo sapiens
taaataaaggatactgagtcccacattgtcattatcgtcgaaccacaaatttggctttgattttcctgttgatcaaagtagactaggaggtctgggatggcatgcagttcacaccgtgcagaaataaagagacaaaccatttcttggaaaaaaaatggcttttgctggcacagtttggaaagaaattatttcatggaggaagtatgatagtggagtgtttagtagcacacagattttgccacttacttgcatggtgactttaggaaagttactagtgtgctcagttttcatttgtaagttggaatacttcttacagcatatgattaaataatacatgcaaagtgcttagaataatgcctggcacatagtaggtactgaataaatgttagctatttattcagctattccaataacatggaaaatagagactaaaaatgtgagtaatgctgccagtagattctctactacaaaaaacaaatgtgcctatgggtgtgtgcacacgctgccccctcacatgcactccctgtattaagtcctagccttgattttccattccatctgcattctgcctaattcatctgctattctttttctgtgctaaatatagcattcaargtcaaggccctaaatataacagtgatttta

SEQ ID NO: 533230 - DNA, 607 bp, Homo sapiens
aaattaccttcctctgggtccttcccatgacatgtggggaytatgggaactacagttcaagatgagatttgggtgggaacacagccaaaccatactaatggcataatattttccaataaaacttgaggtttacaaatgtcaaaatatggaagcagttaaatgaaagtaaatcatgagctatagaacaagttataaaaaaatcaaatcactatatatgaaatatttaagacaaaatcataaatgtcaataaagcaagggtactctattctacaatttaatattcaaaacaaagttgctttattatttgcatgccatattatcattcacttggaaaatccaaaggaatcaactgaaaaatgctaatattaatagaatagatgtgcaaggtggcaagatagtttaaaatcaataaaatttgttatggagaaacattacactttttaaaatgtgataaagttccatttaactaacaagtaaaaaaatacattttctaagaataatttgaaagaaattgtgtgaccatcatgagaagctgtaaaaagctgtacaattttactgatcctgatatatgaataaagactgggcacggtggctcacacctgtaatc

SEQ ID NO: 533231 - DNA, 607 bp, Homo sapiens
aaattaccttcctctgggtccttcccatgacatgtggggactatgggaactacagttcaagatgagatttgggtgggaacacagccaaaccatactaatggcataatattttccaataaaacttgaggtttacaaatgtcaaaatatggaagcagttaaatgaaagtaaatcatgagctatagaacaagttataaaaaaatcaaatcactatatatgaaatatttaagacaaaatcataaatgtcaataaagcaagggtactctattctacaatttaatattcaaaacaaagttgctttattatttgcatgccatattatcattcacttggaaaatccaaaggaatcaactgaaaaatgctaatattaatagaatagatgtgcaaggtggcaagatagtttaaaatcaataaaatttgttrtggagaaacattacactttttaaaatgtgataaagttccatttaactaacaagtaaaaaaatacattttctaagaataatttgaaagaaattgtgtgaccatcatgagaagctgtaaaaagctgtacaattttactgatcctgatatatgaataaagactgggcacggtggctcacacctgtaatc

SEQ ID NO: 533232 - DNA, 584 bp, Homo sapiens
ttatttttgaaaacattggttcaacatggagaaaacacgttctgttctagagcagtrtattcctatgttcaaaatcttagcacaactctttgtaggaacagattcctcattcagatcaaatccataaagtcgaaaagagaatgcgggcccagattttgcttggtttcttacctatttatagcagaaagtagaggcttggtgttgtacaactccaggggatgccattattattcacataaacaggcacccttgaagttgtggagtgcacagcctaaatgcagctcatgcaactgccctaaaactctttaaagtgatttgttaacttttaaagatgaattgtgcaaggaaataaaggctcctaatatttatcaggatttttagaagttaatctaagacatgtatgaggagaaattttgtaaaatgtaagtcactgtctaatatatgttattaatagtaaaatagtcatctaaggaattgatatttaacgggtaagatatattagaaagagtagagatttctttgtgttttacaaattccaaactggttggtgtttttatttacttcagtcaaagaattgcatggtc

SEQ ID NO: 533233 - DNA, 491 bp, Homo sapiens
cacatggcagagttggggactcagcttggggaacggcaaaatgctgggcttcagagagactgtccccactggacttgctgtggctccagacccccatcacctsacagatgtgcatgaatcacctgtctgtaccaggcacggagacatggccctggtcctcagggagctttctagtagaggacattgacaatgagccaggaaacaaataggccagggggtgatcgcggggttggcagcaaagcagacaagttcagtggctggagaaagaggtgatatttgaactgagacctgcctgggtggtgagaggcgcccctggaagggcctggggtgctgatccttaatgcctgcactgaatccatgtggcagcctggttttggctgagggcggacacctgaagggaggggtgggcgtaaggggagttgggtgagagaaggctcagcggggtgactttgcctgggatgttgccttgggcggtcctggacagtagtaca

SEQ ID NO: 533234 - DNA, 563 bp, Homo sapiens
aaaatctaggtagtatcacccatctgggtggtctcatcttcacccatctataggatcaaatttattaattaaattatatagagcttctctaggtatactttcatagttttgtctctagatctttgaaaattaaaatggaaagaggtatstaaaatctcccactgtatcgtatcacagaggtgaaggagtcggcccaagaccacactatccagagaggtcaggaggcgtttggactcagccacccggccccgggcagccgaggttaacggaacccagcgcccgaggctgttgtgaggatgaaacatgatcatggaatctgaaaactcagcctgacgtggaaaacatgattgcctgttaagcaccggctgctcattttcatcttctgggtgaaatgctcaaagggactggatgaatactgagtgagtaaggaataaatgaatgaatgaacaaatgaatccgaatgccctccaatgtgcgtatgtgcctgggtctgttgcagaaagccgcctttgttgtctagacaagaagagatgtttgctttgtgagcccctggtgggtctgcg

SEQ ID NO: 533235 - DNA, 582 bp, Homo sapiens
aggtgatgatagttccacagcaatgtgagtgtatttaatgcaccaaactacacactcagaaatagttagggtgggaacttttatgttatgtgtattttaccacaattaaaattatttttttaaagcagagaaactctggcaaccacaatgagagtgacaccagctcctaagaagggtcgcgaccatgcaacgtgaacagaattccatgccccgacgctggccctgagcggaggtcatgtgcaggctgcagagaggyccctggctgagacagccagccaggaagggggatctcagtcccacagctccaaggaagtgaagtccaccaacagtccagaacagaaacccatcctcctctggagcctccagaagcaacgcagctccgcgcccccctgattcagcccagcgaggagacccactgagcacttcccacccacggaactgtaggaaggtaagttggtgttgctgagctaagtctgtgctaatttgttaaggcaacataaatattttatagcattcaggaaataatactactccaggaaagcacagcgcagtgcagggagtggggtcagggcccggctcagc

SEQ ID NO: 533236 - DNA, 387 bp, Homo sapiens
tccttaaaaccagatccgtggaccctgcacccatggttatccrtgtcagagtcggggccagcccttaaacgcatctggatggaagagccatgaccaaggagccaggcggatctggtctcagtcatgttccaagccctgggaccctggtccaactgctgaagctccctgtgccccattttgtccgtctgtgaaacggggatgcttttggcacctaattcatgcggctgttgtgtgtacatgatactgcggcctacatgcccggcacagcacctgcccctagcaagtgttctgtagacattagccatgttatttttaatgagaatactcttggccttaaactgtaatttttatacccgattcccccttaagagagtctctttcagcccc

SEQ ID NO: 533237 - DNA, 656 bp, Homo sapiens
gagaagctggatgacaatttaaaatagctgcatgtattccccacaacaagggatgggggtcccactggaatacaggacactttcaaaagatcaagttgatcaagttttcccacaatctgcctttaaaaacaggcaggcttgaatgcccagaacatggaaaatcacaataaaatgcatgtgaaaagtaaataaaggcgattgtgggtgtcccaccttttacagagtaacggcgcttcctttagtttctatgccccttgtcccgcttcctcggagcacagcacactgccttacagcgtgcgtctctgtgggaggcttatcacgtgctccctcgtcatctccctaaggaaggactggttaaatagcatgcgacccagagctgggccacccagaagcttgccttctccttcacagccattctcatataatggtccagatttggtgtttgactcttgtccccacgtttgtctgaactctttacaatacctgaaagcttcaacctccttgtgtccatgaaaacgggcatagaagactcggatggctgtcggaagaatcaggcgtcacagtaatasaaagcacttagcccttagctgctggagaaaccgggctcaggcacatgaccttacctatagccacacctgcacattcaggtttccagc

SEQ ID NO: 533238 - DNA, 520 bp, Homo sapiens
actcactgacagttctgttacagcatcaactgagggaaaataccttgagagtttggggggttgtcctataggatgtagtgtatatactgaaagatcagtgaagaaaaaattctgttttttccataactagaactttggwttggggaacccaggggtgaaaggaggagcagcacctgccgctctaagacctgcgagccatatgcaaatgtttgcttcctgacaccgtacatttagcctctgcttggtcagaagtcagggtacaaaggagagatgattcatcagaggcataaaaacgtttccactgagactatcaacttgccatttctggctcattatgccattgatccaataatcctcaaaatattctgtgcccactgcactcgtaaataagccccaaaatactctgcatccgccgcacttgtaaatcctgaatagcacagagaaaacagtgatacagctaccatgagtggaggaacagcagggttcttggttctcgcgccagttcggataaaactacatg

SEQ ID NO: 533239 - DNA, 520 bp, Homo sapiens
actcactgacagttctgttacagcatcaactgagggaaaataccttgagagtttggggggttgtcctataggatgtagtgtatatactgaaagatcagtgaagaaaaaattctgttttttccataactagaactttggtttggggaacccaggggtgaaaggaggagcagcacctgccgctctaagacctgcgagccatatgcaaatgtttgcttcctgacaccgtacatttagcctctgcttggtcagaagtcagggtacaaaggagagatgattcatcagaggcataaaaacgtttccactgagactatcaacttgccatttctggctcattatgccattgatccaataatcctcaaaatattctgtgcccactgcactcgtaaataagccccaaaatactctgcatccgcygcacttgtaaatcctgaatagcacagagaaaacagtgatacagctaccatgagtggaggaacagcagggttcttggttctcgcgccagttcggataaaactacatg

SEQ ID NO: 533240 - DNA, 520 bp, Homo sapiens
actcactgacagttctgttacagcatcaactgagggaaaataccttgagagtttggggggttgtcctataggatgtagtgtatatactgaaagatcagtgaagaaaaaattctgttttttccataactagaactttggtttggggaacccaggggtgaaaggaggagcagcacctgccgctctaagacctgcgagccatatgcaaatgtttgcttcctgacaccgtacatttagcctctgcttggtcagaagtcagggtacaaaggagagatgattcatcagaggcataaaaacgtttccactgagactatcaacttgccatttctggctcattatgccattgatccaataatcctcaaaatattctgtgcccactgcactcgtaaataagccccaaaatactctgcatccgccgcacttgtaaatcctgaatagcacagagaaaacagtgatacagctaccatgartggaggaacagcagggttcttggttctcgcgccagttcggataaaactacatg

SEQ ID NO: 533241 - DNA, 551 bp, Homo sapiens
tttctttctcatctattaatatattaaacaaagtatttgaccaatgagcatgatttatatcagtatatattttgcacaaggcaaaccattctgtttttgtttctgcagctctacctctggagaggtctttaaatttagtataagctttctscaacttcaaattattgatactaattcctccaacttcacatattctaggtttaattcgttgcctacatttaaattgttctatatcaattctggcaaaaagtaaccctgtacttacagacagagtttgatgttatattgaactctggcttttgatttcattcaatatgttctagtgtccttttctaccttaaaattcatgctgagaacataacatgatattctaagtatgcacctaaggctgcaaaagtagggagtgtcaatcacatattttgctctagatacatttctataaacgtacccttactaatgaatattaggtctgaatagcctatagtagctgtgttaccttgtcagtgctataatccatttttgtcttaataacctcaccctgctacaagaca

SEQ ID NO: 533242 - DNA, 589 bp, Homo sapiens
gctggggctctaacatcctgtctatcctttgctaatctctttctgccatgtgggctggagtgtgaacttcacggaagaccctaataggatcctagttcataccactgggagttgatgaaacaaaaaatcttgttcctgcctcaataatccatctcatcagcttaatcagtccccttggatagtgacagtgtcaccacaggacacatcttctgtggcctagtggatattgcaaagctttatgagtaatttagtgccctagaatgaatcacctaactcctgagttcccatcttatctctgcttctggttattttttcattttgtatacttgctcattaatatcttaactcattggccaacaggctgtacaactacataagcctcttcaaatagaggcatttttttttccttagtaaggtcatatgttaggctatcttcagaatttcattttgagagcctcccatcattctcgaatcattttcccttttaaagtctcctgctsttggaacatacctacatttgttctttgaagtttagagagactctaaattttgtcattacatttgattcaaacaaagtttactgttgata

SEQ ID NO: 533243 - DNA, 641 bp, Homo sapiens
aatttatgtaattctaggctagagctatttttacttagtcaacttgtcttttgcattgtgtcaggaaaagtcagctactaaatcatttttttgtttagaagtctataacgactcctaagtatctttatgtcactctctaaacctggaacaccttgactacacaagttgaattatatcaatcttcttccatatgcttgagaattacctctttcatgaagcctcagaaacttgcctattccaattattttaggactttctttagctttagcacttctattcaattttacgctttttgtttttgtttttttgagatggagtctcgctctgttgcccaggctggagtgcaaaggcacaatcttggctcactgcagcctccacctcccaggttcaagcagttctcctgcctcagcctyttgaatagctggaattacaggcacacgccaccacgcccagctaatttttatatttttagtggagacggggtttcaccatgttggtcaggcttgtctcaaactcctgaccttgtgatatggccgcctcagcctcccaaagtgctgggattacaggcgtgagccactgtgcccagtcatgtttctgtagctttttaagtcttgtttttgtctttgtgcttaccttctctt

SEQ ID NO: 533244 - DNA, 471 bp, Homo sapiens
agaaaaggtagattatgcaatcccagaagctggtgtctctaaagagaactagaaccatagtggcagcaacagcttaaaataactggaattaaagtgggaggagcagttctgcaaaagctgtgaccctggagaaggtgcaaccagtgctggaggcaccctctaaaacagcacaagacagggataaatattgtcctttctccccacttccaagccttctgtgagcatctaccattggctgmaatcacctaaaggaagttggcaggagagtctgagaaatgaagttctctacattagtgaacagagcaggggaagcacaagtaatatatcttgaagcaaataggctgcagaagccatgaaagtaaattccttagacttctttctgcagaggtcataattgatcaaagatgccaccttctgtgctctgaaacacagcattgtgtttacataaagaatgtgcttcacatgagctgc

SEQ ID NO: 533245 - DNA, 592 bp, Homo sapiens
  misc_feature (1)...(592): n = A,T,C or G
agctgggttcatgaatctttgaattctaagttggagtgaaatagtggggatgatgagaaacagagagtggtaaattatgarcatcttgttggaggcagagccccaagccactccctcttccctgaaagcatgcatttttgagcctgcaattaatcaaacaatattctaatattatgttactctttaaagctcaaaaaattatgatccaacatctctaaagaatagcagagatgtttgctaattgagttacttcatcatacttttgtctactaaccaaatgtggccattttctttattccnttttgggacataggctgacagactccttcaaatacaacaagccgcagaattttatttgatgcagattgttgaaatgtcataccttcgtgggcattgccagtttcgacagcaaaggagagatcagagcccatctacaccaaattacagcatgatgatcgaagttgctggtttcattatctgcccaccactgtatcagctaaaacagacatcagcatttgttcagggcttaagaaggatttgaggtacagtagagcatcctaagccttggatcaccatcattttcctttccctc

SEQ ID NO: 533246 - DNA, 473 bp, Homo sapiens
gacttcgtctccaaaaaaaaaaaaaaagttgttccctagccttcgtggggagtatagaaaaaggcagaggagaaagtactcatatgagagacactaaaagaattggtgaggaatgaggaatgagatcaaagtggtcttagtttaagcaggamcttcattagaattttcaagcaagccaaagccagactcttggaataatcaaaacaggagattattcaagaaaactgggaacaagttagaatgctaggcatggtgggatatgggaagagccctgagaccttactctgagaccttggctatgcccagctagttaaagggaaaatggcaactttagaaaatagagctgacatgtcacaagaaaaagaatgttagaggagaaaatactctgactttgaattcagaaaagaatatatagaggtgaactctagtcccttttgaaggccccaggaagatgagtgcctttgccagaatag

SEQ ID NO: 533247 - DNA, 685 bp, Homo sapiens
tgcccagactatctgacccaagggctgtagggactgggctgcagaatggatttctaaatcttcaaaataaacaggcaaggaaatcttgcaacaaatgaaaaatgacttgagggcagtagaaagtacttgtgccaactgatggaggaggttatgaaaaatgaggagaggaaaatcactatagacttctgtgtttctactgcaagtggattgaacagtccagatatactgatttccagcccatatttmctgcttttaagctcctttggtcttatttccctcttctttctgaaaagttataaaatgaatgaagggcagaatgtttcttgcccaaccatgattcaggaggcagctcagccacagaacaggcaagtgtagcattgcctggaggaaaaggacttgtagaggcaggtcccagatggatccaccccagacttttcaaagaagacacctccttcatcttgtgttctaaaaccttgcaagttcaggaagaaaccatctgcatccatattgaaaacctgacacaatgtatgcagcaggctcagtgtgagtgaactggaggcttctctacaacatgacccaaaggagcattgcaggtcctatttgcaacctgaagtttgtgactctcctggttgccttaagttcagaactcccattcctgggagctggagtacagcttcaagacaat

SEQ ID NO: 533248 - DNA, 529 bp, Homo sapiens
ggggtgcacagaccagacttgggggattcttctctttctctctctccttatctcacacccgtcattacaaatcctatcagttctgctttcagaacatgaccagactctgggcacttttcgtctccattgctcccaccctagcccaggccacctggattcgtctctcaccaggatttctgcagttgcctctgataccaccttcttgctttgccttcactgatctattctcagcacatcaaccagagagatttctcttaaaaatcagatcatgtgacggctcaactgaaaccctccaatggcttcaaatttcactcaaaaatgtatttcaggtccttaccatgagctatagggtcaacacaatccacacccactacytcccaacactggcttcctgcttttctcagcctcagccatcccagcctcctttgtgcttcttacatgcactaagcacatgccaaccccaggatctttgcacttgctactgtttccccagacgttcccatggccatttaatcacttgcttcagtgt

SEQ ID NO: 533249 - DNA, 509 bp, Homo sapiens
ccagcaccctgtctcatcccatcgtctgatgtgagagggtcccacagcgcagatcaatggggctgggttccagccctgctcccacggtgtctcaaaaactgtcacccactgcacctgcagctattccggtgctctccatctagggagctctttctgactagcttttcccagggttgccgtaaagaggcaaccagaaaagccaagcaagctgacatgggggcctcgcctgagctgagaccctcatgtgacaaaagaaactcgtgggtaggccagggcatgagccagacctatgcgccgtggggaaggtggcagcagcggatggagcctctggggaggttggggcygcccgcacatgtacacgtgtctcctttgcacaccccatgtggaaactcacaagggaacaacacccaaatcagattcctaaggagccccaatccagtccctgtcacgtgtccccaagccgtatgtaacatctgactcccctcctcatatctccatgcccaccttca

SEQ ID NO: 533250 - DNA, 509 bp, Homo sapiens
ccagcaccctgtctcatcccatcgtctgatgtgagagggtcccacagcgcagatcaatggggctgggttccagccctgctcccacggtgtctcaaaaactgtcacccactgcacctgcagctattccggtgctctccatctagggagctctttctgactagcttttcccagggttgccgtaaagaggcaaccagaaaagccaagcaagctgacatgggggcctcgcctgagctgagaccctcatgtgacaaaagaaactcgtgggtaggccagggcatgagccagacctatgcgccgtggggaaggtggcagcagcggatggagcctctggggaggttggggccgcccgcacatgtacacgtgtctcctttgcacaccccatgtggaaactcacaagggaacamcacccaaatcagattcctaaggagccccaatccagtccctgtcacgtgtccccaagccgtatgtaacatctgactcccctcctcatatctccatgcccaccttca

SEQ ID NO: 533251 - DNA, 562 bp, Homo sapiens
taattgctattgtattttaattttaggtatgtatgtatgtatgtatgtatgtatgtatgtatgtatgtatttagagacagggtctcactatgttgcctaggctagagtgaagttgctatttactggcacgattgtagcacactacagcttcaaactgctggcatcaagcaatcctcctgcctcagcctcttgaggagctggaactacaggcatgtgccactgtgcccagctctcctgatcttttgaacaacaatactttctctatgtattcattgtgtaatgaggtaaatataattaaatgtgtggagcattgaaagataatgtccattaaccaaactaaactgtccaataaccaaataagaatcctattatattcaccagtatcaaaataatatttccacytctaggctggatctggatgtcctaaagccaaatatctgaagctggtattttaactacctcacctgattctgaggcatgccaacatggagaacccaagatctatataacacatggatagggcagccaggccagggctgctaaagaccattgatgaatccag

SEQ ID NO: 533252 - DNA, 652 bp, Homo sapiens
tagaaaaaagagcctaggttctttaacatatattaacagtattcatctcacaattttcctattgagaaattaacaagaattccatgccaatcatccagtgagtatcatacttccccttcttctagctaagccatataggtctaaatgaaattaaaactttcccaaacttttagttaactgttcagtttgcaacaattatgagagtaaaactcagtatcacttttacttcaattatgagtagaaaatacagatattgctgaactcattccacattttattgtagccatagccaactgatagtaatctgacagaaaaaaatgatatagtagttatttaataatgccaagaaacctagattctattcttgactaaacttgcctttggataagtcattttcaatctctagataaggtttctcatctacaaaamtaggtaggtagttatatgctaactgatgtcacttttagaaataaaattttagagctctttcagtgtaatgcagtaatgaatgaattaactagagctgaaagcacatacacacagagagacacagtttatacacagtttaaacacataaagatgtgatttactgagtatcaacattctttgcttcaaacatatatattggtaaaaacttaaaactagaaaaata

SEQ ID NO: 533253 - DNA, 477 bp, Homo sapiens
tggccaggctggtctcaaactcctgacctcaagcaatccacccaccttggcctcccaaagtgctgggattatatgtgtgagccaccacgcccggcatggctcatttgtcataactagaatacagcagaagtgacattgcatgacttccaaggccaggccataaaagacaatccggacatcaagtgtcagaaacatgaaagggaagtcttcgaaatgactccaacctgggtcatcgtctaactagggctgcaagaaccaccccgctgagccctgccagccccygaatcatgagatacagtaacaacaaactattattattgttttatgtcaaacccagactagagagtgggaaaaaaatgttcctagaagagctggtgttgagctaagactgaagaatgagtatgaggtggccaagccagggcaagaagaataccttatgcaattcatgtcaattcaagaggacaatttttgtagcca

SEQ ID NO: 533254 - DNA, 511 bp, Homo sapiens
agtggtaagcagggccatcgctttgaggtggagaaggtcgggccatctcaatcacggctgctctctgccttgcttccttgaatttgtgacacagccgcccactgcctctgttgagattacatcataaattactcaggcataagcagaccagagataagagcagtcagaggcagcccagaaaccaaacaaggggtgctggcatttgttaaaaaaaaaaaaaaaaaaaaaaggaaatctgatggagatgaggggagattctggaagtggrtcagcgggtcccaaccacagagaggcctaccaataacgtcctcgcttagcctccccgggggtcggtgctgttctttcccgccctcatcccccctctcttgcctttttcctctcttgccatctttaaaaaacacacataggcagaaatcaatccatcaaatgtcattacagatttattaagcctgatgtagaaagacatttaacagtaacatctccagaaagcataaaaagagcacttctattc

SEQ ID NO: 533255 - DNA, 621 bp, Homo sapiens
ttctagcatttcttaactattagcttccatagaagtgcctaaggaacccccattcccacaccgatcttaaaagtcatattagaaattgaaatgtgcattaacaattatatgacaatcaaacttgaacaatactttcataaagatcttaaaagtggtaagtataagtaggatacaatttagtgctgttaaagtatgaaagtcttgggataccatttagcaacttctattcaaatgcatacgtcaaaagaaacaaaggggctcaccaaatgtcatatattaaatcaaaattggatctgtcgctgacattgtaaatttatcataaattcattacatgttaagttgtagatttttttctctaaatatgattactgtcttaattttttcactgtcactttattttctttgcttagagtggggtttcccccagtgtgtctrgaagtgtctataaacataatataggcacaatggctgatgaaaaagtaaaaagcaggaaaggaaacattttttcaattgtatatcattcgttggcagtacactgttttggactttttggtcattaagaggcaacaagctaactatctaaaatgagtgatgtggttgggagtggttatcttataaaag

SEQ ID NO: 533256 - DNA, 655 bp, Homo sapiens
ttcacaccactggttttattgctccagctactgttattactgattaatttatctcttcaatcatgacttctatgcctttagagataccatagcattctttttttttttttttgcatctctctgcttctctcgacttagctaactgcttcttgtcccacattcaaatcctcaatgggagagaatattattgtattagactctcaccattcaagataaagtatgtatcttggataaatctcctgtgtaggtcctattgtaggtgggtctatacaaatgattgcctgtgagtctgtgatgtgtccaaattaatgatatcacagggcacacaacatggtgatctgtttgtaaagaacttcccagaggagggctctgggcaaagtgagcaatcataatctgcttagtaggggtcaatttaaacttaagtttattgcctggcttgctaatttatagtgatgatcccactctagattttcatgtccccatatatttgacacagcatgggttctcaaatttcatcatgcaccaaaatattctagaaagattgtttaaaaygaagacacttggaacactctcaagagattctgattaaattggtttgggggaggactctggatttgcatttttaataaacattttctattcattaagtttcaga

SEQ ID NO: 533257 - DNA, 629 bp, Homo sapiens
aattttaattccatcaatataagttttatgggaaaagaaaggacatctctgtctttgagatttctttttattccctatggaattttgatgtatatatgttgatggtgggttaaagaagcttgtgtcgtgtgcttgtatcaaggagacaggatctataaacctctaggtactctacattgtactgttttacattgtgatacactctaggcatcctggagttgagcaatgtgttgaytatactggtcacaggggcaatggttcctattctactgggtgttgaacttctgcctgcatctgttattgattctagaatttggagaacatatggtctcttctttggagttgcttgtacattatggttctccactaatgacttggccacactttattcttttttggcatgttctgaactatggctaggacacaaatttgttccttgccagaaccaactgccacaaagccctcaagtacctggtcactttcttctgcctaaataatctcttatataatcaccccagtatgacacttgctgatatttactatattttgttggtgtattgaagaactttggatccattcaatgctacactggtgccaagacaattgcagagtatttatacaagcttttt

SEQ ID NO: 533258 - DNA, 602 bp, Homo sapiens
gtaacgtttgtagctccattatatattctcctaattgctagaacatcattttgaaatggaaaataacatatactgtaattgtatatttatgaagctttcatcccagctcttccgtgagtgcttgaaaagcagagatacaacctatgcttggcacagtatttgaggtgtgatagagagcaggggtttagtaaatgttagtttactgtattaatgcattaataatatctatctaactcagaaaagactacagaatactccttcagtgtcaaatgaagctgttacttagtaagtccacctgtaaactctgtttctttttagaatttactcatggttggcttcaagatttactacttgcttaaagctgtaacactattaggttatatgttaactcggagatttcttgtcagaagaaaaattaagtccaatagttatgattgcattgtcctgtaggatattcaccagctttgcatgaatacaaaaactataaaaaataagcctcagccttgagcagaaaatttcaagtcacagactagatggatttggatgaagtatttgaatagcactattcaartgctattacttaatgctttaaatccttatgg

SEQ ID NO: 533259 - DNA, 598 bp, Homo sapiens
ctattccctagctccctgcccaccaaattattcataaaaaccctagtctctgagtccttaagtaagctgatttgagtaataaactccctttctccttcttggctagcagtgcattattaaactctttctctactgcaatgctgctgtctcagtgaattggttttgtytgtgcagtgggaaagaaagggattacaatttaatctacatagcaaatattccagaatttatcatattatctgaattttaaccttacttacattagcacacatgatgtgaaactggcccaattatcccatagaactgatatttataattttttaaaataaacatagaaattgaccctcctgatcttaaagcatgaaacttacatttgtcttatctgagtccttccttagaaaactaaccctcaggcctgttggatagtataaaagtagttaaactcccaagatcacaacattcagataatgaaaagccagacctctcatcccttatgattttctttccatttcctgattcttgtttacctacaagtagttatattcactccctgctatataaactcccaattttagttggtcaggtagatggatttgagatt

SEQ ID NO: 533260 - DNA, 598 bp, Homo sapiens
ctattccctagctccctgcccaccaaattattcataaaaaccctagtctctgagtccttaagtaagctgatttgagtaataaactccctttctccttcttggctagcagtgcattattaaactctttctctactgcaatgctgctgtctcagtgaattggttttgtttgtgcagtgggaaagaaagggattacaatttaatctacatagcaaatattccagaatttatcatattatctgaattttaaccttacttacattagcacacatgatgtgaaactggcccaattatcccatagaactgatatttataattttttaaaataaacatagaaattgaccctcctgatcttaaagcatgaaacttacatttgtcttatctgagtccttccttagaaaactaaccctcaggcctgttggatagtataaaagtagttaaactcccaagatcacaacattcagataatgaaaagccagacctctcatcccttatgattttctttccatttcctgattcytgtttacctacaagtagttatattcactccctgctatataaactcccaattttagttggtcaggtagatggatttgagatt

SEQ ID NO: 533261 - DNA, 597 bp, Homo sapiens
cagcttgcacccttggcagagatgcagctttttcactgacagctccatgttcagagtcagggtgcacttaacttcaagggaaataagcattgtgaactggaaatctgtgcactagatatcattaagggtgaaggaagactatatgtgaggtcatatttgatggatacacccaacaactgaataagacttttgagcagggctacaataatctctgaattatgaagttggaagcatggttcaagaaatgtcagctactcctgtaaatgtgaccatattagaacaatcatctgatctgatctctgagaattctattaaatgcactccataaagtacaamaacatctcaagtccactatgctaatgcaggtcaaatctacacgaaacatcattttgttttgttttgtttttgtttttggacagggtctggctctggctctggctttgtcactaagactggagtgcagtgacgtgatcttagctcaccgcaacctctgtctcctaggctcaagggattctcccatctcagcctgcccagtagccggaactacaggtatgtgccaacacacctggctaatttgttatatttttttgtagagac

SEQ ID NO: 533262 - DNA, 623 bp, Homo sapiens
tatggagtgggttcttttgttttttaataatgttagtagcttgtgtttgtcattagtacagttgtctgactgtctttgaatgttrcaatggcactggctttagacagttcctcagggcagggactgagtctgcttaaattgctttgtgcagagcacaggtggctgagtaataaacactttttgctgatgcaatgtcttgtattgaagacaaagcctctgattacttagtgttttgaaattagtttttaaagatgcatcaggaatccaattagtgtacaatgtgtgcatgacaccaaaatggctttggagcagattaacaagaccacaacacccttatctcaaaaaaattatattctaaaaccaatagtacaggatgaaaacaaatgtgagcattgaataatagattttctttccataaccttaataaaatacctaatcttgtacaaaacaagtatgcaaatgtgtatgtgtctatacatttttcttcatctctccattatgcaggttagaaatagatcaatggcattgttataggcataatcagaagcaaactggcattagctgagctatgaatattagtttgaaatgttcaatgtaattttttatttttgtttttttctcat

SEQ ID NO: 533263 - DNA, 598 bp, Homo sapiens
ctgttttctgtttgtttgtttgttttttaaagtcctttcagggtacatttactaccatcaygataaaatgccaaaatatattttggcatattttcagaggtgcggaaaattgaacttttccaggacttaaatctagagagtgacttatcttcatgtcttattttgatatttgttttttataaatgtgtcctatattactttttgagaattataaatcagtgatccagaaatatcatcaaccaaagaaattcaaaaccattcaaccatcaccactgtgaaactagactcaaggctactttaaaaagtaatactaagtgaaatgtatggacactggtacatggatggtaattagtttcataattatatttatactattaggattatcatgtcacaacagtagggattacacatccaatggaccataacaaattcaaaatatgttttatctaattagttaataacatatgactaagacttttggatagattaaaggtggtttttaaaaattagtttgtgttttaaattattcttcaaaaatcgagattcacatacagtaattgagatttggctgtgtgaggtttcagttatctgaggttaa

SEQ ID NO: 533264 - DNA, 598 bp, Homo sapiens
ctgttttctgtttgtttgtttgttttttaaagtcctttcagggtacatttactaccatcacgataaaatgccaaaatatattttggcatattttcagaggtgcggaaaattgaacttttccaggasttaaatctagagagtgacttatcttcatgtcttattttgatatttgttttttataaatgtgtcctatattactttttgagaattataaatcagtgatccagaaatatcatcaaccaaagaaattcaaaaccattcaaccatcaccactgtgaaactagactcaaggctactttaaaaagtaatactaagtgaaatgtatggacactggtacatggatggtaattagtttcataattatatttatactattaggattatcatgtcacaacagtagggattacacatccaatggaccataacaaattcaaaatatgttttatctaattagttaataacatatgactaagacttttggatagattaaaggtggtttttaaaaattagtttgtgttttaaattattcttcaaaaatcgagattcacatacagtaattgagatttggctgtgtgaggtttcagttatctgaggttaa

SEQ ID NO: 533265 - DNA, 598 bp, Homo sapiens
ctgttttctgtttgtttgtttgttttttaaagtcctttcagggtacatttactaccatcacgataaaatgccaaaatatattttggcatattttcagaggtgcggaaaattgaacttttccaggacttaaatctagagagtgacttatcttcatgtcttattttgatatttgttttttataaatgtgtcctatattactttttgagaattataaatcagtgatccagaaatatcatcaaccaaagaaattcaaaaccattcaaccatcaccactgtgaaactagactcaaggctactttaaaaagtaatactaagtgaaatgtatggacactggtacatggatggtaattagtttcataattatatttatactattaggattatcatgtcacaacagtagggattacacatccaatggaccataacaaattcaaaatatgttttatctaaytagttaataacatatgactaagacttttggatagattaaaggtggtttttaaaaattagtttgtgttttaaattattcttcaaaaatcgagattcacatacagtaattgagatttggctgtgtgaggtttcagttatctgaggttaa

SEQ ID NO: 533266 - DNA, 605 bp, Homo sapiens
agacatttaacttgcgtgtaaaatagaaatattcaacttgtgtcaatgagaggtaacctttgccatgggcttgataggtgcctactataggcttctcaatacctatcagccctgtggtttagtttcaatattttgaatacctattttattctttatatatttttaaaagcagaattttcctttattttactgtyagtcctcatatattcccacaaagctgggcattaataaggttaactctcagttgctaactaattaatctgaaaatgctaaatacccacgtgaattaaatccttgtttttatcatgagtcactcacgaaaaatgaagagctgtttaaggttgtgtaagacattgattaattatctatcacaaataagagtccagggatatttaaactctttgcatctcaatagcagagtatttaactcaaatcactaaactaagtcattttatgattgaggatgaaaaaaagatgagttcttgactgtgagaaaggggtaacaggacacaggagaatggccctagtccccatttttgcagcagcgtgtgaagtgcattgctgtgaagtgaatgaacaaaatcacatatggggagaggcaacag

SEQ ID NO: 533267 - DNA, 347 bp, Homo sapiens
acaaatacatgtgaagtatttggctttctttggattatggtaacattttttgccaggcctggctgcttgtaatagttttgaagtcctaaagtcataatgcagtgcaatgtcacatattaaggttagaagacaattctccatgacatttcatttctgcattttgtatcagcttttttcctatactaaattccaagtacgtttatatagcaagcagctttggaagayagaaagagtctctctccagaacagaggacaaatttgtttactggccagtttagaagaaataatatcttcctccaaaacagaaaaaaaaatgtagacaggtttgctaatagtcatttttaaaa

SEQ ID NO: 533268 - DNA, 347 bp, Homo sapiens
acaaatacatgtgaagtatttggctttctttggattatggtaacattttttgccaggcctggctgcttgtaatagttttgaagtcctaaagtcataatgcagtgcaatgtcacatattaaggttagaagacaattctccatgacatttcatttctgcattttgtatcagcttttttcctatactaaattccaagtacgtttatatagcaagcagctttggaagacagaaaragtctctctccagaacagaggacaaatttgtttactggccagtttagaagaaataatatcttcctccaaaacagaaaaaaaaatgtagacaggtttgctaatagtcatttttaaaa

SEQ ID NO: 533269 - DNA, 597 bp, Homo sapiens
gaaatagacagatgacatttaaaaactaaaactatctaccaatttctgaaactgttaggacaaatttaattataacaatgctggatttcatgcaaaacagatgaatgtttcaattagaagatttatctaacagttatgctaatcctgtttattttctcacaagtgaatgactgggaaaaatgatgataaaaacaaaaattcagataaattcaatagaaagcttccacaagccttagtgacaaatacatgtgaagtatttggctttctttggattatggtaacattttttgccaggcctggctgcttgtaatagttttgaagtcctaaagtcataatgcagtgcaatgtcacatattaaggttagaagacaattctccatgacatttcatttctgcattttgtatcagcttttttcctatactaaattccaagtacgtttatatagcaagcagctttggaagacagaaagagtctctctccagaacagaggacaaatttgtttactggccagtttagaagaaatmatatcttcctccaaaacagaaaaaaaaatgtagacaggtttgctaatagtcatttttaaaagattagggtttc

SEQ ID NO: 533270 - DNA, 504 bp, Homo sapiens
tttctaccctctcagttgcaccttgttgcttatgccataaccactttttcatgctcacttcattatgttggtgttttaagcagaacacctgctaaggggttatctacttttgaaaagatccaattgtctttagagcaaagtgaaatataggcacagaggcctaattattattaactgttagyataattgtaattataagtagaatatttcattatattacatctgttgacattttaaatgaatctctgtaatgtgctacactaataagcagcaaggaactgctgacttggcacacttttggatggcatttgtgacaacaaaagaggttatgaaaatgaatttgccataggagtcctaccgagttagttactatgattcacaagtttattatggtaataaagcaacacgagacagtaatactagggactcagataatcaaggaatgcacaatattgctcccaacacattgtgaagaagaactaagaagtgctgggaattgtatac

SEQ ID NO: 533271 - DNA, 582 bp, Homo sapiens
attcttagctaaattttacacagtgtaggtagaaaaagtgaactcagagtcattttagcaaactattagaaatgggactgaagtgatacrcagaagcttatgggtggatatacagtttctcagttccagagtgccttgggttccaatgaggtgaattaaaaatgaagcctatagatagcaaacttttgagatcactgatttttttttttaactatacttggtgctaaagaaaagaatcaagcatgtatgttatcacctaatggaatgggagtcaacataaagaagccaactctccataaaattgatccagcctggtggttaaggaccaggatgtatggatccctctaaggcagacctgttggagaagtaaatttcctaaaggaatgaattagaaaaatatatgaagtcacccattattaacatataagaatggaataatatgctatgcatactagttgatagtatccttgggaatggctggacacttcctcagtgtggtcttatttccaacctaaaatagacagcaaaggaaagttctattcagtgatttctcatttgaactaagcaagaaataagaattat

SEQ ID NO: 533272 - DNA, 603 bp, Homo sapiens
gagtggtctaccattaccagtaaatattttagtctccctattctgggcatttctgtaaaatatacttgaatgctstgacacagtcttagcccaggaggtcttcctcctataggctgttttctaatcacctttttgtttattctttgacaggtcatacaacccccacacacgtgtttagcaaggtataaattcctatacacccataatttttgagtattgcatcacacatagcctggggacccagtgacttccctggtgcagtatggacatcggttctctcatcatgggcttacttattatttctctcccatcaggaagtacacacattcccatcttcagtttgaggggcccctatcttgtctaattcttctttctcctctcgagtaaatttaccccttaatactatcttggggatgtatgggatctggctaaatagtgtaatttcttccttcagggaggcttgcttagcagcttcatctgtaagcctgtttcctacagcttctatagtgttccctttctcatagccatttacatgaactatggctacctctgctggaagcagacagctttctaaaacctgtttgaccagttctctgtgtacca

SEQ ID NO: 533273 - DNA, 505 bp, Homo sapiens
tggtctgctaaaccgaggggatcttctaggagtgttttcatttccagttgtaagaggaacatttacaaagccaagctctccctgtcccatggaaacttccctaagagagaatatgctagatgtctgctgtttggaggggataggaaagttctcaatatccttcttacactgttctaattcytctcttaaatttggataaggatctaaaggagcagttggtttggctttcccacggtctccaggtctttcttcctctaaccctcctgctgccccttgatcttcctgttctctattttggtggctgtatggagggggcaagcatgatagggagtccctgggctttttactgggcaaggcctttttactaggctccttagacctagacgtggggtttaattatttgatccagcagacggtgtaacctatctcttcttgtgaggatggggttttatcatttacatacagaattaaagcttggcatacccaatcctcatctgagccaaac

SEQ ID NO: 533274 - DNA, 590 bp, Homo sapiens
ccattccattgcaggcacagagatcccagacaagacgccaagtttgtgagaaacacattcacccatccaaatccaaagaatggactcagagaygcaaagaacagcggaagtgagacttttaataacaatcttgcaagatcgggtgtctggtaggcagacacacatggggcagttgcagcaggcaatttatttcctagcatgcaagtccctcccctagttcctcattggtcgagtactacggggttataatcatcccggatgttggctaagtttcattattttcttctaagttcataccctggtccccttccccacttaagtttcgatttcccagtaacgacactttattttcttttatggactgcctactccactacatcctggttgcttatcatgactttctaggtgcatgagctgtgcggtttgtcacacccacaggctggttgccagtacttggatgtaccatgccttgaaaatggaccattaaatgttttcttacacgcataaatataaaatatacagatatacacatacacatatatttttaagtatgaaaaacatggcttatattttcattgcaccgcaagtac

SEQ ID NO: 533275 - DNA, 521 bp, Homo sapiens
tgcagaaataaaatctaaggatcctgtctttttttcttcccaatatacttctgggtgatattaactagtctgcttcacttccttcagcagtagataatgcattatagccactttatatcagaaaagaatgggctgtgagatgttgctccaatgacgtgcactgtgttttgcggaatgtcaacacaatatttttcttttccagaaagatagaaaattatattccttgtatgaaggatcatgaggaattagaagaggrggttattatataaaacctaactttgaaaaatgaaacatctatttactatttaaaaacaattcatggttatgtgattgctggtgtccttggacataataactgtattataactctattttctttttaaatttatactgtaatacaaaaattactttttaaatctcttctgttttgaaaggataatttgggttgataatgtaataaaatataacctgttttcttcttattcagcttgacaacaatgcaatatatgaaccatgatctg

SEQ ID NO: 533276 - DNA, 585 bp, Homo sapiens
tggggctgttcccttgtccgaatggcagagcccagtcggggcttccgggacaagtcctggccccacggggtttggttttgaggggtcccaagttcccacagttgtcccgacaaaatggaggacgtcgtctcctcctgctgcagccatggcgggaggtgggggactattccccacggggcgcggcgagggtggaagggcctccactgaccgcagcgcactcaagactccagttcaaccgcggccccgaaagctcacttggccccgctccagcacctccccggcctcgcccctcttgggggccttcaaggaactggacagggagggcgctggggcatccaggccgccgctctcctcgagcagaggcgttgggagccgctgccgcagcttgggcccccgggctcgggcgagggcaggcrgccccgccggagtctcccgggctgtgtaggtcccggagagccccgggccccgaggggccgaagcgggccgctacgacgggcggcgaatctcgggctcctgaccctggcggacccggtagctgggggcgggagaccggcggggagacaacccgaccgggagttgagggct

SEQ ID NO: 533277 - DNA, 587 bp, Homo sapiens
tgatgcaaagcccattggatcagatcattagtctttgccagcaggtacacatatattcttggaagttacacattttctagattcttttcattagaataaatgagtagaagtagaacaaatgtccaaatcaatggctcttctaaattttcagtagtcgtagcaataagggttaacattcatgtgggctatgacattagtcagaatatgagtacgtatatttatgtagctgtctcttgttattacatacacacatatatatagcatacatgttaaattactattttatacattaaaatcaatagtgactactcagccaaacaaagaatatgcatgtaaataggggtaagttcagtagttagctactctctttagtactttcctctcttgattatacaaactttaaaaacttctgataattagwgtcaccgtaactatttgctgtggaccttaatacctgggtgatgaaataatctgtataacaaaccccatgacaggagtttacccatgtatcaaactttcacatgtaaccacaaacctaaaaaataataataataaattaaaaaacaaaacagtgatgaatcaacaga

SEQ ID NO: 533278 - DNA, 594 bp, Homo sapiens
cagctggtggggccaggcaacagcacgggccctgcccctgcgcactgcggtctgtctctcctgtttccttctgattctcttyttcacacttactctcagtcttttttttttcatttgctctttcctagttttgtccttggtcacagttaacatacaccttggtggccacttttatagactaggtggtattcatgcctgcagcttctgcttcatgttaccctgggcttgctttacaaatgaagtattcactatatactgattttcagcggcctcagggttaaatggggtgtaaagccagaatgctttatagagtctcttatttaactgacttaggctcttgtcagctccttgaaaaatttctgaaatcttttttatattacttgcttttttctaccaactcttagcctctgcagaagtgcttctcagtacctctgcaaacgctgaagctgagttgcattctctgggtttttttcccctttttcctagagtaacaggctctttttttaatataatttttcatgcacttagagggttaaacaggcataccgagagtcagtgtaaatgtttacagtcttaccttcactgagttctaag

SEQ ID NO: 533279 - DNA, 648 bp, Homo sapiens
gagatacctgggttatagtattttattttttaaaattacctgtgttaaaatatgttttgtgatgtgtaggacaaagaaggctatttaaattgaaatcattttccttgtatccgagatctctaaatctcatgcacattaagtttgaattaacattaacaagggtctaacagcttgatgctgtgttcttagataattaaattcttagaaaatcattccacatttgagggagaagcgaaggacgcaaagagttcagtctttatttaaagtcgcttatacattgttacctgctgtttccggcttttcatgaaatcagcagggaggatttgatattaaaaatcaggttttttctctctttttgcggggagagggtgaaaatccttgtagkgggagtggaattattaactggaactctttctgagctatcactttaccttggcatctcatcatgtgctggaagatccagtctgttttgcaggctaaagctgaggcttgtaccagtaaggttcctttataaccttattacacaaagtgctttataatttacaaagccactttttcattcattattgcacgtgaccctcatagccacctcaggaagtttgaaagacggcatattcttccagagtatcatcccaagagagactgacc

SEQ ID NO: 533280 - DNA, 648 bp, Homo sapiens
gagatacctgggttatagtattttattttttaaaattacctgtgttaaaatatgttttgtgatgtgtaggacaaagaaggctatttaaattgaaatcattttccttgtatccgagatctctaaatctcatgcacattaagtttgaattaacattaacaagggtctaacagcttgatgctgtgttcttagataattaaattcttagaaaatcattccacatttgagggagaagcgaaggacgcaaagagttcagtctttatttaaagtcgcttatacattgttacctgctgtttccggcttttcatgaaatcagcagggaggatttgatattaaaaatcaggttttttctctctttttgcggggagagggtgaaaatccttgtagtgggagtggaattattaactggaactctttctgagctatcactttaccttggcatctcatcatgtgctggaagatccagtctgttttgcaggctaaagctgaggcttgtaccagtaaggttcctytataaccttattacacaaagtgctttataatttacaaagccactttttcattcattattgcacgtgaccctcatagccacctcaggaagtttgaaagacggcatattcttccagagtatcatcccaagagagactgacc

SEQ ID NO: 533281 - DNA, 586 bp, Homo sapiens
gattggatcatgggggtggtttctaatggtttagcactatctccctattgctgtctcatgacagagttctcaagagatctggctgtttgaaagtgggtagcacttctccctttgttgtctctctccttctccagccgtgtgaagactgtgcctgcttcaccttcaccttttgctatgattgtaagtttcctgaggcctcctcagcaatgcctcctgcacagcctgtggaactgtgagtaaactaagtctcttttcttcataaattacccaatctcaggtagttctttataacaatgtgagaacagactaatacactcagtaaatactcattccccttctttaacacttccaccaataccagatgcttgaggatgttatcaaagagtcatacatctcaatggttacgtcaagttgaccaccttcaggttggaaattctgtgcacctcttgacttctcaatacttcacaataacctggatctctaagactgcaaatgtggcatatactatcaacagaggatgaacctggaatgacttccagaagaacaacattcaggtatccaagygataaaagcaaaacacaaaatt

SEQ ID NO: 533282 - DNA, 648 bp, Homo sapiens
ccttgacagtgtcatctaaagaatttcccaatgattttctctctcagcccaatgctctcattataaactttcatgatttgtaactgcttccaatatttacttcttcacttgttagtgttccatacgagattctgaaggactaaaaagtttccattcaaaatgctgtataacctccacttagttccaaaaccgtttcatcacctcaaagttactcttaccagttaagcagtttctctgcattcttcctttctcctagsccctgacaaacaccaatatgcattgtctctacagaatgatctattatggacatttcatataaatagagtcatacaatatctgactttttgcatctacctgcttccacttagcatcaagttctgggggttcattcaccttgtagcacatatcagtacttcattttatggctaaataatattccattgtatgtatgttccacaatttatccatttattcattaatggacatttgtgctttttccaccttttggctattgtgaatagttatgtttttttttaataatatgttagaaatacatattgaagtgtttccagattaaatgatacacctaaattttgtattaaaacaccacagccaaaaaacaaaaataaaagtggatatagatgaaat

SEQ ID NO: 533283 - DNA, 635 bp, Homo sapiens
ttgttggcttacaaaataaaacaaagcaggcaagggatatgcatactttaggacacagtcatttgttgctgtcaaatttctccatgcaaactcatcactcttcatgttctccagtcatatcacctcagaagcataaacactgaattaaaagaactcgcctctgaagtcacagtttctcagaaagtgtctagttcgatatttaaaccagcaaggggttaacagaagactgactccacaatcccataatatttacaggaataaagctggcctaaatatagggaatgagctgctgaggcccagaaattaggcccaggaagttaatcccagagaaatcagtgcactgggaaggaaatgagaaatarggattcattttctggaaaaagagcttaatatggggcattgtgatatagaaaaataaaagccaatgtccaggttttaggattaaggtaaaaaaaatacagtaaaataagccaaaaggataaaaatgctgagttactacacttgaatttcttgaatttctccttattaagagctctattgttcacagggctggaggatgtagagattgaattttccatttaaaggtaagaggtcacagctgtgaggtccatgtaggaccaagaagccacaggaca

SEQ ID NO: 533284 - DNA, 575 bp, Homo sapiens
atactttaaagattttagtcactgtttaaattctctggggtttaaatcctatttattaaaactattctaattctactgcatccccaaggctcaagtttaccaaatcacattcacgtttggatgtgtattttgttatgttagcttatttatcccctaagtaaatgctgcaattcagtaatgcaatttgtctattcaatgatgagaatactgtacttcaaatttcagatatattgttcatagataatccctctcttggtctttgagatggatagttatcatctggggagaggcaacacaaactcctttcctatttctggggaattctcaattggttacaacaccagtggaataaggtatctcacctccaaccatggaagctaaagagaggaggtggtacttytccccactccatccctgagatctgggacgcaggcaggagaagtagctttagccaatcagacatcttatattttcccccaagactttgaatcttgagggaggaatgcaaagacacaggacaagtttagaaatcagtcactgtgaagcgggcagtaggaagaggccatcagaagtag

SEQ ID NO: 533285 - DNA, 567 bp, Homo sapiens
atgtaatcatttggacaggattgaagtcaatttagtcaaattcgcaaccagctcaattaaaaacaacaccaacaagaacagcagtaacagtggcttctgttttggtcagaattatcaatctagtggtgtttgaagacaataaaaatkacctgatgatttgctttaagttgagaagtctaatagctaagtaaagtgacacagtgtcatatgtaatgatatgtaatattcatcaaaagcacaaatatttgaataatgttggaatttatttattccataaacgttttgtaatgtatctttatttccccaggcacttacggacctgttgatgtacatagagaaaaaaatactatacccttccctgaagaacttacttaccattctactgactgctttcttagacatattggctaaaatgtactgaaaattttaaaattctttaaaaaaagtattctttttaaaaagtatactcttttgctaactcaagcttagatgattatcatatttaatgaccatcagaaacatacatagaatctcttattttcttgtcttaatgtgcaaaaatacaca

SEQ ID NO: 533286 - DNA, 613 bp, Homo sapiens
atattaccttacagggtttggggcatgattcacttggataatacttagtccttaatttatttattcactcatttgttctacaaatatatattgcgctcctattgtaaagtagatggtattctaggcacatagatgtatctgtaaacaaaacagacaaaatccctgctctcttgaagctacattctagtggatagagataaacaatgaaaagtaagcatagtgagtaagaaagttaaatataattagtgctatctataaaagtaaaaagtatggttaargaaaactggtactgctgtgcatagggcagggtagagttggggagcaggttacagtgttacatagggtggtcagggctggcttccttgagaacgtgacatttgagtaaagactcaaatgaggtgaaggagcagccgtgtggacatgtcggtggagagtgtgccttaggcagaaagaacagtcagtgcaaaagtcctaaagtgcttgcaggacagcagcgaggctgccaggctggtatggagtgagtggggagatgagataagagaggtgaaagtcagattgctcccaagggcctcgcgggacacttcaggactccacctttccctccgaatgagac

SEQ ID NO: 533287 - DNA, 595 bp, Homo sapiens
ccaaaacacaaatatactgggaaatgaagtaagaggatattgtattaccaatgtaaatttaagattgacatcaccaaataaaagataattagaaacaaatcaagtagcatacctctatatatccaagggatgaaagccatacaaaatcaaaattacagaatattctgaactcagtgaaaattaaaatatggcatttataatcttttgttatgcacgcaatgttgtatttaggggaaaattgtaaagttataaatgtatatattaaaaataagaataatcatttttatatcagtatttaactaagacctttgtaaaaaagtaatagtttaaattaaaaataataaaatcaagggagtaatgtaaagaaggcatgcttattacgggcaggcatgtgggcagcatgacagggtccaagcgatgccctgttatgtatgcgcgttttgttttcaataattcacttagctgtgttcttttgaggtgtktacttttttgagagtatgtttcattgtataaaaataatgattccaacttgacctgattaatgtttccctcaattgctttaacatccctccccagatagatcatatctaaaaaa

SEQ ID NO: 533288 - DNA, 592 bp, Homo sapiens
tagtgaaatctttgttaaaatgtcgttattcttttaagatgtgcacggcaccacagtgttgaatcctaatggtaccatctcatatcatcaaaagctttttgtagcccatccaatcataaaataataccaarttcaaaaaaaaaaagaaacaaagttacatgtggatagagaatgtgctataatgcattagtgccttctcaattaaaaaaggagatcagtaaatacgcaaacaccactcacaccagaaggtaacatttctgtcaaataaagcagccacttagagtggatataaaagattaatgctttcaccagccttcaccactcagctttctctctcactctttatggagtgatggaaaaaagtaagcaataaatcaatcaaaatgatccagtgatatgtaatacaaacattcctgatttctctccttcttttctttcttatttattagaggaaagataaagtttcctttcaggtatgtagccctgggcgtcccactattaggtttgtcttacaaaccctggtgccggtttgaggagcagaaacagcctctgctggaatcaaggtgttgacagaggaatatctggtacaatt

SEQ ID NO: 533289 - DNA, 602 bp, Homo sapiens
gtgtggagacttgttgtgaacagagtgaggccaggggcttaaaaacccctgaaggaactattttcatatactcacatgaagacaattggtatcatttgtacgagttagggtccattcaaaaaccagaaattgtagaaattatactatgtgtttccacaaagagatttcagaaaaggaattcatcagaaagtgttggggaggccacatgcagtggatcaagcctataatcccagcatttagggaggccgaagcagatggatggtttgaggtcaggagtttgagacttgcctgaccaatatgatgaaaccccaactcgactaaaaacataaaaattagctgggcatggtggcgggtacctgtaatcccagctacttgggwggcagagacaggagaatcatttgaacctgggagggggaggttgtgtgagtcgacattgcgccactgctctccagcctgggtgacaaagcgagacgtcatctgaaaataaataaataaataaatagatagatagataaaataaaatgttggggagttgaagaggcaaaacaaacaccaacaagcaacgccgaagcaatgcagagacagtaactgcaggaaacagc

SEQ ID NO: 533290 - DNA, 638 bp, Homo sapiens
tgtttttggtatttttcaatcaaaacagtcagattgtctaagaaacattgtatttcatgagagtagctaattggcttcttaagctcatttgggcrtgaatgatgccaagaaaagatttgcaatgaagtaattgttatagctaatatcctaaagtagccaacctacatttggtgctaagaatcaaagcaagcaaaaaaatgctaatacatatttcttgtgtttctagaactaacatgtttcttagatttctatccaacatttttatataagtttgttttgtacaaacacacagatattacagttcagagaatgtttaagcctaaaactttctaatatgaacttgtggagaaaaaaatattaagctctctaccaaagagttaagtcatctgtaatggattatcctatatttaaactcaaatgtggtattatcatttgtagaattcacgtgtttctacagtgtgttcaaaaacaggttttataaaatggctaatttgtggagccaacacagctataatagaatcattttgtgatttttgcgtcatttttataattgtcctggaaggagaaaaaagtaacggattgttctttttctacgtatcatctatcaatgaattagggatggtaaattccagttttca

SEQ ID NO: 533291 - DNA, 638 bp, Homo sapiens
tgtttttggtatttttcaatcaaaacagtcagattgtctaagaaacattgtatttcatgagagtagctaattggcttcttaagctcatttgggcgtgaatgatgccaagaaaagatttgcaatgaagtaattgttatagctaatatcctaaagtagccaacctacatttggtgctaagaatcaaagcaagcaaaaaaatgytaatacatatttcttgtgtttctagaactaacatgtttcttagatttctatccaacatttttatataagtttgttttgtacaaacacacagatattacagttcagagaatgtttaagcctaaaactttctaatatgaacttgtggagaaaaaaatattaagctctctaccaaagagttaagtcatctgtaatggattatcctatatttaaactcaaatgtggtattatcatttgtagaattcacgtgtttctacagtgtgttcaaaaacaggttttataaaatggctaatttgtggagccaacacagctataatagaatcattttgtgatttttgcgtcatttttataattgtcctggaaggagaaaaaagtaacggattgttctttttctacgtatcatctatcaatgaattagggatggtaaattccagttttca

SEQ ID NO: 533292 - DNA, 641 bp, Homo sapiens
tatttaataaggcatgatgggctttgcattatatgtccctgattcaaccattctggtttgtttcccaccacctttctatgtcacactttactcttgccatacatcacgctttctcatgcttccaagatttttgcatcattttcttttcttttttccttttttttttctgagacagagtctcgctctgttgcccaggctggaatgcattggcgtgatctcggctcactgcaacctccgccgcccagtttctagtgattctcctgcctcagactgagtagctgggattacaggtgtgtgccaccacacctggctaatttttgtatttttagtagagacarggtttcaccctgttggtcaggctagtctcgaacttctaacctcaggtgatctgcccacctcggcctcccaaagtggtgggattacaggtgtgagccaccgcacccagccttctgcatcattttctgtactccaagaaccttgtgcatgttcacataaaagtactcattcattgttcatttctgcatcctttctttttcatgaggtaattattgagctcctgctctgtttctcaatctgtgaggaaaaaggagggaaaataaataaatacactccattctcaaggaactaatagtccagagaca

SEQ ID NO: 533293 - DNA, 641 bp, Homo sapiens
tatttaataaggcatgatgggctttgcattatatgtccctgattcaaccattctggtttgtttcccaccacctttctatgtcacactttactcttgccatacatcacgctttctcatgcttccaagatttttgcatcattttcttttcttttttccttttttttttctgagacagagtctcgctctgttgcccaggctggaatgcattggcgtgatctcggctcactgcaacctccgccgcccagtttctagtgattctcctgcctcagactgagtagctgggattacaggtgtgtgccaccacacctggctaatttttgtatttttagtagagacagggtttcaccctgttggtcaggctagtctcgaacttctaacctcaggtgatctgcccacctcggcctcccaaagtggtgggattacaggtgtgagccaccgcacccagccttctgcatcattttctgtactccaagaaccttgtgcatgttcacataaaagtactcattcattgttcatttctgcatcctttctttttcatgakgtaattattgagctcctgctctgtttctcaatctgtgaggaaaaaggagggaaaataaataaatacactccattctcaaggaactaatagtccagagaca

SEQ ID NO: 533294 - DNA, 602 bp, Homo sapiens
tctattattgcccacttcatgaatgaggaaactgaagcacagcatgtttgggtaaacttggccaaggtcacactactgagaggaagcggatgcaaaccaggcattccggacccagaccctacgctttaaccagcttgctctaatctgcatatttttgtatcccccttctataagttaaatagtgctactaaaaataagcttaatgaatattaaaataaaatatacatttatatatgatatatttatctttatactatttatataatattttctaagcacattttatctatctacacatttacatatgttataaacagcatatttgaatgaatttggatatgtgaataaaaagaacttgagactgagataaagtagtatttcctacacttgtagagtcataacatacacttatttttaatctttctgaatatttcttttttctttttctttctttttttcctttttttttctttttctttctttttttcctttttttttttttttcttttagktgagctacatcttttgacagagaaaattcactttgaaagtaggtcaaaaatgctggtaaacctcactggatttccctgtgaggaattaat

SEQ ID NO: 533295 - DNA, 662 bp, Homo sapiens
tgggattttaatggtaactgcatagatatacagattgatgttgaaagtagtggtacaataataatattttgccttttaaattataacatgggctatcttctcmtttatttagatattatttaagttcttttatattttatagtttttatataatatccttacccatctttcgtcaaatttgtctctatattttattcttttgttgttattataaacagattatttacattttgtctcttattagtgtagccactcaagctttctgctcagtactttttatgtggtatgtttttacatctatttactttcaacttatttgtgttgttgaatctaacgtgtcatatcttgtagaccgtatgttgttgaaatacatgttgttttttatccattgaacaatctctgcctttttgttgtaatgtttagtgcttcacatttaatatatttatttttaaggtaggatttctgactaccaatttgtttctatgtcttatgtcatttttcttccaacagttgtctgttactcccatcttttatgttaaatttctaatatattcatttaaattccctctcatttttttaattatatttttctagttacttttttagcaatttctaaaggttacagttaacaacttaaaatgttaagtttgaataatatcaac

SEQ ID NO: 533296 - DNA, 662 bp, Homo sapiens
tgggattttaatggtaactgcatagatatacagattgatgttgaaagtagtggtacaataataatattttgccttttaaattataacatgggctatcttctcatttatttagatattatttaagttcttttatattttatagtttttatataatatccttacccatctttcgtcaaatttgtctctatattttattcttttgttgttattataaacagattatttacattttgtctcttattagtgtagccactcaagctttctgctcagtactttttatgtggtatgtttttacatctatttactttcaacttatttgtgttgttgaatctaacgtgtcatatcttgtagaccgtatgttgttgaaatacatgttgttttttatccattgaacaatctctgcctttttgttgtaatgtttagtgcttcacatttaatatatttatttttaaggtaggatttctgactaccaatttgtttctatgtcttatgtcatttttcttccaacagttgtctgttactcccatcttttatgttaaatttctaatatattcatttaaattccctctcatttttttwattatatttttctagttacttttttagcaatttctaaaggttacagttaacaacttaaaatgttaagtttgaataatatcaac

SEQ ID NO: 533297 - DNA, 662 bp, Homo sapiens
tgggattttaatggtaactgcatagatatacagattgatgttgaaagtagtggtacaataataatattttgccttttaaattataacatgggctatcttctcatttatttagatattatttaagttcttttatattttatagtttttatataatatccttacccatctttcgtcaaatttgtctctatattttattcttttgttgttattataaacagattatttacattttgtctcttattagtgtagccactcaagctttctgctcagtactttttatgtggtatgtttttacatctatttactttcaacttatttgtgttgttgaatctaacgtgtcatatcttgtagaccgtatgttgttgaaatacatgttgttttttatccattgaacaatctctgcctttttgttgtaatgtttagtgcttcacatttaatatatttatttttaaggtaggatttctgactaccaatttgtttctatgtcttatgtcatttttcttccaacagttgtctgttactcccatcttttatgttaaatttctaatatattcatttaaattccctctcatttttttaattatatttttctagttactttyttagcaatttctaaaggttacagttaacaacttaaaatgttaagtttgaataatatcaac

SEQ ID NO: 533298 - DNA, 607 bp, Homo sapiens
aacatagtattggaagtcctagctggagtaatcagaaaggaagaaaggaaagaaaggaagaaatcaaattatctttgtttgcagatgatattaggttggtgcaaatgtgattgcagttttcattaaaagtagtggcatttctatctgccaacattttctatgatrtgattattacactttgtatgcctgtatcaaaatatctcacgtactccataaatataaacacccaggaacctataagaatgaaaaataaataaatttaaaataaataaatgctatctccataaatacctattattacctcaacatatccaagacaaagtcacctgtccatgtaataaaccgtaaagatttccaaacatttctacttctaattaaatcattgtctttgtttttgttttgttttttgagatagagtcttgctatgtcacccaggctggagtgcagtggcgtgatctcggctcactgaaacctctgcctcctgggttcaagcgtttctcctgtcccagcctcctgagtagctgggattacaggcatgtgttaccacgcccagctaatttttgtatttttagtagatacaggtttcaccatgttggccaagctggtc

SEQ ID NO: 533299 - DNA, 607 bp, Homo sapiens
aacatagtattggaagtcctagctggagtaatcagaaaggaagaaaggaaagaaaggaagaaatcaaattatctttgtttgcagatgatattaggttggtgcaaatgtgattgcagttttcattaaaagtagtggcatttctatctgccaacattttctatgatatgattattacactttgtatgcctgtatcaaaatatctcacgtactccataaatataaacacccaggaacctataagaatgaaaaataaataaatttaaaataaataaatgctatctccataaatacctattattacctcaacatatccaagacaaagtcacctgtccatgtaataaaccgtaaagatttccaaacatttctrcttctaattaaatcattgtctttgtttttgttttgttttttgagatagagtcttgctatgtcacccaggctggagtgcagtggcgtgatctcggctcactgaaacctctgcctcctgggttcaagcgtttctcctgtcccagcctcctgagtagctgggattacaggcatgtgttaccacgcccagctaatttttgtatttttagtagatacaggtttcaccatgttggccaagctggtc

SEQ ID NO: 533300 - DNA, 636 bp, Homo sapiens
ctgagtagtttaatcatcctgttccctgcctgtagaatcctgagaatctgacaaccttcttgcatttcatcctctttctgccccctttcagtgtaatctggtagtgtttcagctagtataaaattctcaaaaaccttcaactcagggaaatttttttgccttagtttttaaataattatcactcctaatttttttctgttgcatcattcttaaactctcattaatagtgttgaagttcctagattaacatcatgttttcatgttttccctcatattttayatttctttgtatatttactatgttctgggtgatatccttctaaactttctaatacactgttttattttagtaagatattcttaatttctaagaatatttcttattctatcattgctcctttttcatagcagcatgttcttgttttatggaggcagaattctctcaacactaagaagcgtactaacttgaattttcaaacttttttctgtatctgataggatctcttttcttcagaataaatgttctgccttttacaaatcttaatatttcctgttaatccatgttcttggttttcctcaaatgtctaataatctttgttaactgttcacatttatgtgcgaagggcaatgttagga

SEQ ID NO: 533301 - DNA, 539 bp, Homo sapiens
gccattgcgtgattggttacaatgacaggagaggataaacaggaccattcagacatactcagaactatcagaggtatcaataagaatggcttataaaaaaccaatcagtttgtttacataaatggttacttgtaggttaaggacatttgtaaatcacttattctctagataatttcaaaattttcccttggacacttgcttaccctattaattttattaatttaattagctagcccttcccctgtgagatattgcattggcaaatttaggtgggaataattgcaaaagctgtacaggaagaggtgaagttaatctgactatgtactgtatgtacaaatgaaaataatatttgttgagcccttactatgtttcaggcatcatcctaggctctgaggatacagcagtgaacaagacagacaaaaatctctgtcctagtggaacatacattctaataggagagacaataaataaatatataaaatatatggtatatcatactggtgataygtgctgtagaaaaattacagtaaagcaggaaa

SEQ ID NO: 533302 - DNA, 653 bp, Homo sapiens
gcacttctaggtagtaatagcctaatctctccacagtagttaatgctcatccattggtgatctttgcgtgaaccaattgtttcattggcggttgcagaatgagggttttatcattcctgcatattttttaactggaattttaaaaacagcctcccttatcaactatatttatttagttacccggaaatagattgtatgggaaaggtgggatgaatattcaatttattctcctttaattgccagttttcagagtaaggagttagcatttgttttttaaaatacaatttaaaactatgtagccattgaatcttgcttcatgaagtaagaatggattcatgtggtaagtgtagctagtgggtctacaggtgacttcccctctcctaccatgagtgtggattagaagaatcctataggatgggggcagagggaagctctctcccagtcctctacacyagaaatggagtgggctgtggaagcgggtatggtgcttgagggagggagaagactcaatacttagtggcaacttctcatctccccgtctgcctctaaggggcagataagtccctgagcccctgtgtctgtgtctttcttgcatgtagacagtggaaatatgatggtgagatgctgaacaggtaccgacaggccctagagac

SEQ ID NO: 533303 - DNA, 581 bp, Homo sapiens
tgcataacttacccatgggcacagcaaatacatgagagagccaggattaaaatctagtttagtatgatttcaaaatctattattttagggaatattaattagtgcagctatgatggaaaacagtatggaaatttctcaaaaaattaaaaatagaactaccatataatccagaaatcccatttctgggtatattcaaaggaaataaaaytagtatgtcagagatacctatactcccatgttcattgcatcattattcacaaaagccaagatacggaattgacctaagggtccatcaacggatgaatggataaagcaaatattatacatatgtacagtggaatactattctgccttaaaaaggaaggaaactgatagtgagtgggaaataaaacttggagtctgttctgatagcagtaccttatataactatctctaaaggaaaactataccaagctattagtctagtatttacttcctatgaacaaaattttgtgtgttcattttgtttcaggttgaagatgaaatccactgaggagggaagtccagcaccctgtgtgccagtccagaactggcccatctgt

SEQ ID NO: 533304 - DNA, 581 bp, Homo sapiens
tgcataacttacccatgggcacagcaaatacatgagagagccaggattaaaatctagtttagtatgatttcaaaatctattattttagggaatattaattagtgcagctatgatggaaaacagtatggaaatttctcaaaaaattaaaaatagaactaccatataatccagaaatcccatttctgggtatattcaaaggaaataaaactagtatgtcagagatacctatactcccatgttcattgcatcattattcacaaaagccaagatacggaattgacctaagggtccatcaacrgatgaatggataaagcaaatattatacatatgtacagtggaatactattctgccttaaaaaggaaggaaactgatagtgagtgggaaataaaacttggagtctgttctgatagcagtaccttatataactatctctaaaggaaaactataccaagctattagtctagtatttacttcctatgaacaaaattttgtgtgttcattttgtttcaggttgaagatgaaatccactgaggagggaagtccagcaccctgtgtgccagtccagaactggcccatctgt

SEQ ID NO: 533305 - DNA, 581 bp, Homo sapiens
ttgcataacttacccatgggcacagcaaatacatgagagagccaggattaaaatctagtttagtatgatttcaaaatctattattttagggaatattaattagtgcagctatgatggaaaacagtatggaaatttctcaaaaaattaaaaatagaactaccatataatccagaaatcccatttctgggtatattcaaaggaaataaaactagtatgtcagagatacctatactcccatgttcattgcatcattattcacaaaagccaagatacggaattgacctaagggtccatcaacggatgaatggataaagcaaatattatacatatgtacagtggaatactattctgccttaaaaaggaaggaaactgatagtgagtgggaaataaaacttggagtctgttctgatagcagtaccttatataactatctctaaaggaaaactataccaagctattagtytagtatttacttcctatgaacaaaattttgtgtgttcattttgtttcaggttgaagatgaaatccactgaggagggaagtccagcaccctgtgtgccagtccagaactggcccatctg

SEQ ID NO: 533306 - DNA, 609 bp, Homo sapiens
gaggatcccagattgccttcctttcctctggaggagcctggttccaggcccctggtcccaaggaaccttccctttccagccttgtccctagaggaagaagaggaagaggaagaagatgaagatgcggcagagcccgagtggctgcgcagcgaggagcatccgagccagtttttcgccgaggcccagcggctgcgggagcagagactgttgctggacgaagaggtgtcagtcgcggggcgggtatacggggtgcatcgggtgatcctggccgcaatcagcagcctcttccgagacaggctgctgggcggcggaggtccgcggccccccttcagcctcgaggtgtccccagggggctgggaggccgtgctgacctttgcctatgagggggtgctgggccccgcctcgcagggggatgtgctggccgcagcagaggcgctgggagcgccccgggtgaaggctgctgcccagcagacatgcgagagggctggaaatgccrgggaagatgtaaagaagcccagccaggcagaggagctgagggagaacctgcgcggaatcgagctcctctaccgagagggcgtcgggtgtgacttgaagctggaggcaggcggc

SEQ ID NO: 533307 - DNA, 621 bp, Homo sapiens
gtaatcccagctactcgggaggctgaggcaggagaatggcgtgaacctgggaggcagagcttgcagtgagccaatatggtgccactgcactccagcccaggcgacagtgcaagactccgtctccaaaaaaaaaccaaaaacaaaacaaaacaacaaccagagaaaaaagacacagaaagcaaatcagaggttgcccggggtggagagattatgacgcaggtgttccatgtcttcacagcagtggtaatggtggtggttgtggtgtatgtgtgtttggattttagaaatcattagttcatactaacacatccagttccaatctaacccacccataattatatcttccctcttccatagttaagaactctggctccggccgggcatggtggctcacgcctgtaattccagcactttgggaggctgaggcaggcrgatcacgaggtctggaggtcgagaccatcctggctaacacggtgaagccccgtctctactaaaaatacaaaaaattagccgggcatggtggcgggcgcctgtagtcccagctacatcagctcccaggaatgctaaggaagcagggtgatgtgggggaacggaaaacacgcccaggcccagcacagccac

SEQ ID NO: 533308 - DNA, 621 bp, Homo sapiens
gtaatcccagctactcgggaggctgaggcaggagaatggcgtgaacctgggaggcagagcttgcagtgagccaatatggtgccactgcactccagcccaggcgacagtgcaagactccgtctccaaaaaaaaaccaaaaacaaaacaaaacaacaaccagagaaaaaagacacagaaagcaaatcagaggttgcccggggtggagagattatgacgcaggtgttccatgtcttcacagcagtggtaatggtggtggttgtggtgtatgtgtgtttggattttagaaatcattagttcatactaacacatccagttccaatctaacccacccataattatatcttccctcttccatagttaagaactctggctccggccgggcatggtggctcacgcctgtaattccagcactttgggaggctgaggcaggcagatcacgaggtctggaggtcgagaccatcctggctaacacggtgaagccccgtctctactaaaaatacaaaaaattagccgggcatggtggygggcgcctgtagtcccagctacatcagctcccaggaatgctaaggaagcagggtgatgtgggggaacggaaaacacgcccaggcccagcacagccac

SEQ ID NO: 533309 - DNA, 612 bp, Homo sapiens
tccctacaatagctgagggtcacacgctgartaatttaatttacacatacacgagggtccagagctaagttaattctgtaaataagacttagaataaaaggccctctccaaatattttaaaaataataatttttgttttttggaagattaagcataccactgaactgctttgttacagaattcagtacaacagaagtctggctaattttgttttttaatgagaaacatctgagttgtacatatcacaaacagcttcaagtttctgtaccaaccccccgcccccacccccgccgtggccaaacagttaaaacccaaagcaaagcatcactttggatgtgaaaaagtcttagaaaattaacttacaaaaacatccctatcaagtcggtagtttggcatttactttacattagtcaaaagctccagctaaaatctaatttttttaaaaaaaaatcgaagtttacattattcatacagattgggcattgttaaaaaatatgcacaaataaccacatccatgcaatacaatttctttaaaaatttaaagcaatataaaagagcagagctaggtactgaacagaacattttggtgtataaccggcagctcaaaattgc

SEQ ID NO: 533310 - DNA, 546 bp, Homo sapiens
ctggtgatataaaagacaaaaaactggactttttaaagataaatgtccgaatattttttaaactcctggaacactagagcaccttttgggagacatatgatctcctttaactacctatatatctaacaaagacagaattattagaagrgatagcaataaatcattctaccttcttaaccctactttccccaagcctagaccagtctagttaatagcatctattttcacttcattccctcttctataaatgaaaccaatattattggactctggcaagtctaggtgggtagttgttgctggaagagaggcaacatcaagttagaggacctacaaggttaggtttatgactgtgcaacatttaagttgttttgacaacatatattgccaggagcctacaagtaacaaaagagaatacatagctttgtagagagattttgacctgtaatacatagaaatactaaagagtacttctgatgaggtagcatgaaaacattcatgccaatcctaggcacaagacattgaaatagaagaataatttggcatctt

SEQ ID NO: 533311 - DNA, 454 bp, Homo sapiens
ctgatacttatttgggagtcattagcatttttatgaaatttgaatttccttctactccttcatgcaaccctgagacttggatttctggtacatttctatagacttcctttatcttgctcagagacacaaggtctgataactctgaaaggcatgccaaatactagcaggaaaatttcacagtttgaatatcatgtgagttaccttgaaaggtaacaagaaaaagatctactaagttgagaagaattcagattcttgctgacgtaactgtcatttcagttcctcatatcaagtgttcagatatgcttttaygatccacaatttagcagtggaaacttcctctattaattattctccttctctcttctttctctttcttctctctctttctctctctctctctctctttctctctctctctccctccttcctctctccagataccacataatctata

SEQ ID NO: 533312 - DNA, 368 bp, Homo sapiens
cgtgaacaacaccaaacatagcacaggttgttacttgttctcaaccatataatcataagccttagaagggaaaccaaaacatttttgggaagagatttggactctcccacactatgcaagtaattcctatctcattatacacagatttccaagagttcagtatacaccagatgatgcctgcatcagagtcacaaactgagcaggtaacaccatgaacattagaaaataaatagggcagcacgtttctcattatgaggaacaacattttccacaggcctatttccaagatggtgctacaggtattaggtctgtggaatatgctsattaataatggtgttgtaaagcctgatgatacttgtggcttttct

SEQ ID NO: 533313 - DNA, 595 bp, Homo sapiens
tggtatcaacaattgtatatatttttgcatgttccagtctaattctatgcaaaatgacagcaggaatctgggacatcatgatggacaaaaggactcggatctgggcagagtccccatgtgcacgcygcttctatcgggcactccagggtccgagaggattcccctagagctgcacgactccctggtgttatctgttcaaagttcacccaccatttctgatcaattagaccagggtttctcaacagggaccctactgacattgggggccagatcattctttgtggtgggactgccctgtggctcaaacgctgcctcttcccaccacctccccactattctgataacctccaccatctccacacattgtgagatgtcccctagagggcaaaatcacccccaggttggaacctcagagttagttcaggtgaggtaggaggcgggactcaactctggaggcagggctcagacactggacctaactgaggactaatgattaaaacaggtagggggcagggaggagcaacgtgagtgctgctctcctgccaagggctttcacggagcctctggtgcctggcgctgccctgaggagccagaa

SEQ ID NO: 533314 - DNA, 595 bp, Homo sapiens
tggtatcaacaattgtatatatttttgcatgttccagtctaattctatgcaaaatgacagcaggaatctgggacatcatgatggacaaaaggactcggatctgggcagagtccccatgtgcacgccgcttctatcgggcactccagggtccgagaggattcccctagagctgcacgactccctggtgttatctgttcaaagttcacccaccatttctgatcaattagaccagggtttctcaacagggaccctactgacattgggggccagatcattctttgtggtgggactgccctgtggctcaaacgctgcctcttcccaccacctccccactattctgataaccyccaccatctccacacattgtgagatgtcccctagagggcaaaatcacccccaggttggaacctcagagttagttcaggtgaggtaggaggcgggactcaactctggaggcagggctcagacactggacctaactgaggactaatgattaaaacaggtagggggcagggaggagcaacgtgagtgctgctctcctgccaagggctttcacggagcctctggtgcctggcgctgccctgaggagccagaa

SEQ ID NO: 533315 - DNA, 439 bp, Homo sapiens
aacctccaccatctccacacattgtgagatgtcccctagagggcaaaatcacccccaggttggaacctcagagttagttcaggtgaggtaggaggcgggactcaactctggaggcagggctcagacactggacctaactgaggactaatgattaaaacaggtagggggcagggaggagcaaygtgagtgctgctctcctgccaagggctttcacggagcctctggtgcctggcgctgccctgaggagccagaagctctctgagtctgagtggtgacatcttgcagcagactcttaatggttttggatcctccattttgcccagggaggagatgcttccttcctggttgtctttgatcaaaaatgctggtgaaagaacaagcatctctttggttcaaaagaggtatgaattatttcagtgatgaagaaagcccaataaac

SEQ ID NO: 533316 - DNA, 328 bp, Homo sapiens
gctctccctctgcagtctgaggagctgcacagcttcagccccccaccccctgtatttggggttctttatttcctcttcttagagaaagtgctaattgttcatggaagtgacaagcggttccccttggagctgctgcctggcttgtatcctaggtgaggatgtgtgaggtgggagggtctgatggcccctgaatgtgggggtaggaggtggccgatggggagatgcaagacacacagccccggagtcctggggaggggccacttggaagactggggtctctggtctgggtyacaaaggtcagagctgtacaaagggtccccaaatgatg

SEQ ID NO: 533317 - DNA, 513 bp, Homo sapiens
tgggaatgcagcaattgatcagtgggtgctgggcagctcacacccccgtgcggacagtcttctccatgggccgagaagtgtgtcacatgcatgcaggtgcatatgcatggggacatgggggcccaggagtcttcctactgcagagttcaaagatgcgggctgaaggcagtttggagagcrtcccctgcctgtgcttctcttttaactccaggacctgagcctctgctgggtggcgggtggacgctgctcccagtctcccatgcaaggggccccagagggaggaaaatggcaggatgggacagagggaccacgtgagagcagctttgggataaagctgccagatacacaaagcaataaacaaaagggaaaaaggaaacgggactcaacacaattcacaagtcacaaggtggttggctccaaggagcaggtccctggctcagcgggtccactggggctctctgggcagaggggcctggtgtttgaggtcccctccagaaccttcacgctgagtgg

SEQ ID NO: 533318 - DNA, 545 bp, Homo sapiens
gctaggcaaggcaccatctcatggggtcctrgaacttggggtgtcaatgtttggctgcagcatggggggtgctaaacacggagttccaaggccctaatgctgtgctcacatgggccatgctttcctttccttatacattgcatagggttccttatctgcaggctggggtactcctgagacccccagagctaggccccaaagcagctccaccaggctggcctgctctgagaagccctgaacgcagtgtgttcacgggcaatgggcagagagcgcctctctcaccgctgggcccgtgtcggcgacaaggacaagtgtcttagggagtaagagatatcagggtggcaggagggcaggggccaggaaattctagaggtagggctgggaggccactggggaaggaggccgagctgcctcctgcgtgcagcagacggatgcaggaaggctttcagtgatcagattcgtgtttcaatcaggtaactctggtgggggtgtggccaggtttctgtttgtctggcattcttcaaagagagctgctctgaccagag

SEQ ID NO: 533319 - DNA, 545 bp, Homo sapiens
gctaggcaaggcaccatctcatggggtcctagaacttggggtgtcaatgtttggctgcagcatggggggtgctaaacacggagttccaaggccctaatgctgtgctcacatgggccatgctttcctttccttatacattgcatagggttccttatctgcaggctggggtactcctgagacccccagagctaggccccaaagcagctccaccaggctggcctgctctgagaagccctgaacgcagtgtgttcacgggcaatgggcagagagcgcctctctcaccgctgggcccgtgtcggcgacaaggrcaagtgtcttagggagtaagagatatcagggtggcaggagggcaggggccaggaaattctagaggtagggctgggaggccactggggaaggaggccgagctgcctcctgcgtgcagcagacggatgcaggaaggctttcagtgatcagattcgtgtttcaatcaggtaactctggtgggggtgtggccaggtttctgtttgtctggcattcttcaaagagagctgctctgaccagag

SEQ ID NO: 533320 - DNA, 545 bp, Homo sapiens
gctaggcaaggcaccatctcatggggtcctagaacttggggtgtcaatgtttggctgcagcatggggggtgctaaacacggagttccaaggccctaatgctgtgctcacatgggccatgctttcctttccttatacattgcatagggttccttatctgcaggctggggtactcctgagacccccagagctaggccccaaagcagctccaccaggctggcctgctctgagaagccctgaacgcagtgtgttcacgggcaatgggcagagagcgcctctctcaccgctgggcccgtgtcggcgacaaggacaagtgtcttagggastaagagatatcagggtggcaggagggcaggggccaggaaattctagaggtagggctgggaggccactggggaaggaggccgagctgcctcctgcgtgcagcagacggatgcaggaaggctttcagtgatcagattcgtgtttcaatcaggtaactctggtgggggtgtggccaggtttctgtttgtctggcattcttcaaagagagctgctctgaccagag

SEQ ID NO: 533321 - DNA, 545 bp, Homo sapiens
gctaggcaaggcaccatctcatggggtcctagaacttggggtgtcaatgtttggctgcagcatggggggtgctaaacacggagttccaaggccctaatgctgtgctcacatgggccatgctttcctttccttatacattgcatagggttccttatctgcaggctggggtactcctgagacccccagagctaggccccaaagcagctccaccaggctggcctgctctgagaagccctgaacgcagtgtgttcacgggcaatgggcagagagcgcctctctcaccgctgggcccgtgtcggcgacaaggacaagtgtcttagggagtaagrgatatcagggtggcaggagggcaggggccaggaaattctagaggtagggctgggaggccactggggaaggaggccgagctgcctcctgcgtgcagcagacggatgcaggaaggctttcagtgatcagattcgtgtttcaatcaggtaactctggtgggggtgtggccaggtttctgtttgtctggcattcttcaaagagagctgctctgaccagag

SEQ ID NO: 533322 - DNA, 518 bp, Homo sapiens
gcaggaaggctttcagtgatcagattcgtgtttcaatcaggtaactctggtgggggtgtggccaggtttctgtttgtctggcattcttcaaagagagctgctctgaccagagattctggtgtgggtgagaaccccagcagatgcatttccaggtgtagccctcttacctgccccaggcaatctgcttctcctcctcccctgggcatttgtttcttgtgtttatctcttaccacagattcatccatcctgggaatgggcttctactttgggcaaygctagatgacacaaaaccttcagttgtaataaacaatcacaaagcaaactggcattccaacgtgaagccacgtctcctcctgacctggctggctttcctgtttgccgtaccggccagcccaggtacccccaaagggacctttgttttcccagaaaaacagaacaaaacaaaaacagcaacaaaaaacccaaacacacacacataaacccaactgcccacccgtaatcaggactgaggctgaacg

SEQ ID NO: 533323 - DNA, 603 bp, Homo sapiens
tacaatggccacaagccctttcagaggttctcatgtgcctggtttctttttgctaaaagccattcatgtggcccctgggccattttgcagtgaaagatgtgcaacttgaatgtaaagatagtcgctgcaccatggacaaggtcctcacggctgtggtcatccaccaaagtcaaattaccacttaccctgagacctgcagcccctactggggccctagcagttaaaagccaatggcacagctgttaaggcccacctggcccttctgaggtattgctgacggccaaggtcaaaacactccacatataaaatgtaaggcccacccacctggccccactgaagctacagtcactccagatctatattgtgtcatgaaatatttcagcaatccagacaattgcacccaatcatagagtctttaatatcatccttcttgtctgcctgagatctgaacaratggagaaaatgagtaaaaagagaaatggatagaggctgaaatttgccttcattcctggtaacagcaaagttagaggaaaatggagttgataggagagagaatgggctgctaagtgagcaccagcattaggcagacacatcacccagcca

SEQ ID NO: 533324 - DNA, 472 bp, Homo sapiens
ttaatggcaaatgggggaagaagtatccagaggaagatctgaatagtttccatgaacttagaaaaataaccaaacctaacaaaagactgagctctgtgcattctacaatgcaatcgctcattcattcatttatcccaactcactcatctcttcagcctcacccccctctcacacacgtgctcccttactgagcattgcagtccagcctgacatctcaatggagttgtttttctgttgtctttcctctttcaccccaacccctatttgttcctttcctcctctcctttccctcccaatggcagttttttttttttaatttcagaagaaaacttacaaaaattgttgaaacattcactacaaagcaaaaccttattttttttttaacattcagcagagagctcctcgcccccmaccccacaaaaaaccggcagccatgtcaaagacactgcctccccctttgacattcatgcag

SEQ ID NO: 533325 - DNA, 655 bp, Homo sapiens
tggaggaagaagaggaaaagtcagtgaaagatctgagactatttattctgagggaataacagaggaaatgataaaagcttatcctcatcatggagttatcaaaattgtctgacaaatagttgctgaaatccatgtaggccaactgagagcttatttgcactaaaggaagaaaaatctcaggaatcacagaggtattagaattaagagagaaagtatggttggtttagggaccaaccatgctcttttttgtgaaatgtagaagaaataaaccatactttctttgtgaaatgtagatgcaagaataaaatcaatgatccttctttaacaaaatctgaatgaatgcatggtgtctactttcaaaaaccccaatgcatacatttttaatccttatgttactttatataatacattcaaayatagaagctaaactgcaataatctactttacatctatatgtttgatacaattgtattttgtgacatacagccaccaggcctggtattctgtcttattgaacaaatcagggaagtcatagcccaggaagaaagctaatgagagacagtgacaattctgaagtttaagaagttattactcctcaaaccccaaacttaatctcgttttgggattaagactgtagtattcattctaaactcag

SEQ ID NO: 533326 - DNA, 585 bp, Homo sapiens
attttctcttactttattgtaagaatattgtatataatgcatataacttacaaaatatattttaattatgttattagtaaggcttccrgtcaatattatgctactatggttaagttttgagggagtcaaaagttatacacagattttcaactgcacaggggtcagtgtctctaaaacctgcattgtcgaagggtcagctgtattctattatgttaataacctgggttcatttcacttggaaaacaataaaatataaaaagaagtaagaaatgtacaactgttttaaatttatgtttaagcaaaacaaaaatatgttaatttaggtttcttattctcactagtcactaagtaaaggatatttgatgaattttggaattattgtgtatatacttacatacagacaaaaatttttttaaattaactttccaaaattcttggctttgtgatagcattaactgatactgcagaacttcaacatctcttccacagtgcaggcttaggaattttgaatggaggacagacaacatagtgcaaatgaatgtcctccagttttgaattaacactgatctggtatgtatgaatatt

SEQ ID NO: 533327 - DNA, 585 bp, Homo sapiens
attttctcttactttattgtaagaatattgtatataatgcatataacttacaaaatatattttaattatgttattagtaaggcttccggtcaatattatgctactatggttaagttttgagggagtcaaaagttatacacagattttcaactgcacaggggtcagtgtctctaaaacstgcattgtcgaagggtcagctgtattctattatgttaataacctgggttcatttcacttggaaaacaataaaatataaaaagaagtaagaaatgtacaactgttttaaatttatgtttaagcaaaacaaaaatatgttaatttaggtttcttattctcactagtcactaagtaaaggatatttgatgaattttggaattattgtgtatatacttacatacagacaaaaatttttttaaattaactttccaaaattcttggctttgtgatagcattaactgatactgcagaacttcaacatctcttccacagtgcaggcttaggaattttgaatggaggacagacaacatagtgcaaatgaatgtcctccagttttgaattaacactgatctggtatgtatgaatatt

SEQ ID NO: 533328 - DNA, 585 bp, Homo sapiens
attttctcttactttattgtaagaatattgtatataatgcatataacttacaaaatatattttaattatgttattagtaaggcttccggtcaatattatgctactatggttaagttttgagggagtcaaaagttatacacagattttcaactgcacaggggtcagtgtctctaaaacctgcattgtcgaagggtcagctgtattctattatgttaataacctgggttcatttcacttggaaaacaataaaatataaaaagaagtaagaaatgtacaactgttttaaatttatgtttaagcaaaacaaaaatatgttaatttaggtttcttattctcactagtcactaagtaaaggatatttgatgaattttggaattattgtgtatatacttacatwcagacaaaaatttttttaaattaactttccaaaattcttggctttgtgatagcattaactgatactgcagaacttcaacatctcttccacagtgcaggcttaggaattttgaatggaggacagacaacatagtgcaaatgaatgtcctccagttttgaattaacactgatctggtatgtatgaatatt

SEQ ID NO: 533329 - DNA, 598 bp, Homo sapiens
ctatgtattgactcatgtctgttccattaatctaggcttctctacaaaaatataatattaacccaggttttctactcattaagttatatgcaaagacaatattctcatccctatttcccacttcacctcagagatcacccttgtctgatcttgkatctttccactcatttttgtgaatacaaatgttcactctctctttaaaaatgcctaacattccattctaccctcatagttttactgttatattagggttatttcttggcatttaaaatactggcttttttaaacaacattttatacttctccctttttcctcaaaatggtgaatatcataaattgtagacaagtcttctccttctaaagacactgagaaaattttggtgagggctatacatcagggggtgaccacatctacaggatggtaaagtatgaagataatagtccaattactactaatgttggacagtgctgggaaagagaaatgataaaaaaagttcaacagacgcagagttgaaaggtatgaataaatggctgcatcaaacttctaggcacatgtagaaataatggctactaaatcccagattgggttacccaattg

SEQ ID NO: 533330 - DNA, 598 bp, Homo sapiens
ctatgtattgactcatgtctgttccattaatctaggcttctctacaaaaatataatattaacccaggttttctactcattaagttatatgcaaagacaatattctcatccctatttcccacttcacctcagagatcacccttgtctgatcttggatctttccactcatttttgygaatacaaatgttcactctctctttaaaaatgcctaacattccattctaccctcatagttttactgttatattagggttatttcttggcatttaaaatactggcttttttaaacaacattttatacttctccctttttcctcaaaatggtgaatatcataaattgtagacaagtcttctccttctaaagacactgagaaaattttggtgagggctatacatcagggggtgaccacatctacaggatggtaaagtatgaagataatagtccaattactactaatgttggacagtgctgggaaagagaaatgataaaaaaagttcaacagacgcagagttgaaaggtatgaataaatggctgcatcaaacttctaggcacatgtagaaataatggctactaaatcccagattgggttacccaattg

SEQ ID NO: 533331 - DNA, 454 bp, Homo sapiens
gtaacaaaaactcagacgctgtttttgatgtctgaatgaggacaactttcaagggtcactcatcttcttttcccacttaaaaaaattctctccacactttaattgatttaaaattgtacctaagatttgaaaatgcttatatacatgtgtaattttttgtttataaaagaggttccataactatttttactgtagttaaagcagataaccagatacctaccttttaaataatttttaaactgtgcagtacactattgttaactatatgcagaaagttttacagcaggtctccagaactttttcatcttgcataactgaaacygtatccactgaaaagcagctccccattttcccagtgggaattgggaacaattaatgttgtcagatcatatggtaattctctttataatttttcgaggaacctacacactgtgttctctaccatttttcatag

SEQ ID NO: 533332 - DNA, 546 bp, Homo sapiens
ctacaagtttaaaccaaggtgctgccaatggggaaaataataatgaacactcaaatccattttctacttgccaggtgttcttctaagagctttacttaaatgaattaacttaatactcaccactaacctatgatattgataccattattctgatcattattttagagaatgaaattgagtgtatagagtttaatgtcgcatagtaagtgttgaagtctgactacaaacccagacaatctagctgcagatagacattagaaagaagcagatggatttgagagagattcaggggtcatagggaaaamatcttgacaattacatttctgaaaattgttccatatatataagtattacattttaaatttatctaaaatgagactgctattgctgaaatgtataataataacaatcaatgcaataataatactccacagtgatagtcccaattgttaaagatattcacatgacttaataacttacttgatgtctctttgatatatgaaatatgctttgttcttataagcaaaagattgtgggatgagtgac

SEQ ID NO: 533333 - DNA, 631 bp, Homo sapiens
gcgtcagcctgtttgttttaccgtttccatgggtacaaagactgttttcttctttttccttacgtttcataccaaagactgtgaggtaaaataatggtagtcattttcaatatgtgttatgttattacrcatcattaataaaaactttcaacctgtatatttggatatatctgaataagtaaagagtctctgatattaactgcctctggaaaaaaaaatctgtaaggaatttaaaacaactactatgtattaaattttagtatgtcattcattcaactattttttaaaatatttgtgaaactaaatatatattttaagctgtttctacttagcaaaagtaaaaaatactaaatcagcaaggaaaaaagcagtttatcaaaagtatatttagtgtgatttaaatattgtcaagaaaacatacataatttttggtagctttccatacttccaaagactgggtagtacttgtatgttaaagaaaaatatagttcagtgacaggtaagaagcatatataaatattcaaagattttagacttaaggttcagtctagatatactaggaatttgcagtcctatattgtgcacgaaacaaaaaatgtgtagaaaaaatagttatataaaataaaggcaa

SEQ ID NO: 533334 - DNA, 582 bp, Homo sapiens
aaataacaagtccaaatagagcaattggctcagacaaggtaaatattcttccagtataaaatttaaaagtttcatgaaaattatctgtgcctttgaataatgttttcagtagaaagctgttttgaagctattttaatctaactcctccttcatatgttgtatgtgataatttacttytttaggcataagaaaagctcaaagaaaactttttcaattgaataattactcaattattgtgcgaaaaagtaaaactaaaatatataaaaatatatattaatgctaacagaacaaagggcaactgagacaataaaaaatgaatcatatattaaaccagaagttgacacatatatggatactgacaatggaatctggaaagaaatatcagtattaaagtcttcagctgcatattatatggtcatacacaacatggcaaaaataatctgctttgcttccacccagtatttcatcttttcattaactaactaaagcccacacagttagtcatataaaatccacacaatcagttttagcttgtcatttagaattttataaagtgataaattaagttagtgtttaaaatac

SEQ ID NO: 533335 - DNA, 582 bp, Homo sapiens
aaataacaagtccaaatagagcaattggctcagacaaggtaaatattcttccagtataaaatttaaaagtttcatgaaaattatctgtgcctttgaataatgttttcagtagaaagctgttttgaagctattttaatctaactcctccttcatatgttgtatgtgataatttacttctttaggcataagaaaagctcaaagaaaactttttcaattgaataattactcaattattgtgcgaaaaagtaaaactaaaatatataaaaatatatattaatgytaacagaacaaagggcaactgagacaataaaaaatgaatcatatattaaaccagaagttgacacatatatggatactgacaatggaatctggaaagaaatatcagtattaaagtcttcagctgcatattatatggtcatacacaacatggcaaaaataatctgctttgcttccacccagtatttcatcttttcattaactaactaaagcccacacagttagtcatataaaatccacacaatcagttttagcttgtcatttagaattttataaagtgataaattaagttagtgtttaaaatac

SEQ ID NO: 533336 - DNA, 582 bp, Homo sapiens
aaataacaagtccaaatagagcaattggctcagacaaggtaaatattcttccagtataaaatttaaaagtttcatgaaaattatctgtgcctttgaataatgttttcagtagaaagctgttttgaagctattttaatctaactcctccttcatatgttgtatgtgataatttacttctttaggcataagaaaagctcaaagaaaactttttcaattgaataattactcaattattgtgcgaaaaagtaaaactaaaatatataaaaatatatattaatgctaacagaacaaagggcaactgagacaataaaaaatgaatcatatattaaaccagaagttgacacatatatggatactgacaatggaatctggaaagaaatatcagtattaaagtcttcagctgcatattatayggtcatacacaacatggcaaaaataatctgctttgcttccacccagtatttcatcttttcattaactaactaaagcccacacagttagtcatataaaatccacacaatcagttttagcttgtcatttagaattttataaagtgataaattaagttagtgtttaaaatac

SEQ ID NO: 533337 - DNA, 559 bp, Homo sapiens
ctggaacttgaaagaaatggcctccaaaatatggatgtatatgtatatattgtattacaatggtagtgaaattttggtgcttacctaccagttgttgacagctagaggaaccagtaaatggtaaaattgagacaggataatctgaatgggtcactgtgacaaaggccagggtaagaaagaatttcaagatggaaaagagaaacatgattatggtaactttcagtgtgtccagaatrttctaagcactgatcctaacacacagaatttcattgaatgcctttaacaaccctatgagaaaatattttacatgcagccacatatcctgtgagagttttccctgttcaagaatgtatcataaaccctaaactgaagatggaaggcaccgcattcttttcacaataagtatacaaagttatcataaatcagaataaaccacaatccaacagaactactcaaaatagccatttagaagtctagcctattctacctagcccaattgtagtcaatataaaagagggctgagaattaaggatgttattggcttgttcaggagtttaat

SEQ ID NO: 533338 - DNA, 559 bp, Homo sapiens
ctggaacttgaaagaaatggcctccaaaatatggatgtatatgtatatattgtattacaatggtagtgaaattttggtgcttacctaccagttgttgacagctagaggaaccagtaaatggtaaaattgagacaggataatctgaatgggtcactgtgacaaaggccagggtaagaaagaatttcaagatggaaaagagaaacatgattatggtaactttcagtgtgtccagaatgttctaagcactgatcctaacacacagaatttcattgaatgcctttaacaaccctatgagaaaatattttacatgcagccacatatcctgtgagagttttccctgttcaagaatgtatcataaaccctaaactgaagatggaaggcaccgcattcttttcacaataagtatacaaagttatcataaatcagaataaaccacaatccaacagaactactcaaaatagccatttagaagtctagcctattctacctagcccaattgtagtcaatataaaagagggctgaraattaaggatgttattggcttgttcaggagtttaat

SEQ ID NO: 533339 - DNA, 602 bp, Homo sapiens
tcggatttgttgtgaggctttaagtgaaaataaggtacgtgaagttactttgcatacattctctgaatgtaaaaaaaaccattattattaaaatactttgataaaagttattcatggaagcatacttttctatagttaaagacccaataatgttttgtatggwgacagtttcaggttgatttttatggtttgataggctgaggttgcagcttaagatgtcaccaaaccagagactcactattaattaacatggtgggaggtgcttgggggattagaagcaaagctaaatgcctctaccttggagcaaattggagaggtagagtaatactttttttcattcatattcagcatttagcacactttattgaacacttataatgagctgggcatttaggggaaataaagatgcaggaaggcattgccccattcctgcgcctactctttatgaaagggcgccctataggagtctctcttcattctcatcacggcctctgtctgtcttctgggcctcaaccctgttttggcctactggatttgctaaccacgctggggccctgttgtcagtcatttcagcattgcttttcctatgaccttagtagccc

SEQ ID NO: 533340 - DNA, 402 bp, Homo sapiens
agaggaaggaccaagggtctcatcaaagaacatgaggtacaataaagtgtttccacttaaattttgtcatcattttggggtttatcttaaatggttgtgtgtatctttagcctaggatgaaamctgttctgaaaattaccctagccctcctctccccggggatgatcacttctttgcttcacactctcagcagagcctgtacttcttactttttagaagtgagaaaattcggcactgagttaatattttatgatttcccttgatgtgtctcagtggcccctgtcctcagactctggtcacaaatgtgtcaactgttactaaagtacccacagttggcttttgtcaggacacagtgtcctcagaagcacagcttttgagaaaacgagcaaatcagggtacaaa

SEQ ID NO: 533341 - DNA, 402 bp, Homo sapiens
agaggaaggaccaagggtctcatcaaagaacatgaggtacaataaagtgtttccacttaaattttgtcatcattttggggtttatcttaaatggttgtgtgtatctttagcctaggatgaaacctgttctgaaaattaccctagccctcctctccccggggatgatcacttctttgcttcacactckcagcagagcctgtacttcttactttttagaagtgagaaaattcggcactgagttaatattttatgatttcccttgatgtgtctcagtggcccctgtcctcagactctggtcacaaatgtgtcaactgttactaaagtacccacagttggcttttgtcaggacacagtgtcctcagaagcacagcttttgagaaaacgagcaaatcagggtacaaa

SEQ ID NO: 533342 - DNA, 537 bp, Homo sapiens
cttgtaagctgacattatcaacatcataaatactaaactattaatatagagtatgttattatagaaacactgcaccacagggtataagggccttttgacaattcatgtaagagatgctgaatttccaaagctgataaatgctctaaatttgtatttccaaaacatgttcaagagtgacattgaaaggcttgttagcaaagaaacatacaaaaaataaagcatttaagtaatcatatcaaaatgctaactattatggtataaaataaaaaagaatgtaaacagatagataaatttttgtggcatgtatataacttagaaagaatgaaacactggtacggattgttgacacatgaatcctagtgtttgtagtgataacacatgaaatgtggtaaaacaaacaaaccaaccaaccaagaagtagacattaagttgctcgactcagataactgcttttctatcattttattgtggttatagttttttaaagctttttgcacacasttctactgctggacttctgctgagttgattcaataa

SEQ ID NO: 533343 - DNA, 468 bp, Homo sapiens
tgaacccagtttctggctgactcctcagtctatacccttcctattccatttcatggatcccccagaattctcactcatctgcccttcaaatggccatggaagccacctctgtccccatgtgccagcctaggactccctgagctgggaagctggtcccgctttctccctgtcaagatgaacacccccagccctctacccgctacacatcggaggtggcaaagggtcccctggtctcctggcgagtcatgagagtggcagtcctgggagatgtggcagtcctgggggaggggtgctggacggagggaggagccagccccgagacatcaaggtggccctgagcaacacatcctgtcgctcctgccccgtaaatagacaccaccttcctaaacgtggccctggaacgaaccccaaggggtagagttggaagcagratccagagtcccctgttgccaggaatagccagggccc

SEQ ID NO: 533344 - DNA, 386 bp, Homo sapiens
gataccccatgacaaggaactgaggacttctgccagtatgtggtgagcttgaaaatggactctccagccccagttgagccttcaaatgactgcagccccagccaasagcttgacagcaccctcgtgagagaccctgagcagaaccaccgagctcagcctcccctcaattcccaatgcttgagactgtatgagacaaccgatgcttgttttaagctgctaaatttgggggtcatttgttatgtggctctagataacaaatctaagaattgtggctagaaaactaccaggtaatcttacagaggaggaagcataagttgaaataaagagaagcaaattacctatagagtcctcaggaggaataaagtcttagaaatcatctacttcat

SEQ ID NO: 533345 - DNA, 550 bp, Homo sapiens
ccacgctgtgagcagctctaaggagataccccatgacaaggaactgaggacttctgccagtatgtggtgagcttgaaaatggactctccagccccagttgagccttcaaatgactgcagccccagccaagagcttgacagcaccctygtgagagaccctgagcagaaccaccgagctcagcctcccctcaattcccaatgcttgagactgtatgagacaaccgatgcttgttttaagctgctaaatttgggggtcatttgttatgtggctctagataacaaatctaagaattgtggctagaaaactaccaggtaatcttacagaggaggaagcataagttgaaataaagagaagcaaattacctatagagtcctcaggaggaataaagtcttagaaatcatctacttcatgtcattaaaagagataggaaagatatttattatttattattaaacagttttatcatgccaaaaatactgtacccataatgctattcctccagtgcatcaactgtttacatttctccacagctccttgcactctttagcta

SEQ ID NO: 533346 - DNA, 550 bp, Homo sapiens
ccacgctgtgagcagctctaaggagataccccatgacaaggaactgaggacttctgccagtatgtggtgagcttgaaaatggactctccagccccagttgagccttcaaatgactgcagccccagccaagagcttgacagcaccctcgtgagagaccctgagcagaaccaccgagctcagcctcccctcaattcccaatgcttgagactgtatgagacaacmgatgcttgttttaagctgctaaatttgggggtcatttgttatgtggctctagataacaaatctaagaattgtggctagaaaactaccaggtaatcttacagaggaggaagcataagttgaaataaagagaagcaaattacctatagagtcctcaggaggaataaagtcttagaaatcatctacttcatgtcattaaaagagataggaaagatatttattatttattattaaacagttttatcatgccaaaaatactgtacccataatgctattcctccagtgcatcaactgtttacatttctccacagctccttgcactctttagcta

SEQ ID NO: 533347 - DNA, 642 bp, Homo sapiens
cagttgctcaagcctgaatgccaggatcccttctggccctcccagtttacacccctcagccaatccatcgccaagtctgccaactctacctctacagtgtcttgagaattagtcactggaatgagactgccagagtgtgaaacctggccctgcctcttcactactacttgttagcaaatgatgttgtttctcaacctttctgtgcctgagtttcctcatctgtaaaatgagaactgtgcacagaaaccgttgtactgatgtaattaataatactccctttctctcttgaaagtgycctagtttggataaattatatggtcaacctaactgatatgaatattatgaaacctaatcaaggttccctcttcaggcaatacgcccatccccctgctgggaatatcacttttatctcactcattaatgcaaataaaagtctcgatcatcattcatgtcagagctgccttcctttgtccattgtaagcgcacagggactgtgggccgacctccccctggtgcccccagccctgccctgagtccttcactgggaaccatcctgtgtctcacccgctgttatactgtctcccaggggcagcccatggctgatgactggctgattagggatatgaagatccagcccattta

SEQ ID NO: 533348 - DNA, 642 bp, Homo sapiens
cagttgctcaagcctgaatgccaggatcccttctggccctcccagtttacacccctcagccaatccatcgccaagtctgccaactctacctctacagtgtcttgagaattagtcactggaatgagactgccagagtgtgaaacctggccctgcctcttcactactacttgttagcaaatgatgttgtttctcaacctttctgtgcctgagtttcctcatctgtaaaatgagaactgtgcacagaaaccgttgtactgatgtaattaataatactccctttctctcttgaaagtgtcctagtttggataaattatatggtcaacctaactgatatgaatattatgaaacctaatcaaggttccctcttcaggcartacgcccatccccctgctgggaatatcacttttatctcactcattaatgcaaataaaagtctcgatcatcattcatgtcagagctgccttcctttgtccattgtaagcgcacagggactgtgggccgacctccccctggtgcccccagccctgccctgagtccttcactgggaaccatcctgtgtctcacccgctgttatactgtctcccaggggcagcccatggctgatgactggctgattagggatatgaagatccagcccattta

SEQ ID NO: 533349 - DNA, 514 bp, Homo sapiens
gacgatctgtgatatcttgagacatgctggttgccactacyaggagagggaggctgctctgggcgtctaacacatagaggcctgggatgctggtaaacatcctataatgcacaggacagacatccatgacaaagaactatcgagtccaaaatatctataaggctaatacaccttacatcagaactcaccaagatattagtaaggattttgtgaaaaatctcccatgaatcagatgtgtagttcaccaacaagctttctccaagggataacagatatttgaaatttgcatcctctatagtaagagatggacaggatcataggagctggggtgtgaagacactcctgttttccctcatgagttctgcactaaagaggcagacggtggagtcagtgcacagggcctgcactctcctctttattactgataagggctaggttggaaggtatcactcaggcacacggccagaaaatagactttttgatactgaatcccagaatcaggctgactcatgca

SEQ ID NO: 533350 - DNA, 507 bp, Homo sapiens
gggggtgattttgccccgtaggacgatctgtgatatcttgagacatgctggttgccactaccaggagagggaggctgctctgggcgtctaacacatagaggcctgggatgctggtaaacatcctataatgcacaggacagacatccatgacaaagaactatcgagtccaaaatatctataaggctaatacaccttacatcagaactcaccaagatattagtaaggattttgtgaaaaatctcccatgaatcagatgtgtagttcaccaayaagctttctccaagggataacagatatttgaaatttgcatcctctatagtaagagatggacaggatcataggagctggggtgtgaagacactcctgttttccctcatgagttctgcactaaagaggcagacggtggagtcagtgcacagggcctgcactctcctctttattactgataagggctaggttggaaggtatcactcaggcacacggccagaaaatagactttttgatact

SEQ ID NO: 533351 - DNA, 587 bp, Homo sapiens
tgtcctacttaactttaagatccagctcaaggaaccccctttccttctggaactccttgcagcagacttcgtcaccccatgacgagacatctcacactgaggaatgatctcttttcttttctgcctcccttacatgcagtgagctcctcaagggtgagtgtgcagtagatgcttcctggattcttgttgcagcctcctgccaagagatcctgcagcttcgctgggctcctccagagaccaggaacccacgtcattgagggccatcagttctatcatgggacagctctgcctgtcaaagagcccatccttaaattaagacagaaagtgtttctcaggatttttttctctttggtccctttggggtaacactaagtgcatttgttcctctctccacataagtcttatcttctgtggtaagccctctgccgccatgtgtctggagggtgtgctgttgcatcctctcaccagtctgatccctgtctttggaatcagccaagagctggacacaatactcctaatggaccctgtccagtgctaaattaagggaatatgacctycctcattttagaggctatactcctttgaat

SEQ ID NO: 533352 - DNA, 586 bp, Homo sapiens
tatttatctgtttgtggtccccatctaattgcaccccccttatttgcacatagtaacctggttccaaattcgtctctctttsaattctctggcaggaatttccttttcttctagcttcttccttctttttctctcctctgtcccctctttccagcactgttatggtgtgtttgtaccagcccagcaggatatcatccttttgctttttttcctttatgtatctcaacctggctatgcctgtctgtcttttcccttgtggggattttctacctattttctctgtctgcccttcccagtcgttatgtgtctttcctgacccttccctccctgctcagtgggcactgttaagagacccaggtccgctgtgctgctgccgtcggctgtgactgctgcccaacggctcggccagctcgagcacagcacactgcagtttcctcatttacagacctgtttgttcttctcatcttctttcttttccaaaactggatggtagggatggtggcttggccctatgggaaagagaagggactgaagatcagtgcccccttgttatgaggagcagttacatcttccctgattttctgtg

SEQ ID NO: 533353 - DNA, 586 bp, Homo sapiens
tatttatctgtttgtggtccccatctaattgcaccccccttatttgcacatagtaacctggttccaaattcgtctctctttcaattctctggcaggaatttccttttcttctagcttcttccttctttttctctcctctgtcccctctttccagcactgttatggtgtgtttgtaccagcccagcaggatatcatccttttgctttttttcctttatgtatctcaacctggctatgcctgtctgtcttttcccttgtggggattttctacctattttctctgtctgcccttcccagtcgttatgtgtctttcctgacccttccctccctgctcagtgggcactgttaagagacccaggtccgctgtgctgctgccgtcggctgtgactgctgcccaacggctcggccagctcgagcacagcacactgcagtttcctcatttacagacctgtttgttcttctcatcttctttcttttccaaaactkgatggtagggatggtggcttggccctatgggaaagagaagggactgaagatcagtgcccccttgttatgaggagcagttacatcttccctgattttctgtg

SEQ ID NO: 533354 - DNA, 624 bp, Homo sapiens
tcatcgtcttcaggtatttaatgctacccccaaatctatattaattcactaagttgggacttttagaattcaacatttttgcttacctcttcaattgctgcatgagaaagcaaattgaccatgcagaatcctttccattacttggtgtgattttataaaataaattattttagttatttaagcttaaataattytcagtggtaattgcttaatgctgtccaccaagcttactttttcctactcctttcattgcttcaaggtactcattgaagaggatttaaaattattgcttagaacgctctttcccttaaccaagagtaaagggcattatatatccaacagactacctcaccttttccacttaacttttcagaaaagttgccccgtgcttaacatttgcaagccgcagaacaaagggagaagcttagatattgatggtgtctttgggaatcaatgcaagagagctcaggggaaactggcagaggcacaacaccggaggaaaaagccttaggaaagtcagaaaagagatgttcttcctaaattagccatgtctggcagtggaatagggacaggggcaatggaaaatacctggatgggtggcctaatgccagagtctgcagcaga

SEQ ID NO: 533355 - DNA, 624 bp, Homo sapiens
tcatcgtcttcaggtatttaatgctacccccaaatctatattaattcactaagttgggacttttagaattcaacatttttgcttacctcttcaattgctgcatgagaaagcaaattgaccatgcagaatcctttccattacttggtgtgattttataaaataaattattttagttatttaagcttaaataattttcagtggtaattgcttaatgctgtccaccaagcttactttttcctactcctttcattgcttcaaggtactcattgaagaggatttaaaattattgcttagaacgctctttcccttaaccaagagtaaagggcattatatatccaacagactamctcaccttttccacttaacttttcagaaaagttgccccgtgcttaacatttgcaagccgcagaacaaagggagaagcttagatattgatggtgtctttgggaatcaatgcaagagagctcaggggaaactggcagaggcacaacaccggaggaaaaagccttaggaaagtcagaaaagagatgttcttcctaaattagccatgtctggcagtggaatagggacaggggcaatggaaaatacctggatgggtggcctaatgccagagtctgcagcaga

SEQ ID NO: 533356 - DNA, 663 bp, Homo sapiens
tgtcatggtaactgacccgatgtggcgctgaaactgtcctcatagctaaccaaccattacagtggtccttcgctggatcggggggtgacctcaggaaattcatttggagtatttctccactgccatcttgaggtcactgggaatagtgcatcctccttccttttgtcattgaacagacatsggcctgagggatttgcatgctctctctgcctcccatgacaggtgctgcagcaggctcaagaaacagcattgcccttatcactggagcttagtcactctcgctgttcttaccacgaggcagacctgtcagcaggaacatggatgtcttagcactcaatgacatatcctagacacaccatgctgcttactttaaaagaaaagcttaggaaagaaatggaattataaaaataaaaaaaaagaaaatctctttcagaatccctactcccatgagatgtccagggttcgaactttaaaaagcaaaaataagaatagtggccaagaaatacatttttgtgtatgtgtgtaaaagatggataaaataaggcattgtttaatttccttctgacttcccaaacaatttcatatcatggacatgaatgctttctcattttatatgagtttttttttaacctgaataatacagagtctatttaaaactatttt

SEQ ID NO: 533357 - DNA, 663 bp, Homo sapiens
tgtcatggtaactgacccgatgtggcgctgaaactgtcctcatagctaaccaaccattacagtggtccttcgctggatcggggggtgacctcaggaaattcatttggagtatttctccactgccatcttgaggtcactgggaatagtgcatcctccttccttttgtcattgaacagacatgggcctgagggatttgcatgctctctctgcctcccatgacaggtgctgcagcaggctcaagaaacagcattgcccttatcactggagcttagtcactctcgctgttcttaccacgaggcagacctgtcagcagraacatggatgtcttagcactcaatgacatatcctagacacaccatgctgcttactttaaaagaaaagcttaggaaagaaatggaattataaaaataaaaaaaaagaaaatctctttcagaatccctactcccatgagatgtccagggttcgaactttaaaaagcaaaaataagaatagtggccaagaaatacatttttgtgtatgtgtgtaaaagatggataaaataaggcattgtttaatttccttctgacttcccaaacaatttcatatcatggacatgaatgctttctcattttatatgagtttttttttaacctgaataatacagagtctatttaaaactatttt

SEQ ID NO: 533358 - DNA, 545 bp, Homo sapiens
aaacaagttgcagaacagtttcattaaagagatccaggatctgaagaacctattcacttcattacttgactaaatgaaaatcatacactgacgtaaggttaaatggggctgcgatttccttattaaatggaacaattaatattacaagtgtttgaagatcatgatcgagaagacttcactgaacgtttccaagagtaattattgcaaacagaacacaaaccctatttagggtgtaactcaatatgagggcttgtgagtcaaatgttgagccatttagaactacaaatctttctttgtggccttattaaagaaattctcccatctccatttaaagggatagattgccaaggcctaaataaaaggccagaacctaaaatgaaaatgcttctgacttcactgccacacctgatacttccaatacagatttcctccgagtgccgctttcttcacctcctttgycccgggccttcataatccagagagagaaaaatgaatttcattcccaaatgctagaattgctggtgcagaatgtaactaaatatcag

SEQ ID NO: 533359 - DNA, 500 bp, Homo sapiens
acttattgcctcctaatgtactatattatttactgagttactgggtttactgtttattttctctcctccacaagactgtaaaatccacaaaagcagagatctttgtccatttagttcactgctatataccaagcacctagaacaatacatatagaaggcatgtaataaatatttgttggatgaacaaatgctgtttctctaaagattgttgtaataggtttgacctgtagacttagaatgcatctcagtatgtggtttatctttatattccttagcagtagttcctaagcttgttttccaaccatagcaaacagttcattttgatagtaattctgtagagctaaatgaagcacacaaattctaaaggttggaaggaagtgctgcagcaaagaaatggattttgtaggtrttatagtccaaccacccatctattctaatcccatcaactgcatccccatggggcattgtatctctccatctttacagaaagggagaagagg

SEQ ID NO: 533360 - DNA, 609 bp, Homo sapiens
tctctgtaaggttaccaagaaaccggcagtcataagttcttgactctgagtatgaattatagaaaccatatgtaggaaatgaggtggtacctgcaaggtggtggggttgggctgggccaaaggagtgtcgttcagtaacaaaaccaggaagaaccgctagtaaatcatcacaggattcagctctgagggaacaaggatctgagaaagggtgatggctgtgggrctgcaaggtagagcatacggatgttatatatatattttaatgccttaaatggttaaacagttcagtctgcacaattacataatataaagccacatatctaatctattaaatgcaatgtattttttttattaatgatctgttcaaggtgtagtcataatgtcttcaaaagggcttgtggaatctccgtttgtatcaaaaccaggagaaatctcttcaaaatctgaaattcgtccagatttactccacataaactactttttgacctttcatcttgagaaaagcataatttctgtctttggtgggaatataaaagtgtttgcctcctaatgtttcctaactagcaatgccaaaaaatacccttctaactggatgttttaagtaaaagt

SEQ ID NO: 533361 - DNA, 609 bp, Homo sapiens
tctctgtaaggttaccaagaaaccggcagtcataagttcttgactctgagtatgaattatagaaaccatatgtaggaaatgaggtggtacctgcaaggtggtggggttgggctgggccaaaggagtgtcgttcagtaacaaaaccaggaagaaccgctagtaaatcatcacaggattcagctctgagggaacaaggatctgagaaagggtgatggctgtggggctgcaaggyagagcatacggatgttatatatatattttaatgccttaaatggttaaacagttcagtctgcacaattacataatataaagccacatatctaatctattaaatgcaatgtattttttttattaatgatctgttcaaggtgtagtcataatgtcttcaaaagggcttgtggaatctccgtttgtatcaaaaccaggagaaatctcttcaaaatctgaaattcgtccagatttactccacataaactactttttgacctttcatcttgagaaaagcataatttctgtctttggtgggaatataaaagtgtttgcctcctaatgtttcctaactagcaatgccaaaaaatacccttctaactggatgttttaagtaaaagt

SEQ ID NO: 533362 - DNA, 609 bp, Homo sapiens
tctctgtaaggttaccaagaaaccggcagtcataagttcttgactctgagtatgaattatagaaaccatatgtaggaaatgaggtggtacctgcaaggtggtggggttgggctgggccaaaggagtgtcgttcagtaacaaaaccaggaagaaccgctagtaaatcatcacaggattcagctctgagggaacaaggatctgagaaagggtgatggctgtggggctgcaaggtagagcatacggatgttatatatatattttaatgccttaaatggttaaacagttcagtctgcacaattacataatataaagccacatatctaatctattaaatgcaatgtattttttttattaatgatctgttcaaggtgtagtcataatgtcttcaaaagggcttgtggaatctccgtttgtatcaaaaccaggagaaatctcttcaaaatctgaaattcktccagatttactccacataaactactttttgacctttcatcttgagaaaagcataatttctgtctttggtgggaatataaaagtgtttgcctcctaatgtttcctaactagcaatgccaaaaaatacccttctaactggatgttttaagtaaaagt

SEQ ID NO: 533363 - DNA, 626 bp, Homo sapiens
tggactctgatcctgtgaggactactggagtctccagaagtgaagactgcaggtgttcacggtggtgatgggggctgctggggtcctcttgcctaacctcttacctgcaaggagtccttccaacttctgagccgattccacccggggagatggggtggcagaggcaaggtgtgtccttcccttctctatgtggccatcctgggattccgtgctttacatgatttctctgcttctttgctgttctctggactctcctttagttattttggtcaaaatgtcgtttgtttgttgttttggagggttttgttgagtaggggagagagctaagagtttctagttggccatctcactgacatcccaatgataatttttaaaggagttaatatttagaaatgtttagaacaatgcctggcatatagtaattaccatttagtgtttgttaaattaatattatgatttatttccgatatactgtttttgttttgtttttgttygttttgagacggagttttgctcttgttgcccaggctggagtgcaatggtgcgatctcagctcaccgcaacctctgcctcccaggttcaagcaattctcctgcctcagcctgccgagtagctgggattacagg

SEQ ID NO: 533364 - DNA, 607 bp, Homo sapiens
ccggcgccgtccgtccttccgttcgtcttcctccctcccggcctctcccgccgaccgcgggcgtggtggtgggggtgggggggagggcgcgcgacacccggtcggcgcgccccgcttcttcggttcccgcctcctccccgttcaccgccggggcggctcgtccgctccgggccgggacggggtccggggagcgtggtttgggagccgcggaggcggccgcgccgagccgggcccgtggcccgccggtccccgtcccgggggttggccgcgcgggccccggtggggcggccacccggggtcccggccctcgcgcgtccttcctcctcgctcctccgcacgggtcgaccagcagaccgcgggtggygggcggcgggcggcgaggccccacggggcgtccccgcacccggccgacctccgctcgtgacctctcctcggtcgggcctccggggtcgaccgcctgccgcccgcgggcgtgagactcagccggcgtctcgccgtgtcccgggtcgaccggcgggccttctccaccgagcggcgtgtaggagtgcccgtcgggacgaaccgcaaccggagcgtccccgtctcggtcggcacctccggggtcgac

SEQ ID NO: 533365 - DNA, 607 bp, Homo sapiens
ccggcgccgtccgtccttccgttcgtcttcctccctcccggcctctcccgccgaccgcgggcgtggtggtgggggtgggggggagggcgcgcgacacccggtcggcgcgccccgcttcttcggttcccgcctcctccccgttcaccgccggggcggctcgtccgctccgggccgggacggggtccggggagcgtggtttgggagccgcggaggcggccgcgccgagccgggcccgtggcccgccggtccccgtcccgggggttggccgcgcgggccccggtggggcggccacccggggtcccggccctcgcgcgtccttcctcctcgctcctccgcacgggtcgaccagcagaccgcgggtggtgggcggcgggcggcgaggccccacggggcgtccccgcacccggccgacctccgctcgygacctctcctcggtcgggcctccggggtcgaccgcctgccgcccgcgggcgtgagactcagccggcgtctcgccgtgtcccgggtcgaccggcgggccttctccaccgagcggcgtgtaggagtgcccgtcgggacgaaccgcaaccggagcgtccccgtctcggtcggcacctccggggtcgac

SEQ ID NO: 533366 - DNA, 341 bp, Homo sapiens
cgcgcgggccccggtggggcggccacccggggtcccggccctcgcgcgtccttcctcctcgctcctccgcacgggtcgaccagcagaccgcgggtggtgggcggcgggcggcgaggccccacggggcgtccccgcacccggccgacctccgctcgtgacctctcctcggtcgggcctccggggtcgaccgcctgccgcccgcgggcgtgrgactcagccggcgtctcgccgtgtcccgggtcgaccggcgggccttctccaccgagcggcgtgtaggagtgcccgtcgggacgaaccgcaaccggagcgtccccgtctcggtcggcacctccggggtcgac

SEQ ID NO: 533367 - DNA, 382 bp, Homo sapiens
gggtcgaccagctgccgcccgcgagctccggacttagccggcgcctgcacgtgtcccgggtcgaccagcaggcggccgccggacgctgcggcgcaccgacgcgagggcgtcgattcccgttcgcgcgcccgcgacctccaccggcctcggcccgcggtggagctgggaccacgcggaactccctctcycacatttttttcagccccaccgcgagtttgcgtccgcgggacttttaagagggagtcactgctgccgtcagccagtaatgcttcctccttttttgcttttaggttttgtcttgcctttttttttttttctttctttctttctttctttctttttctttctttctttctttctcgctctcgctctctccctccct

SEQ ID NO: 533368 - DNA, 520 bp, Homo sapiens
ccgcccgcgagctccggacttagccggcgcctgcacgtgtcccgggtcgaccagcaggcggccgccggacgctgcggcgcaccgacgcgagggcgtcgattcccgttcgcgcgcccgcgacctccaccggcctcggcccgcggtggagctgggaccacgcggaactccctctctcacatttttttcagccccaccgcgagtttgcgtccgcgggacttttaagagggagtcactgctgccgtcagccagtaatgcttcctccttttttgcttttaggttttgtcttgcctttttttttttttctttctttctttctttctttctttttctttctttctttctttctcgctctcgctctctccctccctcgctcgttttctctctctctcgctcttgccctctcgctctctccctcgctcgttttctctctctctctctctctctctctgtctctcgctctcgccctctctctctctctgkctctctctctctctctctctctctctctctctctctgtcg

SEQ ID NO: 533369 - DNA, 150 bp, Homo sapiens
gccttctcggctcttgagacttagccgctgtctcgccgtgycccgggtcgaccggcgggccttctccaccgagcggcgtgtaagagtgcccgtcgggacgagccggacccgccgcgtccccgtctcggtcggcacctccggggtcgacca

SEQ ID NO: 533370 - DNA, 505 bp, Homo sapiens
ccccggaggcagcttgggccgatggcatagccccttgacccgcgtgggcaagcgggcgggtctgcagttgtgaggcttttccccccgctgcttcccgcctcaggcctccctccctaggaaagcttcaccctggctgggtctcggtcaccttttatcacgatgttttagtttctccgccctccggccagcagagtttcacaatgcgaagggcgccacggctctagtctgggccttctcagtacttgcccaaaatagaaacgctttctgaaaactaataactttgctcacttaagatttccagggacggcgccttggcccgtgtttgttggcttgttttgtttcgttctgttttgttttgttcgtgtttttcctttctcgtatgtctttcttttcaggtgaagtagaaatccycagttttcaggaagacgtctattttccccaagacacgttagctgccgttttttcctgttgtgaactagcgcttttgtgactctctcaacgtgca

SEQ ID NO: 533371 - DNA, 208 bp, Homo sapiens
aaacgtagatacacaaagtaaacttctgaaacactccattttttaaaagacagacggraaggaaagaaacacgaaaaagagagaaagaatgaggaaagaaacgaaggaaagaagggaaaaagaaacagagaggaaagaaaaaagaaggaaacacagggaacgaaagagaaataaagcacgaaggaaaaaaggacagaaagagagaaag

SEQ ID NO: 533372 - DNA, 326 bp, Homo sapiens
agctctgttctctgaaaccctggagcccttccccatcacagacacattcaccttctgctgtcacagcctcayctaagctctctgaggctccgctacagggtagacaacttgtacggtgttcacctgctaggatgagggacaaggtcagtgaaaatatgcttctttcagttacgcctcagccacactaaccttggacacggataagtggcctgagtcagcttgtccaatgctctgaccatctccagtaagctctgactctagactcactcccaggtccaacactccctggatgtgtcattttgggcatgcagtcgggtttccctgag

SEQ ID NO: 533373 - DNA, 326 bp, Homo sapiens
agctctgttctctgaaaccctggagcccttccccatcacagacacattcaccttctgctgtcacagcctcatctaagctctctgrggctccgctacagggtagacaacttgtacggtgttcacctgctaggatgagggacaaggtcagtgaaaatatgcttctttcagttacgcctcagccacactaaccttggacacggataagtggcctgagtcagcttgtccaatgctctgaccatctccagtaagctctgactctagactcactcccaggtccaacactccctggatgtgtcattttgggcatgcagtcgggtttccctgag

SEQ ID NO: 533374 - DNA, 326 bp, Homo sapiens
agctctgttctctgaaaccctggagcccttccccatcacagacacattcaccttctgctgtcacagcctcatctaagctctctgaggctccgctacagggtagacaacttgtacggtgttcacctgctaggatgagggacaaggtcagtgaaaatatgcttctttcagttacgcctcagccacactaaccttggacacggataagtggcctgagtcagcttgtccaatgctctgaccatctccagtragctctgactctagactcactcccaggtccaacactccctggatgtgtcattttgggcatgcagtcgggtttccctgag

SEQ ID NO: 533375 - DNA, 521 bp, Homo sapiens
tgcctatatctggaaacatggattgttacaaattagaagtaaataacttgataggcccaatttaacaaatgaagctcaagaagtgggagatatgagacctataatgaaagattaaattattttaaaaatcttaccacaaagaaaaatcagagtcaaatactttaactgttaaattatacaaaatatttcataaaaataccaatcctttacaaatacacaccatacatagataagagataaacaacccctaactactttatgaggccaatattactataccaaagccagacaaacccatcatgtgttaggattaatatgggtacatacggctgataaataaagacacataattctcaaaaagtactaataagttaaatacagaaacacgtaaaagtaattatacaccatggccaagtacaatctttttacaaatgaagtggcttaatatctaaaaaccaataatytaatacacaacattgataaagtgaagaacataaaatgatccttttaatagacacaga

SEQ ID NO: 533376 - DNA, 154 bp, Homo sapiens
ctaaaagggttcaagaaaaatartgttgcattttcttatgtcacaggaaacacttttaatggtaacttgtcagattgtctatgaacaaacccactttttaagacattgataaagtcttcttttcttcacgttgtgttttatacaagaacacttc

SEQ ID NO: 533377 - DNA, 154 bp, Homo sapiens
ctaaaagggttcaagaaaaatagtrttgcattttcttatgtcacaggaaacacttttaatggtaacttgtcagattgtctatgaacaaacccactttttaagacattgataaagtcttcttttcttcacgttgtgttttatacaagaacacttc

SEQ ID NO: 533378 - DNA, 523 bp, Homo sapiens
acgtattccaggatgacacgtgttttagttgtctttgggcgacaactagcggcaaccgttaytgaaaatgtaagctgtagagaacaaaaaaactctggtcgcctgttcacagctcactcactgcaacgttgaatcctgggcttaagcaatcctcctgcctcagcttcctgagtagctggaaatataggcatgtgccacaatgctgggcaatatttttaagtagtggtaatctctctcgatgtgttgcccaggttagtctcaaactcctgtcctctatccagcctcccaccttggtcttcagaagtcctgggattacaggcttgagccactgtgctcactcctataatttgatgttttcaacaatactatgtagtgaaatgcatcacgaagacattttgcaaaagaaagctcactatcacatataaagttgtatacttgtcatgtgctcacgtgagcgcatgttcttgcctgtctgaatgttttctgagaactgatcatcttttccccagggacactggttgaa

SEQ ID NO: 533379 - DNA, 523 bp, Homo sapiens
acgtattccaggatgacacgtgttttagttgtctttgggcgacaactagcggcaaccgttactgaaaatgtaagctgtagagaacaaaaaaactctggtcgcctgttcacagctcactcactgcaacgttgaatcctgggcttaagcaatcctcctgcctcagcttcctgagtagctggaaatataggcatgtgccacaatgctgggcaatatttttaagtagtggtaatctctctcgatgtgttgcccaggttagtctcaaactcctgtcctctatccagcctcccaccttggtcttcagaagtcctgggattacaggcttgagccactgtgctcactcctataatttgatgttttcaacaatactatgtagtgaaatgcatcacgaagacattttgcaaaagaaagctcactatcacatataaagttgtatacttgtcatgtgctyacgtgagcgcatgttcttgcctgtctgaatgttttctgagaactgatcatcttttccccagggacactggttgaa

SEQ ID NO: 533380 - DNA, 635 bp, Homo sapiens
cttataggcatcatcactgagatgataaagcccaaaaaatctaatgggaacttaggctgcaacaacatatgtatagtgtttagatcaagggaagcaacagtccctttccactctgtagtggttagacccttactgagggacttccttttggctcggactaccatacattaagtgggtcatatgtaggatgtgtacagaagggagtgaacagacaagggtgcggctgaaagaatttggagctgtggccatttatgctagtgttttagtccattttgtgttgctataaaggaatacctgagactaggtaatttatgwagaaaataggttaattggctcatggttctgcaggctgcataagcatagtgctgctgtctgcttgaatcctggtgaggccacaggaagtttacgatcatggcggaggaagaagagggagcaagagagtgaagaggggtcctggacctttttaaacaaccagatctttcatgaactaactgagcgagaactcactcatcaccaaggaactagtgctaagccattcgtgagggatttgaccccaggatccaatacttcccactaggctccacttccaacattggaggccacatttcaatatgagatttggaggagacaaacat

SEQ ID NO: 533381 - DNA, 553 bp, Homo sapiens
acacttgtcagggaaaaatcccaacctcacagagaatgacaaggagtaaacctgccacaactctctaggtgacaaagtagacaatgagataaggacagtttattacttacagttaagcaaacactgcaagtattggaatggcaatgccacttcctcttgccctccaatcccacagggtgacatcatgagcccagatggaggttatgcatctactgcactgaaccacagtcaaggaatctgggaccctgtgtctgacacattttatggcaaccagcatacaagcctgggaagcaagcccttgccatgttgacatgctctggtcacttttacctaagcagttacttacatgactagctactgaagctgcctggcatctggagatgataacccttgtcatctggcacactgaacaaggaggtctayggatgctcagggtccatgttggactgcctttctaaacacttgggttaaacaggtatgggtcattttttataaaaatattttgaagacatagaaagtaaaataaaattctagatttgatgtttccttaaac

SEQ ID NO: 533382 - DNA, 609 bp, Homo sapiens
tcctttaatggcaccaaatcaggtacagtcaaatgtttgcagacaagatgccagccaaaccttaaagctgcaaaggctcaatctacctggccagaaagtggtggccccacccgtttctctatatgcatcctaattgtctctttcataagtctcctggagggcatgtgtatgaatacattaaacatgtctagaagataataagtggggtttaagtagtctcaactttagcctttttgactcaaaatatcccagacctggcaatggaatgagcgggattatctgcctttttgtttcacggcagtccagtcattctgaatgttacctttggtgttgctcaaacaccaggcatttcacatgccctcagctaacagaatagctgagtatgactgtcagtttctcccttaggtggtcactcagtcccaaatttcccatttctatgactaataccagcatatttaatatgacgttgaacacsttgacctcctttatcttctctttctcatgttcattactaccattactaattgtacctgcttactaccacccacaatttggtacatgtctggattgggaaagcagcctcctaatcatttctgtacatccagcttt

SEQ ID NO: 533383 - DNA, 625 bp, Homo sapiens
ttatttttgtggtcctgttttcttttcctttctaacactgtccatgagagcacttacacttcccaagccatttgaccctgatgtcccacagctaarcaatggcatgaacattctacccctcactctctcccaaaatgacctaccctatgctttaaacccgaaagaccttcagggaaatcaatgactaatatcaactaaaatgagcattatttgtaacaaggtaagatactactgacattttaagaataatcagacctcaatcttatggcttccaaactttggaatttgtacaggagagagaaagaaagggctgggggtggggagagagagagagaaagagaacaagaggaagaagaagaggaagaggaggaggaagaagaagaagaaaagggaggaggaggatcagggtagcagtgctggcttcagagatgctgaggaaggaaagggaggagaggaagaaaaaaggagggaagattaaggaaaaaattggggttttttaaccattttattttgccaagttaaggaccttaaaaagccacaacaaaactaccatttaataccatgaatgcattataaaagagaagatattttaataccaaaatatttgaaaagggtttagtttcat

SEQ ID NO: 533384 - DNA, 625 bp, Homo sapiens
ttatttttgtggtcctgttttcttttcctttctaacactgtccatgagagcacttacacttcccaagccatttgaccctgatgtcccacagctaaacaatggcatgaacattctacccctcactctctcccaaaatgacctaccctatgctttaaacccgaaagaccttcagggaaatcaatgactaatatcaactaaaatgagcattatttgtaacaaggtaagatactactgacattttaagaataatcagacctcaatcttatggcttccaaactttggaatttgtacaggagagagaaagaaagggctgggggtggggagagagagagagaaagagaacaagaggaagaagaagaggaagaggaggaggaagaagaagaagaaaagggaggaggaggatcagggtagcagtgctggcttcagagatgytgaggaaggaaagggaggagaggaagaaaaaaggagggaagattaaggaaaaaattggggttttttaaccattttattttgccaagttaaggaccttaaaaagccacaacaaaactaccatttaataccatgaatgcattataaaagagaagatattttaataccaaaatatttgaaaagggtttagtttcat

SEQ ID NO: 533385 - DNA, 258 bp, Homo sapiens
cgcacgccccctgctcacctctgcccggaccgaccggacttccggagcgcgaaggcaggggcgcagcccgcaaccaagtgcccggagaccgtccctctgcccgctggcccgaaggggcccgctgcctcccgccatcggagaccgccggagcccgcaactgggggcatcatggagggtgagtggtcctggggctgggggccagccgtggggcmgggtaccgactccggggcatggggcgaagggagaggagagggccgg

SEQ ID NO: 533386 - DNA, 583 bp, Homo sapiens
tgatgtatacatgggggttctttatatgatccctctaataacagctcattaaactttatactcttgtatatgtttattacaatattctctcttctacatgtttgacatttaccatattaaaataaagatgtttgagtacagttggaagtccttggaaggcctaaacctgggagtatcatctctcatcgggcacaggaagtttgcaggttgtccgcctcccgccgcagtccctctgccccatcccaacactcaccgcagtgccccctgctggtccctgcagccctgatgatgccagctcgctggccctgctcctctgagggtctctaacctccaggcccccagcctccattgagcctccaggccagtggctgagttctsggtgtgacagaaagattccacagggactcttcatcccctggaataggcctcaggaggaaagtttatgacacaacatcatgagtcaccccaactaatgacttcccagaagagctgtggttggacactgagccttcccttcgaagcaagcctggggaaacacacaccaaagcctggtcctaattcacagacacacagagcagggcca

SEQ ID NO: 533387 - DNA, 583 bp, Homo sapiens
tgatgtatacatgggggttctttatatgatccctctaataacagctcattaaactttatactcttgtatatgtttattacaatattctctcttctacatgtttgacatttaccatattaaaataaagatgtttgagtacagttggaagtccttggaaggcctaaacctgggagtatcatctctcatcgggcacaggaagtttgcaggttgtccgcctcccgccgcagtccctctgccccatcccaacactcaccgcagtgccccctgctggtccctgcagccctgatgatgccagctcgctggccctgctcctctgagggtctctaacctccaggcccccagcctccattgagcctccaggccagtggctgagttctcggtgtgacagaaagattccacagggactcttcatcccctggaayaggcctcaggaggaaagtttatgacacaacatcatgagtcaccccaactaatgacttcccagaagagctgtggttggacactgagccttcccttcgaagcaagcctggggaaacacacaccaaagcctggtcctaattcacagacacacagagcagggcca

SEQ ID NO: 533388 - DNA, 511 bp, Homo sapiens
gtaatcccagctactcgggagactgaggcaagagaatcgcttgcacctgggaggtggagtttgcagtgagctgagatatcgccattgcactccagcctgggtgacaacagygagactccgtttcaaaaaaaaaaaaaagagggtcacaaacacctcacattctgaggtgctggggattaggacttcaatatgaatttttgtgggacacaacacgtaactctcaaagagaagctttgggtgtttggaaagttctctttttcatcatccatgctagataaaagtcatctgggtactaaagccaaaagaaatcttaattcctggaacagccctcttaggaacacttcttgagatttgagtttgccaggcactgttttagacactggggatatagtgttgagcaagacagatgaggtcaccctgacagtaggatgggcttggttatgcacagcaatccccccaaatctcaatggcttaaggaaacaaaagttgattcctcactcacataaagtag

SEQ ID NO: 533389 - DNA, 302 bp, Homo sapiens
acacgtaactctcaaagagaagctttgggtgtttggaaagttctctttttcatcatccatgctagataaaagtcatctgggtactaaagccaaaagaaatcttaattcctggaacagccctcttaggaacacttcttgagatttgagtttgccaggcactgttttagacactggggatatagtgttgagcaagacagatgaggtcaccstgacagtaggatgggcttggttatgcacagcaatccccccaaatctcaatggcttaaggaaacaaaagttgattcctcactcacataaagtag

SEQ ID NO: 533390 - DNA, 525 bp, Homo sapiens
tctgggcatcccttagcctactcaagttgataaataaaattaaccatcacagcccccacattagcttccacggccgcatcggccatgacccccaagactgcagacaggggcaagctcccaacaggctcttggaaatgtctccaggggtagatgcttcttatttttctcagccactgtgggaatacaattagactcatgcctgagttggtttgataaaagcccatttaaaaaaattctgaacatgtctgccgggcgcggtggctcacgcctgtaatcccagcactttgggaggctgaggcgggcggatcatgaggtcaggagatcgagaccatcctggctaacatggtgaaacccygtctctactaaaaatacaacaacaaaaaaattagccaggcgtggtggcgggtgcctgtagtcccagctacttgggaggctgagacaggagaatggcgtgaacccaggaggcggagcttgcagtgagccgagatcacaccactgcactccagcctgggtgacagaggctta

SEQ ID NO: 533391 - DNA, 646 bp, Homo sapiens
gaaacttgcctgtcattgttatcttctgggggccgggggccagtgcaaggagaccaggttctggccttggccttgcccctctgcgttgtgtgttgaagtgtatgggctctgggatcaggaactgtcctgcctccaccacttactggcgtggcaaccttgggcatcaagaaactgagaatcaagttttcttacctgagaaatgggtcattgtgaggaactgtctagcatagggcctcaaacatcagttcccagaagcagccygctttgctgggcccatttagacaaaggtgctacacctccttgcgccttgatttcctcctgtgtccaatggagtttgatgccccatgaaataaaagccaagtgcgaggggtctttcttactctgggtgatcaggggcagaggggatggcatctgtacccctgcccacgctgctggctgtgccgctggggaatggctgcaacagaactcctgaatatgaagatgtgcaagagtccaaggaattagcccttttcttcccagccattattaatagggaaaatgggggccctgcttgaaagaagagactcaagaactaccataggcagcacctttttttagcccccacacccagcaagaggctgggacgagcgaggccaggctgctggca

SEQ ID NO: 533392 - DNA, 619 bp, Homo sapiens
gtgcagtttgataacattgaggctagccattgttgatggctatacagaaacttaaaatttttaaagcagtgcacttttctgtcagccagaactaaagtattgttatgtacagtgcytgtactatccagcaaagtctagtcacatttaatacgtaacccatcaatggatatcaatctaatctatttttcttatcttttagtatgtaatagtgttgtgatcctctgacatagcctctgcctctggaccagggatagtacctcaagcctgtaatcccagtgctttgggaagccaaggcaggaggattgcttgagcccaggagtttgagaccagcctgggcaacatgacgagaccccatttctacaaaaaatttaaaaattagctgggcgtgtgcatgcttatagtcccagctactcaggaggctgaggtgagaggatcgctgaactgtggaggtcaaggctgcagtgagccttgttcgggccactgcattccagcgtgggtgacagagcgagaccttgtctctgaaaaaaaaaaaaagataacctctgtctttttcagtatcttgtacacttctcataggaattatctacatttgccaaactggttgtttcattatgtagcc

SEQ ID NO: 533393 - DNA, 516 bp, Homo sapiens
ggtcttcgtggtggtgcggcccagcgactccgggctgccctctgagtcgggccctagcagtggggcccccaggcccggccgcctcccgctgcggaatgggcgggtggctcaccayggcttgcccagggaagggcctggctgctcccacctgcccctcaccattccagcctgggatatctgagggggtccagggagggcgggacgctgcctcagggccccgattggacacgagatacatgcaggcgatagcggcctggtgtggttaggtgaggatgcgtggtccctccctctccagagccaggcagtggtgggcagctgctggtgatgtcttctctgctgccttcaccctcagtagaggcaaatgcgggggacgggaaggaaccaacttgccctgtgtggtgggcttgacaaacatcatctcactgaattgtcacaacgctttggagataggttgtcttctcttccttctacagatgcaaaaactgaggcctggagagatgtgactcacccaagttt

SEQ ID NO: 533394 - DNA, 605 bp, Homo sapiens
ctctgggcttctgctgggctttacttcctgactagagtggctagaaaattgtatgtttcctctacaagatgtttttatgaagctattttataattatagatttattatcctcactggattcctatgttctgacacctggaccctgacggggccttgtgcagcctaggcrcccacgggcaagtggtgtggaccattcctgacacgccatcctccacctccaggttggctgggtttcctaaggtgactgccctttcataagcggcaagttcggagatgaacggcatgcgtgatgggggaaaagggccagaggcctgttgacactgagcatccccacccagagggcctcctggagggactctgtgtcctgtcctgccatgtgcggcatgagtggtcaccctcattgtggctctccactgatgaatggcctcttgactttaccaagaccaggcagcacccaacagaccaatgtgagctggaggcggatgccgggcctgcaccccacaaaccacagtctgcccagccctgtgctgaggagtctctcttggggcctggaggactcatgagctgatctgcattggaatggagggcgaagttggcaaaggaag

SEQ ID NO: 533395 - DNA, 489 bp, Homo sapiens
ctgtttaaccagggaaggggtaagcagcaacagcaagtgaccatctaatctactgtctaaaccaagacattattgagmgtggaaaaagtgctccacagataaacacggtgatttaacaggtatagactgggattctcatgggcacaccctggccataggtaactccagctttcaaaatatgcacatccaaaatatgtcatactttgttcttgagctttgccttaatctttcatatgtggccaaatctacactggaacaattacattaggtaaaatccagctactttgaacatcaagtggaaaacacctagtaaggtttagtaacctcttctgacatttcatatttctctacaattttaaggaatatttcatctattatggaaagactaaactaacatttattgatcatgtcaggcactgacctaaggactcagatataaagatgaattaggcagggttcctgctctcaaggagtttgccatctacgaaa

SEQ ID NO: 533396 - DNA, 547 bp, Homo sapiens
attggccacacaaaagttgttgcagaaatgaatagatgcttcctgccttaaaaacagagaagatatatacaggcaataggtattaatgtcatttcagccagtcagcgatttttgtttaatatcccaaccaatacagatggagggactgtttaataatgagtctcctggataccttaaagaaaaraatagtaaatactagagtatttaatgcattcatttcttgaccacctattaagtgtcaagaactcttctaagtatagcagggctctggggtgaaaccaaaacagtggtttgttgattgaatgctatggggagttgcaatccccatttagagattccttttaatactatacctgcctggctattttgttatcattgttgttcctatgttttccatattttactagcaatgcatgttgggctttttgttttttgtttttgagacggtctcgctctgccacccaggctggagtgcggtggcgcgatctcagctcactacaacctccgcctcccagggtaaagtgattctcatgcctcagcctcctga

SEQ ID NO: 533397 - DNA, 547 bp, Homo sapiens
attggccacacaaaagttgttgcagaaatgaatagatgcttcctgccttaaaaacagagaagatatatacaggcaataggtattaatgtcatttcagccagtcagcgatttttgtttaatatcccaaccaatacagatggagggactgtttaataatgagtctcctggataccttaaagaaaaaaatagtaaatactagagtatttaatgcattcatttcttgaccacctattaagtgtcaagaactcttctaagtatagcagggctctggggtgaaaccaaaacagtggtttgttgattgaatgctatggggagttgcaatccccatttagagattccttttaatactatacctgcctggctattttgttatcattgttgttcctatgttttccatattttactagcaatgcatgttgggctttttgttttttgtttttgagacggtctcgctctgccacccaggctggagtgcrgtggcgcgatctcagctcactacaacctccgcctcccagggtaaagtgattctcatgcctcagcctcctga

SEQ ID NO: 533398 - DNA, 483 bp, Homo sapiens
tgaaaaattaaaatttaaagtgactgattttagaatcctaatccagatcagaatttgtgggaggttgggggataaggcatcttttaaaaaaattttttttaagttccaaggtgattttaatattcagccagggctgagatccacagcttcaacttmtaatgccaaccgggaagaaagaggcagcttagcgagtgtatgttagagtacagacagtccctgacttatttatgatggttcgacttacgatttttcaactttaagatggtgtgaaagtgacttgcattcagtagaaaccgaactttgagtagccatatgaccattttgtgtttcactctcagtacagtattcaacaaattacatgagatactcaacactttattataaaataggctttgtgatagattattgcctacctgtagtgttctgagcatatttaagatagggtaggctaagctatgatattgataggttgggcatattaaa

SEQ ID NO: 533399 - DNA, 537 bp, Homo sapiens
ggacacagccaaaccatgttactcttccgtttaaatttaatagtattttagcaatgcatggagtctttggacaggaactcaaagcaagaggggcaggaagaggcagggacctgcatcaggcccacccatgaggggagggtatgtagggaaccacccaggtgccagcgctgatgtggaagtccagcctggctggcaaagctagtaccaaggttggtaaaacccctagtccccatgcagatggggttggtgaggggggacaggtggaggacgggacactaaggtaatgtcatgtcacagcaggtggacagagaacagtgggtgattatctagtgtagcccacactggcagacaggtgggcaagggacggacaatgaccccttgggagtggatcctagtcactaagccaaggttccgactacacctcagtcccttgaaaggatgacaagccccygtgtgtctataagccccaaattttgtggtgagcagttagcgtgtctccccacaaccatcctccgccaaatgaaccatggaggacac

SEQ ID NO: 533400 - DNA, 524 bp, Homo sapiens
cctcataagaaatcagagattttacttcaaagcttccaaaggattggtatcccgaagttccacagttcatttgaatcaaaaattagatggctctgttgatcagaacaaccaagatagaggctttctgattataaatacattttagacctgcctagagcagaataggcatttggaaaacatagatttatttttacaagcaaattactctggcgtgaggaattcattatagagtggtaaaattaaatggttacatttcatttataacttataagtatcattttacaatgtgcayctatgcattggaaggaactgttgcctgtcattaaatattttctgtttcatgttccttttacatccattaaaatgcttatcatattgggttgacgttatatccagctagaagccttttccaagtgtaaatggagatgcctgtgtaagtcagcactctacaaaaagtgactgtgtcagggagcgtacacagacttcatcaatacaaagggtatatgggggcaaagagtgctgat

SEQ ID NO: 533401 - DNA, 476 bp, Homo sapiens
  misc_feature (1)...(476): n = A,T,C or G
atatgaagcactgagatataagacaatggaagggaagaaaggccacaaagtcacttattcacaatgttagcagtcttaggatcttagactcaaagratgatagctgggagcctctcagaaatcctcctcacgtctttgctcattatgtggatgaggactctgaaattggagtcgaagctgtgggctttacccagtgtcatgcagcttagcagtggtcacactggatccaaaacccaagtctccttattctgtctctgtgcacttcatacattcanaaaagaaaaattcaagtgggaatgaacattaacttatgcaagaaaatttgctcttttttaataagaaaaacctttccagcaattttcatctattaccttgatgagctagtaatagtaccagcaactgcatgcttactctgccaggttctgttcttaagcacctcccatgtaataactaattgaatcctcacttcaatcctg

SEQ ID NO: 533402 - DNA, 640 bp, Homo sapiens
tttgagaaagtcagtggattccactgttcctggaggccaccctgggtcaggtccctggtggtggctgggcggtagggagtatcttcaaagccctctgtgggagaggcactgcctctctggccagccctgggcagtgcccacgcagacagcccccagcctcagccccccactaaagtgtgttctttaccctcagattcatatgaagacaatgccagccgcgatgtacaggctgctgacggcccaggagcagcctgtttacatctgaccgcggccacacgcggtggcatgcatggaggactctcctcttcgtggttgtgtttctcgtgctgcatccctgtgtccactgagactttcccctctcgcgcccagcatttggttttacacaggaagagaagaatccacaaggacctctttactctctccgatttgcttttttttttttttttttttcaataccagggaagtttcgyatgcactcccttgaggatggagagcagccagcacccacctggtactgacccaggaccatcctggagggctttctgggtgtgtccagggggtgggctgtcactgcttgagggagaatcctcccttcccaggaggtgcagacttcttaaaaggagctcgcggggcagcaaag

SEQ ID NO: 533403 - DNA, 661 bp, Homo sapiens
ctgtgtggggtctccaggtggctgcttggctccaagcaagaacatcccaagagggtctagcagaagctgtgtagcctcttatgacttcacctcagaaacacagagtgtcacttccacggcattccattttttaccagtgagtctcaaaggccagccctcatttgggggaaggagtatcaaagaatttgcaratgtgtcttaaaaccatcacaggcagcatgaatttctctcactatatagatgaggaaaccaaaacctgggagcctgagttgaccgtgatggtgcacacagctagcaagcagcagaagtgagacatgaaaacagctcagccagggtccgaagcctgtgcatacaaccaccctgccaccctgcgtctctgtagccaatattttagcagggcatatactacatagatacataggaacagaatttgagattgaaaggcacgagaaagaactaataaactattccaagagcaggcaaggaatgggcttgtaccactaacagaggtcagaaaaggcttcccatggcaggtggacttggcagagtgggtaagataaggatgcgcagagaagctggagggggacaggaaaatgtggcagggtggacggggagcaggtattttaggcagagacactgcacatgtggaggcaggaacata

SEQ ID NO: 533404 - DNA, 661 bp, Homo sapiens
ctgtgtggggtctccaggtggctgcttggctccaagcaagaacatcccaagagggtctagcagaagctgtgtagcctcttatgacttcacctcagaaacacagagtgtcacttccacggcattccattttttaccagtgagtctcaaaggccagccctcatttgggggaaggagtatcaaagaatttgcagatgtgtcttaaaaccatcacaggcagcatgaatttctctcactatayagatgaggaaaccaaaacctgggagcctgagttgaccgtgatggtgcacacagctagcaagcagcagaagtgagacatgaaaacagctcagccagggtccgaagcctgtgcatacaaccaccctgccaccctgcgtctctgtagccaatattttagcagggcatatactacatagatacataggaacagaatttgagattgaaaggcacgagaaagaactaataaactattccaagagcaggcaaggaatgggcttgtaccactaacagaggtcagaaaaggcttcccatggcaggtggacttggcagagtgggtaagataaggatgcgcagagaagctggagggggacaggaaaatgtggcagggtggacggggagcaggtattttaggcagagacactgcacatgtggaggcaggaacata

SEQ ID NO: 533405 - DNA, 594 bp, Homo sapiens
ctgatagctccatgggggatgcagggggtgggaggcaaatatggaggcaaggagaccatattcctttcctggggcttccctattttatgaccacaaacagggtggctgcaaaacatagaaattcattttctcacagtagcagaggccagagttccaaaatcaaggcatcgcaggtccacgttcctcagaaagctctaggaaaaatctatcccaagcctttatcttagcttctgatgttgctggcaatccctggcattccctggcattccctggcagtccctgtcagtccctggcttacagacgcattgctcagtgccctgtcatcatgtggcgttctcctggtgtctgagcctgggtttgtgtctctttccttctgcatgtaacgacactagtcatattgaatttcagtcatatcaaatttcatattgaatgtctgttccarcatgacatcatcctaacctgatcacattgcaaagaccttatttctaataaggtcacactcacaggtaccaggggttaggacatgaacagatctttttgggagacacaactcagctaacaacagagaccaattagaggacatttgcaattggc

SEQ ID NO: 533406 - DNA, 414 bp, Homo sapiens
agggcaaaatcatacatgtggcaaactccacaaccaccaaggccggcagagcagtgagagctgcattaatggggaatttcagtgaaatgccgcccagctcctaaattcataccagatgagttccagaagattaaagttattacaataaagccccagggaatcaatcacgctctgccttgtaaccttcttggttttctgcatcattcacacaaaccactttctgcagggcactggggtgttccctrgctgggctggacccacaggccccaataaagcacttcaggttagaaagcctagcaaaaggacaggcttggttcaggtaagtggctggggtctggcaagtggcttgtttagtgaccagtgacaatgcggtgtgggagcccagtggggaagggtgggctccctaacccccag

SEQ ID NO: 533407 - DNA, 560 bp, Homo sapiens
gctgcctctgtcctcattcatgggaaataccttatctgcctaaagcaaataccacttaagctctaggaactttcctgcaccctccttccctgcccatgtagatgtatgtgtgagattttttggcaagtttctctaatctggaccgggaggatggaagagcaaggacsccatttcagtagtgctcggaaaaaggatgcgttgaatttctcagcccttctccacctcacataaacacccgcccaccctgcacccggatcctgggtcataattttaataaatgcagaaagagaaagtggttggaggatggagcacatggaattcaggagaaaacccacaaagacccctgcatgtcagacacaccctgtcccggagcgtggtgtccccttgagctttaatgagctccctgtgatcacagccatgccttctcctcgttggggaggtgtcctaggatgcttcagccaaagacctttgtttcccgctgctatctcttttacctggacaactctcctggcccacgttcctcttgccagcactgggggtcacaggcctgagccctgggt

SEQ ID NO: 533408 - DNA, 530 bp, Homo sapiens
agctgcctctgtcctcattcatgggaaataccttatctgcctaaagcaaataccacttaagctctaggaactttcctgcaccctccttccctgcccatgtagatgtatgtgtgagattttttggcaagtttctctaatctggaccgggaggatggaagagcaaggaccccatttcagtagtgctcggaaaaaggatgcgttgaatttctcagcccttctccacctcacataaacacccgcccaccctgcacccggatcctgggtcataattttaataaatgcagaaagagaaagtggttggaggatggagcacatggaattcaggagaaaacccacaaagacccctgcatgtcagacacaccctgtcccggagcgtggtgtccccttgagctttaatgagctccctgtgatcacagccatgccttctcctcsttggggaggtgtcctaggatgcttcagccaaagacctttgtttcccgctgctatctcttttacctggacaactctcctggcccacgttcctcttgcca

SEQ ID NO: 533409 - DNA, 569 bp, Homo sapiens
atgaattttctaatttcaaaaagattaaaatgtgtctagagacaatagatgaaagatttgtttttgtagttatttgagtccagagtccaactccatttaactcaaatatgctgatttttttcaagaatgcaaatatactacgtaaattgcgataagattaccctttgctttgttcagtctctttaggtttgagtctyttaggtcacatacctataactgcattaggagctactatattcgacgtgattcttcatatagttgcaaacatctgactaatttaagacttgtcttcatcaatgatttagtctcatttattatacataattttcttattgctcttatactatactgagggcattttgttgatttgagaacagaatgctgatttataatatttatagaaatatataaaacatatttcaaaagactatagctacattgtatattgtgattgatagtatttaaatactgctaaagtgatattgtttatacaacacttgaaattcactcaccttcttcatacagatgtaggtttgaaatgcatgcattttttaagggtatataaactt

SEQ ID NO: 533410 - DNA, 433 bp, Homo sapiens
atgtggctctgattgcaacgtcgaggatagtcttctccttcagaagcaatatggtgaatcaacgcttgcagacacagggcaaacccagaatgctatttgtacaaacaagtatggctcctctcctgcggaagtttccagtgcagatgccaatgtctttgccatccattygcccttaaggaaaagggcttgctgaactcaggcaaagtagggaattgagcctgttgactgccttggatgcttagtgtcccatattccctgtggctagcctgggcagagtctgtgagggattagagcatgaaggctatagtgcataatgagtttaaggaaaaattagcctgaaaaaaatcacttagctccaaatgtctagtgatatttatagacgttgtgggttaaatttcacttcactgactttgtcctttacattgacaagcta

SEQ ID NO: 533411 - DNA, 216 bp, Homo sapiens
tttattatttttcatattaatatactattttcaaagatcttcaaagaattttaatatccttttgtggtgaaaggaattaaatgttagtcctttttttttactcatcactgtactaatgaagatacttagttttgtaarttattgaattatctgctctctgtatttctgtttcttgatagtttcctttagcaggttctgagaaaacataaaaaaaaa

SEQ ID NO: 533412 - DNA, 465 bp, Homo sapiens
ctggtttccggccctctatgtggtgaatgtggaagcctcaagcgttatgcaaatctgcccagtcctctattcttgatcttcaccttctcgttcatgagtttcaggccccagttctgaatcagcctcctgtccatcagactcttctttacctctccccgaggagcccataacctgcagccctactgcatgcttggggtaggtgctcagttcaccgtggttgaaggaatagacgagcgtctgctcaagcagcagcagcaactgcgtggagtcttcttgaactaacactcctatgcccctctcrgcacaaaatgacgtgtccccccttgcttccccttcacatttccacccatgcctattacaacatccgtctgtctccccactacaccgggagcttgagagaagaggccatgtctctagcacccagcacagggactggcacacatgagatgctcctgcttcttaaat

SEQ ID NO: 533413 - DNA, 465 bp, Homo sapiens
ctggtttccggccctctatgtggtgaatgtggaagcctcaagcgttatgcaaatctgcccagtcctctattcttgatcttcaccttctcgttcatgagtttcaggccccagttctgaatcagcctcctgtccatcagactcttctttacctctccccgaggagcccataacctgcagccctactgcatgcttggggtaggtgctcagttcaccgtggttgaaggaatagacgagcgtctgctcaagcagcagcagcaactgcgtggagtcttcttgaactaacactcctatgcccctctcggcacaaaatgacrtgtccccccttgcttccccttcacatttccacccatgcctattacaacatccgtctgtctccccactacaccgggagcttgagagaagaggccatgtctctagcacccagcacagggactggcacacatgagatgctcctgcttcttaaat

SEQ ID NO: 533414 - DNA, 670 bp, Homo sapiens
aaatggactgggggaaatgaagaggcaagggaatagaagtctcagtgggtgccatgaccctgtttaagtgattgagaaaatgaacaagatgaaaaggttaatggctgtggtcagaaagtgaaatatgtgaattcaggatttcgaaggtagggtgggtgatgactggcccccagatgcggccatggtgaagtggggcaaaggtgcaggtgcatggtgaggggaaggaggaaatgggaggtgatgatgttggccccacacggacaccacggttgtgcaggaagatggcaggagctgggcaccagggtgggagccacctggagtcaggaagagtgaagagaaaggatgaagaggctccctctcctgtgtctctcctccccaggagaagaacaagaaacaatccgaaagtaataacaccaatgtgcctttacaaagtgtgagtgggtgttgtgtgctgtcacgtgtgtagtaggctcctctgtggatggctagagggactggacatggccactggatcccacttgcaagagcagaggaaaagagtggtcgtgaggaagtaaagccccccaaaatccaggggttgctgcagctttgkgtgtggagcgtgccctctgaggaaaggctgctctgggggagattgcccaggaaacggggctcagaggccacgaaagca

SEQ ID NO: 533415 - DNA, 628 bp, Homo sapiens
  misc_feature (1)...(628): n = A,T,C or G
ttaggggcttctgggagatgtgtgctcctaggattagggagttgactctaaggatgaccttagaggttaacagggatgagaaaggggtcaccaaggggtctaccaggggaatgggagaggctgtattgatagaacagcttctgctgcaggttccaaacaagaaatgtgggagaatggttgaaatcagccccgggggcaccttcccgtgcatgcgtgcagctccttcaacattcagtcgaccttcagtgcctcctgtgagccaggcactgggctagtctctgggggtggagagatgagtcaggcaaatgccagccctcagagggctcacagggcagaaggtgagagatgagtgagcagaaaatgaccacagcgcgtgtggggcccagtggagggaaggaggggattcaggagcacaggagagtcaacaggggaaacttctccgaggagaatctgatcctcctcccatctggccaccttctgaagccctctctccccatccaagtgagaaaggacaggcgtatgaccagattggtgtatsaagatgctgaattacgttctcattgtttcaaactagtaaaccatagattttatgtagtaacttctacaaactgcattacanaacactcca

SEQ ID NO: 533416 - DNA, 385 bp, Homo sapiens
cacacacgcacaaaatccaaaatttcatactgkagatttgctgctgagaactcagtttgggatggttgctgtttattgcattctatttattctgcttttattttggggcttggatggcattctttgttttgctaaatgctttcaccatttgcagtgtgttctagttaattaagtcaatttatccctcgttcagggctctggcaggtgaagcaacagaaagtcctactaaagttagacaggaggttttatcttaaagccccagagcctgtgcggactggaccacgcttccttaggatcctctctcctggcatggcatgcccctgtcaagctgcttgttctgatacgggctgccaaagctgttccatcctggatggggctgataaga

SEQ ID NO: 533417 - DNA, 591 bp, Homo sapiens
tggcaggacacctccagcccaacaaggtcccctcctagcaccagcccctgccacagtctgatgcaggagcccccccggtaaccctcccagctttggacccagggcccatgctccatgggcctcggctaccacccaccaaaccgggcatagacatctgtcacagcctggctcagtgcaaggtcaatgaggccccggcccaggcagaagtgggggaagacaatgagcagcttcctcagcacggcgttgaacctgagcagcgtctgaaacagagaagtaggactgttggaaacggggcaaaccccaccccccctctcttcagcaggtggggcccagatgctctcacaggacagcacagggcaaggcctgcagacagagagtccttgcagccagactggccactggagggatttgtccagcagagcatcatgggtttgcaatggaggtcatgaagtacttacaagcagtgcctcaaggccaggccaaggagctaatcaattaaatgaccaatcaaggactggggctccctgcaagtttctagtgggcgggagctkcccctttgtctagccaggcagcatcttctaaacatttact

SEQ ID NO: 533418 - DNA, 601 bp, Homo sapiens
tggttatgctctgtgctagagtcctaacaagacaaatgctaaggtagaggtcattctgctcaaacaacctgaccccacctggatgtgggcttacatttgcaaagggcaccaaagttctaagagatgaggggaggagctgagccccttgtccttatctaggtttcccttgttctttcccatccctcagtctgctycttttcccagtaccaacatgtttgtgtcctcagaattaaaggagtaaaaatgtgtaaacatctgactagcaacagccatgagattttgcctggcttgttgataagcagcattgagatctgccctcctaagaatgggccattaggtcttcaaagcttttacgatgtgaggtaaagaatgttcaccaggagtttcatgcacaaaagggtttctctttgtgggaactagaacattgttccagtgatgacggaaacagggctttccataccaaaacagggttttcctttgaatgactctcccacctttcccttgtctcttcctccccacctcaacaacacaggaaagaagctggaagcagggacaatgggaaggtccctttgttactcgagctattagaaacaaaaagaaa

SEQ ID NO: 533419 - DNA, 481 bp, Homo sapiens
ggtgaaactgtagggtcacagagtgaattacacctctggcttaagtcagtgaaaagtcctagaagtttgtggtcctagaagtcctaaaagtttatgggactttgttttgagcaaggataagaaattgatttcaggctgggcgtggtggctcacgcctgtaacccyaatactttgggagacagaggcaggtggatcacttcaggtcaggagttccagagcagtctggccaacatggcgaaaccctgcctctcctaaaaatacaaaaattagccaggtgcggtggcacatgcctgtagtcccggctactcaggagactgagcaaggagaatcccttgaacccaggaggtggaggtctcagtgagctgatatcatatcactgcactctagcctgggcaacagagcaagactctgtctaaaaaaaataaataaataaaaagaattgtttcattcttctgagaactgcaccaactaccttaaagtg

SEQ ID NO: 533420 - DNA, 518 bp, Homo sapiens
aaactgtagggtcacagagtgaattacacctctggcttaagtcagtgaaaagtcctagaagtttgtggtcctagaagtcctaaaagtttatgggactttgttttgagcaaggataagaaattgatttcaggctgggcgtggtggctcacgcctgtaaccctaatactttgggagacagaggcaggtggatcacttcaggtcaggagttccagagcagtctggccaacatggcgaaaccctgcctctcctaaaaatacaaaaattagccaggtgcggtggcacatgcctgtagtcccggctactcaggagactgagcaaggagaatcccttgaacccaggaggtggaggtctcagtgagctgatatcatatcactgcactctagcctgggcaacagagcaagactctgtctaaaaaaaataaataaataaaaagaattgtttcattcttctgagaactgcamcaactaccttaaagtgattccatccaaaaccccacatgttcagccatggacttgctt

SEQ ID NO: 533421 - DNA, 513 bp, Homo sapiens
agcttggggccaactctccctatagacagtgagtgcattctgacaagcatgggctctgggttcaaatcccaactctgccactcatgcctatgtgtccttaataggacgcttgatgtctctgtgtctaaggtttcctggactatggaaatgagcctaataaatgtctaccccttaggaccattrtaagagtacattgaggtaatttgtgtaaagcagtcgaagcagtgcctggcatataggaggtgctgtataaacgtttgatgctagtattactattattattctggagtcttccttgcaacggtgatagccgaagccacaggggcaggtgacgttataggcagaatacaagggcctggagacagagccctggggccatgtaattaggcattatgtttacatcatgttcattttttttcctccaagactccttctttgaacgtgagcatccagggtgggttcctggggtatgcgtgaagaatctggtaaagatttttgagccctgtggccggc

SEQ ID NO: 533422 - DNA, 599 bp, Homo sapiens
actcccccgcttgtcggccagatttttgctcaaaagtatcaccttctgagggacctacccctgactctcagctaaagaggtccctccagtggctgttccgttttctccaacatgtatgttgtctgtctcctccttttttttttctttgagacagggtcttgctctgttgtccaggctggagtgcagtggcaaaatcatggctcactgcagccttgacctcctgggcttaagggaggcccaggagggggggcctttgggaggccacctcagcctcctgagtagctgggaccacaggtgyatgccaccatgcctggctaattttttacttgttgtagagatgagatgttgcccaggctagtctccaactcctgggctcaagccgttctcccacctcagcctcccaaagtgccaggttggcttagttcactgccacttccacagtgcatgggctaaggccaaagctccatgaagagctgctgaatgaattaatgaatgctaagagccaaggacaccagcgaacacatatccagcatctgccgcatcccagaagttcagggtgaaaaccagggagtgacccccacaggggccacctgggtgga

SEQ ID NO: 533423 - DNA, 599 bp, Homo sapiens
actcccccgcttgtcggccagatttttgctcaaaagtatcaccttctgagggacctacccctgactctcagctaaagaggtccctccagtggctgttccgttttctccaacatgtatgttgtctgtctcctccttttttttttctttgagacagggtcttgctctgttgtccaggctggagtgcagtggcaaaatcatggctcactgcagccttgacctcctgggcttaagggaggcccaggagggggggcctttgggaggccacctcagcctcctgagtagctgggaccacaggtgcatgccaccatgcctggctaattttttacttgttgtagagatgagatgttgcccaggctagtctccaactcctgggctcaagccgtyctcccacctcagcctcccaaagtgccaggttggcttagttcactgccacttccacagtgcatgggctaaggccaaagctccatgaagagctgctgaatgaattaatgaatgctaagagccaaggacaccagcgaacacatatccagcatctgccgcatcccagaagttcagggtgaaaaccagggagtgacccccacaggggccacctgggtgga

SEQ ID NO: 533424 - DNA, 628 bp, Homo sapiens
acactgccgcctacttcctcttctatgttcccgctctgtccacagtcccctctgaacactcccgtgaagcaggttctaggatcatctccattttatagaaggggagattgaggatcagagacatgcagtcatttgcccaaggacacacgcaggaagttcaatggcttccaatcccatgctctttcctctacaccgtgctgactcacttgaggttttaacagggggcggcaaacacagctcctctccccttgaccctctcactcccaaagcccataggaccctgcygcagggtggcacatacttaacctccttgggggggcctccagctcccctctctgtgtagagcctacgttccctgctgtgctgagtccttggctctgctcagctcagcctgaccgggctgcggtcatttgaatccccagtgctgccgcccaccggtcaccctgtcctgtcaccaggtggtgactggcccagtgacccccaagacaacccgccagaaaagaatcatgccaggtgctcacctgctcactgcagagggctctaaatctgcaactcaggtaacagggaaacaactgattggagttaccaccctcaggttgctaaggccaagtgcctgccaaatccagcg

SEQ ID NO: 533425 - DNA, 628 bp, Homo sapiens
acactgccgcctacttcctcttctatgttcccgctctgtccacagtcccctctgaacactcccgtgaagcaggttctaggatcatctccattttatagaaggggagattgaggatcagagacatgcagtcatttgcccaaggacacacgcaggaagttcaatggcttccaatcccatgctctttcctctacaccgtgctgactcacttgaggttttaacagggggcggcaaacacagctcctctccccttgaccctctcactcccaaagcccataggaccctgccgcagggtggcacatacttaacctccttgggggggcctccagctcccctctctgtgtagagcctacgttccctgctgtgctgagtccttggctctgctcagctcagcctgaccgggctgcggtcatttgaatccccagtgctgccgcccaccggtcaccctgtcctgtcaccaggtggtgactggcccagtgacccccaagacmacccgccagaaaagaatcatgccaggtgctcacctgctcactgcagagggctctaaatctgcaactcaggtaacagggaaacaactgattggagttaccaccctcaggttgctaaggccaagtgcctgccaaatccagcg

SEQ ID NO: 533426 - DNA, 208 bp, Homo sapiens
aggtgaggtcagaaaacataccctgggagaggctggcacaatgcccagaaccgccatcgctaggcctggggttttcctctgtagtggaatactagtattcatgtagtgcagggacaaaaccaattagatagttctgggagttaaaaagaggtgatttacagtgcyatttgagaaggggtattaaggaatttgccagggcactgacgcg

SEQ ID NO: 533427 - DNA, 504 bp, Homo sapiens
cagttggggacctcagcccctgggtctgatgtcatccatttgcctttctcaatggacttctctccttgcactggctcctactcccccaggacctgtgggtgaccacatgagaagaacacaaacaggccatgcccctttctttctccccctctcaatgcctgcagtagtgggttccatggggtagtgacctgagatttactcattgtggggcctctagcccagagcagggcctactacctcayagtcaccccatgaatgctcagtgaaagaagacgtccaccacaaggtcctggggaaccaagaattccactgtggcccataaattctaagtctacaggattctggaatgggagatgggaaaggccttcaaaagtggccacttttaacccattatactggcaactgagccatgtttccccatcctggacacatccagagggcactgcctaaaaccagacacatctccccacccaggacagtgtaggagccttagcctgggggatg

SEQ ID NO: 533428 - DNA, 589 bp, Homo sapiens
tgcagttggggacctcagcccctgggtctgatgtcatccatttgcctttctcaatggacttctctccttgcactggctcctactcccccaggacctgtgggtgaccacatgagaagaacacaaacaggccatgcccctttctttctccccctctcaatgcctgcagtagtgggttccatggggtagtgacctgagatttactcattgtggggcctctagcccagagcagggcctactacctcatagtcaccccatgaatgctcagtgaaagaagacgtccaccacaaggtcctggggaaccaagaattccactgtggcccataaattctaagtctacaggattctggaatgggagatgggaaaggccttcaaaagtggccacttttaacccattatactggcaactgagccatgtttccccatcctggacacatccagagggcactgcctaaaaccagacacatctccccacccaggacagtgtaggagccttagcctgggggatgcaggtggacagggagggggtgagccactaaagctgaagagcagaaagcagrtgaaaggggacagtagggtggaaacagagaga

SEQ ID NO: 533429 - DNA, 423 bp, Homo sapiens
aatgttttgtaactcaactggcctgcttcctggccaaccagcagaacaaatacagtaagatctataggctcaccrtcacgaaagtgatgaacgaagtcctatcttctctctgagaaactaagtgctctctccatctaaaataatgtcatcctccccatacttctaggaaaacagaaatgggtattttaacattttgttaaagttggaagacagaggtcccaaaatatttagcaactttccatgtttgcaatcaggtgggggtgggactagagttaaactgccatttattgatttctgacacaggcacagaatgacctgttttctccaagaggctcaatcatgttttcaagaatcctctctgtaccatgtaagatcctgcagacaaataacatctagtctgttgttctaaatgtctgagactag

SEQ ID NO: 533430 - DNA, 352 bp, Homo sapiens
gctgaggcctttatgggcagccagaaagccggaaagcagggtttacccctggccccacagcgccatactgtctggggaaaagaaggaaacccaagagtacacaaacagtggcccaaagagaaaccttccaagtgctctatgcctcaccgtttagcagaaaatatcaagcaactctcaatctagctggtctgtaccttccacgaatgaaataatgtatttattgcagtctttctggttgagatatttcaaatatttggtggagcttttaatgagagagacactctcgagtgtggaagaaaaaaaagaggggatgtgaagatraggcgactttaggacagaaaaaaaaaaagag

SEQ ID NO: 533431 - DNA, 410 bp, Homo sapiens
ctggtctccgaccttcccctgcaacctgtgacacctgccattttcccatcttaggcgatggcaacgccacccttccgtttgctccgggcaaaacttcgagagttccctctgactctggagttttttcctcagatccaagagccaactggtcatcaattcgtaatttcccatcggctaagtgcgtgggcattgagctacacgcgagtctctccacctctgcggaatggctacttcggggtaggggaggggccctcccgtggattgtaaggtgtttagcagcagccgtcgcctccgctgactagatacatgccagggggttagcattctccctccccgcttcccccattcgtgacctagtgtcccagcgtggaggkgagaggcgtgtaagggcaaagttgccccctcttgag

SEQ ID NO: 533432 - DNA, 537 bp, Homo sapiens
gaagggaagcgctcagtcctggccaaggagctggtggaggtgagggaggcgctgagccgcgccacactgcaacgggacatgctgcaggccgagaaggccgaggtggccgaggcgctgaccaaggtgggtccctgtctgctgcacaaccacaaacctacctctgacccccagccccaagccttgtcactctggcacagactggtcccagtgtcaggcagacctctgagcctggtcacagactgaccccttccttctggatacaggctgatctttgtcacaggccacagacctctggacctctggtcccagccataagtggactgacctctctttatggccgtatccctgctcttctggatgctcctgggggcaatgcctatagctcagggtcatccagtgcctgagactcagctcctggggtctgagagttgtggccacagcgcagagggtccttggcgggggggcctgcgctgtccgctgcagcctgggctctgagcagtgctatccctagaccytactcaggggatcctctgaact

SEQ ID NO: 533433 - DNA, 334 bp, Homo sapiens
gtgaatttgtcagggtttgcttttaggctttagcaggttggtctacaataggccttattgaaaagtgtgacacttattcctaaagcacatccattctagtgtctcagttggatacctgggtgctaatgaggtgtgcatcagttcttcccaccatggatggcagaaactccatcatacattccccaaccctcctccacctcaagtacctctggtccaaactcaatttcatagcagccacccctctgttaaawctgttagtcttttccttgtgcatgtagagtccacttcttgataagtatgcacatggaaccccacatagactttgagagctgca

SEQ ID NO: 533434 - DNA, 366 bp, Homo sapiens
tcatggccaccgcagggccctcagtttagcattcttcagagccagcatccaacaagccacagaagctctgagtatttccctttcctcagtcacccacataaatggcttcagagccttctggggaaggcctgaaggaagatttacagcatacacttgtggtagcattgaaggcttcactcttcctcaagggatccaatctcccctcagtcaagaagctccaggtatctgaactggatgccaggtcataaattcccactatggtgactccatcaggtctctgtcctcagaactagagcttttctaagtgtaacgtaagttgatttcttagtagatktcccatccattacattcccagacacctcacaa

SEQ ID NO: 533435 - DNA, 614 bp, Homo sapiens
tgtagacacaggggaatgtgaggtgagcatgtcctcaaagcctgacrgattgggtaaattctcctttgtgttctctctttcatgagctgggcagatgtgcctgagacaggtttgaccaggcaactgaaaagacatccctaagagaagacaaagcaaaggtatgaaaggaacacacgtccctgactgactaggaggaacagagctgcctgctatctggaacaacttcctcccagactaagtgagaaataaacttctgttttctatatgctactgtgtttgggggcctttgtgttatagaagttttgctgtcatcctttccaattcaccttctcacaccagatatttcaaattaagaagattatatcaggccaggtgccatggctcatgcctgtaatcccagcactgtgtggggctgaggcaggtggatcacttgaggccaggagttcgagaccagtctggccaacatggtaaaaccccatctctactaaaaaatacaaaaattagctggacacagtggcacactcctgtaatcccagctacttgggaggctgagacaggagaattgcttgaacccaggaggcggaggttgcagtgacccgagatcatgccactgt

SEQ ID NO: 533436 - DNA, 614 bp, Homo sapiens
tgtagacacaggggaatgtgaggtgagcatgtcctcaaagcctgacggattgggtaaattctcctttgtgttctctctttcatgagctgggcagatgtgcctgasacaggtttgaccaggcaactgaaaagacatccctaagagaagacaaagcaaaggtatgaaaggaacacacgtccctgactgactaggaggaacagagctgcctgctatctggaacaacttcctcccagactaagtgagaaataaacttctgttttctatatgctactgtgtttgggggcctttgtgttatagaagttttgctgtcatcctttccaattcaccttctcacaccagatatttcaaattaagaagattatatcaggccaggtgccatggctcatgcctgtaatcccagcactgtgtggggctgaggcaggtggatcacttgaggccaggagttcgagaccagtctggccaacatggtaaaaccccatctctactaaaaaatacaaaaattagctggacacagtggcacactcctgtaatcccagctacttgggaggctgagacaggagaattgcttgaacccaggaggcggaggttgcagtgacccgagatcatgccactgt

SEQ ID NO: 533437 - DNA, 614 bp, Homo sapiens
tgtagacacaggggaatgtgaggtgagcatgtcctcaaagcctgacggattgggtaaattctcctttgtgttctctctttcatgagctgggcagatgtgcctgagacaggtttgaccaggcaactgaaaagacatccctaagagaagacaaagcaaaggtatgaaaggaacacacgtccctgactgactaggaggaacagagctgcctgctatctggaacaacttcctcccagactaagtgagaaataaacttctgttttctatatgctactgtgtttgggggcctttgtgttatagaagttttgctgtcatcctttccaattcaccttctcacaccagatatttcaaattaaraagattatatcaggccaggtgccatggctcatgcctgtaatcccagcactgtgtggggctgaggcaggtggatcacttgaggccaggagttcgagaccagtctggccaacatggtaaaaccccatctctactaaaaaatacaaaaattagctggacacagtggcacactcctgtaatcccagctacttgggaggctgagacaggagaattgcttgaacccaggaggcggaggttgcagtgacccgagatcatgccactgt

SEQ ID NO: 533438 - DNA, 614 bp, Homo sapiens
tgtagacacaggggaatgtgaggtgagcatgtcctcaaagcctgacggattgggtaaattctcctttgtgttctctctttcatgagctgggcagatgtgcctgagacaggtttgaccaggcaactgaaaagacatccctaagagaagacaaagcaaaggtatgaaaggaacacacgtccctgactgactaggaggaacagagctgcctgctatctggaacaacttcctcccagactaagtgagaaataaacttctgttttctatatgctactgtgtttgggggcctttgtgttatagaagttttgctgtcatcctttccaattcaccttctcacaccagatatttcaaattaagaagattatatcaggccaggtgcsatggctcatgcctgtaatcccagcactgtgtggggctgaggcaggtggatcacttgaggccaggagttcgagaccagtctggccaacatggtaaaaccccatctctactaaaaaatacaaaaattagctggacacagtggcacactcctgtaatcccagctacttgggaggctgagacaggagaattgcttgaacccaggaggcggaggttgcagtgacccgagatcatgccactgt

SEQ ID NO: 533439 - DNA, 507 bp, Homo sapiens
aagcaggaaagggcattcagaagagaacagcatgggcaaaggtcccaaggccagaggacttggaaactgcaagtccctcagtgtagagatgagtctgtagaggaggttgacacaagcttgtgaaagacccagtatgccaggctaasggggtgggaacagtgagggacactgagggttttatggcttaaattttgacaagtgtatctacatatagacaactaatgtaacactccttttttttttttttttttttttttttagagatggagtctcactctgtcgcccaggctagagtgcagtggtgagatcttggctcactgcaacctgcgcttactgggttcaagtgattctcctgccttagcctcctgagtggctgggactacagactgatcccaccacatctggctaatgttttgtatttttggtggagacagggcttcgccatgttggccaggccggtctcgaactcctgagctcaagtgatccacctgcctcagcctcccaaag

SEQ ID NO: 533440 - DNA, 507 bp, Homo sapiens
aagcaggaaagggcattcagaagagaacagcatgggcaaaggtcccaaggccagaggacttggaaactgcaagtccctcagtgtagagatgagtctgtagaggaggttgacacaagcttgtgaaagacccagtatgccaggctaagggggtgggaacagtgagggacactgagggttttatggcttaaattttgacaagtgtatctacatatagacaactaatgtaacactccttttttttttttttttttttttttttagagatggagtctcactctgtcgcccaggctagagtgcagtggtgagatcttggctcactgcaacctgcgcttactgggttcaagtgattctcctgccttagcctcctgagtggctgggactacagactgatcccaccacatctggctaatkttttgtatttttggtggagacagggcttcgccatgttggccaggccggtctcgaactcctgagctcaagtgatccacctgcctcagcctcccaaag

SEQ ID NO: 533441 - DNA, 472 bp, Homo sapiens
aatatttactgtgcaattgtgatacaccccgcatggatcaagagctctgcaggaaaaytcccactgatgtattttactgccaccaccacagtgcatactcacagatcacaaaatagacctcagcaaatgtattataaaatgtgacccaacaggctgggcacgatggctcactcctgtaatcccagcactttgggaggctgaggtgggcggatcacgaggtcaggagatccagaccatcctggctaacacggtgaaaccccttctctactgaaaatacaaaaaattagccgggtgtggtggcgggtgcctgtagtcccagctactctggaggctgaggcaggagaatggcgtgaacccaggaggcggagcttgcagtgagccgagatccagccactgcactccagcctgggagacagagcgagactctgtctcaaaaaaaaaaaaaaaaaaaaaaaaaaaaaagcagaactgc

SEQ ID NO: 533442 - DNA, 472 bp, Homo sapiens
aatatttactgtgcaattgtgatacaccccgcatggatcaagagctctgcaggaaaactcccactgatgtattttactgccaccaccacagtgcatactcacagatcacaaaatagacctcagcaaatgtattataaaatgtgacccaacaggctgggcacgatggctcactcctgtaatcccagcactttgggaggctgaggtgggcggatcacgaggtcaggagatccagaccatcctggctaacacrgtgaaaccccttctctactgaaaatacaaaaaattagccgggtgtggtggcgggtgcctgtagtcccagctactctggaggctgaggcaggagaatggcgtgaacccaggaggcggagcttgcagtgagccgagatccagccactgcactccagcctgggagacagagcgagactctgtctcaaaaaaaaaaaaaaaaaaaaaaaaaaaaaagcagaactgc

SEQ ID NO: 533443 - DNA, 472 bp, Homo sapiens
aatatttactgtgcaattgtgatacaccccgcatggatcaagagctctgcaggaaaactcccactgatgtattttactgccaccaccacagtgcatactcacagatcacaaaatagacctcagcaaatgtattataaaatgtgacccaacaggctgggcacgatggctcactcctgtaatcccagcactttgggaggctgaggtgggcggatcacgaggtcaggagatccagaccatcctggctaacacggtgaaaccccttctctactgaaaatacaaaaaattagccgggtgtggtggcgggtgcctgtagtcccagctactctggaggctraggcaggagaatggcgtgaacccaggaggcggagcttgcagtgagccgagatccagccactgcactccagcctgggagacagagcgagactctgtctcaaaaaaaaaaaaaaaaaaaaaaaaaaaaaagcagaactgc

SEQ ID NO: 533444 - DNA, 205 bp, Homo sapiens
gagatgcccccaggctgactcccaytcaagcgggtccccccgcctccccccgagcccatcccctctgtccacctgctgccactctgacagctacaacccacccaggcttggggctgcctggactctgcctataacttcacaggctcactcccatgctgtccttcacacctggagaagtgccaaggttaccagtgccacagaacaa

SEQ ID NO: 533445 - DNA, 277 bp, Homo sapiens
gccctcggtagcctggagtggctcrtcctggacagactcaccgctatgacgcagggggaactgccaggagtccctgagcgaggtgatctgagaaatgccatggcagtgttctaagccagcagcctggcttacccacaacctctccgctgtgtgaccttgagcaagtgccttaacctctctgagcctcagcttgcccctctgttaaagaatgatcatatatgacacctagcaaggttatgtggagtatcagcaacaaggaatccactgcagccagtgt

SEQ ID NO: 533446 - DNA, 277 bp, Homo sapiens
gccctcggtagcctggagtggctcgtcctggacagactcaccgctatgacgcagggggaactgccaggagtccctgagcgaggtgatctgagaaatgccatggcagtgttctaagccagcagcctggcttacycacaacctctccgctgtgtgaccttgagcaagtgccttaacctctctgagcctcagcttgcccctctgttaaagaatgatcatatatgacacctagcaaggttatgtggagtatcagcaacaaggaatccactgcagccagtgt

SEQ ID NO: 533447 - DNA, 277 bp, Homo sapiens
gccctcggtagcctggagtggctcgtcctggacagactcaccgctatgacgcagggggaactgccaggagtccctgagcgaggtgatctgagaaatgccatggcagtgttctaagccagcagcctggcttacccacaacctctcygctgtgtgaccttgagcaagtgccttaacctctctgagcctcagcttgcccctctgttaaagaatgatcatatatgacacctagcaaggttatgtggagtatcagcaacaaggaatccactgcagccagtgt

SEQ ID NO: 533448 - DNA, 277 bp, Homo sapiens
gccctcggtagcctggagtggctcgtcctggacagactcaccgctatgacgcagggggaactgccaggagtccctgagcgaggtgatctgagaaatgccatggcagtgttctaagccagcagcctggcttacccacaacctctccgctgtgtgaccttgagcaagtgccttaacctctctgagcctcagcttgcccctctgttaaagaatgatcatatatgacacctarcaaggttatgtggagtatcagcaacaaggaatccactgcagccagtgt

SEQ ID NO: 533449 - DNA, 615 bp, Homo sapiens
tggccctcggtagcctggagtggctcgtcctggacagactcaccgctatgacgcagggggaactgccaggagtccctgagcgaggtgatctgagaaatgccatggcagtgttctaagccagcagcctggcttacccacaacctctccgctgtgtgaccttgagcaagtgccttaacctctctgagcctcagcttgcccctctgttaaagaatgatcatatatgacacctagcaaggttatgtggagtatcagcaacaaggaatccactgcagccagtgktgcaggtgcaactggctggggctggtgtcacgggtggtaaaagaatttaccgagacagtcatgggtaaagaaagtctgaagacaccttgcaagagaacagcaggcagcatggcagagagaaggccacctccccaggggcagaggccagggggaagtttgatagggtcacactggagaggcgacatgcagacagggtcatgctggagaggccacatgcaaacagagtcacgctggagaggccacatgcagacagggtcatgctggagaggctacatgtggaaacggtcacactggagaggcggcatgcaaacagggtcacgctggagaggccacatg

SEQ ID NO: 533450 - DNA, 615 bp, Homo sapiens
tggccctcggtagcctggagtggctcgtcctggacagactcaccgctatgacgcagggggaactgccaggagtccctgagcgaggtgatctgagaaatgccatggcagtgttctaagccagcagcctggcttacccacaacctctccgctgtgtgaccttgagcaagtgccttaacctctctgagcctcagcttgcccctctgttaaagaatgatcatatatgacacctagcaaggttatgtggagtatcagcaacaaggaatccactgcagccagtgttgcaggtgcaactggctggggctggtgtcacgggtggtaaaagaatttaccgagacagtcatgggtaaagaaagtctgaagacaccttgcaagagaacagcaggcagcatggcagagagaaggccacctccccaggggcagaggccagggggaagtttgatagggtcacactggagaggcgacatgcagacagggtcatgctggagaggccacatgmaaacagagtcacgctggagaggccacatgcagacagggtcatgctggagaggctacatgtggaaacggtcacactggagaggcggcatgcaaacagggtcacgctggagaggccacatg

SEQ ID NO: 533451 - DNA, 615 bp, Homo sapiens
tggccctcggtagcctggagtggctcgtcctggacagactcaccgctatgacgcagggggaactgccaggagtccctgagcgaggtgatctgagaaatgccatggcagtgttctaagccagcagcctggcttacccacaacctctccgctgtgtgaccttgagcaagtgccttaacctctctgagcctcagcttgcccctctgttaaagaatgatcatatatgacacctagcaaggttatgtggagtatcagcaacaaggaatccactgcagccagtgttgcaggtgcaactggctggggctggtgtcacgggtggtaaaagaatttaccgagacagtcatgggtaaagaaagtctgaagacaccttgcaagagaacagcaggcagcatggcagagagaaggccacctccccaggggcagaggccagggggaagtttgatagggtcacactggagaggcgacatgcagacagggtcatgctggagaggccacatgcaaacagagtcacgctggagaggccacatgcagacagggtcatgctggagaggctacatgtggaaacggtcacwctggagaggcggcatgcaaacagggtcacgctggagaggccacatg

SEQ ID NO: 533452 - DNA, 415 bp, Homo sapiens
gaggctacatgtggaaacggtcacactggagaggcggcatgcaaacagggtcacgctggagaggccacatgcagacagggtcacgctggagaggcaacaggcagacagggtcacgctggagaggccccatgcagacagggtcacgctggagaggccccatgcagacagggtcacgctggagaggccccatgcagacagggtcacgctggagaggccccatgcagacagggtcatgctgctggagctaacgtgcagagctaggtatttggtaacaggagattgtgcaagygggctgcttgtggttatccatttcttagaacaatggctctcccccaccctagttcatgttcttgccagctagggcctgtggtgccatggagttgtgcagaggagggaaccccttcctcatttctat

SEQ ID NO: 533453 - DNA, 513 bp, Homo sapiens
agctgccaacaggagccagtggtgctgaggtatccaacagggcagcacatggtcctcccaggagccgtggcccagcaccttctggccggaacagccatcctattcaaataaacgagtaacaaaaatgggcatgctctccacttccaaaagcaatgctggccaggcacagtggctcacgcctgaaatcccaatgccagaggcgttggaaccagagcaactccatcttgaacaggagctgggtaaaatgaggctgagacctgccgggctgcattcccaggagtttaggcattctaagtcacaggatgagataggaggtcggcacaagatacaggtcatgaagaccttgctgataaagcaggttgcagtaaagaagccggccaaagcccaccaaaaccaaggcggccacgagagtgacctctgattgtcctcacggatcattatatgccaattagaatgyatttgctgctaaaagacacccccaccagcaccatgacagtttacagatgccatggc

SEQ ID NO: 533454 - DNA, 280 bp, Homo sapiens
gggtgaggccagggcgaggccaggtccccccttcacggggaaggctccctgggtgcttccctggtcagggctgtgcattcttgtcaccagtccctccctgaccccagtgactctggctgggcctccacccctgcccagacccaccccacyacagaagaacctgacctaccattcactcttttttaaatattttattttttcagagacagggtctcactgtgtttcccaggctagaatatagcggctgttcacaggcatgatcatagctcactgcagcctg

SEQ ID NO: 533455 - DNA, 280 bp, Homo sapiens
gggtgaggccagggcgaggccaggtccccccttcacggggaaggctccctgggtgcttccctggtcagggctgtgcattcttgtcaccagtccctccctgaccccagtgactctggctgggcctccacccctgcccagacccaccccaccacagaagamcctgacctaccattcactcttttttaaatattttattttttcagagacagggtctcactgtgtttcccaggctagaatatagcggctgttcacaggcatgatcatagctcactgcagcctg

SEQ ID NO: 533456 - DNA, 393 bp, Homo sapiens
aaaaactagtgagggaggagaaaaatgaataaactctaaatccattaggtgatatttataaatagcaaaattggaggatggaatggagaaaagagttgaacttatcattaaagaagtaacacatgtgaaaacataaggtgtaactcatccccaaagaaaagtaaactctccataaagtagcaagtatagaaatttattgaaaaggaggaaagtaccactcacccccccaatataagcgtattaatttgaattaaaattttctccaaatccgagataggttacgcaaaagaatacaaaaagattatttttctttcaactaagaggaaaaacaaaatccgatttaaattcactaatgggacargaagggaggctgtggtttgcaggtgctagtaa

SEQ ID NO: 533457 - DNA, 280 bp, Homo sapiens
gcccctggccacgtgttccctcgtaccaatcgatcgaatttctagtcgcaattctctgtctgtccctcagctctggggagaaagtgggggctgtggcrtgggggctgaagtccagtttggggcggggtgggagaggagtccttgagtatcctgtcccagggccaaacccccaggagtccaatcttcaagacatccttgagccgacttccgccgatggagggggatcttcagggtgcctgctgggttctcaggactcctcttcagatcctagttttgaccc

SEQ ID NO: 533458 - DNA, 360 bp, Homo sapiens
gtatgcaaagcttctcaagtgaggacagggctacctacgatgaaagaaaaaagtttagcctggggctgatgatcrgctctccctttactaccacattcctgtgcagagcaccaagaaatcagagaattctacactcaactttgaccttgtgggttattatggcagtatatttatcgaaataggagaatagaacatatttaactatttgttagcttcatttataactcataattatttagacataatgcaaatgtgggctggaatttacgttctgattttttgtggccttgagctaaggaaaagggacccaaggaaatgggctttatatgcttggatggctttgtggaatccccaacttca

SEQ ID NO: 533459 - DNA, 457 bp, Homo sapiens
gaggtgataattgatcatacttacgtgataaagcctccataactttccatctggctgttcccgggttgtgccctgctatagtaaactggcaactaagtaagtaaactgtttttctgaggtctctgagccagtcttgaaagaaactggatccagagaggggatgatagaaattacgaattatagctggttggtcataagcacaggaggcagcctggacttgcatttggcatctaaagtagcgccatcttgtggaactgaagccttaacctgtgggatctgacactatttttaggtatatagtgtcaggattgagtttaactatgggataccctgtgggtgtctgytgagaactggagaattgaatttcttggtggaaaaacccctcacacatttggtgtcagaagacaatggaagtagtagtgagtgttaagagtaaaatatagagaaagaagaacag

SEQ ID NO: 533460 - DNA, 525 bp, Homo sapiens
gggtgggtcaaatgaagagaaagtttagataagctcacctaaaatttgaggtttcaggaatgtaagtgctgggttctaccaatgtaaattyacagatgatccccaagcaacgttttctttccttctatctcctcattggtgctttcatctattttccttttcagtgcccatggataaaaaccaggttctctacagagctcaatttagtctcattaactgttttttctttttcttttacaggagttaatgtatgtcttttttgaaatgtcctaatacagctattattaaggaaagagaaactaaaagaagaaaaatactttcttttatatcacatttttctgtttttattttcacttagataaagccaaatttacttatattctaatcattactttttggatacatacaatctgaagaaacctatattttatgggaaaaccagcctcaaggtatagaagagcttaatgcagagaggcatttaagaataattggaaatatatatatatacacacacacacaaagcaa

SEQ ID NO: 533461 - DNA, 597 bp, Homo sapiens
tgcacttaacacaattcatggttttgtctaggtaaaggatcataatctttgtagattctttagtggtggattgtcctatttcactcagtctgtggattcaagctctgacgagagygcctcctccacaccgctcagttgtttgtagtataagaatgcaaaacaggccgggcgtggtgactcacgcctgtaatctcagcacttggggaggccgaggcgggcggatcaccttaggtcaggagtttgagaccgtcctagccaacatggtgaaaccacatctctactaaaaataccaaaaaaaaaatagccggacctggtggtgggcgcctgtaatctcagctacttgggaggctgagacagaggatcgctaaaacctgggaggtggagggtgcagccatctaagatcacaccattgcacaccagcctgggtgacaagagcgaaactctgtctcaaaaaaaaaaaaaaaaaaaaagcaaaacaaaggtttattggatagctggactagtgtctgggaaaaagaaaaagatggaagtgcagtttctccccttatcaaattatgattctggaggaaaaaaggcaagtaaacgagagaatgaatg

SEQ ID NO: 533462 - DNA, 597 bp, Homo sapiens
tgcacttaacacaattcatggttttgtctaggtaaaggatcataatctttgtagattctttagtggtggattgtcctatttcactcagtctgtggattcaagctctgacgagagtgcctcctccacaccgctcagttgtttgtagtataagaatgcaaaacaggccgggcgtggtgactcacgcctgtaatctcagcacttggggaggccgaggcgggcggatcaccttaggtcaggagtttgagaccgtcctagccaacatggtgaaaccacatctctactaaaaataccaaaaaaaaaatagccggacctggtggtgggcgcctgtaatctcagctacttgggaggctgagacagaggatcgctaaaacctgggaggtggagggtgcagcsatctaagatcacaccattgcacaccagcctgggtgacaagagcgaaactctgtctcaaaaaaaaaaaaaaaaaaaaagcaaaacaaaggtttattggatagctggactagtgtctgggaaaaagaaaaagatggaagtgcagtttctccccttatcaaattatgattctggaggaaaaaaggcaagtaaacgagagaatgaatg

SEQ ID NO: 533463 - DNA, 391 bp, Homo sapiens
tgatgacagggaaaactgatagtaactcatataaaagacaaggagggaggaaccatcagtagaagaccctggttggtctaggaggagaggaaatgttgkacttatttagaacagacttacttttcctctagcagtagagcagaaaacattaccacatattccttaagggtttgttgcatttatacaataaacttgatatcaactaaaatgcacacgtacgaaatctacttatgagcatattttgctttttggtgcatgtgcaagattttaatgtgggtattactaacctctacttaggaagttgtgagtttcaaagtggtgtaataggggatttgaaatttgtaagcatgtaaaaatgattaagttcagtaaagacggcacacttaattag

SEQ ID NO: 533464 - DNA, 464 bp, Homo sapiens
aggagggaggaaccatcagtagaagaccctggttggtctaggaggagaggaaatgttggacttatttagaacagacttacttttcctctagcartagagcagaaaacattaccacatattccttaagggtttgttgcatttatacaataaacttgatatcaactaaaatgcacacgtacgaaatctacttatgagcatattttgctttttggtgcatgtgcaagattttaatgtgggtattactaacctctacttaggaagttgtgagtttcaaagtggtgtaataggggatttgaaatttgtaagcatgtaaaaatgattaagttcagtaaagacggcacacttaattaggtatattttcctcaaataaaatagtttctacagaggtaccaaattatatctgaacccagaaggtcaattcaatttgatttgtctgcttctggttcagactgggggtgagagaa

SEQ ID NO: 533465 - DNA, 590 bp, Homo sapiens
attcaacatcaccaacaagtttttagcgaaatgtaataattatataattaaacatctttcatggatcaccctatccatctctactatataaatttaagatkctaaatgttttaaaaatacttcttgattatggttattaattgttcacaagtccactggtaaatattacttattcctagactgaaacagagctaaacgtcaatactatatctagttttcatttgtatagatacaggactgagaaaatttgttcatctaaataaatactatggatggggtaggaaggtgttttgttataaccatgtcatacaattatttgaattttgaataagttttgctcatttatatgagtcccttagaatggttcttatttcatgttcaatagcagattgagtttctggacttagtttccctgtgtcactgtaggtcataactccaagcttttcgctaattccaaatttgataaccatctgctttgccattttagtggcattagcaaaatcactggaagcacctgttgtaatatggtcaattccaaatataagctcctctgccactcttgctcccatactaatgtccatttgtgcaag

SEQ ID NO: 533466 - DNA, 590 bp, Homo sapiens
attcaacatcaccaacaagtttttagcgaaatgtaataattatataattaaacatctttcatggatcaccctatccatctctactatataaatttaagatgctaaatgttttaaaaatacttcttgattatggttattaattgttcacawgtccactggtaaatattacttattcctagactgaaacagagctaaacgtcaatactatatctagttttcatttgtatagatacaggactgagaaaatttgttcatctaaataaatactatggatggggtaggaaggtgttttgttataaccatgtcatacaattatttgaattttgaataagttttgctcatttatatgagtcccttagaatggttcttatttcatgttcaatagcagattgagtttctggacttagtttccctgtgtcactgtaggtcataactccaagcttttcgctaattccaaatttgataaccatctgctttgccattttagtggcattagcaaaatcactggaagcacctgttgtaatatggtcaattccaaatataagctcctctgccactcttgctcccatactaatgtccatttgtgcaag

SEQ ID NO: 533467 - DNA, 590 bp, Homo sapiens
attcaacatcaccaacaagtttttagcgaaatgtaataattatataattaaacatctttcatggatcaccctatccatctctactatataaatttaagatgctaaatgttttaaaaatacttcttgattatggttattaattgttcacaagtccactggtaaatattacttattcctagactgaaacagagctaaacgtcaatactatatctagttttcatttgtatagatacaggactgagaaaatttgttcatctaaataaatactatggatggggtaggawggtgttttgttataaccatgtcatacaattatttgaattttgaataagttttgctcatttatatgagtcccttagaatggttcttatttcatgttcaatagcagattgagtttctggacttagtttccctgtgtcactgtaggtcataactccaagcttttcgctaattccaaatttgataaccatctgctttgccattttagtggcattagcaaaatcactggaagcacctgttgtaatatggtcaattccaaatataagctcctctgccactcttgctcccatactaatgtccatttgtgcaag

SEQ ID NO: 533468 - DNA, 586 bp, Homo sapiens
cacacagcccaaggacggggtggagatggatgctcgggtgaggccccgcccctgtcccgggcaccaaaggcctcctggtgccagatctaatccagcaggacttctctgtcctccttcccccggctctcagcatcgtcacggtggacccctccttgtccagcacgctgcctcccgcctgctgcgacctcactctcttctgctgtcctgggacctcgtgggcctcctcccrggtccccttcctgctcctcatcctctgtttggccgtctggttgttagagctctccccaggcctcaggaggatgaggaataaatgaaccgacccggtcccccaggctccccttcattcattcaaccagcgagtgttcccagggagctcactgtggatggggctccccatgggagctgcagacacagcagggagcaaagccgcccccgcctcctgagctcacctcatggtgggagacaaaatgcaaataaatgcatcgtgtccaggagtgcaacgtgctgtaaggaacataaaccagggaaagggcagagagtgtggggcagtggggccagtctgaatggaaggggagggctgtctgct

SEQ ID NO: 533469 - DNA, 490 bp, Homo sapiens
ctgaatctggaaaggacccagagtgatgtgttgaaggacgggctgaaggcatgagggagaccccatggggaggctctgacatgggaggaggagccctcagccacgytcacctgaacggggaggactcaggaaggcatcggtgtgtttgctgtgaggtcccagctctcagggagaggaggaaagatcaggcacagtggccagggctagggagaccccactcctctgaaatgactccaagacagccccgggtgagaaggaggccctggggtcagagactcagagcatgagagacagtgagacctgcagggccaggacgggagaaggaaggggcgtgggaggaaccagccctctcagtcctggctcctctttccctccaggcgtgtctaggaagccctccctcctgaccctgcagggccctgtcctggcccctgggcagagcctgaccctccagtgtggctctgatgtcggctacgacagatttgttctgtat

SEQ ID NO: 533470 - DNA, 490 bp, Homo sapiens
ctgaatctggaaaggacccagagtgatgtgttgaaggacgggctgaaggcatgagggagaccccatggggaggctctgacatgggaggaggagccctcagccacgctcacctgracggggaggactcaggaaggcatcggtgtgtttgctgtgaggtcccagctctcagggagaggaggaaagatcaggcacagtggccagggctagggagaccccactcctctgaaatgactccaagacagccccgggtgagaaggaggccctggggtcagagactcagagcatgagagacagtgagacctgcagggccaggacgggagaaggaaggggcgtgggaggaaccagccctctcagtcctggctcctctttccctccaggcgtgtctaggaagccctccctcctgaccctgcagggccctgtcctggcccctgggcagagcctgaccctccagtgtggctctgatgtcggctacgacagatttgttctgtat

SEQ ID NO: 533471 - DNA, 490 bp, Homo sapiens
ctgaatctggaaaggacccagagtgatgtgttgaaggacgggctgaaggcatgagggagaccccatggggaggctctgacatgggaggaggagccctcagccacgctcacctgaamggggaggactcaggaaggcatcggtgtgtttgctgtgaggtcccagctctcagggagaggaggaaagatcaggcacagtggccagggctagggagaccccactcctctgaaatgactccaagacagccccgggtgagaaggaggccctggggtcagagactcagagcatgagagacagtgagacctgcagggccaggacgggagaaggaaggggcgtgggaggaaccagccctctcagtcctggctcctctttccctccaggcgtgtctaggaagccctccctcctgaccctgcagggccctgtcctggcccctgggcagagcctgaccctccagtgtggctctgatgtcggctacgacagatttgttctgtat

SEQ ID NO: 533472 - DNA, 490 bp, Homo sapiens
ctgaatctggaaaggacccagagtgatgtgttgaaggacgggctgaaggcatgagggagaccccatggggaggctctgacatgggaggaggagccctcagccacgctcacctgaacggggaggactcaggaaggcatcggtgtgtttgctgtgaggtcccagctctcagggagaggaggaaagatcaggcacagtggccagggctagggagaccccactcctctgaaatgactccaagacagccccgggtgagaaggaggccctggggtcagagactcagagcrtgagagacagtgagacctgcagggccaggacgggagaaggaaggggcgtgggaggaaccagccctctcagtcctggctcctctttccctccaggcgtgtctaggaagccctccctcctgaccctgcagggccctgtcctggcccctgggcagagcctgaccctccagtgtggctctgatgtcggctacgacagatttgttctgtat

SEQ ID NO: 533473 - DNA, 625 bp, Homo sapiens
ttcacatatctgtcttaagtctgtattttwttatttttctcccattcagagattccccgacttcctcaataatgtcagttctcagaaatgtggcttgtggatgtgagaaaggacagactcttggaaagaaggaagagaaaagaaagcttacagagtcagccaccagggaaagccatccccagaaaggggccagtcatcacaactctaggttcatagaggttatggaagcgtagtgaaatatgaggcagttaagattgagggacttagcccaacacagtggctcataactgtaatcccagcactttgggaggccaaggtgggtggatagcttgaacacaggagttcgagaccagcctggccaacatgctaaaaccccaaatctacaaaaacaatccaaaaattagctgggtttggaggcatgtacctacagtccctgctactccaggggctgaggtgggaggatcgcttgagcccaggaggttgaggctgaagttagccatcatcacgccactgcactccagcctgggcaacacagtgagaccctatctcaaaaaaaaaaaaaaaaaagattgaggggctcactgatctgggaggaacagaccatggttaattcactcagatttgt

SEQ ID NO: 533474 - DNA, 576 bp, Homo sapiens
gctgattttcacatatctgtcttaagtctgtattttattatttttctcccattcagagattccccgacttcctcaataatgtcagttctcagaaatgtggcttgtggatgtgagaaaggacagactcttggaaagaaggaagagaaaagaaagcttacagagtcagccaccagggaaagccatccccagaaaggggccagtcatcacaactctaggttcatagaggttatggaagcgtaktgaaatatgaggcagttaagattgagggacttagcccaacacagtggctcataactgtaatcccagcactttgggaggccaaggtgggtggatagcttgaacacaggagttcgagaccagcctggccaacatgctaaaaccccaaatctacaaaaacaatccaaaaattagctgggtttggaggcatgtacctacagtccctgctactccaggggctgaggtgggaggatcgcttgagcccaggaggttgaggctgaagttagccatcatcacgccactgcactccagcctgggcaacacagtgagaccctatctcaaaaaaaaaaaaaaaaaaga

SEQ ID NO: 533475 - DNA, 529 bp, Homo sapiens
gctgtactattgacattagcttgtgcactgggtgaaattgaagtgagttaaatgtgaccttggcttagttgttgaagtagaaatgaactctactgggagtgaaaaaaaataagaccagtttctctaacttcattttttctttaatgagtttaacagcactcttaggatttgatacattttataaaaacgctttatttccttttctattatatactgggtaatcagcatttagtaaggttagcttgcccttttgttatgaaatccttgtcttaggtatttatatgctatattcttttttaaatggcacacttattttccctttcctcccyttattagtcgtaaccacataaatatgaactgaaagttttcaggcatatatgtccagtgacttcttaatacatgctagaccactgaaacatttttaaatgctcagtgtttctgatgacattgcattgtcttgtccactaggttacatgtgctctcactaaacaacctgctggtaaatcaagtgcagtgaatatgtgagacc

SEQ ID NO: 533476 - DNA, 529 bp, Homo sapiens
gctgtactattgacattagcttgtgcactgggtgaaattgaagtgagttaaatgtgaccttggcttagttgttgaagtagaaatgaactctactgggagtgaaaaaaaataagaccagtttctctaacttcattttttctttaatgagtttaacagcactcttaggatttgatacattttataaaaacgctttatttccttttctattatatactgggtaatcagcatttagtaaggttagcttgcccttttgttatgaaatccttgtcttaggtatttatatgctatattcttttttaaatggcacacttattttccctttcctccctttattagtcrtaaccacataaatatgaactgaaagttttcaggcatatatgtccagtgacttcttaatacatgctagaccactgaaacatttttaaatgctcagtgtttctgatgacattgcattgtcttgtccactaggttacatgtgctctcactaaacaacctgctggtaaatcaagtgcagtgaatatgtgagacc

SEQ ID NO: 533477 - DNA, 529 bp, Homo sapiens
gctgtactattgacattagcttgtgcactgggtgaaattgaagtgagttaaatgtgaccttggcttagttgttgaagtagaaatgaactctactgggagtgaaaaaaaataagaccagtttctctaacttcattttttctttaatgagtttaacagcactcttaggatttgatacattttataaaaacgctttatttccttttctattatatactgggtaatcagcatttagtaaggttagcttgcccttttgttatgaaatccttgtcttaggtatttatatgctatattcttttttaaatggcacacttattttccctttcctccctttattagtcgtaaccacataaatatgaactgaaagttttcaggcatatatgtccagtgacttcttaatacatrctagaccactgaaacatttttaaatgctcagtgtttctgatgacattgcattgtcttgtccactaggttacatgtgctctcactaaacaacctgctggtaaatcaagtgcagtgaatatgtgagacc

SEQ ID NO: 533478 - DNA, 579 bp, Homo sapiens
tttttttttttttttttgagacaaagtctcgctctgtcacccaggctggagtgcaatggtgtgatcttggctcactgcaacctctgcttcccgggttcaagtgattctcgtgcctcagcctccccagtagctgggattataggcgcccaccaccaggcccagctaatttttgtatttttagtagagayggggtttcaccatgttggctaggctggtctcgaactcctgacctcaggtgatccacccctcctcggcttcccaaagtgctgggattacaggcagggtcccttctataagggcattaatcccattcatgagggctctactcccaggacctaatcaccacccaaaggtcccacctactaacatcgtcatgaccttgggggttaggatttcagcaggtggctttgcaggtgcacccacattccttccacacagatggggcacatctctggtagcccacagaactcttccccgcagtgtccagccaaaaagagcctcttccctcctgaagcctgaaagggctgagaaccccctctgtggccccaggggcatggtgttttcagagcactctccaag

SEQ ID NO: 533479 - DNA, 579 bp, Homo sapiens
tttttttttttttttttgagacaaagtctcgctctgtcacccaggctggagtgcaatggtgtgatcttggctcactgcaacctctgcttcccgggttcaagtgattctcgtgcctcagcctccccagtagctgggattataggcgcccaccaccaggcccagctaatttttgtatttttagtagagacggggtttcaccatgttrgctaggctggtctcgaactcctgacctcaggtgatccacccctcctcggcttcccaaagtgctgggattacaggcagggtcccttctataagggcattaatcccattcatgagggctctactcccaggacctaatcaccacccaaaggtcccacctactaacatcgtcatgaccttgggggttaggatttcagcaggtggctttgcaggtgcacccacattccttccacacagatggggcacatctctggtagcccacagaactcttccccgcagtgtccagccaaaaagagcctcttccctcctgaagcctgaaagggctgagaaccccctctgtggccccaggggcatggtgttttcagagcactctccaag

SEQ ID NO: 533480 - DNA, 579 bp, Homo sapiens
tttttttttttttttttgagacaaagtctcgctctgtcacccaggctggagtgcaatggtgtgatcttggctcactgcaacctctgcttcccgggttcaagtgattctcgtgcctcagcctccccagtagctgggattataggcgcccaccaccaggcccagctaatttttgtatttttagtagagacggggtttcaccatgttggctaggctggtctcgaactcctgacctcaggtgatccacccctcctcggcttcccaaagtgctgggattacaggcagggtcccttctataagggcattaatcccattcatgagggctctactcccaggacctaatcaccacccaaaggtcccacctactaacatcgtcatgaccttgggggttaggatttcagcaggtggctttgcaggtgcacccacattccttccacacagatggggcacrtctctggtagcccacagaactcttccccgcagtgtccagccaaaaagagcctcttccctcctgaagcctgaaagggctgagaaccccctctgtggccccaggggcatggtgttttcagagcactctccaag

SEQ ID NO: 533481 - DNA, 579 bp, Homo sapiens
tttttttttttttttttgagacaaagtctcgctctgtcacccaggctggagtgcaatggtgtgatcttggctcactgcaacctctgcttcccgggttcaagtgattctcgtgcctcagcctccccagtagctgggattataggcgcccaccaccaggcccagctaatttttgtatttttagtagagacggggtttcaccatgttggctaggctggtctcgaactcctgacctcaggtgatccacccctcctcggcttcccaaagtgctgggattacaggcagggtcccttctataagggcattaatcccattcatgagggctctactcccaggacctaatcaccacccaaaggtcccacctactaacatcgtcatgaccttgggggttaggatttcagcaggtggctttgcaggtgcacccacattccttccacacagatggggcacatctctggyagcccacagaactcttccccgcagtgtccagccaaaaagagcctcttccctcctgaagcctgaaagggctgagaaccccctctgtggccccaggggcatggtgttttcagagcactctccaag

SEQ ID NO: 533482 - DNA, 427 bp, Homo sapiens
ggtcacaaatccctttgtgaatctgatgaaagcaatgaacactctttctagggaacatgaacacacacacacacacacacatacacacgtaagcacaayttaacctataatttaggagcctatagaccccatgtgaagatctctgacctaaatcccacctaaggctcccaactctcacgttctatgattctatcaacaaccaaccaaacaatgaagcatcttctgtcacctcagaccctcaaactcatgaaccaacgttttggtaccagccccctaatgtctgtaaaattgcaaataccaagactaatgttctctctggagtggtgcagataaagttatatcaagtatggttattaaatttccatatttagatgtgcaaagccaggctcctccaggagtccttagaagccattcagttcccaataat

SEQ ID NO: 533483 - DNA, 573 bp, Homo sapiens
agcaagttattgcaagtccctgaacagcttaatcccatcatttccttatcagttatcatttgtgtagtgtaaactaacatcagggctactagctcagtgggaacatatgtttcaggaattctatataaagactgaaatggaaaagaagaaatatagatgcaagtacaaattgttcagcaaatgaagaaaagtattaggcacaaagtaaatattttagtagtaaaaaaagaacagcaataatttcatttktcatattaaaagtctgttatattttataacatgttcacattaaaatgtggttacaagcattaattattcttttttcataaattttaaatcagatctgtcatttgacataagattgaggaaagttgctaataaatgaacacaattttcttagataatcatagaagctgctttcatgacacattttcttgaagagattagctaatcatccccaggattttcgagcatttatcatatatcttctttaatagaaatggataataatcatatagggagaaggaactgtgaaatgtttgggaatctttattcagagtaacctacaggata

SEQ ID NO: 533484 - DNA, 513 bp, Homo sapiens
tgggtgacgagagtgaagctccatatcaaaaaagcaaacaaacaaacaaaaaaactggattcggccattttaggataatcgttacaataattctcccttttggtctaaggttctctttgtgtcaacatgaatatttggtggcttgaactagctactcgggaatattttaaatctgcttattgccttgtgtcttttttgaaatctttttatatacattacttcatttgatatacagaattttaaacctagaagagccttatagttcaggagtccatttctaccaatggaacactggcggcccagagagttggtggcattcataaatcacattacttataagaggtgtttgcatgacattttgaattgactgctttgaagccatggccattttgacattagtgactttttctttttaccctaaaaatcaaacagtttaacaatcagctaattttttaattatggggaaatatgagcagcagacacmcatgtcctccccatgctacctgtggagaa

SEQ ID NO: 533485 - DNA, 569 bp, Homo sapiens
ccagcccaaattcaccctccctctgggtttctccgccttgacactgttggcgcctggggccggttaattccttgtcacrgtgccgtcctgtgcatcgcaagatgtggggcagcaagtttggcctccacccaccagatgcagcaacacgccatcccccagtcgtgagagcccataaaggagccagacattgctgaatgtcctcaggggcacagtcacccctgattgagagccactgccctctctggcccttacgaagcctcagtcatataaagactgaacatcataagcccagggagaactgggggtagaagctgaccccacagaaccttccggctcctgggatggcccccatccaatgctgtgccctctagctggcagccagaggagacagggcccttgggaaatgacacttagagcctggccctgggtaagggttggtgtgggccaatggaggaaatgcgggggaagggcccccacctcaccccacaccatgaaggtggccaccatacaccccgtcttggcctggcccctgaggaagctgtggcccagtgtgcccgccctggagcctg

SEQ ID NO: 533486 - DNA, 569 bp, Homo sapiens
ccagcccaaattcaccctccctctgggtttctccgccttgacactgttggcgcctggggccggttaattccttgtcacagtgccgtcctgtgcatcgcaagatgtggggcagcaagtttggcctccacccaccagatgcagcaacacgccatcccccagtcgtgagagcccataaaggagccagacattgctgaatgtcctcaggggcacagtcacccctgattgagagccactgccctctctggcccttacgaagcctcagtcatataaagactgaacatcataagcccagggagaactggggrtagaagctgaccccacagaaccttccggctcctgggatggcccccatccaatgctgtgccctctagctggcagccagaggagacagggcccttgggaaatgacacttagagcctggccctgggtaagggttggtgtgggccaatggaggaaatgcgggggaagggcccccacctcaccccacaccatgaaggtggccaccatacaccccgtcttggcctggcccctgaggaagctgtggcccagtgtgcccgccctggagcctg

SEQ ID NO: 533487 - DNA, 569 bp, Homo sapiens
ccagcccaaattcaccctccctctgggtttctccgccttgacactgttggcgcctggggccggttaattccttgtcacagtgccgtcctgtgcatcgcaagatgtggggcagcaagtttggcctccacccaccagatgcagcaacacgccatcccccagtcgtgagagcccataaaggagccagacattgctgaatgtcctcaggggcacagtcacccctgattgagagccactgccctctctggcccttacgaagcctcagtcatataaagactgaacatcataagcccagggagaactgggggtagaagctgaccccacagaaccttccggctcctgggatggcccccatccaatgctgtgccctctagctggcagccagaggagacagggcccttgggaaatgacacttagagcctggccctgggtaagggttggtrtgggccaatggaggaaatgcgggggaagggcccccacctcaccccacaccatgaaggtggccaccatacaccccgtcttggcctggcccctgaggaagctgtggcccagtgtgcccgccctggagcctg

SEQ ID NO: 533488 - DNA, 476 bp, Homo sapiens
gggatttttgctctatttttaacagaagcataggaccgtaaagatgtgtcatgaaaccccaagtgtcccaaagcctcggggcccacaggagcatcgggaagtgaggcagtgcgctcatcctgacggagcagcgtcgtgtctgtagcggggagggaggctggcccaggrgcccggcatgttcctgaagcgttcacagggttttgagaccttcacagccccatcaatgtgctggcccatgtggcatggatggggtagtctctctgggcaaatgagaggcccaaggagagaccaagccaccaaagggctcaagacaaagtcactgttccttccccaggaaggtggggcagaggcaagatctatcggacatttcaaagtttcaggcaggagctcctagaggacttggtggctttgccagcccaggggcctctgaaggcagcccccagacccttgtagcagggctgtccatccccagggag

SEQ ID NO: 533489 - DNA, 507 bp, Homo sapiens
caccccagccacccatccaggaggttggttccttttgcccagttcatagcagctcagtccttaccagatggattcttggtgttgggaagcagcctctttttattcctgaaaggcaatgccctgtccgtttgcagtagagaatccccagggagcaagaaagatgacagaagtgtggctgccgtgtttctaggtcatgagagctctggcratactaccacaaggcctgcacgtggactctatgataacttgagtcttccatcatgtttgccaccagccctccctgagtgcccagaggagatgggggcagagtcacttggcctactaaagcctcctgttccttctggctcatgcattgctttgtggtaagagaaaggaagtctttagaacagcgcctgggaatcagcccttctccctactgagtccccagtcctgtcccttccctgactcgctcctcctccaaccttggtttctatagctgcatttttttttttttttttttttgagaca

SEQ ID NO: 533490 - DNA, 507 bp, Homo sapiens
caccccagccacccatccaggaggttggttccttttgcccagttcatagcagctcagtccttaccagatggattcttggtgttgggaagcagcctctttttattcctgaaaggcaatgccctgtccgtttgcagtagagaatccccagggagcaagaaagatgacagaagtgtggctgccgtgtttctaggtcatgagagctctggcgatactaccacaaggcctgcacgtggactctatgataacttgagtcttccatcatgtttgccaccagccctccctgagtgcccagaggagatgggggcagagtcacttggcctactaaagcctcctgttccttctggcwcatgcattgctttgtggtaagagaaaggaagtctttagaacagcgcctgggaatcagcccttctccctactgagtccccagtcctgtcccttccctgactcgctcctcctccaaccttggtttctatagctgcatttttttttttttttttttttgagaca

SEQ ID NO: 533491 - DNA, 318 bp, Homo sapiens
gcagagacagagaaacaattctgagagggaaggaggaaaagcagctggtgggggtgaggatgggtggagctcttaggagaaaagtgatggggcagacaggaagcaggatggcacagcccgtctgtattagtccgttttcaggccgcttttaaagacatacccaagactgggcagtttacaaaagaaagaggtttaayggactcacagttccatgtggctagggatgcctcacagtcatgatggaaggtgaaaggcacgtctcacatggcgggagacaagagaagagagcgtgtgcagcagaactgccctttataaaac

SEQ ID NO: 533492 - DNA, 601 bp, Homo sapiens
gctgtgtcccccgtagacactcaggaagctgcaggccaggagcccttttgaaccccactcacagcccttccctgcctgcttccagaaayccagcagaaaacccttggctctgcggccatgaatgggtggtttctctccacctgactggtggggatgacagcgtgaccagagatagtctccttagtggccgctgtccaccctgcacaggcacatcatgactccaggaaagcttgagaggcaaaggattggcctagacatctactgagggcaccagagcccccagcctgggtccgagtcccgcctctgcctcttcccaaggagggtcctcagaaagggtcactcacgactctacacctcagtgtcctcatttgtaaaatgtggatgattgtgcctgcattgtgggcttgggctgaggaggagataagataagcacaacacctgctggaacaaggcaggtgttccgcaaagctcagccatttggccacaggaagtaaactgctgaatgcagttgttgcatccatcaccaccatcatcaccatcaccaccatcatcagcatcactgcatcaatatcccaccgccatcatcagcatcaccgccatc

SEQ ID NO: 533493 - DNA, 601 bp, Homo sapiens
gctgtgtcccccgtagacactcaggaagctgcaggccaggagcccttttgaaccccactcacagcccttccctgcctgcttccagaaatccagcagaaaacccttggctctgcggccatgaatgggtggtttctctccacctgactggtggggatgacagcgtgaccagagatagtctccttagtggccgctgtccaccctgcacaggcacatcatgactccaggaaagcttgagaggcaaaggattggcctagacatctactgagggcaccagagcccccagcctgggtccgagtcccgcctctgcctcttcccaaggagggtcctcagaaagggtcactcrcgactctacacctcagtgtcctcatttgtaaaatgtggatgattgtgcctgcattgtgggcttgggctgaggaggagataagataagcacaacacctgctggaacaaggcaggtgttccgcaaagctcagccatttggccacaggaagtaaactgctgaatgcagttgttgcatccatcaccaccatcatcaccatcaccaccatcatcagcatcactgcatcaatatcccaccgccatcatcagcatcaccgccatc

SEQ ID NO: 533494 - DNA, 358 bp, Homo sapiens
gctctcaatgtgccactgtttcctgtggattctgagtcttggcaccatgagaccagtgtgggattcttctttcttccaggcaaccggtgaccaaaaacactttcaggcagtatcgagtgctaggaaaagggggcttcggggaggtgagtgaacattcacgtttttaattgaaagttcttacattcaagtcacctttcctgtcccttctaaatcaacctaaagggttggcccacgggtcccccgggggcaccagtggctcaatgtgggccccgggggcagtgagggtgggagagagtcagtggcctyggggctatcaggtgtgtctatggtggaaagaggttgtggagctgggcaggtg

SEQ ID NO: 533495 - DNA, 538 bp, Homo sapiens
atgggccaagcacggtggctcacgtctataatcctagcactttgggaggccacagcaggtggatcgctgaagctcaggagttcgagaccagcctaggcaacatggtgaaaccctgtttgtacaagaaatagaaaaattagccaggtgtggtggtttgcatctgtagtctcagttacttgggaggctgaggtgggaggatcacctgagacctgggaggttgaggctacagtgaactgtgattgtgccactgcactccagcctgggtgacaacgtgagaccctgtctcaaaaataaataaataataataattacattatgtattaatttggtggaccaagcaatttgtaaatacagaatgtcctacttcttggaacaagaaattctgatcaataaaattaagaaatattcctatgtacataagtatgcaactaaaccaatagtataacagcaaaacatyagagttgcttaagaagaacaatagtagcaatacatcgctttatagtgcccacattaaaaatatactaaaattcaaaagata

SEQ ID NO: 533496 - DNA, 642 bp, Homo sapiens
caggccaagttcctccagagagttctgtttagataaggaaagctcatgawgtgaaagaagttatttctccatcatggacgctctttactgtcttttaagaaaaaaaaatgtgacattctggcattatttattataaacgtttacactcagaaactattaatataaatgagcagaggaggctttgaccaggactggttttaaaattggctgccccgcaagctggacacccaatgtagtacagcttcctctcattgtggggtgttttttttttttttttggaacagggtctaggctagaatgcagtggtgtgatcgtagctcactgcaacctcaaactcctgagctcaagcaatcctcctcccttggcctctcaaagtgctgggattataggcttgagccactgtgccttgccggcactgtgtttttgtgccaggccttgtcacactcaacagttcctcaaatgagccacactcttttacactcctaggtctccaaatttgtgatgccctctacatcaaatgctcttttccatctggtcaaatcttatattccttaaggacttgattcctttgggaagcctcctccaatgccctggtttgagacagacacccctggtcttttttcctgtcatacccagtgagca

SEQ ID NO: 533497 - DNA, 511 bp, Homo sapiens
gatttggtccttaattcaataggtctatgagagtgaaaaagcagtgttttttcctctgctgctgtcataccacaacagtcaacaaagaagacttccatgaccacatgtttggcagtttscccccacaccaagcaagcaattaatcctgcagcaaacactagctggctgtcttctaattcaactcagttctgatactgtttacctggagatagtgtcagatcccacaggttgagggcccagtcccaggactctccttcctttctctgctgcttcatgtgccagtctcaagctccaggtggatttccctgtgcttctgattgactagattggggtttccacaacgccctcgttggatatgattaatttgctagagtggcccactgaactcagggaagctcttagatatactggtttattacaaaggatgttacatgtctcttctacagatgaaatgcataggttgaggttagggagagggacacagagcatccatgtactttacagtcatacc

SEQ ID NO: 533498 - DNA, 637 bp, Homo sapiens
cggtgggacccatcaggtggttggctttatggcctcctctttacctctggccctggaaaaggtttagtaatcgctaagcctccatatcaagagtcacctgaggcctttgccgaagtacccatgcccaggtgcattccacacgctgccctgtgtatccctctctcctgctcctgcattttgactcagtaggtataagctggggctggaaagcggaattttctttcatcaagaccattcccatcaaagcctggcaatgataagtaacttatccagagtcactctggacagcctgccagtcaaaggtaaaagagcatgtactctgcttttgttttctatctgtagaataaggaaggaccaacaggctcattggactgttcattctgggcacaggcagrtggctgtttggctcattagtgtttcatttcctgttactaggggtgggcattgtgtgtggctcccctgtggtagagaaggacatcggatgaacatgtgatctgtgtatccagctccaacccaaaaggtaatgaaaatgggatccagtttgtagttttgtatatggaaataattatcttaattgcaggtacacatcaggggccagtcagaatctggcatgagaatgtccaaaatgtagtcttct

SEQ ID NO: 533499 - DNA, 317 bp, Homo sapiens
cactggggactcatgaggattctttcaataatgagttatcagttgagacctagacagattatagaagttgggsaactgccttgaagttaatatcagacataagtgaggaccaaacttcttcttgaagcccttgaagtaatagtgaacatatgctaaaggaaaaaaacatttatttttagcattctcagtttctgccctatcccaaacccaccttttaccctcagaatagcttctatgaatgtaggatggatgttagggtgtccttgacttctctttgatactccttggtaaaaggaagcctgtccaactttcctttt

SEQ ID NO: 533500 - DNA, 525 bp, Homo sapiens
tgtatagtgcttctgtgttacagtaatggctccacatttctttttggacattaggtaccatgtggtacttcctggctggcatatttaattgttggtagaagacctccagcaacactgttttctctggtgaagtgatcagccatcttgaaaatacatgctgaaatggaagtaaaacaagatcaaaaagcctatcctggacaatcacctggactagcagtatacactatgggaggcagaaataagattttattaagttaaaattgtgattttgggggtcgtttaatattacagcactgtcattcttatccaggctaatatgaggaaggtaactgctccttttgtatagtattcattattttgcaacataaagtctacagagcaagcttgtgataacctacagaagaatgtgagaattagggcccacacccactgagttttaatgaaaacacagttttcatctccattttgacacttaggtatgtgcaaatgtgcctagmatagaactgggatttccccttttctaga

SEQ ID NO: 533501 - DNA, 608 bp, Homo sapiens
ttaacctgggagcttacagaaagagactgatgaagggaggttgcagacgaaaagtcttgtggagaagtggaggcagttccagttctccacggggtctaagatgtactcttgatagaagtgcttggcacctggtaacgagttttgtccattgatgctgataagaaatgctaatatattttatagaaggcttagcaaaggatgcctcataaaagggaaaagtgtcattctataaaaagacagtctctttttgtttyagactattttctgctgctgtaacagaatactacagactgggcagtttataaagaaaatatattatttgactaattgttctggaagctggaaagtccatgataatggtgccggacatctggcaagggttatcccatggtgcaaagtgaaaggaagaacaagccagcaagcgagactcagggagagtaggggctgaaccctcatgataacaaacccatttctgtgattaatccattcatgagggcagagtctttaagactgtatcacctttaaaagatcccacctcttaatactgccacaatgacaattaaatttcagcatgagttttggaggacacattcaaggcagtgtatttt

SEQ ID NO: 533502 - DNA, 590 bp, Homo sapiens
tgacaccgtggccagccctgttcctcacctgatgcctgcctgtagtcttcggccttgctgctccagaacttttcatcgtggcccctttagggccatggcagcacaaatacacttagtaggtgaggccatgaggacacctaccaccattaaggatgcctrtggggagtagggagatggaggataggctggtaagaccctgccagtgcgggcctgcctcagtgccttggaacgaggtattcccagtgcctctgagctgcatcccagtgtgtcctgagcacccatctggcctggcaagaagcaggcacgaaaggcatatgggccgtagcctctagcctcctgccacctgcattccaagccacgttccagtagcactttaactgaaacatctagctacacaagatgggctgagcactctacacagatgctggtccatgcagaaacaaccctaccccttctgcacctgaaagggttccctctgttagaaaaggtttgcttcaagttcggttataaaggaaggcttgtgcatagttagtggggaagccacagggatgtgcaacttttccctacagccctgaggttccaggcactaa

SEQ ID NO: 533503 - DNA, 636 bp, Homo sapiens
ccgggcctaccctattccttttgcatttataaattgtatgcttctttcagggactttttaaaaatcagaagttggtgccagcccagcgaagtagctcacgcctgtaatcccagcggtttgggaagccaaggcaggaggatcgcttgagcccaggagtttaagaccagcctgggcaacatagtgagagcctgtctctagaaaatgaaagaaaaaataaaaagcaagtttgtgccagcacatatggaaaagtctgaccctgtgcctttcactcccaacataccattcctgttggagcacacacatgatgctattgatcttccaggtgtgcctggaaaggtgaaagcagggctttgtctgtccttgcccctagccctggacagagtggccaggatttctaagtagataaggcttgtccctggccgtttcctgcrtgaccttgaaaatccctcctagtcaccacgcccatatacctggccacccactcccctgtagccctggctcattctctcagagcctgattagtgatctggaagaaaaagatcggattaaatctgttcttggtgatgctggaaacctcacctcttacaggggcattgcctttggagaggtcttggaggccttcacccaaaggccagc

SEQ ID NO: 533504 - DNA, 636 bp, Homo sapiens
ccgggcctaccctattccttttgcatttataaattgtatgcttctttcagggactttttaaaaatcagaagttggtgccagcccagcgaagtagctcacgcctgtaatcccagcggtttgggaagccaaggcaggaggatcgcttgagcccaggagtttaagaccagcctgggcaacatagtgagagcctgtctctagaaaatgaaagaaaaaataaaaagcaagtttgtgccagcacatatggaaaagtctgaccctgtgcctttcactcccaacataccattcctgttggagcacacacatgatgctattgatcttccaggtgtgcctggaaaggtgaaagcagggctttgtctgtccttgcccctagccctggacagagtggccaggatttctaagtagataaggcttgtccctggccgtttcctgcgtgaccttgaaaatccctcctagtcaccacgcccatatacctggccacccactccsctgtagccctggctcattctctcagagcctgattagtgatctggaagaaaaagatcggattaaatctgttcttggtgatgctggaaacctcacctcttacaggggcattgcctttggagaggtcttggaggccttcacccaaaggccagc

SEQ ID NO: 533505 - DNA, 556 bp, Homo sapiens
gtgtggaaggttgttctagacagggaagaccattctgctggggcaacatgtgcacagagatctgcctggtgcgcagacatcagccatgcttacatctggaggcaaagtccaaaaggccccaagaaaaatatttagtccccaaggaggaaattaacttggggaaaagggaaaatatctatggtggagtcagaggagagaagggtcacctaagaggaatcaggccaaccttacaggccataggaaagactttctattgaacttaactttrgaaagccattgagcaattttgagcaagagcagaacttgatctcatttatttttaaagatcattccaggggctgccttcagttactctattacaaatcatagctgtactttttggtattctttctatctttcttgtacttttgtgtccctttacccaaacaccaattttctttctgaaaaggctcctgggtctatctcaaaacatcaccaggagaaaaataaatttatatttctgactgggaaataggctcggttttagtacgtcttaggataaaattgtattttttgg

SEQ ID NO: 533506 - DNA, 556 bp, Homo sapiens
gtgtggaaggttgttctagacagggaagaccattctgctggggcaacatgtgcacagagatctgcctggtgcgcagacatcagccatgcttacatctggaggcaaagtccaaaaggccccaagaaaaatatttagtccccaaggaggaaattaacttggggaaaagggaaaatatctatggtggagtcagaggagagaagggtcacctaagaggaatcaggccaaccttacaggccataggaaagactttctattgaacttaactttggaaagccattgagcaattttgagcaagagcagaacttgatctcatttatttttaaagatcattccaggggctgccttcagttactctattacaaatcatagctgtrctttttggtattctttctatctttcttgtacttttgtgtccctttacccaaacaccaattttctttctgaaaaggctcctgggtctatctcaaaacatcaccaggagaaaaataaatttatatttctgactgggaaataggctcggttttagtacgtcttaggataaaattgtattttttgg

SEQ ID NO: 533507 - DNA, 566 bp, Homo sapiens
gctgcttgcggggctgaggcaggagaatcacttgaatctgggaggtcaaggccacagtgagccaagatcgcgccactgcactccaacctgggtggcagagtgagaccctgtctcaaaaagaaaaacaaataactaaatgtaaggaaagaattttcttagaattactccaagtcaaagattttgaaaatagaacatatttagtgaaaacttacagtggaaacacatattctactctgaaaaaattcactcactcaaagtgaattgctaattaaaactatatagtatatgtctatcattccattcattcagatgtcagtataaggaaaaacaaatgaatacttaggacactcaggtaatgactgatacctaagtcattttatctttaccaaatttcctgaagaaaaagttgctaaagtacaccaagtttttagatcagaattaattcactcaattacccaattaaaccaaaagggccattgagtctyattcaaatagcctccaagctagagaaaagatatttataatagttctacatctatgatacagaaatatattcttggtagagg

SEQ ID NO: 533508 - DNA, 421 bp, Homo sapiens
tgtattttgcataaacatatactttggaatattttagaaaaataacctatcttgaaagcatgaaaataattttaatttttaaaatcaaataatttatatttttaatgaaaattcattctaattttatacattttgaaatattacattttattatttaatagtttagggcattgctatcaatctaacacaaattctatgaaaattgttatttttgagacagggtcttgctctgtggcccaggtatgatcatcagctcactgcagcctcgatctcctgggctcaggcaatcctcccgtctcagcctccagagcagctgggactacaggcacatgccaccacacttggctcatttaaaaaaawttttttttatagatacgggattttgctatgttttgcaggctggtctcaaactcctgtgctt

SEQ ID NO: 533509 - DNA, 563 bp, Homo sapiens
tctcatatttgtagtctcatttctaatttttcttactttcctgctttcttttttcccccattttttgaattgttttgaaggggttagtccttttcattcagcttttcaaagaccccacttttggctttccttataacatgcttagatttcaaacagaaaaaggaatttaacttttgggttaattatttatttggtccactacattgaagatagtcccaaaagttcactggttattttgtctgctccccgaaaaccccctttacttcataaatakagtttagaagagggccaggacaggggatttgggtcagggaaattaaccttgactgcactgtgagccactgcgaaccactttgtgactttattactatgcaacattgattaatgtacactctagaactaactgctggaaggagacactgctgggcagcttgaaggcttgaggaagaggaaaggcagagggaaggaggggagagaaggggaagggagcagagagttggggttgggggagaaggaatgctttagcttttcaaatgatagaaacttttgtcctttgttttaac

SEQ ID NO: 533510 - DNA, 490 bp, Homo sapiens
gtaaaaatatcatatataatctgtgtgcttttctctgttagtctgtcttatttcaactggattctcaggcccagccacagaacctaagaggcagaggaaagttgcttctcccctccagtcttattttttattgaattatctgaatgatcycattccacgcgatcacgagtgaacaatagcatcttattcggtaatgttagaaaccatggctctaagggggagctagctcttatttaaagaaaataaccctgttcagaatgaagctgtggctagtgttaactcaataaaatataacgcttcttgggaatctgcagggctggtgggaaaagccattgaggaccatggagtgaggataaaaggtttgaggagtccaagtgttttcaggacaggattctgtgtggccagatggttcaaatggatgcaaattccccaaatggcccacaggtacattgggtgtaactcggggcttaaccacatggctgcctgtggg

SEQ ID NO: 533511 - DNA, 490 bp, Homo sapiens
gtaaaaatatcatatataatctgtgtgcttttctctgttagtctgtcttatttcaactggattctcaggcccagccacagaacctaagaggcagaggaaagttgcttctcccctccagtcttattttttattgaattatctgaatgatcccattccacgcgatcacgagtgaacaatagcatcttattcggtaatgttagaaaccatggckctaagggggagctagctcttatttaaagaaaataaccctgttcagaatgaagctgtggctagtgttaactcaataaaatataacgcttcttgggaatctgcagggctggtgggaaaagccattgaggaccatggagtgaggataaaaggtttgaggagtccaagtgttttcaggacaggattctgtgtggccagatggttcaaatggatgcaaattccccaaatggcccacaggtacattgggtgtaactcggggcttaaccacatggctgcctgtggg

SEQ ID NO: 533512 - DNA, 519 bp, Homo sapiens
tggctagtgggggtggggtgcttctgggaaggctgcctccctcccaggaaggtccatatagaatgttttctgaccctgatcacagtcctcaggacagtcatgattgctgctcctcccagtcccgagtgctattcatgcttcatctccatcacctctcataacagccacaggagcagacattgtcatcttattctacaggacaaaattgggagtaagggaagtcaggagacttgattaccatcacacatctagtaagaaaaattacacatgaagcccttaggactggcaccgaggagatgctgagtaaatggcattgatcattgtaatacagggacttcctcatttccagggaggaggggaagatcatttgtccagatgtatgtgcttctgaattcactattgatttttatagcttttctgtttcccccttcaccatgtattggcatttgtaaatatrgtcacatgtttacctgagctacagtgtaacagaaagaactccaaggtctataaacctggctt

SEQ ID NO: 533513 - DNA, 435 bp, Homo sapiens
tgcagctggggcgtgaccccaccgcacgctggccgggcaaggtcaccgctccttcgccagcggggcctattccctttggagcttctccagcttcgtggcctccaccggcctgtggctgctggtctttgggcagttgtccattcattaatagctccctcagaggttggggcacagaaagtaaaagaagcaaaaaacaaaacaaaacaaaacaaaacaaamccagtgttgaatctggcagaggagatgctggcagaaacgagattggagcaaatggctgcaatgcctggagggaatttgcattcaccctggcatctgcgtggaagtcagcgcccagcaccccgcctggcagcatctgtcactgctccaggagcatccaagacaagcctacactgggttccgctgggaagccagtatgaaggcttggtccccaaatgt

SEQ ID NO: 533514 - DNA, 557 bp, Homo sapiens
ctctaataaaaaacaattgaggtaagaaggcagtgaaatgacatattcaaactcctgacagaaaaaaaaaaaaacaccatcaaccagaagcttatactaatcaaaatacctttaaaaaacgaaggcaaaataaatattttttctattttttcatcataaatctactttatcragaaatagacactgtgtctatctcgaattttaggatagtccatcaaatgtaggaataaggataccaatttttccatgtacatatccctaagtttttaaaataatttttacatgaactttatacattttttttttacttttattttaagtttgggatatatgtgcaggtttgttacataggtaaactcgtgtcacaggggtttggtgtgcagattattttatcacccagatattaacctagtaaccaatagttactttttttgctcctctcccttctcccactctccactcaagtagacccccgcgtctgttgttccttctttgtgttcataagttcacataattcagctcacacctataagtgagaacatgtggtattttgtttt

SEQ ID NO: 533515 - DNA, 605 bp, Homo sapiens
ttcaataaatgttagttgagtactgtgctatgtgcaaacatgaatgagatacaccttggattcatacagtgtsgggtggggagagacaccaatattgatatagacagtacagtatgggaagactgaaatgtacaaagcgcttacaagaagacaaagctactttggtaagtaacccaaaggagactattccaaggatatgacatgtaagctaaatgattagacatttctaaggaaagaaggaaaatatactgtaggcaggaggaagtggatctcagtgtcaccattaagaagctagagcagttttgccttaagaacactgatgtggaggacagtgatgatgactgcggtagttaatgtttactggtcatttccttcctatatgggcatgcacagctcaaaggatttcacatgtattaccttttaaaaatcctcacaatacctctgtgaaatagagacttgcgacagttttttattgctgtatatcccaaaacttggtggcttaaaacaaccaccaattatttagtgcctgattctctgtgggttggcaattcaagctcaagttcactgtggggaggaggcttcatccggactccctcatgagtccg

SEQ ID NO: 533516 - DNA, 605 bp, Homo sapiens
ttcaataaatgttagttgagtactgtgctatgtgcaaacatgaatgagatacaccttggattcatacagtgtcgggtggggagagacaccaatattgatatagacagtacagtatgggaagactgaaatgtacaaagcgcttacaagaagacaaagctactttggtaagtaacccaaaggagactattccaaggatatgacatgtaagctaaatgattagacatttctaaggaaagaaggaaaatatactgtaggcaggaggaagtggatctcagtgtcaccattaagaagctagagcagttttgccttaagaacactgatgtggaggacagtgatgatgactgcggtagttaatgtttactggtcatttccttcctatatgggcatgcacagctcaaaggatttcacatgtattaccttttaaaaatcctcacaatacctctgtgaaatagagacttgcgacagttttttattgctgtatatcccaaaacttggtggcttaaaacaaccaccaattatttagtgcctgattctctgtgggttggcaattcaagctcaagttcactgtgrggaggaggcttcatccggactccctcatgagtccg

SEQ ID NO: 533517 - DNA, 633 bp, Homo sapiens
gatgaaagtttaatatgaaagtcaaattattaaagaagaaaatgtacttctttattatttcatgagggacaaacatttcttaaatacaaaggaaaaagcacaaatcataagggaaaaactttaatayatttgaccacattaaaatctattgatcaaagatgacattaataaagtagaaaaggaaagtcatgaattgaaggaagataattgcagtgcctgttactgacaaataattagtgaccataagtataaagaattcctataaattacaagagtaacaaatggcataagtaggtatgtaacagaaaaggaaacatggttggcaaaaactcacaagtaataaaaaaaaaaaaaagcacagtaaaaccacaatgggacactgttttcctcagaaccaaattgtcaaaaatcaggaagtctgataataccaagtactactgagcccatgaaaagtaattcggaatgtattttggcattatcaaacaaagcttgagatgtatctaacttttaatctagggattacattctgaaagtttttcctcataaacatgtacacaaggaaatggacaaaaattttcatataatcaagttcgatgtatttttataatgaaatatcacagcccattgaaaatg

SEQ ID NO: 533518 - DNA, 468 bp, Homo sapiens
tctcctgccaaggcccatggccctcaggaaccctggctccctcactgtgagccaagtggatgcccaaagctccacccctggagcttctgattcctgtgagctggggcgaggcctgggctttggcagggttcagaaactttccaggggattctgagaacggacagtgtgcaaagtgcccaacaatagctctaccggctgctgcttaggtcaatttgctgtaagttttcattttggtacaatgttaatcttacagaaaactttcaagaactgtacaaaagaactcttgtattccctttacaccaatccaccaatggttctcatcttaaccatttgcttaataattttcytgtgtttatttttatctaaaaaaaaacatgaagtaagctttcctagtgggtatgatacagactgatagcaggacatatataatatatattatataacaaatgcatacatatattgggagac

SEQ ID NO: 533519 - DNA, 500 bp, Homo sapiens
tgactcagtccatcatcctctcaacaggtttgcagatgaactgaaccaagaggaattctcccccaatctgttacctaactcttccctgtacagggcaggctatgcccagggaccagaaagtttatttagaagttccaagagtgtcttccccccagaaaagagatacgagcaagcaatgggggcatttgtcagacgtaaaaaaacaggaaaaaagaacaaagagaagtcagtgggaattggaaagaggamacaggagtcaaggggatggtggatgagagaaaaagacagaatgactcaggaagagggatgggtgccctggggggaggggttgggaacagggctggaatggcgagcagcaatttgtgaagtttacagataaatcttggtcctttcagcaaagcttatctgtaatgggctcggctcgttgaggccccgtctcctgtagacataaatcattttctaatttataacatgaataattgattttgcctctgtagcct

SEQ ID NO: 533520 - DNA, 500 bp, Homo sapiens
tgactcagtccatcatcctctcaacaggtttgcagatgaactgaaccaagaggaattctcccccaatctgttacctaactcttccctgtacagggcaggctatgcccagggaccagaaagtttatttagaagttccaagagtgtcttccccccagaaaagagatacgagcaagcaatgggggcatttgtcagacgtaaaaaaacaggaaaaaagaacaaagagaagtcagtgggaattggaaagaggaaacaggagtcaaggggatggtggatgagagaaaaagacagaatgactcaggaagagggatgggtgccctggggggaggggttgggaacagggctggaatggcgagcagcaatttgtgaagtttacagataaatcttggtcctttcagcaaagcttatctgtaatgggctyggctcgttgaggccccgtctcctgtagacataaatcattttctaatttataacatgaataattgattttgcctctgtagcct

SEQ ID NO: 533521 - DNA, 580 bp, Homo sapiens
gcagagggtctgcccctgggctcctgctgctgtccaggtcagggaaggggcctggcagtcacccctcatgtgggccaagatcctgggggcctgtatccatggcccaggactgacgcaacaatgtgccacagattaaatggcttaaaacaacagatgtttattctctcgcgsttctggaggctggaagtccaaaaatcacaggttgacagggtcccactccctctggagtctctggggaagaaccttacttggctctgcctggtccctggagtttgctggtcatcctcaacattccctggcttgtggctgcatccctcccatctctgcctctgttgtcacatggcatgacatgtgtctccctgtatgtctctgtgtccaaactctcttcttcttataaggacaccagtcacgggataagtgcccgccctaatccagtatgaccttatcttcacttgattacatttgctaagacccttttccaatcacattccagggcttaggacctgaatatgtctttgaggggaatacagttcaacccacaacaggacacagggaagcccaaattaataaacccccttct

SEQ ID NO: 533522 - DNA, 600 bp, Homo sapiens
gctgttgtgtatgctattttaaattatttaaaataactccatctgaaaaaccaaaaacaacaaaaagaagaggagaaaggaaaactaggtttaccacattgggtccaaccaacttggaaatctgaccctttctctttgccctggaaagttgggggagacataaccagggagggaaatggaagcagagcttggtggaagtggggattgccaacacgtagcccgcaggctgacagaggctctccccgtctcttcctaaaccctcagtccatcttctcttcttctcagtcttcccctcccacctccaacctcgtcacaggaagaatgaagcaggccccgccttccggtcctgcccctagcgcttctcccttggccccagtgcccttgtccatccaatgacraaggatgcaacaacatggtctgccctaaaaggaccggaccctctcaaaccccatgatccagtgacaactgcagagggttttacatatatgtcaagaggaggagacatcccataaggaagcttccagaaggcagtgcgtgagaggcaccatcattcactctgattattcaggacctttcttggcagccacgaatcccatcctt

SEQ ID NO: 533523 - DNA, 600 bp, Homo sapiens
gctgttgtgtatgctattttaaattatttaaaataactccatctgaaaaaccaaaaacaacaaaaagaagaggagaaaggaaaactaggtttaccacattgggtccaaccaacttggaaatctgaccctttctctttgccctggaaagttgggggagacataaccagggagggaaatggaagcagagcttggtggaagtggggattgccaacacgtagcccgcaggctgacagaggctctccccgtctcttcctaaaccctcagtccatcttctcttcttctcagtcttcccctcccacctccaacctcgtcacaggaagaatgaagcaggccccgccttccggtcctgcccctagcgcttctcccttggccccagtgcccttgtccatccaatgacaawggatgcaacaacatggtctgccctaaaaggaccggaccctctcaaaccccatgatccagtgacaactgcagagggttttacatatatgtcaagaggaggagacatcccataaggaagcttccagaaggcagtgcgtgagaggcaccatcattcactctgattattcaggacctttcttggcagccacgaatcccatcctt

SEQ ID NO: 533524 - DNA, 592 bp, Homo sapiens
gctgttgtgtatgctattttaaattatttaaaataactccatctgaaaaaccaaaaacaacaaaaagaagaggagaaaggaaaactaggtttaccacattgggtccaaccaacttggaaatctgaccctttctctttgccctggaaagttgggggagacataaccagggagggaaatggaagcagagcttggtggaagtggggattgccaacacgtagcccgcaggctgacagaggctctccccgtctcttcctaaaccctcagtccatcttctcttcttctcagtcttcccctcccacctccaacctcgtcacaggaagaatgaagcaggccccgccttccggtcctgcccctagcgcttctcccttggccccagtgcccttgtccatccaatgacaaaggaygcaacaacatggtctgccctaaaaggaccggaccctctcaaaccccatgatccagtgacaactgcagagggttttacatatatgtcaagaggaggagacatcccataaggaagcttccagaaggcagtgcgtgagaggcaccatcattcactctgattattcaggacctttcttggcagccacgaatc

SEQ ID NO: 533525 - DNA, 497 bp, Homo sapiens
gcccaggggttccttaggcccagcaggccctcctggccaggctaaggaatcagcagccagggagtgaccgagcaaagcacacccagcaacggcacatccccaggcagatgttcttctagagttgcaactcatgctcaggccatgtgggcctcggtcctgggactgcagagggcttactggcctccatgcttcgcaaaatgagggcactcccattgcagacaggcaccctggcatggaagggtccattccctgcaggactggaatgaacttcactggcctgactgaatcccttactgagccttcacttccctgtccaagtgatcctgtatctaattgttcatctcgtcagccaatcycaaacacaattccacccaaccctgggtctccatggccaggggagtctgccttctggccataaatactctagaactgatcattagtcaggagcaaattagcaatagctatggtagcactgcaggcttccctcagcctggaat

SEQ ID NO: 533526 - DNA, 620 bp, Homo sapiens
caggagtccacccaactctggctcccagtcctgggcagagtcttttcttctctattctatgaaagcagagcaaggagccccgattccttttgattttagaggtgtgaaatgaagatgatagtaggctttacctcactgggtggttgagagttttaaataagattatgcaaagtgcttagtaccatgcttgacgcatataagggcttgatgaataataacttttaaaaacaagtgatactgggttagttgaagatctgtatgaaaacaatcttgaccctgtacctcacaaccctaccagaagtcaattctagcgtggctatagacctctgtgcaaaaggcaaagcagtgaagcctgtagaagcaaacacaggagcatatattttcatgatcttgaggcagacaaagatttctcaggacacacacaggactaaccataatggaaaaaagtgataatgtagatggcatttttctttaaaaagtggctagatggagacccttagcgagtgccaggagtgccatgtctggccttgtctctaactctgtgacgagcacgggtcacttaagctyggggggcccacagtttctctgcaccatctccctcctgggagatgttcggcatc

SEQ ID NO: 533527 - DNA, 511 bp, Homo sapiens
ctctgcatcccctgcacaggagaggccttctggctcatacttacttgtctttcagttcttaggtgaaatgtcacctccccagagaagctctgaccccttctcccagtcttgttatgttcccctactggtctctctcgaagtcccctgmttttccctccacgctgccgacatcatttgtaattctatgttcatttcatgtctgttcccctagactgtcagcctgttgacagcaggcatgggcccattttgtccatacagcatctaattagtgccctgcatactggggatggatgaaggcacaggtgaagatgttgtcacaaagggttgcccacaaacccaaaccccatgggttacataagacaggaacttatttctctcacatacagttcagaggtgagtggcccgggccagcagggcttggtcatcttatggcttccaccttgaggtccaaggtcaccatttctcagccagcaggaagggggagaggggaagtggaaggtaagcagcttcc

SEQ ID NO: 533528 - DNA, 511 bp, Homo sapiens
ctctgcatcccctgcacaggagaggccttctggctcatacttacttgtctttcagttcttaggtgaaatgtcacctccccagagaagctctgaccccttctcccagtcttgttatgttcccctactggtctctctcgaagtcccctgattttccctccacrctgccgacatcatttgtaattctatgttcatttcatgtctgttcccctagactgtcagcctgttgacagcaggcatgggcccattttgtccatacagcatctaattagtgccctgcatactggggatggatgaaggcacaggtgaagatgttgtcacaaagggttgcccacaaacccaaaccccatgggttacataagacaggaacttatttctctcacatacagttcagaggtgagtggcccgggccagcagggcttggtcatcttatggcttccaccttgaggtccaaggtcaccatttctcagccagcaggaagggggagaggggaagtggaaggtaagcagcttcc

SEQ ID NO: 533529 - DNA, 440 bp, Homo sapiens
tgtcacccacaaacgatgttgttgaaaagttttgatgtgtaagtaaatacccactttctgtacctgctgtgccttgttgaggctatgtcatctgccacctttcccttgaggataaacaaggggtcctgaagacttaaatttagcggcctgacgttcctttgcacacaatcaatgctcgccagaatgttgttgacacagtaatgcccagcagaggcctttactagagcatcctttggacggcgaaggccacggcctttcaagatggaaagcagcagcttttccacttccccagagacattctggatkcatttgcattgagtctgaaagggggcttgagggacgtttgtgacttctggcgactgccttttgtgtgtggaagagacttggaaaggtctcagactgaaatgtgaccaattaaccagcttgtttgatgatggggg

SEQ ID NO: 533530 - DNA, 440 bp, Homo sapiens
tgtcacccacaaacgatgttgttgaaaagttttgatgtgtaagtaaatacccactttctgtacctgctgtgccttgttgaggctatgtcatctgccacctttcccttgaggataaacaaggggtcctgaagacttaaatttagcggcctgacgttcctttgcacacaatcaatgctcgccagaatgttgttgacacagtaatgcccagcagaggcctttactagagcatcctttggacggcgaaggccacggcctttcaagatggaaagcagcagcttttccacttccccagagacattctggatgcatttgcattgagtctgaaagggggcttgagggacgtttgtgacttctggcractgccttttgtgtgtggaagagacttggaaaggtctcagactgaaatgtgaccaattaaccagcttgtttgatgatggggg

SEQ ID NO: 533531 - DNA, 611 bp, Homo sapiens
ttgaaggggccagggcccactgattgagaaggtrtggtgacagccagatcttccgccaaaaagttaagcctacacggccctctgagctgagggtccctccccactgggggcccccttacctgtgcatttcagtagggtttcctttagctcccgtttctctttccggagctgagccaggtgcccccggatttcttccttcttcttttcaagcctctccttctcctctgtgtaccgcttcacctcagcttctgtccgattcttgccaagcttgatctctacagacccagagagggaagccccaggtaagcagagctggatcatgagggctgtccccagtctactccccaggctcggatagaacctggggctttggcacaaagccctgctaggctggatgccagacctggacaggtccctctacctctctgaacttgtttcctaatctgaaaacgatggtgtgatggttaatattgaatgtcaacttgattggattgaaggatgcaaagtattgttgctgggtgtgtctgtgagcgtgttgccaaaggagattaacatttgaatcagtggactgggagaggcagacccgctctcagtctgggtgggcaccacct

SEQ ID NO: 533532 - DNA, 654 bp, Homo sapiens
gctgcacactagttttcagagttttaaatgattacagttgcatggacatgactaagtgggtaaaatcatgctttacttacccagtccccttctgctgactgctaaacagcatttgaatgaatatcctaatgcatgtaacattctttcccactcccgcccttttttttgagactgtctcactctgttgcscaggctggagtgccagtggcacgatctcagttcattgtaaccttcgcctcctgggctcaagccatcctcccacctcagcctcccaagtagctgggactacaggtgcataccaccatgcccagctaatttttgtattttttttagagatggggttctgccatgctgcccaggctggtcttgaactcctgagctcaagtgatccacctgccttggcctcccagaatgccagaattacaggtgtgagccaccacgcctggccccttctctttttaaaaaactagtttcctaggataaaataccaggactgggattattggatcaaagagtatgggtgttttttatggctcttgaaacaggctgccagactgctttctgagaagcctgtgttaatttacgttgtcacctataacgtaagagttcagggttccatcctgggtaatactgctattttcagtcttatttaat

SEQ ID NO: 533533 - DNA, 654 bp, Homo sapiens
gctgcacactagttttcagagttttaaatgattacagttgcatggacatgactaagtgggtaaaatcatgctttacttacccagtccccttctgctgactgctaaacagcatttgaatgaatatcctaatgcatgtaacattctttcccactcccgcccttttttttgagactgtctcactctgttgcgcaggctggagtgccagtggcacgatctcagttcattgtaaccttcgcctcctgggctcaagccatcctcccacctcagcytcccaagtagctgggactacaggtgcataccaccatgcccagctaatttttgtattttttttagagatggggttctgccatgctgcccaggctggtcttgaactcctgagctcaagtgatccacctgccttggcctcccagaatgccagaattacaggtgtgagccaccacgcctggccccttctctttttaaaaaactagtttcctaggataaaataccaggactgggattattggatcaaagagtatgggtgttttttatggctcttgaaacaggctgccagactgctttctgagaagcctgtgttaatttacgttgtcacctataacgtaagagttcagggttccatcctgggtaatactgctattttcagtcttatttaat

SEQ ID NO: 533534 - DNA, 654 bp, Homo sapiens
gctgcacactagttttcagagttttaaatgattacagttgcatggacatgactaagtgggtaaaatcatgctttacttacccagtccccttctgctgactgctaaacagcatttgaatgaatatcctaatgcatgtaacattctttcccactcccgcccttttttttgagactgtctcactctgttgcgcaggctggagtgccagtggcacgatctcagttcattgtaaccttcgcctcctgggctcaagccatcctcccacctcagcctcccaagtagctgggactacaggtgcataccaccatgcccagctaatttttgtattttttttagagatggggttctgccatgctgcccaggctggtcttgaactcctgagctcaagtgatccacctrccttggcctcccagaatgccagaattacaggtgtgagccaccacgcctggccccttctctttttaaaaaactagtttcctaggataaaataccaggactgggattattggatcaaagagtatgggtgttttttatggctcttgaaacaggctgccagactgctttctgagaagcctgtgttaatttacgttgtcacctataacgtaagagttcagggttccatcctgggtaatactgctattttcagtcttatttaat

SEQ ID NO: 533535 - DNA, 581 bp, Homo sapiens
cctgaggtcaggacttttgagaccagcctggccaatatggtgaaaccccgtctctactaaaaatacaaaaaattagctgggcatggtggtgcaagcctgtagtcccagctagtcgggaggctgaggcaggagaatcgcttgagccagggaggcagaggttgcagtgatccaagatggagccactgcactccagcctgggtaacagagcaagactctgtctccaaattaaaaaaaaaaaaaaaaaaaagcaaccggagatgtcctgtttgattttacagaactactaaattatgtcctggtagacagcaacaggggcaggtgaggaggaatttgggttaaacccttgcaggaaaccaccttcatagaaacatacagtactgagaatgaacragtgaaggttttcaaagctttctgtagcttagcccaggtgtcaacaggttaaagccaacactagaaacaggtcgaaagaatgagcgtcagctccatgctatgatttgagaagtgtctaccaggtcctttggtgtttttctccatccttctgcctgtctgccccctttccagtgctccgacagccacaaggg

SEQ ID NO: 533536 - DNA, 581 bp, Homo sapiens
cctgaggtcaggacttttgagaccagcctggccaatatggtgaaaccccgtctctactaaaaatacaaaaaattagctgggcatggtggtgcaagcctgtagtcccagctagtcgggaggctgaggcaggagaatcgcttgagccagggaggcagaggttgcagtgatccaagatggagccactgcactccagcctgggtaacagagcaagactctgtctccaaattaaaaaaaaaaaaaaaaaaaagcaaccggagatgtcctgtttgattttacagaactactaaattatgtcctggtagacagcaacaggggcaggtgaggaggaatttgggttaaacccttgcaggaaaccaccttcatagaaacatacagtactgagaatgaacgagtgaaggttttcaaagytttctgtagcttagcccaggtgtcaacaggttaaagccaacactagaaacaggtcgaaagaatgagcgtcagctccatgctatgatttgagaagtgtctaccaggtcctttggtgtttttctccatccttctgcctgtctgccccctttccagtgctccgacagccacaaggg

SEQ ID NO: 533537 - DNA, 498 bp, Homo sapiens
ctacaaccttagcagcttaaaacctacacaaggtgacagagtgcaaatggcaattataatayagcaaggcacccaaggaaacagaaggaaacgtgcaattctggaagaagaggtagaaggagtgccagaaaatatgttgcaatggcctccatggaacacattcaagaattatatgaaagtgtatttcattcaaaaataaatagtgagtagctataacgtgcaagatactgttgtcggcattaaaaacagacaaaaatcgaagcctgcattgaactcactttcaaggagacagaaacggacaaaaaactaataattacatagaatgaaaaccatgttgtatgataggaagcactgtgaagggaaaaaagtagggaaaggtgtagagtatggaaagagggcagggacaattgaaattacaaatagcttaatagcttaagcaggggatcctcactgagacagagacatttaagaaaagacctgaaggagtggaggaagcca

SEQ ID NO: 533538 - DNA, 468 bp, Homo sapiens
gggaatgggctaactggctaaactactatcttgtccatcctgccttcacttcagtccttccacattgttatttggtgtttgractgtgctagaagaactgttttatacaggctgctattcaataaatttgtaaataccatacccacaccaaaggatttaacactgaaaagattaaggtaattttggaaaattctaaaagtcacttttcactcctgagatgtaggtggtcagaagaaatgaggaacactgtagaagccatatgcaagatgcacagatggcattgtgtttgttgtggactgttgatgttaacaggatggaagaagtcaaaactgaactttataaaatagggtataagaaaataaagatgtccctgtacttacaggtgctaagaaactagacttgaagaacttgtctctctcagaaattgagaaattgttagcaatggttgaactaagctcatcaactcct

SEQ ID NO: 533539 - DNA, 468 bp, Homo sapiens
gggaatgggctaactggctaaactactatcttgtccatcctgccttcacttcagtccttccacattgttatttggtgtttgaactgtgctagaagaactgttttatacaggctgctattcaataaatttgtaaataccatacccacaccaaaggatttaacactgaaaagattaaggtaattttggaaaattctaaaagtcacttttcactcctgagatgtaggtggtcagaagaaatgaggaacwctgtagaagccatatgcaagatgcacagatggcattgtgtttgttgtggactgttgatgttaacaggatggaagaagtcaaaactgaactttataaaatagggtataagaaaataaagatgtccctgtacttacaggtgctaagaaactagacttgaagaacttgtctctctcagaaattgagaaattgttagcaatggttgaactaagctcatcaactcct

SEQ ID NO: 533540 - DNA, 640 bp, Homo sapiens
tgcagcggggagtggtggtgctggccaagagcttctctcaggagagaatcaaagagaacttccaggtaaaggttgagcagagtcgctccagagtgagccatgggtgctgatctgggcgatctctcttacatgggagaatgcgacacgtgtcattcattcctgtgctctccactctgtgctaagggaggagggcagtgtggaaggatctacgagagggcactgaactcagagtcctcaggtttatcatctctaggcttgrctttgccacttactagttggttgacactaagcaaatttcaactcacttattttcatccgtttcaggagttcttctacatggtaatgaactttaaggaccctgattcttctccttcaccttctctacctataaatgcctatttgtattttaaaatcaaacccaaataaaattagctgctctgttaaactactgggacaccccaggccagttttcaccacaaaagcccctggcctggcatgactctgttagtgagttttttgtttattaattttacatcatttgctaatacttcagtgtgctctctggactgtgagaacctaaatacaatggctccttctggattatcttttattacccttcccctggcagtgactctagcag

SEQ ID NO: 533541 - DNA, 640 bp, Homo sapiens
tgcagcggggagtggtggtgctggccaagagcttctctcaggagagaatcaaagagaacttccaggtaaaggttgagcagagtcgctccagagtgagccatgggtgctgatctgggcgatctctcttacatgggagaatgcgacacgtgtcattcattcctgtgctctccactctgtgctaagggaggagggcagtgtggaaggatctacgagagggcactgaactcagagtcctcaggtttatcatctctaggcttggctttgccacttactagttggttgacactaagcaaatttcaactcacttattttcatccgtttcaggagttcttctacatggtaatgaactttaaggaccctgattcttctccttcaccttctctacctataaatgcctatttgtattttaaaatcaaacccaaataaaattagctgctctgttaaactactgggacaccccagsccagttttcaccacaaaagcccctggcctggcatgactctgttagtgagttttttgtttattaattttacatcatttgctaatacttcagtgtgctctctggactgtgagaacctaaatacaatggctccttctggattatcttttattacccttcccctggcagtgactctagcag

SEQ ID NO: 533542 - DNA, 548 bp, Homo sapiens
cattttgtacctatacaagagtggtcagaatgtgtgaaaactgctgagtcatcctgacagcatggctccagtagattctaggggtcggctatagtattgagtgatattaaaataacaaataatgcacaaaaggcatggatctaaaaaagtctttaggaatcttcactcactgagagctcatattcaggacacagtttcttcttcaaatcaccttggacaagtaagtaaccstttttgttcccttttctgtaaaataagttacaagttaaatctactttgtagggtatttgagaggattccctgatagtcttgcctgatacagaatagaaactcaaaatcttagctagtagcgttggtgtcattgctattatcagcactataatttcccttgagttagccagaagaaatactaagtttattggacagtgagtacagggttgccttgctcagatgtactgagcctactgtcaactttaagccgctctctgtgaggttagagtttatcttggtctgggaggaccaagcagagtgctttagagatgacaagc

SEQ ID NO: 533543 - DNA, 548 bp, Homo sapiens
cattttgtacctatacaagagtggtcagaatgtgtgaaaactgctgagtcatcctgacagcatggctccagtagattctaggggtcggctatagtattgagtgatattaaaataacaaataatgcacaaaaggcatggatctaaaaaagtctttaggaatcttcactcactgagagctcatattcaggacacagtttcttcttcaaatcaccttggacaagtaagtaaccctttttgttcccttttctgtaaaataagttacaagttaaatctactttrtagggtatttgagaggattccctgatagtcttgcctgatacagaatagaaactcaaaatcttagctagtagcgttggtgtcattgctattatcagcactataatttcccttgagttagccagaagaaatactaagtttattggacagtgagtacagggttgccttgctcagatgtactgagcctactgtcaactttaagccgctctctgtgaggttagagtttatcttggtctgggaggaccaagcagagtgctttagagatgacaagc

SEQ ID NO: 533544 - DNA, 603 bp, Homo sapiens
tttagtcttaaaacacacatccagcctgggccacagacgttgtctctacaaataataaaataattagtcgggcgaggtggcatgcgcctgtggttccagctaatagggaggctgagktggaaggatcacctgaatccaggtggctgagactacgtaagctatgatggcaccactgcactccagcctggacgactccttctcataaaaccaaaccaatccacacacacacacagagaagagaaacagagtttacttttgaatatcgttgagagaatatactgaattgcctggcgtgatgcgaatgaagcaacatagttctgttcctataacaaggacattggaaacaaaattttcaccagttgtagcatttccaattagtctagttgggagtcaccaggattagatcaaagtataaatccaaagactgtcagaaaatattctgaattcaggagagaagggaaatcatgatagaacaggaagtctgatctgtgtacaatcagaagatatcataatccaaattttacatcaagttaggggtacatgcagggtttaactctggagaaacttcacacagaagtctgaagacaccaagaagtgtcttgg

SEQ ID NO: 533545 - DNA, 530 bp, Homo sapiens
agcctcctttctgggtagaaatgtgccagccggaaatcagaactccattagcatggaaatgagatgtcctggattgaattgtgtcccctaacaagatatgttgaagttctaattcccagtacctcagaatgtggcattatttggaaacagggatattgcakatataattagtcaagatgacatcatactggagtaaggtgagtcccttatctaatatgactggtgtccttataaagaaacagaaaaggccaggtgcgatagttcacacctgtaatcccagcactttggggggctgagataggtggggattgcctgatctcaggagttggagaccagcctgggcaatatgacaaaaccctatctctgcaaaaaataccaaaattaagcgagtgtggtggcatctgcctgcagtcccagctacttgggactgaagtaggagtcctgaagtcagaggattgtttgagcccagaaggtggaagctgcagtgagttggttttgcactactgcactccagactgggtgacaaagtg

SEQ ID NO: 533546 - DNA, 634 bp, Homo sapiens
tgagaccagaaggaatcagtgagtatgtgcttctgagccctgctattgccatcttaatgcacgaatggggtcacagcctgggctgaagcttctttcttcaaaacaaaagcctggatttccaataaaggttgaaaaatacaagacttacgtgtttttataaaaaaaatttactaacttttaaactcttgtaatttttcattggaagactraaagtaatttggaagaagaattaaaactgttaatatatattcatgagcagttagtttactcctatttagctgagcctcttaaacatgtttattaaacaatgacttaactgtaaaatccaccaggaatgctgtcaacattaaacagccagtgtttcaggaaagatgtttttagtcacatcataattaccaccaatctcactaaatatatagtcatatgcattttgataacattgttattttcctaagaaattaaaaatgggaatataaagtcagagagaatatttttacttgatcctaaaatataagttatctactatgaagccgatgcctaaaatagctatgtctatgcacttaatactcaattactacgtgctgccttggtgactgaccatagctcttggaataaatcttacgcatttcttgaa

SEQ ID NO: 533547 - DNA, 367 bp, Homo sapiens
tggctataaggtcaacagtgaagcagagatcaactagggattacaggcaactttcagtgaaatccctagaaccagaataagctacagcgactcagaattaacaaagaaaaaatctccaggtgcttaagaatccaggaaaaatgttcactacctaaggagtgagattagtttagtcatcaaaaatgcaacagcatttttgtctttgcattcttaaatttgagctttacatttgtaattccactatatggtgaatyataatatataaaaacattttagaaataatgcttaagtcttttaaatatatgaatatatggggattattcctaaagttcttggaactttagttgctgagatctagaaagaaaat

SEQ ID NO: 533548 - DNA, 468 bp, Homo sapiens
gaagtgaaaaccaaggagagaagggggtcttgcattagcaagtggggatctgagtttgagatagaggagaaggagcaggtcaagaggataatggggttgaatttgcagtgctagtggagggctcaagaggttggaggatggagtttattataacgggagctcagagaataatcatctctaatttattattgacrctgtgctcaacattcaacatccatgttcttcctcaaaagctccctgctggatagtgtaagtgccactaccatagaaagattctacttcatcatgcctggtctactacagcctcttagctggtgctcctgactcaaattactctgtttgtggtcagttccttattccactacaaggctcatcttcttaaaacatcacgtttaataggttactgtgaagatctaaaagcttcactgagtacccattgcctacagtataaaggatgtgcccctccat

SEQ ID NO: 533549 - DNA, 531 bp, Homo sapiens
tgaatttagggtggcttgtctgtgtgccatttattttatagtacctaatttccatcaattaaccatttcatgccttagttgagtcccttataaagtcctgtattaagcctggaggggataggcaaactaagtcattataactgcctgcagtggctagtagtaattrgggagaggagagataaaaatggatgggggccaaatagggtattaatgcaaacattgtacttttctacttatgtatttttgtgattttttttttttacttctgatctattcacacagtgtactccataaggtaaattttgtatttctaggattatatttataatataaaaatgcagatagaattattttaataaagtttttgttttgttttgttttatggtcttgcataaaaggaaaatatttcaaaattattttggaatcacaagatatgtgttcttttctagtccttcagaagttccaaaatttcagttttcattgtagaatgaataagcaagaaccctgggcactagttctctccttggttac

SEQ ID NO: 533550 - DNA, 531 bp, Homo sapiens
tgaatttagggtggcttgtctgtgtgccatttattttatagtacctaatttccatcaattaaccatttcatgccttagttgagtcccttataaagtcctgtattaagcctggaggggataggcaaactaagtcattataactgcctgcagtggctagtagtaattggggagaggagagataaaaatggatgggggccaaatagggtattaatgcaaacattgtacttttctacttatgtatttttgtgattttttttttttacttctgatctattcacacartgtactccataaggtaaattttgtatttctaggattatatttataatataaaaatgcagatagaattattttaataaagtttttgttttgttttgttttatggtcttgcataaaaggaaaatatttcaaaattattttggaatcacaagatatgtgttcttttctagtccttcagaagttccaaaatttcagttttcattgtagaatgaataagcaagaaccctgggcactagttctctccttggttac

SEQ ID NO: 533551 - DNA, 575 bp, Homo sapiens
tatttttttaattaaaaccatggttagaactcagctgatatgartgtaaagtcaatggctataaaattattttttaaattgttacacatggacttactcctaagtaaatgcatttccccatgagaagaattatttctgtctttactttagtgtctagaatactgcaattttgtgtaaatatgaaattgggtcttgctcatcttcatacaactttcttaggtgctcatggcatccgagagccagtagtgttttaaacagagtccttacaatctggaaatttgagttctaagtttggattatttacatcttcaattgtgttttcactaagtcccttcactcttcgggaattatagtttcctacatgtaaaaagatatctcttatgattaaatcatgaggtatcctgggcagatgatgacttcagtgatgttgtgcccccgaaaaagagtgtggctcagagcgggacatgttttcctttcctttgaatgcatattaccttggtcatctccactgcctcctacaaggcagataagcaacagatgtgaccattacaaacactcgtcagatgaagcagtga

SEQ ID NO: 533552 - DNA, 575 bp, Homo sapiens
tatttttttaattaaaaccatggttagaactcagctgatatgagtgtaaagtcaatggctataaaattattttttaaattgttacacatggacttactcctaagtaaatgcatttccccatgagaagaattatttctgtctttactttagtgtctagaatactgcaattttgtgtaaatatgaaattgggtcttgctcatcttcatacaactttcttaggtgctcatggcatcmgagagccagtagtgttttaaacagagtccttacaatctggaaatttgagttctaagtttggattatttacatcttcaattgtgttttcactaagtcccttcactcttcgggaattatagtttcctacatgtaaaaagatatctcttatgattaaatcatgaggtatcctgggcagatgatgacttcagtgatgttgtgcccccgaaaaagagtgtggctcagagcgggacatgttttcctttcctttgaatgcatattaccttggtcatctccactgcctcctacaaggcagataagcaacagatgtgaccattacaaacactcgtcagatgaagcagtga

SEQ ID NO: 533553 - DNA, 567 bp, Homo sapiens
cagaaacttagtgaatggtgactatataccatatttatggctgtgtaacaagatatccagagacagagctgtttaaaacaagaaatactgattatctcgcagtttttgtgggtcaagaaccaggttagagcttaactgagtgtctccagctcaagttctcctagtaagttgcagccagttgtcaaccgggaatgcagtgtcatctgaagaaatgactggggagggacctgcttccaagctcactcacatggctgtgggtgggcrttggtcccttaccccaaggacctttgtacagtactgcctcaaaacatggcatttgttttgtcccaggacaaacaatgagagagagagagaacaccaaagatggaagataaggtttttataacctaatctcaaaagtgacacttctaccctactgtattctttaacaaagggtcaataagtccagcccacattcaaggggagagaatttcataagggagtgaataccaggaggcagagatccttggaggccatcttagaggctgcctaaacagtgacacacatctttagtcctagagatgtact

SEQ ID NO: 533554 - DNA, 666 bp, Homo sapiens
agataaaccttatttctcaaggcagggcaatcatgatcaggaacaataataattctctgtagccaacctgtggggtcttcatagaggatgtagatgtacagaaacttagtgaatggtgactatataccatatttatggctgtgtaacaagatatccagagacagagctgtttaaaacaagaaatactgattatctcgcagtttttgtgggtcaagaaccaggttagagcttaactgagtgtctccagctcaagttctcctagtaagttgcagccagttgtcaaccgggaatgcagtgtcatctgaagaaatgactggggagggacctgcttccaagctcactcacatggctgtgggtgggcattggtcccttaccccaaggacctttgtacagtactgcctcaaaacatggcatttgttttrtcccaggacaaacaatgagagagagagagaacaccaaagatggaagataaggtttttataacctaatctcaaaagtgacacttctaccctactgtattctttaacaaagggtcaataagtccagcccacattcaaggggagagaatttcataagggagtgaataccaggaggcagagatccttggaggccatcttagaggctgcctaaacagtgacacacatctttagtcctagagatgtactt

SEQ ID NO: 533555 - DNA, 618 bp, Homo sapiens
gttgaagctgatgtagtgccacatagatcttcattatactgttttgtctacttttctataagattgaaatttttcatrataagaaagctacaaaaagaagaattccattgtaaagggagggtttagctatgaagtagcattggctggagcataagaatatcaatggtgtttttgtgtctgtgccctccttcctccctgcagtgtccttgagttataggtagtattatactctttaggagccagagaatgcagaagtttgaattctattacttccatgtccttatttcagtcttggaggtcaggaggaatacttggcaactcttccagcagaggttttgacaagctcataatagctaagaacctttcttgttcatttcccggcattctgtttttgcggaggtgccttgcccttgtgctgcgggccaagttgttccctgcccttgttgttgcatttacagacaaagcgatctatgcttggaccacaaaagtccttatagaggaccttttgttggggtagcgcagtatctgtacccagtatggaagcttcagaagctaaatagtcaccctctcaaggcatggtagtgctgtcttcagttaggtagataataataaggtaga

SEQ ID NO: 533556 - DNA, 618 bp, Homo sapiens
gttgaagctgatgtagtgccacatagatcttcattatactgttttgtctacttttctataagattgaaatttttcatgataagaaagctacaaaaagaagaattccattgtaaagggagggtttagctatgaagtagcattggctggagcataagaatatcaatggtgtttttgtgtctgtgccctccttcctccctgcagtgtccttgagttataggtagtattatactctttaggagccagagaatgcagaagtttgaattctattacttccatgtccttatttcagtcttggaggtcaggaggaatacttggcaactcttccagcagaggttttgacaagctcataatagctaagaacctytcttgttcatttcccggcattctgtttttgcggaggtgccttgcccttgtgctgcgggccaagttgttccctgcccttgttgttgcatttacagacaaagcgatctatgcttggaccacaaaagtccttatagaggaccttttgttggggtagcgcagtatctgtacccagtatggaagcttcagaagctaaatagtcaccctctcaaggcatggtagtgctgtcttcagttaggtagataataataaggtaga

SEQ ID NO: 533557 - DNA, 666 bp, Homo sapiens
gaagtgaataatcaggattactactgagagaagcaaaagtcatagccaagaaaccgatgcagaagggcagacacgagtgaaaaagaagttacaaacgaagctagttagtagctaggaggatcagaaacagatctgagagatggtacaagttgagaaagtggctgtgacagcagacaggaataaagttcctatttttcctccagctttattgaggtataactgaggaataaaaattgtactatatacagtatttaagatgtacaacatgatttttggatgtatgtatacattgtgaaatgttcaccacaatcaagctaattatatccatcacctcacatagttaccttttttctgtgtgtgtgtgtgtgtgtgtgtgtgtgtttgtgtgtgtgtgtgtggtkagaatacttaagatctacttccttcgcaaatttcaagtacaggttaccactaactatcatcaccatgctgtatgttaggtctccagaacttactcattttataactgaaagtttgtaccctctagctatcatctctccattcccccaacaagttcctattttatatggagccttttgcccaatacagtggcaaaaccgagagcttaaagaaagtatctaggactaggcaatgtttattgtttgcagtttgtttcgtctgtatgga

SEQ ID NO: 533558 - DNA, 525 bp, Homo sapiens
cttcaggtggagagccagaacagggagaagtgtagcactaagaggcccccaggtttcccaccacagccagatgggctatctcagaaaatcgactatttttttttttttttcgagacagagtctcactctgttgcccaagctggagtacagtggcgcgatctcggttcaccacaacctccacctaccaggttcaagcgattctcctgcctcagcctcctaagtagctgggactacaggcactcgccaccatgcccggctaatttttgtatttttagtagagacgggttttcactatgttggccagcctggtctagacctcttgacctcatgatccgcccaccttggcctcccaaagtgctgggattacagacataagccaccatgcccagccagaaaattgacttttaaataacatttattgaagttacttttatcattatgagcaaattatggccaatgcaaaaatcttggtaaattttgtaacattcamaaatggttatggttatgatatgggagtgggagaag

SEQ ID NO: 533559 - DNA, 628 bp, Homo sapiens
gctgcctggcccaagccctggtccttggtagagttggtggtaatgagytaattcactcctgagccacagggccttccacacatttccccaaccccaaacctttctctgtcaagccagagaaagactgagctttcaaactactgggtgaaggttggtttataggcccacgagtaaataaagtttgaggactagttaggagtgctccataattttaggagggagagttaagttcagtcttctcacacatggtttttaatttgctttgcgaggaggggttattggtatcaattagagtttataaacccataaggtaaagctgcatgattcactcatcaaattgctgtgaatctgctgggggagccctgagtcagggtggtttccagaagaccctttttaaagcattgcaattctttaaaatataccaaaattttagctacagaagggtttttggaacagaaaaaaaatgaccttctttgttaacattagaaatgggatagaaagtacccacttttctatagttcttggaattgccccttcttctaggaaattagatgataaagagtcaaaagtggaccgtttctctttatgagacaaggtcacgttaagtctctgaaacaatgtcatgtat

SEQ ID NO: 533560 - DNA, 570 bp, Homo sapiens
ctgtttctaaaaccactttcctcaaagaaatttaggacaaggatttaagatcctaggacatgctgtaatgatcaatctcagcaagccctaaaagggactgacatttgctaccctcagaaggtgtctccacagtgagcacagaacgtggcttatggaattgcatggaaaatgtgtgcagagtgaatgtaagtggcagggagggggctacagactcttccccacactgaagctggctgcttgagccatctcccccttatatgacctttgatacaactttagccaaattctgtgtccataaggaaacacaataaaaacataaactcccgtgcatcactttacctacctgtccccatcccctaagcatatgaggccaacttactgcagacatcattccctctgaaggcacattgtgagccacagaactgtgcctgactctccctagggtttctctctagtgacttcgagggctgaccagccttgtgtctcagagtcctgccatttaatttctctccagttgtgctacagaattatataattaaatgaaartcaacagggcaaggagagagagaa

SEQ ID NO: 533561 - DNA, 570 bp, Homo sapiens
agccttaatagcaaaactaaggtttctctgaggaagaagaaattctgtctattgaccacaggggcagtttctgccccagaatgtttagtctgctcctcctgatggcttaccctacaaatttcagactttcccagtcaacctccacaattatgtaagcagactcacatatatatacacttcattcaaaaatacatttaaaaggagacaagaagggggatgcttgaggctgacacactgacaagtaaagttagcaggaagagagaagccagwatcaccaaatcatcataaaaaggttaacttttgttcagtgtagtaaagacataaatatggaatatagtggttaaaggagcaagtttaaattatcgggaaaattagcactctaatttccaaatatattgtaattctaaagatttgtaagtttgctttcaaaattctatttgtgttcacttgcaaaactatgccttaaatgaaggtccaagttagaaacttagggaatcattccagactttataagctatcttattctttattctaagaaaaaggatatgtatgtcattgaagaatttcatg

SEQ ID NO: 533562 - DNA, 541 bp, Homo sapiens
aaggggctacttttggtaactgtcttctgagatttttcaatctatcttagaatgaaagaggaaagaaagagaacaaagacatacatttagaaaaagtaatcattaccattaatatttctactgattactcttataattaaagtcagaggtcatccttttccaaatgtttttattcccatgtttttctctggatgctttcacagcccattagggtagaggaattagggtattaccattttcccacaagacaccaagcagagttctgttggaagtgccaagatcaaaatgtactgtggtcagtcatgcctcagtacctttgttctttcattcattcaacaaatatttactaagtgaatattgtgtgcagaccacagttctgacattctagttgggaagtggggtgggtcaggagacagaaaataaacaaatagcaatataaatatataatgtcagatggtaaraatgctataaagaagaagaggcaggttaagggaaacatagcatgatggtgaagaagtcccattttattcaggggtgatcc

SEQ ID NO: 533563 - DNA, 330 bp, Homo sapiens
gtgagacataacagcattcaaaacccactctatacttggagatgtgccgtagaccaaagtgtgccggccatgctgggtggagaaggtggtgaagggtgaagagctcttacctcccactgccctctctacccggcacagcccccagagcacagattccagaaggatttcggtgttgggccagggactgcaagtgtgacagagcctctggtggtcctgctaggtaaaagcatgaaracatttctgtgaggtcagaagacactggagactgcagaagggaacttttctgtctttttgccatgaaaaagcactagtataagcagaaaatagaca

SEQ ID NO: 533564 - DNA, 664 bp, Homo sapiens
cagagatgctctccataccacaccactaccaccagggaaaaggygtggggtggtggtggtgattcaggagtgtttttttgaactgttcagtgcttctttcagcaaaatgaagataaaaccagtttctatgagagcttgccttatttttggttcttatgaaggcgttttttctgtgtagacagttgttaaattagtgttcctgttgggggataaattgtggaggttttgattccgccatcttcccctgccttcccacctgcagcacactattactaacccatgtttctggtcaattagacaagagaattaaagatagaaggaaagtgacttcaaagaaagagattgaaattttatttgaatatttgaacaattgtctgaagataactggcttaagactcattgggtataaaaagaacattctaccaatatcaaagtggatctagagaatgtaatttatcatatggatctttacttctataaatacaaagttgcttcacaagtttaataagacaatctcgctttcagaatctttggcacaaaacttgactgaagaatgtgagaatcttatctagatcaaaaattataaagaaaatgtaaattttttatttagttgaagcaaaaatggtatttttgtgatagtctattgattaaaagactccagtcc

SEQ ID NO: 533565 - DNA, 664 bp, Homo sapiens
cagagatgctctccataccacaccactaccaccagggaaaaggcgtggggtggtrgtggtgattcaggagtgtttttttgaactgttcagtgcttctttcagcaaaatgaagataaaaccagtttctatgagagcttgccttatttttggttcttatgaaggcgttttttctgtgtagacagttgttaaattagtgttcctgttgggggataaattgtggaggttttgattccgccatcttcccctgccttcccacctgcagcacactattactaacccatgtttctggtcaattagacaagagaattaaagatagaaggaaagtgacttcaaagaaagagattgaaattttatttgaatatttgaacaattgtctgaagataactggcttaagactcattgggtataaaaagaacattctaccaatatcaaagtggatctagagaatgtaatttatcatatggatctttacttctataaatacaaagttgcttcacaagtttaataagacaatctcgctttcagaatctttggcacaaaacttgactgaagaatgtgagaatcttatctagatcaaaaattataaagaaaatgtaaattttttatttagttgaagcaaaaatggtatttttgtgatagtctattgattaaaagactccagtcc

SEQ ID NO: 533566 - DNA, 634 bp, Homo sapiens
gcttttaaaacaaagatagtttatttctgaaaaaaactgaaaagagaactagaaaaagaagataaatcacaatgcacagtgcaatgaaacttcgtttttaaaaaatagccttattaacatataattgactatacccacttaaaatacacaatttgatgaactttgatcaatgtattcaccagtgaaaccatcaccacaatcaaggtaatgaacacacctatcacctgcaaaagttttcatgtgcttctctgtaatcccttcccttcctactcaaactcatgcctcttgtcacaaggtttctccactctggctgttgggaacgaactattgcctggccaatgcaagctcagaagtttttctgccagcttttttctagtggttgcctctctgtcttgggaagtttcctcacatgcatgtacctggtcraacttctgctgaagactcagaggaaccctgcacagatctccagagctccctccttccgttgcactctctcctctctggtactctagccaccctggcctccctgaattctcagctctattttccaactcagagtctcttttggttcgcctgtctgcattgcggcttggaaaccctctccaggcagtaagctggagcaagcagcatgttc

SEQ ID NO: 533567 - DNA, 634 bp, Homo sapiens
gcttttaaaacaaagatagtttatttctgaaaaaaactgaaaagagaactagaaaaagaagataaatcacaatgcacagtgcaatgaaacttcgtttttaaaaaatagccttattaacatataattgactatacccacttaaaatacacaatttgatgaactttgatcaatgtattcaccagtgaaaccatcaccacaatcaaggtaatgaacacacctatcacctgcaaaagttttcatgtgcttctctgtaatcccttcccttcctactcaaactcatgcctcttgtcacaaggtttctccactctggctgttgggaacgaactattgcctggccaatgcaagctcagaagtttttctgccagcttttttctagtggttgcctctctgtcttgggaagtttcctcacatgcatgtacctggtcgaacttctgctgaagactcagaggaaccctgcacagatctccagagctccctccttccgttgcactctctcctctctggtactctagccaccctggcctccctgaattctcagctctattttccaactcagagtctcttttggttcgcctgtctgcattgcrgcttggaaaccctctccaggcagtaagctggagcaagcagcatgttc

SEQ ID NO: 533568 - DNA, 690 bp, Homo sapiens
ggtgtggttggttgctaaagcctgctgggcccagacatgaaccctgccctagctgggcagcggcgcgggagcaaagttgttctgaggctgccctccccggggcctgctctcccagccctggaggagccggcgcgagacgcgcgggggcggggccgcgcgggggggcgggrctcaccaaggctccaccccgccgcggccactgttcgcacacacctggtgctgatcaacgccgaggccgactcgtcgccacccagcgcgccgcaggccggggcggagaggcgcagggcgctgggcagtctccggcgagggcaaggagcggtgcccggctgggccggctatgtctcccgctactgcggttcccgccggcgcccgcgacctcgggggagcagccgggttcgggggcgccgcgctgtgaggccggggcctagagccagccgcggccgcgcaggaggggcccagggcccgcgctcgcccgcgtccccgccttcctcccgcgctcagccccgcctcggctcgctgcccttggctctcgtcgccatggcctccgtcgcccaggagagcgcgggctcgcagcgccggctaccgccgcgtcacggggcgctgcgcgggctgctactgctctgcctgtggctgccaagcggccgtgcggccttgccgcccgcggcgccgctgtccgaactgcacgcgcag

SEQ ID NO: 533569 - DNA, 690 bp, Homo sapiens
ggtgtggttggttgctaaagcctgctgggcccagacatgaaccctgccctagctgggcagcggcgcgggagcaaagttgttctgaggctgccctccccggggcctgctctcccagccctggaggagccggcgcgagacgcgcgggggcggggccgcgcgggggggcggggctcaccaaggctccwccccgccgcggccactgttcgcacacacctggtgctgatcaacgccgaggccgactcgtcgccacccagcgcgccgcaggccggggcggagaggcgcagggcgctgggcagtctccggcgagggcaaggagcggtgcccggctgggccggctatgtctcccgctactgcggttcccgccggcgcccgcgacctcgggggagcagccgggttcgggggcgccgcgctgtgaggccggggcctagagccagccgcggccgcgcaggaggggcccagggcccgcgctcgcccgcgtccccgccttcctcccgcgctcagccccgcctcggctcgctgcccttggctctcgtcgccatggcctccgtcgcccaggagagcgcgggctcgcagcgccggctaccgccgcgtcacggggcgctgcgcgggctgctactgctctgcctgtggctgccaagcggccgtgcggccttgccgcccgcggcgccgctgtccgaactgcacgcgcag

SEQ ID NO: 533570 - DNA, 627 bp, Homo sapiens
ttttctatacacccttccaggtgtgacacctgtggaaaatgtcatacttgtggcatggtgggagaacacaagctttagagtcagatgccacaattcaaatccttgctcaaagctgggcacagtggctcacgcctgtaatcccagcactttgggaggccaaggcaggaggatcgcttgagctcaggagttcaagaccggcctgggcaatatggcaaaatcctgtctctacaaaaaatacaaaaattagccaagtgtggtgacattcgcctgtagtcccagggaggctgaggtgggaggatcacttgagcctgggaggtcgaggctgcagtgagataagattgtgccactgcactccagcctgggtgacagagtgagaccgtctcaaaaaaaaaaaaaaaaaattctcacttacccactaaactgtatgaccttgagcaggctatcttatctctctggatctcagtttcctcattcgtaagatgaggatagtaacaatacctgcctcatagggttgctgagaagaatatatgggataattaatctcaagcattgaatgcactgtgtggctcatatsatgagccaaatatagaaacgatggcagttattactcagttatttacgatgaaa

SEQ ID NO: 533571 - DNA, 540 bp, Homo sapiens
ttcagtctatgctttagggaagaagccactataccttgttagggtggggatagggtaaaaaaatctaactcgtagattaaaatctgctaaacatacttctgtctcttggtagaaatgtgtaaagtccttgaaaagtgaaacaaaatattttctacatttgtactctactccatgcgtagcaaagtatgaaggrcattttaataatgaaagttgtcagttatgtagatgattattgctgttgcatgaaaacagtattcaagtgagtgcatgactacatataggatattaaggtcccaacaagcatctgttttcaaattaatgtagcagaatagaagtttcaaggtcagtgctttcaacccagctatagaacatgctatgtgagagtcaccaggttgaaatccagttgttgttggggcttggtagtctgcatgcttagagtcagggacaaatacacacatacacattagccaagtgagaaaatcttatatcactttttctgtgtacatacttaccagctttgtacttcaaatttagtaaaat

SEQ ID NO: 533572 - DNA, 559 bp, Homo sapiens
ataattatcccagaatctgtgctcagtataagagggagttgtcttttggaagcatcccagaacctttgacttgcaatttataacatttacttagtgacacaaaagaaaacaaacaaaaggacatttttgaataaccccagaaactttccccattaatatctaattttagattatatcagttcctgctattggaggtcttggaggctgccagttcacatagtgttttcaaatttacagcacaaggcaatgagaacatatgggaccaaagttctgtttttcatattctccattttaacctttccctttgaaatttaatcaacatgaaaggaaataaacactttttgtcttccttgtacaatgggagtgatatcctcctccatttccccagtgatagtcaggttccagatagctgcctttaatggcaaagtttaaatcacattgactcctatgagcaatttggcaagtatttttaccaagcacaggacaactgmtagagccaaatggctaaatatttctctaaggctaatcatagaattcacaattcaactttggagtaaaa

SEQ ID NO: 533573 - DNA, 585 bp, Homo sapiens
agaaggtcattcaaattctagtctcattttaaatacatattttttccaagttggaagaggataatcaaattggccagatttttagagcatccttctgaaaagattaatcttaaaaacctatcagaaaacataaataagaaatctgaaggaaaagaagtttcaggtacaattacactttttgaagtcacgagaagtttgggttttctgacgttttctaagtaaaagacatgaactaggcaactagaaatccatagcatcctatggaatttagagacttgtggayatgtgaggtttaagggttaaaaagcaaatttctttaaccatttggttaaaacttacaaatatgttaaaagaagcatcacagactaaactattatatcagataataattacctttttagagagcccaaaaataatagttacttactagatgagagtgcatcaactacaaagacatttatagccacacttctaaacaaaaagcattctgctcaccaacttctagaagagcttgctttcggagatgtaggacctcaagactggctccagagtcttgcaggagcagatgcagaaagtaaacaggat

SEQ ID NO: 533574 - DNA, 585 bp, Homo sapiens
agaaggtcattcaaattctagtctcattttaaatacatattttttccaagttggaagaggataatcaaattggccagatttttagagcatccttctgaaaagattaatcttaaaaacctatcagaaaacataaataagaaatctgaaggaaaagaagtttcaggtacaattacactttttgaagtcacgagaagtttgggttttctgacgttttctaagtaaaagacatgaactaggcaactagaaatccatagcatcctatggaatttagagacttgtggacatgtgaggtttaagggttaaaaagcaaatttctttaaccatttggttaaaacttacaaatatgttaaaagaagcatcacagactaaactattatatcagataataattacctttytagagagcccaaaaataatagttacttactagatgagagtgcatcaactacaaagacatttatagccacacttctaaacaaaaagcattctgctcaccaacttctagaagagcttgctttcggagatgtaggacctcaagactggctccagagtcttgcaggagcagatgcagaaagtaaacaggat

SEQ ID NO: 533575 - DNA, 640 bp, Homo sapiens
acttttagggtgccaaagcattaaatttaagtcatacataaaagtcaaatttttgttttgtttttattctttctcttttttgatttaatattaaatttgatattaagtttgacttaataagaaagaaaacaaaattcatrtatattcatactttcatattattattggttgaactgagtcccttacaatattatatattgaagtccttacacctagaaactcagaatataaccttatttggaagtagttactgatgtaattccttaagatgaagtcatcctggagtaaatcgaccctaatctacataaatggagtttttattttttaaaaaaggagtactttggacatagacactccataggaagaatgctatatgaagatgaagctcaatctacaagatcaccagtgacccaccagaaggtaggcaagaggcatggagcaaattcttccttacagccttcagaaggaaccattctggctgacaccttaaccttggatttctagccaccagaactgtgagacaatatgtttctctttttgtaagccactcaatctgttgtactttgttatggcagtcataagaaacgaatatacacatgcaccagaggcaatgtcacctataaaattaacccattctttc

SEQ ID NO: 533576 - DNA, 581 bp, Homo sapiens
ctgactcggacactggccttgggaacaatgttcgagagaacacttgccccttgactgtaggagccagaaggggacccaggtgtgcatagctctctgtagacatttttacccaaacctgttggtaaagtgcccatctggtgctcaagagagcctgggggtctaacagggagcccggctgcctcacctggccacagcctccacaccagatctccacattgtcttgatccagaccagctctgtgatcagaaggaaattgggtccagtgtaggagmgagctggtcctgggcctggcaggcaagagtgtgggcatcctttcctggcctttctccactctccctcaagcctgtgctcaggttgccttgaatgtggactctggaagagccaggggcccagaatgccgggggaggcttctgagtggcactcatggaacaccgtccctctgccagccataggccctgcctccagtgtcagggaatggaggctgggctgcgagagtgttgctgccccctgtgtcattcttctaatccaatgtagaaattgtacgtaatgtatttaaatcaacgcaaatgtatgaataacaa

SEQ ID NO: 533577 - DNA, 581 bp, Homo sapiens
ctgactcggacactggccttgggaacaatgttcgagagaacacttgccccttgactgtaggagccagaaggggacccaggtgtgcatagctctctgtagacatttttacccaaacctgttggtaaagtgcccatctggtgctcaagagagcctgggggtctaacagggagcccggctgcctcacctggccacagcctccacaccagatctccacattgtcttgatccagaccagctctgtgatcagaaggaaattgggtccagtgtaggagagagctggtcctgggcctggcaggcaagagtgtgggcatcctttcctggcctttctccactctccctcaagcctgtgctcaggttgccttgaatgtggactctggaagagccaggggcccagaatgccgggggaggcttctgrgtggcactcatggaacaccgtccctctgccagccataggccctgcctccagtgtcagggaatggaggctgggctgcgagagtgttgctgccccctgtgtcattcttctaatccaatgtagaaattgtacgtaatgtatttaaatcaacgcaaatgtatgaataacaa

SEQ ID NO: 533578 - DNA, 581 bp, Homo sapiens
ctgactcggacactggccttgggaacaatgttcgagagaacacttgccccttgactgtaggagccagaaggggacccaggtgtgcatagctctctgtagacatttttacccaaacctgttggtaaagtgcccatctggtgctcaagagagcctgggggtctaacagggagcccggctgcctcacctggccacagcctccacaccagatctccacattgtcttgatccagaccagctctgtgatcagaaggaaattgggtccagtgtaggagagagctggtcctgggcctggcaggcaagagtgtgggcatcctttcctggcctttctccactctccctcaagcctgtgctcaggttgccttgaatgtggactctggaagagccaggggcccagaatgccgggggaggcttctgagtggcactcatggaacaccgtccctctgccagccataggccctgcctccagtgtcagggaatggaggctgggctgcgagagtgttgctgccccctgtgtcrttcttctaatccaatgtagaaattgtacgtaatgtatttaaatcaacgcaaatgtatgaataacaa

SEQ ID NO: 533579 - DNA, 531 bp, Homo sapiens
tgctcaccagtgttgcggatgatgtaatccagcaccaccaaccgctcaaactggagcagtagttgccggttagtgttctcaggaagaggttctgcttcaaaacgccgcagccaatagtctgcatctttgtagccttcaacaaagagctggaatgaaccaacctggaaccaagaggaaggaacaaaggtttttccctactgcccaaatccaaagacctttggagtatatgccagatacccattaaggccctatggagtttgtatcagagaaggaaaacttttcaagatctttacttcctcatttcttgcaagtacaggagaaaagagatgtaacagtgatcatccatccaaattaaagaacctatccaaatgaaccagaggagtaaagtgaaaagttaggtctcaacttttcaaaccttagccacttgacagaaatraggaagacaggatcctcagggcaggttattcacgtgcccatatttgagttgtaggcaccttgcttcaccacttggatgactatgtcactataaat

SEQ ID NO: 533580 - DNA, 605 bp, Homo sapiens
aatggagagtaatacattctggttattcttgaatcattgggaataaattcttgattaaaaatattttttttctccagggttttgaagacattgttccattgtcttctaagctcccagggttatttttaagaagtccaaagtgtttctgacttctgagactctgtaggtcatctggaagctggtaggatccaatttgctgaaattttatgagatgtaccttggtttgggttgaatgttattcattgtgctggaaacttgattagtcctttccatctggaaagtcacagccttgtgttatgggacatgatactgattttttttttattgataattccttcccccctcatttttctattcttgtttgtagaattcttttgtttctgtgttggacctgttaaactattcttatttttttattatcttaattttctctcatttttttttctctgatatctgggagatttatttaaccttatcttttaattcttctaaggttttaaaaatcattttattttttcatgagctttttcmtgagtcctcaatgtttctcttttatagctttcttttcttatttgtagatacaatatctcagtatcttccctttt

SEQ ID NO: 533581 - DNA, 614 bp, Homo sapiens
tagtaaaagaaaatattagtgtgacaagtaacactggactatattcaaatttgttttgaattatttagggttggctcctgcaaagggaaatattcatctcaatctaaagtaatttttttgccaatggcaatttatttattccacatgcattcattcataatcaaagtgaacacttaaccatggaaactatattaaaaataaagtggtcatttttcaaaaacagtttaattttttcagatgcagaatatagataaaacgttagmtctaaataaaatatcacataaaatattaattcatatatttattagagaatattgattgaactcctacgttcattgaactgttcaagacattcagaaaataaatatctttctttggaatatttaatattatttctacataatatttcagttgcctttatgtcaatattttgtttataattttaaaatatcttttgtcattgacggcattttgaacttgaactttttttcactaaaacgtaacctgtcacattataatgactgaaatcaatgtgatttatgaaactacttttaggataaagggatgtcgcataaatcctaagtgataaatatatgtctgaacataatgatcta

SEQ ID NO: 533582 - DNA, 614 bp, Homo sapiens
tagtaaaagaaaatattagtgtgacaagtaacactggactatattcaaatttgttttgaattatttagggttggctcctgcaaagggaaatattcatctcaatctaaagtaatttttttgccaatggcaatttatttattccacatgcattcattcataatcaaagtgaacacttaaccatggaaactatattaaaaataaagtggtcatttttcaaaaacagtttaattttttcagatgcagaatatagataaaacgttagctctaaataaaatatcacataaaatattaattcatatatttattagagaatattgattgaactcctacgttcattgaactrttcaagacattcagaaaataaatatctttctttggaatatttaatattatttctacataatatttcagttgcctttatgtcaatattttgtttataattttaaaatatcttttgtcattgacggcattttgaacttgaactttttttcactaaaacgtaacctgtcacattataatgactgaaatcaatgtgatttatgaaactacttttaggataaagggatgtcgcataaatcctaagtgataaatatatgtctgaacataatgatcta

SEQ ID NO: 533583 - DNA, 602 bp, Homo sapiens
tgcagcctgctgacaccctgatgttagcctcatgagactcattttggacttctgccctccagaattgtaagataayaaatttgagctgttttaagccactaagtttatgggaatttgttacagcagcaataggaaacacgtgtagtaatacgtcaaaattttatgtggtgacacgtcactattggtggggttgggtgaagaatgctgcctttcccctagtggactgtcagcatcacagggtagaatccaggttaattttgcctgctcttgtagtctacctggggtaggcacacagaaggtatttacgaaaggcatgagtgaattgttctctttctcaaagataacttttgctctgatgataaccatctgccaatctcaaggacctatttccttttcactctcgtggtgtctggcctgtagtctctgcaagatgtgagcatcttactccccgctatgttgttatctgttttccaaagtcaaaacacccccatctcatgcctccccacagggccagtttctgtcccaaggtgacatgctttatctcagccaaatggtagcactgggatgcttgccatgacagtgaaaatgccccttccaagcaa

SEQ ID NO: 533584 - DNA, 602 bp, Homo sapiens
tgcagcctgctgacaccctgatgttagcctcatgagactcattttggacttctgccctccagaattgtaagataacaaatttgagctgttttaagccactaagtttatgggaatttgttacagcagcaataggaaacacgtgtagtaatacgtcaaaattttatgyggtgacacgtcactattggtggggttgggtgaagaatgctgcctttcccctagtggactgtcagcatcacagggtagaatccaggttaattttgcctgctcttgtagtctacctggggtaggcacacagaaggtatttacgaaaggcatgagtgaattgttctctttctcaaagataacttttgctctgatgataaccatctgccaatctcaaggacctatttccttttcactctcgtggtgtctggcctgtagtctctgcaagatgtgagcatcttactccccgctatgttgttatctgttttccaaagtcaaaacacccccatctcatgcctccccacagggccagtttctgtcccaaggtgacatgctttatctcagccaaatggtagcactgggatgcttgccatgacagtgaaaatgccccttccaagcaa

SEQ ID NO: 533585 - DNA, 632 bp, Homo sapiens
agtgggtggggaggctggctgcaggagtggatgcgtgagtctaattgagtaggcaaagagctttctgggcactggatatgtctttggagggtgcatcttcacatccttgcactattactacatgatctttctaaaaatgtgtttaaaatctattttaatattgaaaacagacaccatcactgctgctgcrgaaaacaatttagtggttcctccaaagttcaatgtagaataaacctataatatcaactggcagtcctgcttctaggcctgtactccaaagaattgaagacagggactcaaacagatacttaatattcatagcagtatttttcaagagccagtaagcaaacacaggccaaatgtccatcaactgatggccagattaacaaaatgtacgtccaaagaaatgtccgtgcaatggaatattacccagccgtagaaaggagtgaagttctgacacgtgctacagcacggacgaacctcagaaccatgatgctgagtgaaatagatcagtcacaaagggacaaatattatatgactccacctaaatcaaatatctaaggcaagttcatagagacagaaaggcatggctcacgcctgtcatcccagcactttgggagttcgaggtgggt

SEQ ID NO: 533586 - DNA, 632 bp, Homo sapiens
agtgggtggggaggctggctgcaggagtggatgcgtgagtctaattgagtaggcaaagagctttctgggcactggatatgtctttggagggtgcatcttcacatccttgcactattactacatgatctttctaaaaatgtgtttaaaatctattttaatattgaaaacagacaccatcactgctgctgcggaaaacaatttagtggttcctccaaagttcaaygtagaataaacctataatatcaactggcagtcctgcttctaggcctgtactccaaagaattgaagacagggactcaaacagatacttaatattcatagcagtatttttcaagagccagtaagcaaacacaggccaaatgtccatcaactgatggccagattaacaaaatgtacgtccaaagaaatgtccgtgcaatggaatattacccagccgtagaaaggagtgaagttctgacacgtgctacagcacggacgaacctcagaaccatgatgctgagtgaaatagatcagtcacaaagggacaaatattatatgactccacctaaatcaaatatctaaggcaagttcatagagacagaaaggcatggctcacgcctgtcatcccagcactttgggagttcgaggtgggt

SEQ ID NO: 533587 - DNA, 632 bp, Homo sapiens
agtgggtggggaggctggctgcaggagtggatgcgtgagtctaattgagtaggcaaagagctttctgggcactggatatgtctttggagggtgcatcttcacatccttgcactattactacatgatctttctaaaaatgtgtttaaaatctattttaatattgaaaacagacaccatcactgctgctgcggaaaacaatttagtggttcctccaaagttcaatrtagaataaacctataatatcaactggcagtcctgcttctaggcctgtactccaaagaattgaagacagggactcaaacagatacttaatattcatagcagtatttttcaagagccagtaagcaaacacaggccaaatgtccatcaactgatggccagattaacaaaatgtacgtccaaagaaatgtccgtgcaatggaatattacccagccgtagaaaggagtgaagttctgacacgtgctacagcacggacgaacctcagaaccatgatgctgagtgaaatagatcagtcacaaagggacaaatattatatgactccacctaaatcaaatatctaaggcaagttcatagagacagaaaggcatggctcacgcctgtcatcccagcactttgggagttcgaggtgggt

SEQ ID NO: 533588 - DNA, 599 bp, Homo sapiens
ggcagcaggcttgccggcctcttcctatctgagcttcacatggcttctgtcctgataaggttttcccagcagaaccctaatcacctttaattctttgcaagaagaggaattgtctgttccaaggcccagttacccaactctttcttggattcggtcattttctattcaattaactattgattatgtgaaagtaaaatagcctaatatgcaaccctgacttgctgctggaatttaagctcagatctggtagctccaagatgggaattctaagttctcatgtgcaaataataggtaaattatgttattaacaataatttttaagaaaatatttgcaatcaatacttttttgaagaattaaatgtacatgtgggcaattttaacctcttcatttctggtttatatattttttagttgtcttcaacattatgattttatttaatagaagatacatcttaatcatttagaaactttttcatctttccttctttattctccaacaaccaatyaacagatgtcttgaatgtcctaggaccagaagtgtccattttccccaagttttctagaaatataaagtgatttacaataggccaagaagacag

SEQ ID NO: 533589 - DNA, 558 bp, Homo sapiens
aagtgctgggattacaggcatgagccacagtgcctagcccacctgctttaacactagcttctagtttagaaagaaatactttcaaataaaaaataaatctcagcacagaccacaaaaaatttaccaaaaatcacaatctggagmaaaagtcaatgaaatgcactgtcaggaatctaagctaaatgaaataaattatttatcacatatcctgccaacattcaggccttggtagccaaggtgaataattgaattaaacatccagggcgatgtgagaaaggggagaggcttaggagtggggagaggcatcaacaacaggaaagtaccaacagttgtcttttaccaggtgcttagcaaatgcctagcatttggatatattgtttggatatattgttccatttaatccctaaaacaagcatatggcaggttcactaatattattcccttttgagtaaattgaggcttagagaggctaagaatctcaatgaggtgaaaaataagtcacagagactaaattcaaatgtaatcagtgtgactagtcctcattttcaaaccatgctt

SEQ ID NO: 533590 - DNA, 579 bp, Homo sapiens
atggcttatatgcaagtgaagtctaaaaaatagtgttggttcacataactttccactgttactcagataactgaggctaaccaacaatgaggagagcacttttgttttcctttttttttttttttctgagacaaggtctcactctgtctctcaggctgaagtgcagtggcgtgatcatggttcactgcagycttgacctccctggctcaagcggtcctcccacctcagcctcctgagtagctggaaccacagtgcacaccaccacacttggctaatttttgtatttttagtagagatggggtttccctatgttacccaggctgatctcaaactcctgggttcaattgatctgcccacctcagtctcccaagtgctgggattacagagtgagctactgcacccagccagcactttctgttaatactttagcctctagtcatgagctagaaagggacttgaatacagccacccagtttcacttctctgggggtctctgactcacgttcatttggtacagaacctaatagacagcatatggggaaaatttttttgaactgaattgaaaatgtaacaaaatgc

SEQ ID NO: 533591 - DNA, 666 bp, Homo sapiens
cttaatttgttattataagctaagcactttacctccaaaaggaagaatacaattgtgccatttatcatatatcagaattacacaggacatcatgttaatgatcatttattcctagctacttgaagaataatacccagtaattatagcaaatgtaagtcaaatagtaatagcatactttaaatagtatagtaattataagttatgtccatgcatccgggacaagggtcttttatgcttggtattraatctgttctgcaatttattcttaatatcatcgctggggttgaagaaaggaagcttgcctgtagaaaggaaacttgttgtcctttcacatttccaataagtcatttgaagaaaacggttctttgcatgccttgctaaacccaattaccaccaagacatcataaacaaatattcattgcatttacagctgcttctttattgcacaatgcaaaatgtattgttaaatttaaaccatttaaaaggagtaagcgctcagatttctgcattcattttaaacttaattgaaaaaaaatcaagcatgtgttgcagtattttcttatttagagactgttgctaaatgaacaatcatataatactctcaagtatagcaaatgctggacaaaaatgtgggcatctctggcttggtatttggtaacatagaga

SEQ ID NO: 533592 - DNA, 666 bp, Homo sapiens
cttaatttgttattataagctaagcactttacctccaaaaggaagaatacaattgtgccatttatcatatatcagaattacacaggacatcatgttaatgatcatttattcctagctacttgaagaataatacccagtaattatagcaaatgtaagtcaaatagtaatagcatactttaaatagtatagtaattataagttatgtccatgcatccgggacaagggtcttttatgcttggtattaaatctgttctgcaatttattcttaatatcatcgctggggttgaagaaaggaagcttgcctgtagaaaggaaacttgttgtcctttcacatttccaataagtcatttgaagaaaacggttctttgcatgccttgctaaacccaattaccaccaagacatcataaacaaatattcattgcatttacagctgcttctttattgcacaatgcaaaatgtattgttaaatttaaaccatttaaaaggagtaagcgctcagatttctgcattcattttaaacttaattgaaaaaaaatcaagcatgtgttgcagtattttcttatttagagactgytgctaaatgaacaatcatataatactctcaagtatagcaaatgctggacaaaaatgtgggcatctctggcttggtatttggtaacatagaga

SEQ ID NO: 533593 - DNA, 386 bp, Homo sapiens
cccgcggtcctgcagtcctgcaggtgggccagtcctgccaactctccarctcccctcgcagagcataaactgaatcaggtggccgaaccaccggacgccagagtccccagtgtccgcgcccacacaggcgtaggcagcttcccaggctttgggctggggacccaggccaggtcccctggctcttgctcccgccctccgctcatgctcactgtggccccaggacgtgggcgatgttgcagggagcaaggggcgcctctgcctgacttgccggggtcgagcctccctgtcccaccccaccagccctgggaatactgcggcctggcactcccgaaaatccctcactcacagagctgaaggacttgctgggtccctggtggcccctgtcc

SEQ ID NO: 533594 - DNA, 490 bp, Homo sapiens
tattcattaagaaatttgaaaacaatcattcaggaattttaggtcaagagctggaaaaccccaagcctccgtcacctgagcaaagggagatactgtgagaacctgcaggatacacccatgttccaccacctgcccgaagaagcctgtggttcttgtcagcttctcaagggtgaagcgcagatcattttctgcttgagcagaagagcagaccaaagagctcattgactcaaggagcatcacggcaactgagctgcrcctggaagagaagaatccagggtgtgatccatagccaaggcctgaagcaatggggcccatacttggcctctccagggtgagttgtgacccaagtgctgggctttagcccatgagtggtccctcttgccattttgtttcctcccaaagagaagccagtgttggtgatttcatttctcataatctccttaggagcacaggttttggtttgtgccttttttggatcaggttccctgca

SEQ ID NO: 533595 - DNA, 490 bp, Homo sapiens
tattcattaagaaatttgaaaacaatcattcaggaattttaggtcaagagctggaaaaccccaagcctccgtcacctgagcaaagggagatactgtgagaacctgcaggatacacccatgttccaccacctgcccgaagaagcctgtggttcttgtcagcttctcaagggtgaagcgcagatcattttctgcttgagcagaagagcagaccaaagagctcattgactcaaggagcatcacggcaactgagctgcacctggaagagaagaatccagggtgtgatccatagccaaggcctgaagcratggggcccatacttggcctctccagggtgagttgtgacccaagtgctgggctttagcccatgagtggtccctcttgccattttgtttcctcccaaagagaagccagtgttggtgatttcatttctcataatctccttaggagcacaggttttggtttgtgccttttttggatcaggttccctgca

SEQ ID NO: 533596 - DNA, 495 bp, Homo sapiens
ttattcattaagaaatttgaaaacaatcattcaggaattttaggtcaagagctggaaaaccccaagcctccgtcacctgagcaaagggagatactgtgagaacctgcaggatacacccatgttccaccacctgcccgaagaagcctgtggttcttgtcagcttctcaagggtgaagcgcagatcattttctgcttgagcagaagagcagaccaaagagctcattgactcaaggagcatcacggcaactgagctgcacctggaagagaagaatccagggtgtgatccatagccaaggcctgaagcaatggggcccatacttggcctctccagggtgagttgtgacccaagtgctgggctttagcccatgagtggtccctcttgccattttgtttcctcccaaagagargccagtgttggtgatttcatttctcataatctccttaggagcacaggttttggtttgtgccttttttggatcaggttccctgcattgc

SEQ ID NO: 533597 - DNA, 450 bp, Homo sapiens
gacaggaaggaagacagtctagagtggaagataaagataaccaacccatgatggaaccaactcagaaatcaaccccaccaagagaaaactttattcatgcactgamtatttatggaacacctttcacttgccaagcactgttccaggtgctggggatatagcagaaaactgcatgtcaaaattgctgctctcataaagttcacattctgggactctaacccagccaaagcactattgcgtctgtattttccaaatactttacaatgagtatgcactactattacaatcagaaaaaaatattagattactaacaagctattgaaagtgtctcccactgggtgggagacagctaggaaaaagaaataaagaggaaaaatatcctcttgaaagttaaaataggatagagacggattggtgggggctactttagactgcggagtcacagaggac

SEQ ID NO: 533598 - DNA, 450 bp, Homo sapiens
gacaggaaggaagacagtctagagtggaagataaagataaccaacccatgatggaaccaactcagaaatcaaccccaccaagagaaaactttattcatgcactgactatttatggaacacctttcacttgccaagcactgttccaggtgctggggatatagcagaaaactgcaygtcaaaattgctgctctcataaagttcacattctgggactctaacccagccaaagcactattgcgtctgtattttccaaatactttacaatgagtatgcactactattacaatcagaaaaaaatattagattactaacaagctattgaaagtgtctcccactgggtgggagacagctaggaaaaagaaataaagaggaaaaatatcctcttgaaagttaaaataggatagagacggattggtgggggctactttagactgcggagtcacagaggac

SEQ ID NO: 533599 - DNA, 372 bp, Homo sapiens
tgaggtatcatctaatgagaattctctctatgccaggcactgcgctaagcatttcacatcattaascaatgtgagttttaggcaaccccgaagcaggcagtctgttcatcccaattgcagctgaggaaacagggtgagtgaggccaagcagctggcccaaggtcccctgcctggtaagtggcacagcctgcagccctgccaggtggtcccgctaaccaagccggcgcttttctgtcaccatgccgtatcgcctcctgtactatcaaaatgtactatcaaatttacctcaaaagaaaaccctctgtcttctgagaagctccggaaggtccaacacgttgcctgccaacagaaaaacatgaagagttaaaaatt

SEQ ID NO: 533600 - DNA, 340 bp, Homo sapiens
tagctcctaaagcccagctgaggtatcatctaatgagaattctctctatgccaggcactgcgctaagcatttcacatcattaagcaatgtgagttttaggcaaccccgaagcaggcagtctgttcatcccaattgcagctgaggaaacagggtgagtgaggccaagcagctggcccaaggtcccctgcctggtaagtggcacagcctgcagccctgccaggtggtccygctaaccaagccggcgcttttctgtcaccatgccgtatcgcctcctgtactatcaaaatgtactatcaaatttacctcaaaagaaaaccctctgtcttctgagaagctccgg

SEQ ID NO: 533601 - DNA, 340 bp, Homo sapiens
tagctcctaaagcccagctgaggtatcatctaatgagaattctctctatgccaggcactgcgctaagcatttcacatcattaagcaatgtgagttttaggcaaccccgaagcaggcagtctgttcatcccaattgcagctgaggaaacagggtgagtgaggccaagcagctggcccaaggtcccctgcctggtaagtggcacagcctgcagccctgccaggtggtcccgctaaccaagccggcgcttttctgtcaccatgccgtatcgcctccygtactatcaaaatgtactatcaaatttacctcaaaagaaaaccctctgtcttctgagaagctccgg

SEQ ID NO: 533602 - DNA, 372 bp, Homo sapiens
tgaggtatcatctaatgagaattctctctatgccaggcactgcgctaagcatttcacatcattaagcaatgtgagttttaggcaaccccgaagcaggcagtctgttcatcccaattgcagctgaggaaacagggtgagtgaggccaagcagctggcccaaggtcccctgcctggtaagtggcacagcctgcagccctgccaggtggtcccgctaaccaagccggcgcttttctgtcaccatgccgtatcgcctcctgtactatcaaaatgtactatcaaatttacctcaaaagaaaaccctctgtcttctgagaagctccggaaggtccaacacgttgcctgccaacaraaaaacatgaagagttaaaaatt

SEQ ID NO: 533603 - DNA, 616 bp, Homo sapiens
atcaggcaacattttatgttgtaagaccttgattcacagtcaacaccataccagtttaactaaatgatttcagtgtctttaagtacaaaatgatgatgtaaatatagtatattcatatgggtttctaggataagacttaatctctgttgggaaaattgataacttgttatccttttaaattttcagaattattttggggaaataccttttagaaataatagcagcttaaaagaggggagaaaaaagagttcaggcaatatttcggrggggggaagaacgaatttttcataaaatttaataatctacagttattaatatgatttctaaacttcttcattatttggtctgagtgatcactagttactctgtggaaaataaacgcttatatagaaatctcatttaaattagaagagaaagactctgtcatcaagaggtatgtaatttatctgttaccaattaattatgttttaattacattcatttcacaaagagaatgaagccatagaaaataatactgtcttatctctgttcaaactaagcaattttttaatggacctacattacgtgtgttagcttctagtcattgattctgtaatctttttctgccaaccagtac

SEQ ID NO: 533604 - DNA, 583 bp, Homo sapiens
agcacagtaactcgtaaaccaagtgctaaaagatgaaatctgaaacacagatatagaataaacgtgttttggatatcatgtaatgttccccaacttttgcctatcattttcgaaaacaggaatgtgatctgtacttatttttagagaaaaggacacgaacatttragaaattactgacaaaaattattctcctcctgcccctccgatccaataggtttgaagccgctggtcctcgccttttactccttagctggacagcgggttcgggatctgccccatgactaaggctgaagtggaaagttgcgaagatagaacaagagttgttccttagggtggtgtccctaaacttgaaagtggacttggtcctgctcgcaggtgggcttgcacgcgccaggcttcgtgtggtggctcgcgcgcgctggcccccgagcgccagcgtgggtgacccgtgccccgccccggacggccttttcaccctgttctgtttctggggaggggcgaggggaaaactgcgggtgccttccctcagaggcgggcagccattgtgcctcgggaacacggtctgagtagagttgtgttcgca

SEQ ID NO: 533605 - DNA, 606 bp, Homo sapiens
gaatgccattcacagtttgtcaaaatgtcaaggaggtacctgaataaccatgtagcacaggttaataataaatctttatctagttaattcatttgtgcaaatcatggcttccacttgagccccttccctctgtctagtctttcctggttgttcaagccatttttgatcrtatggttcctaatctctgagaacaactgatgttcaggttatttgctgtgtgctaacctcatgtcaatttctgaagtcttgagagatagtatccacttaccctatgtaccttatagaacctgggacagtgtgagtccagatttgttctttggtttcctgaggttgtatatctctacacaggcacacagaccaatttccccactctctaggaaaattgtcaagagaggaaatagaattgattctttcagcagctcagttattagaagtagatagggtctgtctgattaggttatatgatatgtcataggctttgccttgatttctttttgagagatttttattgtgtgtagacctactatagagagactgaagacaattttatttttcatcacatctgagaattgtttgtagcatgaaatgtgggatgcaattcatatt

SEQ ID NO: 533606 - DNA, 611 bp, Homo sapiens
gttcacagtatagagttgaatataagttgttaactgtctgaaataatgttaactacttctatgatggatagtttcctttaaaaaattattattgatgtaagacttaaatggacttggtttgttattggatggagaagctggccttctgcattgagtatctcttagcaggaatgcattcctttagaccaatgtcttacacattggaggaaccagtttgtggatcctcaccacygttttgtcatctgttctgtggaaaactttttaaaaaagccaattttcagacttgtcattccaattatatactcatcaacacttaagaaaaatattaaaaatctgtccagtatagcaacagatggtaatctttttatttccttttgaattaaaaaaaaatattattaatgtttattagtgttttttgctcagtaaactttttttttttgccaattatccattaatttcttttcattatctcttgtgaaaaaaacagagctgaaatgtgtctctgtacccaatggaaaacaccctgactgctttatcaccttgctgtttaaaaacaaaagcaacttttcacaggccgacacctttattcaaggattataaaagacaacaga

SEQ ID NO: 533607 - DNA, 591 bp, Homo sapiens
tacaatcctattgactgcttctgtttccattgagttttggaccctggaactcactcaagcaataacagccaaagcacgcttttttgaagaagtaaacaagcatcctcctcctcctgccagaaatctgttaaaagcaaggatggmgaatatatcccattctcaggactcatgtggggtctctcacttctgccttggtataaatgcatatgcccccttgtggcctaaggaaagagagatgcagctgggctccccaagggccctgactcccctactgcttctgcataggacatggagtctatgaagagagcgccctggctcctggaagccttgccttgcttttctactgaccacatgttattaagtaaatggaaggcagaaggaaggagtctgacatttcttctcccacagtgaagggtggaggaaggaaagaaacagaggggtttcctttctctagcccagcggccatcctgactgtgaagcaaggggtctgaggagaaaactgctccttgctgccgcgtatccatctaagtagccagactcatggaaaaccacactgcaaatgttgccctctttggagaaaacccactgtca

SEQ ID NO: 533608 - DNA, 615 bp, Homo sapiens
aaatattactgtggcaaaaggggagaatagagtacagtggacaattagtagtgtctgcaataattattttaaaattaaaaatttctttataataaaagacaccatgaaaaaattgaatgctcaaaccaaagactaggagaaactattttgaaggtatattgatatcaagaatatatacatagttctacaatcaaataaacagacaaccaaatasaaaaatgattagtcatttcaaagaagagaatcttgaatggttaatgatacttacacttggcatcaaggaaatgcaaattaagaaatcaggagatactatttcacatccatcagattggtaaaaatcaatatatttgatagcctgagttattagagaatgtgggaaaactgaaacttctttggtgttaatgggaacacaagttggaacaacctctggaattttcaaagaaatgaggaaatacataaagtggcatcaactgctagcaccagcatttaaggcaggaagtgacaggctaactctactgctttgtgtaaatgtttttgtgcaactgatttataatcaggactgcccttatctataaagctgctaacctctgaaccatgaagggaaaagataaacac

SEQ ID NO: 533609 - DNA, 602 bp, Homo sapiens
tttataaagcaatgttaaccataaaggtgatggggccattttcactttaacaaaaataaccctagtgtttcacctttaagagagtgtagctttagggtcccaaataagaggtaaacagtgacagtatatgggaatatatttaataaaaacttaattaagatgtgcagtaccttagtcggtggacaaggaaacagccttaaataaatgagaacacataattcattgactccatgtaagtaaaaatagacattctcatcaacttaatatatattttgtttgcatacatttacagtggtattttatttgttagatctggaaaaattttattgaaaggaagaaagtgtggaattatgtttaaacatttgaaaaaagaagactaaaagtgaataactgaatcagatattaaagcttgttctaaggctatcataattagaagcatgatattgactcaagcctaaaaagttcagtgttctttttgctgtatttcagcctactgactcaagcttgtcgttcacatcacagccttgtctcattctgctttttaaaaatttctacctgtttmatgaccatgtcaacccttctcctcatcactgagttgtctt

SEQ ID NO: 533610 - DNA, 628 bp, Homo sapiens
taactggggcaattaagccaatcagagcaagcaaatcaaatctaatttacactgtaatggactaaaaatgaatgaataaacattgcactaccaaatccaaatgattaaatatgtctccaaggatttttttttctatttcagtatacaagatcatggtatttatactataattaaccatttaagaatgatgaaacaaattggaacatctcttcatttttttatatgttttttataaaattgccaaatagcattcaagaatataataaattagaatccttcttaacttagacatgtttacttataaaatcaatttaattcaagttcatgcttcatttgaatgctggaatttaaatggracatatagatgctaatttttttaaataaatttttatatattcagttttttgccttagccatggaccgtaataggaagattaataatggatttagtatgatgagttaaaactttattcatctttgcaaggtgcgtgcaatttagaacttgacaatgcagaaatgtaacatgcagtacagtatttaggtaaagcaagctaacatacatctcactcagagcccagtgtcactaaaactgctaagaaactataaacagtggcatgcatcccccaga

SEQ ID NO: 533611 - DNA, 628 bp, Homo sapiens
taactggggcaattaagccaatcagagcaagcaaatcaaatctaatttacactgtaatggactaaaaatgaatgaataaacattgcactaccaaatccaaatgattaaatatgtctccaaggatttttttttctatttcagtatacaagatcatggtatttatactataattaaccatttaagaatgatgaaacaaattggaacatctcttcatttttttatatgttttttataaaattgccaaatagcattcaagaatataataaattagaatccttcttaacttagacatgtttacttataaaatcaatttaattcaagttcatgcttcatttgaatgctggaatttaaatgggacatatagatgctaatttttttaaataaatttttatatattcagttttttgccttagccatggaccrtaataggaagattaataatggatttagtatgatgagttaaaactttattcatctttgcaaggtgcgtgcaatttagaacttgacaatgcagaaatgtaacatgcagtacagtatttaggtaaagcaagctaacatacatctcactcagagcccagtgtcactaaaactgctaagaaactataaacagtggcatgcatcccccaga

SEQ ID NO: 533612 - DNA, 534 bp, Homo sapiens
ctgtaactggggcaattaagccaatcagagcaagcaaatcaaatctaatttacactgtaatggactaaaaatgaatgaataaacattgcactaccaaatccaaatgattaaatatgtctccaaggatttttttttctatttcagtatacaagatcatggtatttatactataattaaccatttaagaatgatgaaacaaattggaacatctcttcatttttttatatgttttttataaaattgccaaatagcattcaagaatataataaattagaatccttcttaacttagacatgtttacttataaaatcaatttaattcaagttcatgcttcatttgaatgctggaatttaaatgggacatatagatgctaatttttttaaataaatttttatatattcagttttttgccttagccatggaccgtaataggaagattaataatggatttagtatgatgagttaaaacttyattcatctttgcaaggtgcgtgcaatttagaacttgacaatgcagaaatgtaacatgcagta

SEQ ID NO: 533613 - DNA, 598 bp, Homo sapiens
ggtgcctttggtgctctgctttttggagtagcctgttctcggttgactttttcatccacctccatgcagtaagaggttgttctgtgggagagacacagagtgtccagctctgccagtgactgggtgaggaagtttgtcttctcaccctgtcaggaagtgttacgaagctcattgtggccacgcaagtaagccacattccaatccagttgatattttcaacctcatccattggacatgcatatgtaactcaactgcttcacaactcagagcagaaagagaggagtgggtatcccaaggccccattattctttattattattattwttttttctttttttttagagacagggtctcactctgctgtccaggttagagtacagtggtgcaatcacagctcactgcaccttgaaactcctggactaaagttatcctcccaactcaccctcctgagtatgtgggactacaggtgtgtgccactacacgtggctgcttttttttttgtagagaaggggtctcactatgttgcccaggccggtcttgaactcgtggcctcgagtgatcctcctgtctcaggctcccaaagtgctggcattatagg

SEQ ID NO: 533614 - DNA, 657 bp, Homo sapiens
tagatctcctaaactgtgcccagcaaatcatttgccatgacttgtagaaaagaaacagaggagctaggcatggtggctcacatctataatcccaggactttgggaggctgaagcaggaggatcgcttgaggccaggagttcaagaccagcctgtgcaaaatagtgagaccctgtctctaccaaaaataagccagggtgtggtggcacatacctgtagtcctagcctacttgggaggatttcttgagcccaggagtttgaggttacagtgagctctgattgtgccactgcactccagcctgggtgacagagtgaaaccctgtctcagaaaaaataaaataagatgacagagattgcaaatgcaaaagggattaagcttcacaccagcagcatttcatcttatgtgaagagaaggatcaggcctatttggtggaagccagtaggtggttagaaatcttaaaggcgggatttgtagttaaactggaaatgtaggccaggcgtggtggctcagtcctgtaatcccagcactttgggaggcagaggcaggggcagaccatgaggtcaaaagattgagaccatcctggccagcatgatgaaaccccatccctactaaaatatgaaaattagctggscatggtggtgtgcacctgtagtcccag

SEQ ID NO: 533615 - DNA, 609 bp, Homo sapiens
aatacaacctacttacctggccccattgactgccaaaccctgcgtgaattgtgcagacatgccacagtgaccttctagaactcttaccagtttactttaaacccattaattagaattcccccacaggaaatctgcttcgatatgccctggatgccaataaaagctttggcccatgggtcccctctatccttcccagcactgacccatctccatgtggccttcagacatgccaggtactcccagggcctgtaatgaaatccttattccatttggggtctctttctgttgctgaagggctattctttattgtcaaagaatttaaaacactccatctcatgctccctgagctagtatcacagcacagtgttacaatttatgtttccatcactggtttcaacagaaaggccttattctagctccttctttcgttggaatataggtggtgctcaaatatgcttactgaatgaacgargggagaatttagacaaacacaggagagaggaagaaaatgacagataagccattacaactagaaaacactaccaagtataagcagaaaataacagaatatttcacttccttgtccccaaatcctcagtaactccctac

SEQ ID NO: 533616 - DNA, 508 bp, Homo sapiens
ccagcactttgggaggctgatgcgggtggatcacttgaggtcaggcgttcaagaccagcctgaccaacatggcgaaacctcacctctactagaaataccaaaagttagcctggcacagtggcatgtgactgtaatcccagctactcgggaggctgaggcaggagaatcacttgaacccgggaggcagaggttgcagtgagccgagactgcaccagtgcattccagtctgggtgacagagtgagactgtctcaaaaataatatwataataataataataataataatagaccaaagtataaaagattgaaggcgaaaaacagacatatctagttctacagaaattgagaataatctgttaggctgataagaaaacctaaagaaggtattttcttcaaaactagcaatagcattaaggcaatagttataaaacaaaattcagcactttctttatattacaacatttcagttacagatgctgtaatctggattttcttaaaagctgcgcag

SEQ ID NO: 533617 - DNA, 476 bp, Homo sapiens
cagaaataaacatatgacactagagtaatttctactttaagatactctggaggtttcacctcagagaccatgtacagtgacttaattctctacttcataagatcactaaataggtgaamgttttcaataatgaatatgctgaggactaggaatacttctaagaaaaaaatttgaagcctcaaaggatggtctattaatttaaacaatgtttgatacgttgtgtaccacttatcaagaaaacactttgtagctgatttaaacaaatgtctacatcttatttatggctatcattttccttccaatttgtttatctttttattatttctgttgatgattcttctaatacctcttaactccaaattcacctttatgctctaagataacagaaaaaattcctttaatcatttctcctttaaaacaaacatgaaattattaagctttctgggtagagggcaccaaagggacactgaaggaga

SEQ ID NO: 533618 - DNA, 505 bp, Homo sapiens
tgccaaatcatattggttgtcagagattgaagccaacatgattcataaatgttaatttggcagaggatcaggaattccccaacttcatgtcaactaggcttccatctgtccaaggaagccaacagtctgctttctcctatctcttaataaaaggctgagaagatgagcaatggtgatcagcaaagcttgtaggaaacatgtgcgctatctacaatcaaaactgcaatctatgatcaggatcagcgggttcctatttggtaataagtaccttgtcaaaacagacaagcacttagttcatatctctccagtaaatgttctcaaaagcagccccaagtcactagaaacaataggatgagagagaacaaggcaatattctctttgcataacaaatcttagtaaattgtaaacacatcagagtcacttattcctcacataattgactcctaccttttctytttcacgttatttttcttttacattaaatatgccttactaaagtggtggg

SEQ ID NO: 533619 - DNA, 131 bp, Homo sapiens
ctacctctctcctaagttactagatcaattgctagatcacattttctaacatatatactttaccatattatccttttacataaaaactttaatactatccayagtctctgaagaatagagcccagttcctc

SEQ ID NO: 533620 - DNA, 517 bp, Homo sapiens
tggcccttgcagggtatcagaggtaattccagtgtttttgggygatgagtcagagggacatatttataactgagataatgttaatactagctagatgagaagtgtttcttcaccttttaggagttttttgtttttttgttttgtttttcttttgagacagagtctcgctctgtcgccgaggctggagtgcagtggcgtgatctctactcactgcaacctccgcctcccgggttcaagcgattctcctgcctcagcatcccaagtagctgggactacaggcatgtgccgccgcacctggctaatttttcgtattttttgtagagacggggtttcaccgtgttagccaggatggtctcgatctcctgacctcatgatctgcccacctcagcctcccaaagtgctgggattacaggcgtgagccaccgagcccagccaggagtttttgaaaagcaacaaattgacaattaaaaaaaaaactctaagtatttctaaagtttcctgtccaagtgactcacaa

SEQ ID NO: 533621 - DNA, 481 bp, Homo sapiens
tgacgggaagggccagttgcaagaaatggcgagaaaggtcaccagcaagtttcttcccactgccttcctgccacgctctgttgttcatccctctctacaggacaagctctccattgccaaagggccttccaggcagccacttgcttggaacgctgtcttttggattctcaataccactctttttttttttcctgtttttcctgttgacacgtaagtgacattgccaaccctgttgaacagagcgtgtaagttatccctggcaaagaaaagaacaggtctctgtgtgctttatgccacagtaatgtcttctatagccaccgtcttcctgccacacccagcaaggggttggcatctgcctgacacatccaccctaatgaccaaggatagaccaagaagagcagggcacaaatactctggagcacggaaaataggaaatttttwaaaaaaaaatccaactcactacaaagagatcaaatggcct

SEQ ID NO: 533622 - DNA, 266 bp, Homo sapiens
ttaaaccacgccaacaacagacagggcaggttttcagtctccacctgcaatgctgtgttttgactagaagcgtctgcattttgactgtgacctgtctcaygaggtcaggtgcagaattttccacttgcggtgtcatgttggtgctcaaaaagtttcagatccttcataataattgggttggggcgtgaggcatgggggatggagcttcctggggtggcttgagaggtgggagtgggtggagcatttgttcagggacctgacatctc

SEQ ID NO: 533623 - DNA, 641 bp, Homo sapiens
tggtttcctggccccgtgcagctttatttctaatgtgcaaygtgattgtctgcccctgttgtccacaggactagcctgctgccataaacatggtgcatgttgtaaatattgcacaagcctccccagatactaaatatgtgtaattcttggggcatggattgtgtggttcatttggaagtgatgaggaattattatattgctgttccctaatgaagaaagtcactttgcctggtgagttttgtctgtcaactggatgaggatcatccctctgtctggaagccagaattcagtggcagcttttagataccaatgctaagtcaatttcttttgtcttggcaagggatggcatagtatttccagaagtaaagtcttatatgctggacaatgtggcaacagatgacatacgaaaccagataaatgtagccttagggcttcagggcaaatgcaccaagagaaccaggcataaacctcctggcattttttggcccagccctggaaatcctagtgtcacgttggctgtactatataggttgaagcagaatcgaggtgaagggggcatagggctgcccacctccccttcctaagaggagtgtcagagaacttactgacctgttttaaaacacgaataggatcctagtgga

SEQ ID NO: 533624 - DNA, 536 bp, Homo sapiens
gctgtccctgcttctgggggatgaaggcattgtgagatttttgattaaatctgggccatttccaggctgaaaagctggaccagagcttcagggcttgagtctctcacagagagatttcccaatggggacatcagtcctgccttgggaccagaaagccacatgctgtaggccaggaagggggaagcaggggctgagcccgagggagaaaggctttagaggtgttagcagacagctcagtggcagtggttagaattagggaggcagcgacctcttcttagtgtggtcagagcatgccaagaaagtgtggtctgtgtctgggctgctgaggcccgagggcaagggccaagctcattcataggacagtggccaagaagcggggactgaaaggcttgggaaaagtaaggaagctctgcaggttctgggacacaagtgaacayggtaagcagtggaaggcccaccccaggacagggttagactgggagcactgtctccttgtagcccacaagaggccagggcagggcccaagtacagtgtgg

SEQ ID NO: 533625 - DNA, 533 bp, Homo sapiens
ggagccagggctgtcttcgtattcccattagaccaagcttrtccaacccgaggcccgcatgcggcccaggatggctttgaatgcggcccaacgcaaattcgcaaactttcttaaaacattatgagtttctttttgctattttttttttttttttagctcatcggctatcgttagtgctagtggattttacatgtggcccaacacaattcttcttccaacgtggcccagagaagccaaaagattggatacgcatcagacagatggaaaagggagattcagactgtttttcagggaggtggctgggtttacacgctaatcccgattcaccctgtccaaactgcctaagccctccgccattctcaagccctgcagtcacagctacacagatcacagcttcagccaggagctgggcagaaggccaagaggctgttcccaccaggctgctcagggctggtcttttaggacccttcccttgagccctctatggtgtggcaaagccttcattgccttaactggagccccatcagcttcag

SEQ ID NO: 533626 - DNA, 498 bp, Homo sapiens
gtgtgaccttgggcaaattctttaacctctaagcttcagttttgctcatccgttaaatgaagaaaataaacactaattatgaagtcattgtgacctgtcaggaactaaacgtttaaagctcttgacaaaatttctggtacctacactcaaaaacagtaataaatggcaattcaatttcaaccccatggtcattctgagtaagattttaagttagtagaaggcagatgagatgtgaacaataacctctttgtagaatgaaaacctaatgtcatggtttataaataactctcccagctatggatactgttatctctgtcccctccaggcaagccttgtttaatccaccacagtggtttcctacgaatgtatatatatatatatataaaaagaacaatgataaagaacatacacaataatgtggggaggcatgcaaatcaaaaaggcrttaactgatagggaaaagggagcaaggaactaggttgaaattatgtggaaggg

SEQ ID NO: 533627 - DNA, 266 bp, Homo sapiens
acaccctttgggatcttgggcttaacctctttgggctttacgagggcctcgatagccttggcacatgtactcacggccttggcactgtcggcctgcatcttctttaggcccttcttcttgtgcttcttggtaaagcacatgttccccaggaacttggggtccacccccttaagagatttgtatctttgtgatrggggtttcttgatgacatttctgtgccattttcgggactggttgtgtgtggtgtggttcttggacttggccat

SEQ ID NO: 533628 - DNA, 544 bp, Homo sapiens
ctttggccccaagactgccttgtgttacatctctctccccttgctctcatatgccaattaaactataaactcttggacagctatgtcatactatccttgtgcacctagtagttatccaagaaatatttgttaccttgttctggtttggcaggctgggaaaatgtgattgtgtgtgtgtatgttgggggygggggacatgtatccacaatcagcacctcaatgcctgctcccacatccctgctccagactccaatctgcaggacatcaaaagcaactcatagatttggtcaattcatttttctttaaaagagattcagtggtttattcactgagttgactggccaaagccacctcctggccttcgctgacttctcagagaccaggcctaggcccagaatgggccccaagctttcaggctttcattttcaaaatgaatcctgactgacaagcagctacttccgttgctctggagactcctctccgcaaccccagatctgtaaacaccaaaccgcacacatgcacacacacttccagaatatgcaaa

SEQ ID NO: 533629 - DNA, 544 bp, Homo sapiens
ctttggccccaagactgccttgtgttacatctctctccccttgctctcatatgccaattaaactataaactcttggacagctatgtcatactatccttgtgcacctagtagttatccaagaaatatttgttaccttgttctggtttggcaggctgggaaaatgtgattgtgtgtgtgtatgttgggggtgggggacatgtatccacaatcagcacctcaatgcctgctcccacatccctgctccagactccaatctgcaggacatcaaaagcaactcatagatttggtcaattcatttttctttaaaagagattcagtggtttattcactgagttgactggccaaagccacctcctggccttcgctgacttctcagagaccaggcctaggcccagaatgggccccaagctttcaggctttcattttcaaaatgaatcctgactgacaagcagctacttccgttgctctggagactcctctccgcaaccccagatctgtaaacaccaaaccgcacacakgcacacacacttccagaatatgcaaa

SEQ ID NO: 533630 - DNA, 575 bp, Homo sapiens
gccctttgtttatatgaattcaggcttctaccctggagcaggccattggcccttaagtagttgctgggaagaaggtactagccctaggggtgagggggctggcctcatcttgaaaggaatgtgaaccatcaggagagagggggaggccagtgagcagtacaaagtggttccttccttactttatcagttggcttctgtcatacgtaaggcttggaataataaactcttagttttcagagtgctttcatatttttaattatctcttgacccagacagcaagcttgtgagatatgtagagaagacagtatttatatgcaattcacacacaaggctgagggaggttaagtggcctgcccagggtcacgcgtctcgaaagtggtagagcagggtccgtgctcatgcctctgtttgatgctgccatactgtacatttgggtacggctgacaggaacagctcttaataaaattgtgcagtgggtaaatgttgtccttggcgccttcagccatcyatttctgacatccaggcatcctgtaccccagatcacctaacgtagcactctgtaataacagtgatta

SEQ ID NO: 533631 - DNA, 586 bp, Homo sapiens
tgttctaaaatatttactcctaatgtgcaaaatagtgacagatttgatcagattaattgtatttcactcactggatcatctaattgtggctcccaaacagatttttcaaatagcttttggctggattgcttgtcttcatcctccctgctcacagttcctgtgtcacaatatcttaatgcattctgcctttttggaggcttaataaagaagcttgccacagaagccattcttcagggttttgccaaaaaaattgttttcaattagtattacaaggggaaaccatctcagttgagatgtagctgggaaatgcatggggacataacggtactaattgctcctggtcattgttggtctgaggggccgtagggagaggaggagctgggcacagcctatttatctgctcwgtgatttctctgatggctggattacaggatgtgatttccttctcagatccttcagtgatttccaaggtgagcagaagttgcagattccttaattgggaggcctgatttaatgattacagaaatgcagtggctggaacttgctttgtagctggcaaagaaggaatgcccgggagtggcttctc

SEQ ID NO: 533632 - DNA, 373 bp, Homo sapiens
tttcatttctgtaaaaaaggctgttagaatttggataaggattgcatttgtagatcattttgggtaggttattcatccatccaggcaaacactattcattttctgtctttatgtgtcatcctgtgctaaaggtcatgggagcaagggtctrtaaggatgattgagatttgatttctatttccaggtaactttgttttttaacaaacttctttttttttttttaagtggcttttctggtgtattctttctttttaattgagatgaaattcacacgacataaaattaaccatttaaagtgaacaattcactggcatttagtacattcacaatgttgtgtaaacaccgcctacctctacctacgtctaaaacagtt

SEQ ID NO: 533633 - DNA, 406 bp, Homo sapiens
ggccatttgtgctgattggtggattgttaacctttttgaatatcactctggggaacagtttaagaatctttctcagtacaaggctccaggmagacattactgaattgatcaaagttggtactttagatgaaacctatttatcacccctggattaaggtcttatctcccttagggatatttggttataaacagtgtgctctgaaggttaaagaacctccagggctccaggaactggacttctactgctgtaccttcaagtaccctccttggacagaactgggggctgaggccaaatcacagttcctgatctggattggcctgacctttgaacatgagatagggcaatcaatggggacgggcactaaaatgaactctaagaccctcccctcattgccaaggcttctag

SEQ ID NO: 533634 - DNA, 609 bp, Homo sapiens
  misc_feature (1)...(609): n = A,T,C or G
tataatgctttatttccaaatggggagactgaagctctgaaagttaaatagctttctattatacaggtagtaattgtagagctgagrttgaacccgtgtctttctggtttttttttttaagaatttatcaaaagtctttgattagatttattatgacataataaggagaaaaatcagattcagacaaacttgactccatagtgtgcattttccactcagttatttgtgtttctgaattagtaatttcactgaagctgtgtcctcaactgtaaaatgcaagtcatgatatttgcagatttgtgtgatgtttaaacaaataatacactgtttctaacattttcctgaatatttgaattacctggaatgcttagaagaagtacagatacctcaacagcttctttcaaattctgatagaatgggtctggattaaagcctgngaaattttaattttagcaaatgggctgagatggctttagaaacaatgagctaatgtacacacagtagcacagccattatcaccgaagttagagtttaatggctgttgtattattattgaagttgccagccttgttaattatatttctaaatggtatctgctctggaagtccc

SEQ ID NO: 533635 - DNA, 629 bp, Homo sapiens
gtctagccatgtggcagatactttagccaagaataatacccggattctgcaatttgagcaccaattatcaggaggttaaaagcactgatttatcctggtccctggtctccctcaagccgcgtacagtgctctaatgatgagcaattgaggagcagcgtcttttctcatgttcattactctccaacaagatcttaacttgataaggccatcctgaaaaggctagatcagctttagacaaggtagcaggtgcatttatcaactgctcatgtttgctgagtcagggattgctgtggtttttaacatttttttttcctactaaagaagttactttttttgttttcatatttaggggattgctatctattcatgacagcattttccattatggcacctgaagaaagtgtttaaacttttctcccagtttctaamctcaagtcttttcaataaattgtatatattatgcaattcgatgctagataattgtcttattccctcaccctccaaaatactagcatatacctaattaatacagggatattccataaatcataggtgccaaggaaaaaccatgtaactggggaaaactttacacagaatatcaatcagatcctggtacttgtcatttaagt

SEQ ID NO: 533636 - DNA, 618 bp, Homo sapiens
  misc_feature (1)...(618): n = A,T,C or G
tcgttaggaaaagagagaagaaatgcttttcctttgtgggtatgatgagcatttttgaattactatcttatgaacactgataatgcagtggctcatcagctcatcttatttggtcccttgtttaggttgcatctcagagctatttagttgctatggtgacagtaaygatgaaagctgattggaagaagataacatcttatttgggacattttcagttgaaaggagagagtacattctacgctttcctattagacaagatattgggttacatccatgttgattagcaggtctcacttttcttatcagtacagattgtttcagtatcgtactttatgactaaactctctaaaacttgacttgggatttcaccagcttgaagtaacccaatctccatcaaacgggatttttctgaatatagttgttcagcatatataagagaagaaatactcaatttaatatcaaagagccaaattcataatttcaaacaatgtatagtatacatacaatataatgaaatgttttttcattgatagaattatttaataagaatccattaacagtcaggaaactataggaacttcagcaataannnnnnnnnnnnnnnnnnnnnnnnnnnnn

SEQ ID NO: 533637 - DNA, 618 bp, Homo sapiens
  misc_feature (1)...(618): n = A,T,C or G
tcgttaggaaaagagagaagaaatgcttttcctttgtgggtatgatgagcatttttgaattactatcttatgaacactgataatgcagtggctcatcagctcatcttatttggtcccttgtttaggttgcatctcagagctatttagttgctatggtgacagtaatgatgaaagctgattggaagaagataacatcttatttgggacattttcagttgaaaggagagagtacattctacgctttcctattagacaagatattgggttacatccatgttgattagcaggtctcacttttcttwtcagtacagattgtttcagtatcgtactttatgactaaactctctaaaacttgacttgggatttcaccagcttgaagtaacccaatctccatcaaacgggatttttctgaatatagttgttcagcatatataagagaagaaatactcaatttaatatcaaagagccaaattcataatttcaaacaatgtatagtatacatacaatataatgaaatgttttttcattgatagaattatttaataagaatccattaacagtcaggaaactataggaacttcagcaataannnnnnnnnnnnnnnnnnnnnnnnnnnnn

SEQ ID NO: 533638 - DNA, 629 bp, Homo sapiens
aatcctcacagaagagtaatgagtacataaaaataatggctgagggggaatatgtcatcctaatggagcacagaaatagggtttccagatctgactgatgggccagagatcatcttctggcaggagggatacttgaacgaggttagtgacatgccaggggtgggtacttaggcagattagagttcagcaactgtaacaccaacaaggacagaaaattaacaaaataaagaaaaacaaaaccacatgcattggtctctcactatatgccagacactgtactatggacgtcatttggattcttactgaaggtayacaattagcctacggatgatgaccctatgacctggatacccttaaccatattttatatctaggaagaagattaaatgtgttaagaatcttgttcaacatgatacaactctgcttcggcagctaagcaatattataggctcatgaagtcttactctagagctttattttttaaccacattagactgtgaagaagtattttttgaaaaaaacaagaaagctggagaggccccttagggtatttgtgaagaagaaaaatcctgtttttgttccctttttttttttgagtgatgtcagcttactagagggacctcagaaaa

SEQ ID NO: 533639 - DNA, 626 bp, Homo sapiens
catgaaaaaaattaaatttataattaagattcctaaagatttggtttttcctttatttgggagggattttttaaagatataattttcacttgtagaaaatgaattattaaataaattatggcatctaaaatagaattctgacaaattcaaaaagcataacttacacagtattaggaagaatcaaacagtgttacaaatgagcataaatgtgtttccctttttgtcagatggttaaatgtttaactatgacagaaaaattaaaaagttaacaagaaagtttcagccaataaatgcaaaaagttaacaatgagatttcaaccaacaaacgcagaacccgttcaccacatatgattatctttkgtctcaagaattttgcatattttgttaatgcagatattatttatgctcctctatgtaaagctataaagtcatgtctttgattatttataacgtgccttgtcatctccatgctcttataatcaaaagaaagaaatttatcatcagaaatctatgtgcagagggaaagccaagcaaaagcattctcaatttcactaccttgtttcatttctataagataacagtcttatgagcctataattctattctatgcaaacctgtcattctat

SEQ ID NO: 533640 - DNA, 626 bp, Homo sapiens
catgaaaaaaattaaatttataattaagattcctaaagatttggtttttcctttatttgggagggattttttaaagatataattttcacttgtagaaaatgaattattaaataaattatggcatctaaaatagaattctgacaaattcaaaaagcataacttacacagtattaggaagaatcaaacagtgttacaaatgagcataaatgtgtttccctttttgtcagatggttaaatgtttaactatgacagaaaaattaaaaagttaacaagaaagtttcagccaataaatgcaaaaagttaacaatgagatttcaaccaacaaacgcagaacccgttcaccacatatgattatctttggtctcaagaattttgcatattttgttaatgcagatattatttatgctcctctatgtaaagctataaagtcatgtctttgattatttataaygtgccttgtcatctccatgctcttataatcaaaagaaagaaatttatcatcagaaatctatgtgcagagggaaagccaagcaaaagcattctcaatttcactaccttgtttcatttctataagataacagtcttatgagcctataattctattctatgcaaacctgtcattctat

SEQ ID NO: 533641 - DNA, 691 bp, Homo sapiens
tgtgttgcaaaatagtagatacgtttcccagtaaagaattgaaataccagcaactggcactgatagctaatgctccattatttctgtgcataaatccacgctgaacttcccttttttttcttgttttttgtttttttgaggcagtatttcactctgtcacccaggctcactgcaacctccattcccaggttcaaacagtccccccacctcagcctcccagagtagctgggactacaggtgtgtgccaccacacccagctaatttttgtattttttttggtagagacagtctttcaccatgttggccagactggtcttgaactcctyatttcaagtgatctgcccgcctcagcctcccaaaatgctgggatcacaggcatgagccaccatacccagcctatgaacattccataaccattttgcccttgtgatgtcatcactctaccattttgtttctggactatctccctgcaacgtaagttaacatgtgctcaggtaataaaatttattataatgttaatatgggtgagtaaaataagtagtaaaaattatattaagacaaagtatttccttatttctcattattctaaaattttttcctccattgcctgtcaatttaaatatttatatactcagcaaccatttttattagttattaccttaagtttaatattctgctctcaattctaaaa

SEQ ID NO: 533642 - DNA, 648 bp, Homo sapiens
agctgccaaatcaaaatttgcatttaaataacatgcctggcctagcaccaaggctcacacctgtaatcctagcacttcctttaggaggccagggttggacaatcacttgacaccaagagttcgagaycagcctgggcaacacagtgagaccccgtctctaaaatgtgtgtgtgtgtgtgtgtgtgagtgtgtgtgtgtgtaaaatattaacaggtggtttggatgaactacacagtttgagaagctctgacctagggaagagttaagtctttgacttagcaggtacaaaagatgactgactctcttgagatgtcttttaatttaattgtggctgtattcaaccacaacacttagaataagtttatacaacatcttcttgatgatgcacaatgctagctgcctttttgttgcctttggaaacactgcaatgcattcattggaatgacagtaggcagaagtattttctctttaccacacttgtttcaagaaattgaggctttattgctctgaaaacctctaaattctatgcaaaactgtgaaatgtttctgaaccagtaatacaggagaacagattgttaaaggatctacttccatttctatttatttaaaagtttataggattgggttaatggaactcagatgagttta

SEQ ID NO: 533643 - DNA, 550 bp, Homo sapiens
ctggccagtacaggtatagcagactgattttaaggtcatctgtgggaaatgtagtgctccacaggttcagcatctcaggttccttttgctgtgttttcccatcatacctaaagtggtacctttgaacacataatccaagaaggctcacaaccacattctcatttcagtgaataagtgagaggatgggttgaagaaggggacctctttttttgataggttattggggaactggtggtgtttggtwacatgagtaaattcttcaatggtgatttgtgagattttggtgcactcatcaccgaagcagtgtatactgtacccaatttgtattcttttatccctcaccctcttcccaccctttccccctgggtccccaaagtccattgtgtcattattatgcctttgtgtcctcatagcttagctcccaaatatcagtgagaacatacaatgtttagttttccattcctgagttacttcacttaggataatagtttccaatctcatccaggtcactgcaaatgcctttaattcattcctttttatggctgagtag

SEQ ID NO: 533644 - DNA, 439 bp, Homo sapiens
gttcctctctcaagcacacagattctctctgtacaacatggtcactgccagaggatgatggagaggtgatgtccatgattcaagactgtgtttcctaccctcttccattgtatctttcagcaatatgaagttaaaaccaggtactgtgagtgctcacctgattttttattcttttgaactgctttgtgtgtgtgtgtgtgtctgcagagagttgttaagttgatgtttatgtagggaagatgattggtggagacttctatttggccatcttgctctgcctctctctgtcaaggctaatacatttggcacaccccctttattgtgataatgtgtgttctaacaaataaatatttagcaaacttcctgaagaaagtccagstaataggattatcctcagcagatactcagttaacacgtgatgcaattcttgttcattttt

SEQ ID NO: 533645 - DNA, 459 bp, Homo sapiens
acaggtaagataaattccaggttactaaactggccacctgcatacccaaactttcaggtagcctttgaaggtgaccttgtattatgtaygatgctggagtcctatctagtaaattatttcctgtatgcactaagtggatgcaaattatttattgtgtatctcacctatagatttactcttttaagaccttgagaatctttcttgttttttagaaatttcatttgacttttaatgttctcaagggctcagcctcaaatgattatacctcatgctgaggaaccaaaaaaattaagtcccaaacactgagtaattatttttccaatatgtacgtctagcagcctttttagtaagtgcgctaagaaaaaaaatttctcctctaaagttctcaaaaataacacccaaagcatagattcaacttagccagccagaagtacctattcatctgggccctttgaggta

SEQ ID NO: 533646 - DNA, 592 bp, Homo sapiens
gcagtaacagacgtggccccgtagtggctgcagaatcaaaattcctatcccagaactggcagcagctagacagcttagtggtggaagactgacagttctcatatatgatttgaggcatattacttggaagcttatccttaagcctggctctccagccttcctaaaaattctgtgaagcaccaaatatatttaagtaaatttcctatgtgctcaaccagccagtaaacaacttctgctgactgaaaacactgaatcgtccaatcatgaagccaaaagaatgtggctgtataacaagaaaaataaatccatgtatctacagtatggagttaaagtgccaagaaaagttgtcaaggtaactcttgataggtaaaggtgaagcagaattatacacatcttcaaacgctctgctaagtaaagagcctggccttcattcagcatgaaatgtggtatcactgagcttccaaacaaaggagtraatgatatgatcaaaaaaattgtacttaagatgactgattattctgacagcagagttgccaatggattaaagcaaaacaactggcaaacacagtgattaacagactattctggtaat

SEQ ID NO: 533647 - DNA, 627 bp, Homo sapiens
ggcagacccagttgcagtgaaaaacagaacttaatttttgtatcacctaagtaactgtgtatgcaagtaaagcacagtggctaaatttggctagctgataagtacagaccaatarattctacttttgcaaatttgcttgtcttgtgactttggtaaagttatatattgtgaataagttttcagtaaatatgtggtaaaacttatgatccaatactgtataatgatctaatttctatttatttaatttatcctttttcatcagcatcaccccagactgtgctctcccacattatatttcagccttcaaaactacttgcaatttctggattaactcacactcttttcttattcttgcccttgcgtatactctgccatgataaaaatacatttatctatatgctgattatagcatttatcatataattgtgtcggctacttgtctattttcccaactgggctcagtgcttcttgaaggcagacacagagttttacttacgtttgtattcttagcattcataaaatacctgcatgttgtaggcactcgacaaatctgtatctatagctatggacattgcactttaatcaatattgtggatcctccatcagttcttgaagcatggtttaaca

SEQ ID NO: 533648 - DNA, 643 bp, Homo sapiens
tgcctaggcatttggctgcctcctgctactatcaattccataacagaaaaagacatgtagcaatgtgtgtgtgaaataaaatagtgtgtgaatgtgagtctaagaaatatccttaacattctcagctatagaatatatacgagctgtagcatatgaggcacaaaaggtaggtggagtatacttcataaagtgtcttagttaaagagataagagtgtttgtggaagcatgattaatctacttcagaaagatagctttagcaccagtgtgaaaatgatttgattgtgaggatcctggtkatgttaaaggacgaggaagctggaggaaggaagttgggggattatggaaactttatgttcagcaacgaattaggatcctgcacaagcaaggaatgttaaaggccagaattaagacaatagtgaaacaacaacagaggaattaatgttctggaagcagtgaatgatcccactggaatttctgaatattgtgtatatttgtcagaatgtagcaccaactatgcaaatgttcttgcaccaaaaacttgcaaaccacaaaggcaaccccttaattactaatgccagttagtgccactgcagtaatttcctgagtaagcaatgagttcatttctctggcaagttatctcaa

SEQ ID NO: 533649 - DNA, 643 bp, Homo sapiens
tgcctaggcatttggctgcctcctgctactatcaattccataacagaaaaagacatgtagcaatgtgtgtgtgaaataaaatagtgtgtgaatgtgagtctaagaaatatccttaacattctcagctatagaatatatacgagctgtagcatatgaggcacaaaaggtaggtggagtatacttcataaagtgtcttagttaaagagataagagtgtttgtggaagcatgattaatctacttcagaaagatagctttagcaccagtgtgaaaatgatttgattgtgaggatcctggtgatgttaaaggacgaggaagctggaggaaggaagttgggggattatggaaactttatgttcagcaacgaattaggatcctgcacaagcaagkaatgttaaaggccagaattaagacaatagtgaaacaacaacagaggaattaatgttctggaagcagtgaatgatcccactggaatttctgaatattgtgtatatttgtcagaatgtagcaccaactatgcaaatgttcttgcaccaaaaacttgcaaaccacaaaggcaaccccttaattactaatgccagttagtgccactgcagtaatttcctgagtaagcaatgagttcatttctctggcaagttatctcaa

SEQ ID NO: 533650 - DNA, 518 bp, Homo sapiens
gatacatagttaattttacacagcccaaggcaacagagtwtgggaaatggtcagtagtgttagcagacttgataaaacgaagagaagaggagggataatgtgaaaacaaagcaaaggaagacaacattctaccacctgtaaaatagtattttcagtaaattatttgaaaaaaaaaaaaaccagaaactaacccatctgaatccattcaaaatggtcatttgaacaatacagggctagatttaaatgctattatactttacataaatatacaacatcccttaaagtaaaactaatttttttcacagctacaaaggaaatacatttcattaacactgtttcttaaaataatcctagaaaacaaggtctctttttgacacaggtatttgaatttccttggccattaacatcttgtaactaccattgttttcagatataattctatttaaacaaatctaaaaagtgatagattctttagaacatgaataagttatataaaggattacccctttttctttcaa

SEQ ID NO: 533651 - DNA, 482 bp, Homo sapiens
aagattctgctggctggaagcttgaacttctagcaaaagcctcaggctgtttccactcgtggaggaatgtgaaagggagccagcaggtgcagagatcacatggcaagagaggaagcaagagagagacwggaggtgccagactcttaaacaaccagctctcctggaaactacagagttggaactcactcaccaccaccccaaaacattagtctattcatgagggatctacccccatgacccaaacacctcccatcagatcccaacttcaacaatacggatcaaatttggaggagacaaacatacaaatgatagcagtggttaataatttaattcacaacttctgtatcattaataagaatttgagattttttttaaatcaagtatttataaagaatctttgaaatgtccaactataattattcttttaagtatgtgcatatttaggattaatatatttttctgataaatttttccttttgcca

SEQ ID NO: 533652 - DNA, 583 bp, Homo sapiens
tgccattttgtctcttaatgaacatgcccaggaagttgcatctccctggtgcctgcatccaattaacactttcgtgcaacagtgtggaccatcaggaattggcctctctctggtgccactgccagtgaatcactttttgttgttgttgttgttgtttttgttgttttgagatggagtctccctctgtctcccaggctggagtacagtggcgcgatttcggctcactgcaaactccacctcccaggttcacgccattctcccacctcagcctccggagtagctgggactacaggcgcccgccaccacgcccagctaattttgtttttgtatttttagtagagacaggrtttcaccctattagccaggatggtctcgatctccttgaagggaaaattaatgaattttataatagccaagaaatttattcttttccttaaaggtagaatgcaatatagccccacccgggggcctgggttgagagaatattaactgcttgtttctcctctgtgcccagagaggcttatctgtgttctatcatttcacgttccttgaggcacggcgtgttcttgcttctctccctagc

SEQ ID NO: 533653 - DNA, 583 bp, Homo sapiens
tgccattttgtctcttaatgaacatgcccaggaagttgcatctccctggtgcctgcatccaattaacactttcgtgcaacagtgtggaccatcaggaattggcctctctctggtgccactgccagtgaatcactttttgttgttgttgttgttgtttttgttgttttgagatggagtctccctctgtctcccaggctggagtacagtggcgcgatttcggctcactgcaaactccacctcccaggttcacgccattctcccacctcagcctccggagtagctgggactacaggcgcccgccaccacgcccagctaattttgtttttgtatttttagtagagacaggatttcaccctattagccaggatggtctcgatctccttgaagggaaaattaatgaattttataatagccaagaaatttattcttttccttaaaggtagaatgyaatatagccccacccgggggcctgggttgagagaatattaactgcttgtttctcctctgtgcccagagaggcttatctgtgttctatcatttcacgttccttgaggcacggcgtgttcttgcttctctccctagc

SEQ ID NO: 533654 - DNA, 618 bp, Homo sapiens
tctgatgctattttgatgcatggaacccattcattgatttggtcttcttactgtaccatgcaatctgtaccatgtaaagttggcaaactattataagcatgatatggtttggctgtgtccacacccaaatctcatcttgatttcccacatgttgtaggaggcacctggtgggaggcaattgaattatggtggaggttctttcctgcactattctggtgatagtgaatgagtctctcaagatttgatgattttcaaaaggggagtttccctgtacaaactctctctttgcctgctgccatctgtgcaagaagggacttgctcctccttgccttctgctatgattgtgaggctaccctagccacatggaactgtaagtccaattaaacctgtttcttttgtaaattgcccagtcttgggtatgtcattatcaacagaatgaaaatggactaataccaagtagttctattgtgaagatatagctttggagttaaaaacaaattctgcctgccctacctggttagsgagaatttaatttcaactgaatattttgtataaagtagaaatgtcatgtcgttaatgaatgagaggatccagaagtcctaagcctcttgaataggg

SEQ ID NO: 533655 - DNA, 618 bp, Homo sapiens
tctgatgctattttgatgcatggaacccattcattgatttggtcttcttactgtaccatgcaatctgtaccatgtaaagttggcaaactattataagcatgatatggtttggctgtgtccacacccaaatctcatcttgatttcccacatgttgtaggaggcacctggtgggaggcaattgaattatggtggaggttctttcctgcactattctggtgatagtgaatgagtctctcaagatttgatgattttcaaaaggggagtttccctgtacaaactctctctttgcctgctgccatctgtgcaagaagggacttgctcctccttgccttctgctatgattgtgaggctaccctagccacatggaactgtaagtccaattaaacctgtttcttttgtaaattgcccagtcttgggtatgtcattatcaacagaatgaaaatggactaataccaagtagttctattgtgaagatatagctttggagttaaaaacaaattctgcctgccctacctggttagggagamtttaatttcaactgaatattttgtataaagtagaaatgtcatgtcgttaatgaatgagaggatccagaagtcctaagcctcttgaataggg

SEQ ID NO: 533656 - DNA, 614 bp, Homo sapiens
cttttcaaagtgtggtccatggattagccccatcagcatcacctaggagcttgctagaaatatcaaagtgaaatagtgctaccatttttcccctttatgttcaaagatccctgatgctgaggcaatcataatcataatagtaaaataataataaaaataatagaaaaatagtaatagtaaaataataatgataataataaaataccgttgatgagtgcttactgcattagtcatatgcaatacatatgactatgtaaatagtcagcaactatttatataataactctaatgcaattatcatagtcctcaatttgtgcataaaaaaactaaagctcaaagaagataatttatccaaaatcacatagmtgggaaatgttccatccaaatctattcagctgcaaagcctggactctctctttgccactccatgctaccataactgagatctttcatcctaccactaacccaccacaacattccctgactgcttccccagactcacccattgcttgctcttcccactgatttttttttcattgctcttgcttagtttgcaacatctgcatatgattttctgcaatacaggtggttaagagtggtcattcattcttagg

SEQ ID NO: 533657 - DNA, 635 bp, Homo sapiens
ggaaagactggcaaggattttatgattctctggtttttcctatttcctggaatattctttttcacatttcttgcctagttaactcctaattaatctgaaagacctaggtgaggtatcttttctatggtaggtagaawaacattctctcaagatgtccatgttctaatccctggaacctgtgaatatcttatgttacttgataaaagggactttacagatacaatttacatcatagaccatacaatgggaaaattatcccagattttccaggtgggcccaatgtaaactgcatggactcttaaaagcagagaagtttctctgaccagaggcagaaaagacatgaggcagaaggggaagttgcagaaacttgaagcacgagagagaatttatcccccattcctggaaagctacatggaaagcaggacaaaaaaaatgtgagtagtctctagcaataaagatcagcctctggatgacagccagcaaggaatgagaacctcagtcctacaatggcaagaaactgaactctgccaacactctgaatgagcttaaatgtaatttaaacccagagcccagaaaggaacactgtgttgctgatatcttgattttgacccatgagactctaagctgagaatcag

SEQ ID NO: 533658 - DNA, 623 bp, Homo sapiens
gcccagagggagttctgaccagcggacctatgagataataaatggatgttgttttaaggtgcttaatttgtagtaatttgttttggcattaatagacaccccctttcagaaagccttttcccwaacttcctatatccaacccaggtctatgtttcatgtcccagctacatgctgcccatagctcctgcatgctcctcaacaaggacagcccactgtgctctacttctgtttattttgctgtctcctctgctacattgtgaatgccctgaaaatagaaaccatattttatcaggttatataataagcacatatacatagcctatacgtaaatcattctcagtgattgttaaatgaataaggtagaaaatcaattcatgcaacaggtatttgttgagtacctactattggccagggattgtcctaaatgatagtcacatacaatgaatatgaaaagtatctgattcaaagaggggttggaggaggcagacactaaatgtaaaaataaatgaatactttctgacagctataatttcaaataatacaataaaataatggaacagagggtcatagggtaagaggcaagactaccttagctggagcagtaagggaaggccctcttgaag

SEQ ID NO: 533659 - DNA, 626 bp, Homo sapiens
tatatttggtatattcccttgcagattatacatttaaaaataaaatttagattatactttgtaaacagttttacgtccttctttttccaaaatattattttcataaagtctttaaaaacttgttttaaatgggcctatagtaatttgttgttgaatgaaaccattcctctgtcgttaaacattacattatttcaaaacwttatttcaaaaatgtcactattcattctataatgatgtgcaattataagtcacagacttgatgttcacatagccacgtgcatggatcttaaatctataatcctgaatgaaaaaaacatggaaagcagaacgagatgaataacataaaaccattaatatatgtaaagttgtgtgtataccaaatgagaattcatcttctataagaacatagaaacaaagggctcagcacaaacattcagtttgtcatccagctttggccatattaactaagggtgaacatattgtacacattataacttaacttcgccattcccaggcatatgcctgacagaaatatggtcatgtgtttatcaaaaattaagggcaataaatagtggtatattcacaaagtgagatattatacagcagtaagaaagaacaatctccag

SEQ ID NO: 533660 - DNA, 626 bp, Homo sapiens
tatatttggtatattcccttgcagattatacatttaaaaataaaatttagattatactttgtaaacagttttacgtccttctttttccaaaatattattttcataaagtctttaaaaacttgttttaaatgggcctatagtaatttgttgttgaatgaaaccattcctctgtcgttaaacattacattatttcaaaacattatttcaaaaatgtcactattcattctataatgatgtgcaattakaagtcacagacttgatgttcacatagccacgtgcatggatcttaaatctataatcctgaatgaaaaaaacatggaaagcagaacgagatgaataacataaaaccattaatatatgtaaagttgtgtgtataccaaatgagaattcatcttctataagaacatagaaacaaagggctcagcacaaacattcagtttgtcatccagctttggccatattaactaagggtgaacatattgtacacattataacttaacttcgccattcccaggcatatgcctgacagaaatatggtcatgtgtttatcaaaaattaagggcaataaatagtggtatattcacaaagtgagatattatacagcagtaagaaagaacaatctccag

SEQ ID NO: 533661 - DNA, 626 bp, Homo sapiens
tatatttggtatattcccttgcagattatacatttaaaaataaaatttagattatactttgtaaacagttttacgtccttctttttccaaaatattattttcataaagtctttaaaaacttgttttaaatgggcctatagtaatttgttgttgaatgaaaccattcctctgtcgttaaacattacattatttcaaaacattatttcaaaaatgtcactattcattctataatgatgtgcaattataagtcacagacttgatgttcacatagccacgtgcatggatcttaaatctataatcctgaatgaaaaaaacatggaaagcagaacgagatgaataacataaaaccattaatatatgtaaagttgtgtgtataccaaatgagaattcatcttctataagaacatagaaacaaagggctcagcacaaacattcagtttgtcatccagctttggccatattaactaagggtgaacatattgtacacattataacttaacttcgccattcccaggcrtatgcctgacagaaatatggtcatgtgtttatcaaaaattaagggcaataaatagtggtatattcacaaagtgagatattatacagcagtaagaaagaacaatctccag

SEQ ID NO: 533662 - DNA, 626 bp, Homo sapiens
tatatttggtatattcccttgcagattatacatttaaaaataaaatttagattatactttgtaaacagttttacgtccttctttttccaaaatattattttcataaagtctttaaaaacttgttttaaatgggcctatagtaatttgttgttgaatgaaaccattcctctgtcgttaaacattacattatttcaaaacattatttcaaaaatgtcactattcattctataatgatgtgcaattataagtcacagacttgatgttcacatagccacgtgcatggatcttaaatctataatcctgaatgaaaaaaacatggaaagcagaacgagatgaataacataaaaccattaatatatgtaaagttgtgtgtataccaaatgagaattcatcttctataagaacatagaaacaaagggctcagcacaaacattcagtttgtcatccagctttggccatattaactaagggtgaacatattgtacacattataacttaacttcgccattcccaggcatatgcctgacagaaatatggtcatgtgtttatcaaaaattaagggcaataaatagtggtatattcacaaartgagatattatacagcagtaagaaagaacaatctccag

SEQ ID NO: 533663 - DNA, 584 bp, Homo sapiens
tctttaaaaaactaagtaaaaattgatgttgcttgttgtggaaaataaattgtttttataatagaaaacatttctatgatggtattatatagccaagatcagtgaaaagcaaactgtatttataaggttttgatattagagaactaattaaagccttttatcagtaagaacacagagaccttattttayggttaaatgtctcaaaattagtgaatagatcattcctcagagtctgcttacaactaccaatcttttacacagtcattgctaatgcctataatcaaggaataactacaatttatttttttttcatttaatcagtgtgcttttgaaacggacaggttgtgttctctgccatttacaaactcaactcaaggatttaatttaaaattcaataattgaatgagatggtataataaccttttatataaattcatcatttcttatctttcccaaagaacttatgtcctgtatgccataatcactactgtttacttttctggaaggtttttgtataaatttctatatctcaccctggattgtaaatccatcctcaaaatacagcgtgaacagtttactactcc

SEQ ID NO: 533664 - DNA, 584 bp, Homo sapiens
tctttaaaaaactaagtaaaaattgatgttgcttgttgtggaaaataaattgtttttataatagaaaacatttctatgatggtattatatagccaagatcagtgaaaagcaaactgtatttataaggttttgatattagagaactaattaaagccttttatcagtaagaacacagagaccttattttatggttaaatgtctcaaaattagtgaatagatcattcctcagagtctgcttacaactaccaatcttttacacagtcattgctaatgcctataatcaaggaataactacaatttatttttttttcatttaatcagtgtgcttttgaaayggacaggttgtgttctctgccatttacaaactcaactcaaggatttaatttaaaattcaataattgaatgagatggtataataaccttttatataaattcatcatttcttatctttcccaaagaacttatgtcctgtatgccataatcactactgtttacttttctggaaggtttttgtataaatttctatatctcaccctggattgtaaatccatcctcaaaatacagcgtgaacagtttactactcc

SEQ ID NO: 533665 - DNA, 587 bp, Homo sapiens
atagaatcggaatgctgctatgtgacagaaatcatcacactaatgcacaggaattgaagtcaagcaactttggtcttgtctgaattgaattaagtcttgaccttgtaaacatttccgttggaggtagaacatacacatttgactttttgtcaaataagggatagtaaacaatgattctgagatcctaataaattaaaggtattgtaaaggcattaaatatactttttaaaagaaaccaaagataaaaaggcacacagatgtttaataaattagaaagtgaaatgtaaatcttcatagttgaaatgtttgcatcttcagatcttcactggttttatttgataattttgaaactatgattaataatgagctcacattttaaactcttagtgtgcatgacaagctctgcaagtatctccattcactatggagttgtccatagtaccagtgactttaaaacaatgtcagccactgcatattcatttttmtttactcttatggaagtctgagtgaataatgatatttgcacagtagagattttttttaaagttttagcaccccctcccacattggttgtttaagtgcctcca

SEQ ID NO: 533666 - DNA, 578 bp, Homo sapiens
atgacaagctctgcaagtatctccattcactatggagttgtccatagtaccagtgactttaaaacaatgtcagccactgcatattcatttttctttactcttatggaagtctgagtgaataatgatatttgcacagtagagattttttttaaagttttagcaccccctcccacattggtkgtttaagtgcctccagctgctgttcccatgaacacagtgttgataggtggtaaagaggacaccatttctctactgcttgttccatgggagtccagggtttcttgagctggatactggttggaagttccatacatacattgggatgaggaagaaggaattggggtttgcaaactggaagctgtaagggaaaatataatcagcaattgaaaattgattgacattttcttttctctgcaaatgccactcattttaataccctgtatttatttttgcacttagcacacatacctattctaaatttgagtctgtatggtttaccagagcaatcatcttttcttccatttgttcccacttgctagtctcccagaaattatttcctctacatatttcacaaagaa

SEQ ID NO: 533667 - DNA, 578 bp, Homo sapiens
atgacaagctctgcaagtatctccattcactatggagttgtccatagtaccagtgactttaaaacaatgtcagccactgcatattcatttttctttactcttatggaagtctgagtgaataatgatatttgcacagtagagattttttttaaagttttagcaccccctcccacattggttgtttaagtgcctccagctgctgttcccatgaacacagtgttgataggtggtaaagaggacaccatttctctactgcttgttccatgggagtccagggtttcttgagctggatactggttggaagttccatacatacattgggatgaggaagaaggaattggggtttgcaaactggaagctgtaagggaaaatataatcagcaattgaaaattgattgacattttcttttctctgcaaatgccactcattttaataccctgtatttatttttgcacttagcacacatacctattctaaatttgagtctgtatggtttaccagagcaatcatyttttcttccatttgttcccacttgctagtctcccagaaattatttcctctacatatttcacaaagaa

SEQ ID NO: 533668 - DNA, 424 bp, Homo sapiens
gctcctcctttactgtctgtcattttactctatttaatcaggttcagagtacttgacattatctttttaatrcatttgctcatgtatttattgccttactgtccctctactagaatgtaaacttcttacaggcaagaactatggcctgatcaccaccatatcctcacatctagaatggggtctggctcctagtcggttctcaataaattcattaactggctcactagccctgtatttccctcatatatggttgctgccttcttattgctgacatgacgtgctctctaagaaccaggctttatacttaagaaatagttgaactcaattctccttgcactacttatccacttattctatcccctcattttaccctgcagcacactttgtaatctacttgtaagccagctctgataaactaaagctt

SEQ ID NO: 533669 - DNA, 424 bp, Homo sapiens
gctcctcctttactgtctgtcattttactctatttaatcaggttcagagtacttgacattatctttttaatacatttgctcatgtatttattgccttactgtccctctactagaatgtaaacttcttacaggcaagaactatggcctgatcaccaccatatcctcacatctagaatggggtctggctcctagtcggttctcaataaattcattaactggctcactagccctgtatttcyctcatatatggttgctgccttcttattgctgacatgacgtgctctctaagaaccaggctttatacttaagaaatagttgaactcaattctccttgcactacttatccacttattctatcccctcattttaccctgcagcacactttgtaatctacttgtaagccagctctgataaactaaagctt

SEQ ID NO: 533670 - DNA, 664 bp, Homo sapiens
gccactgaagaagtctcttgaaagctgctgttcagtccaagccatgcatcgaccatgctcggtgtgatgaggatagagtcctgatgtggagtggggctgtgccctaaacacagtctggtagttagagctggtgctataaaagtcatgattggcttgagggagagtgggataaatgggctctgggtatgtggagcagtgtgatggagctgacagtactgggcccacacttgggggcctccctgccattggtccttggttaatgacacttcctcggcttgccatggctggagaaatgggtggtgtcatcagatggccagcaatctgtgaaagctccatttgacctggaaaaaatcaccagaacattcctttagtgtcatattaaagtagatgagctcacatctttaaaaaatattcaaaagatttattaatgtattgttttccagcttgcttcattcctgccctccaaaaataactaaactgaaaagcaccaaaaatccagaatttaaaaaatataatcacaacacatgtatatatcacaacagtggagacgtggatttggtgactacagaggaaagtctgcgatggcttcatggtttctccacaggtagcatggggaggacatgkgtgtctgctgctcatatttccccataattaaaaaattagc

SEQ ID NO: 533671 - DNA, 562 bp, Homo sapiens
ttcacagagtaaaatctctacatggagaatgagattaactcattttagtgagagataagttcattaggacactttgaaggttgtggaatgtctggagttaaatgtattttcaagtattttgaattcaaccatttaatttaatttaactcagtgcatatttattgaataactcctataaacaagacattctgaggatacatatagttacaagtcacaaacattaagaaattcaagactacaaagtagatgtgtctgttattaagtataacagaagaaataatgtagttagttctctgaacatagaggagggataaatcwattagtattaggggactgaagggagttcatgcttggaactgcagcagccattttgtgactgcaaaggagatattactggcacacttgagaatagcagagcagaagataacaagggcctgtgggtcttcgtagacatccttgagctgctaaccaatccagccactgcctacccctgaatttcttgattaggaagatgaaaaacttgattaagataatgccatttttagtccgtcattcagttctt

SEQ ID NO: 533672 - DNA, 562 bp, Homo sapiens
ttcacagagtaaaatctctacatggagaatgagattaactcattttagtgagagataagttcattaggacactttgaaggttgtggaatgtctggagttaaatgtattttcaagtattttgaattcaaccatttaatttaatttaactcagtgcatatttattgaataactcctataaacaagacattctgaggatacatatagttacaagtcacaaacattaagaaattcaagactacaaagtagatgtgtctgttattaagtataacagaagaaataatgtagttagttctctgaacatagaggagggataaatcaattagtattaggggactgaagggagttcatgcttggaactgcagcagccattttgtgactgcaaaggagatattactggcacacttgagaatagcagagcagaagataacaagggcctgtgggtcttcgtagacatccttgagctgctaaccaatccagcmactgcctacccctgaatttcttgattaggaagatgaaaaacttgattaagataatgccatttttagtccgtcattcagttctt

SEQ ID NO: 533673 - DNA, 464 bp, Homo sapiens
tctagtgattcagcttaaatgctgatctcccctccctgggctaaatcttagtaaagtagactaaacaatggagaacacagctcagggatacaggaaggatttgctctctgaaaacagctcakccacagtctcccttggtgtggtgacaaaaaaccactttaagcactttaaatctctattcaaaactatcacttacctattttatcacagtattctggccggtgtaaatacgcctggaaagcaaatcagcaccagtttgagttggatgatactctactaagtcattgctagattcttgggaatataagaaaaccaaattttacacaattaaatgttaaattacacatgaacaaagtctgtttgactttttaaaagaaataaataacacttggaaagttgttctcatctgtgaaagtatattaaaaggctgtcaaaaagaaaaatggaggatttcaaatataaat

SEQ ID NO: 533674 - DNA, 634 bp, Homo sapiens
ttatccctcatagttaattaaaatcctccccaagaatcggcagatgatagatataaggacattgaaccttttaatccatggaagggtgaactaatgatttttccgtaccttgctcagcttcagtggggtctgtgcctcactgcatttgtaccatatagatttcagaagagcagcgaagggagtgactccgatccccgcggcaacgcacacacacactgggtagtgaaatacatctgtcagggcagttccaaagggcccgtccactgccagcctggaatcatagaggaatgcagsctatttgaccttcagaacaccttgctcgtgaacccagaaccatccggagctggtgctttttacaggacgtgtttgccagtgcatgcagaggttgactctgtgcctgaaaatgccctatttggagagcctggggttagcatgaggatttccagctctgccttattgggagacaacgaggttgtcctggcccaggcactgttcatggaaggacaaagcctgacatctctcgctatagctcaggcctcgtccatgtggcatgctctccttacagcgcttagaagcttgttttggctccaagtatcattgaggctgctggaagagctatttccctttccacccc

SEQ ID NO: 533675 - DNA, 661 bp, Homo sapiens
ttttatttacatttccccaaacctgtccctgttccttctaagtttcccacttctaaaggtcatcttccttgccatgctcactgccaaccttctccagaaaccttgaacaagttagtcatgagtttgctaaggtctctttcctacycttcaccaagaacagtggcacagatcctgtgttcaactccatgaatcctcctgatccctttccctagaattgaacccaactttgttaaccctcagatgcaggtaaatagacctagggtttcccactgtatcataattgctacttgccacataattaattatggactgatatactaaactaccaaaatacttatttagaaagaaaatcatttttcttcttgtttttgtctttacccttctaatctcagaaacaaagattcattagttggtaaaatagaggttaatgtgacttaaggagagaattagcttctatgaaatatgaatttggatatcttttagtataacacatacatatatattacattacgcagcataatatattataaataagaacatcctatgattgagtactttctagtggggtgtgttgcaacacataagtcttagcaattttaagactggatgtcactcaaacctaaaacatcttttccataacagagttataaatgatattagc

SEQ ID NO: 533676 - DNA, 661 bp, Homo sapiens
ttttatttacatttccccaaacctgtccctgttccttctaagtttcccacttctaaaggtcatcttccttgccatgctcactgccaaccttctccagaaaccttgaacaagttagtcatgagtttgctaaggtctctttcctactcttcaccaagaacagtggcacagatcctgtgttcaactccatgaatcctcctgatccctttccctagaattgaacccaactttgttaaccctcagatgcaggtaaatagacctagggtttcccactgtatcataattgctacttgccacataattaattatggactgatrtactaaactaccaaaatacttatttagaaagaaaatcatttttcttcttgtttttgtctttacccttctaatctcagaaacaaagattcattagttggtaaaatagaggttaatgtgacttaaggagagaattagcttctatgaaatatgaatttggatatcttttagtataacacatacatatatattacattacgcagcataatatattataaataagaacatcctatgattgagtactttctagtggggtgtgttgcaacacataagtcttagcaattttaagactggatgtcactcaaacctaaaacatcttttccataacagagttataaatgatattagc

SEQ ID NO: 533677 - DNA, 532 bp, Homo sapiens
acctctagagttcccaaatagttacatcagatgaattctgccrttgcaattattgtttatattaggggatggatttctagtgcctccttctctgtcatctttctctccttgttcttcttacatcttctctcacttttaagtttccattgtccccagaataccctttggatagtgagaaaataatcaaagttggaaaagactcttctgggaggaatggttttagccttaagccaagaccttcatacaaatgaacatttgtgcttgttgcattaagggttgttgtaggagatagagacaggagaaggtggtggtggtctattaggcttagctccagttcctagtacaagacatggtatgtatttctggaaattctgaaatatatgcagtgagtctgaaatatgtacaggttaaatataaatgttaaagaagaaaggaaaactacatagaagcaatgaccacattgaaccattaagttgatttggtcatttcagttactgcaacagttgatgaggattgtgccagaattgatcca

SEQ ID NO: 533678 - DNA, 532 bp, Homo sapiens
acctctagagttcccaaatagttacatcagatgaattctgccattgcaattattgtttatattaggggatggatttctagtgcctccttctctgtcatcwttctctccttgttcttcttacatcttctctcacttttaagtttccattgtccccagaataccctttggatagtgagaaaataatcaaagttggaaaagactcttctgggaggaatggttttagccttaagccaagaccttcatacaaatgaacatttgtgcttgttgcattaagggttgttgtaggagatagagacaggagaaggtggtggtggtctattaggcttagctccagttcctagtacaagacatggtatgtatttctggaaattctgaaatatatgcagtgagtctgaaatatgtacaggttaaatataaatgttaaagaagaaaggaaaactacatagaagcaatgaccacattgaaccattaagttgatttggtcatttcagttactgcaacagttgatgaggattgtgccagaattgatcca

SEQ ID NO: 533679 - DNA, 594 bp, Homo sapiens
aaactctatggactgtgtcccaccgccttctcccgcacatcgcgcggggaggccggctcctgcgtgttcacctgttgtttagaagattcatgtttatctaatgtgaagtcaatattattgtcggggaaagagttagggttgctaacgaccttctgggagtgcacctgccggcccgggccacgctctgctggctcagaaaccacttagcggctctccaggcccgtctcctccacccaggtcacagcccaccattcatctcatctgaaaacgtcccacggggagagagccgcagtgcatagcaacggggggagcsgaaacgctgtcggaaaagggctggcgccgcaggaggtggccgagccagaagcctggccattctggggtggagattccagatcccacctctgtcgggacgcagagctgggcaccatccaagtgtggcaggggatgggagcccgcgcgagggtcttcaccacggacggcacggggccgaggtgtccattgcagagccacagatcttggcacatgaagggaccctttcctctaaactccactttaaggcaggtactggagtggagccgctttttatgcagaagc

SEQ ID NO: 533680 - DNA, 592 bp, Homo sapiens
aaacggccggcaagggcagtatgtcaagaggcgagatcccagtgagccctgggccagcttagagaccagtcttgtgcacaaaggtggcttcctgtgagctgtccctgtgcatcatgggtgcctggggacgtcatcgaatttctctttgtgtccatctcttcatgcagaacatgcagggacaagaaagaaggaagcttgtggtgactaattagaaagaacaaagaggaattaggaacaaatgcagttgtggtggtgaaagatgttggtcgttttgttgcagttctccctcagcttaaatgagggaagagacagggctcctaggagggcaggtgagttaggagaccctgttgctcaccmtctctcaggagcacagggaggagggactaagaaagcctgccttcgaggccaggagaagaggtgccctggagcgtgtgaggaagcagcccgggggcttggcactgaaggacgacagccaaaacatccaaggaacatgcagcatgacttttaaaaaagtcctgggtagttgaagtttagatgcacaagaaataaggtaggcagtggtggttattgacacaacggattccaatgctct

SEQ ID NO: 533681 - DNA, 516 bp, Homo sapiens
ctggtgatctctctctccaatagagcataaactgtcaaatgctaactgttaactcaagttgtttctttccttaaaataagctcacaaatatctctttttttcttcctcccttacttataaatgtgaatacacactcacaaaataacagggctttgttgtcacagaaaagtatttaatcacacatgtttcacgtcttaggyttaaaaaagcagagacgtgtccggaaaaattgaattaaaaaccttggaaatatattggttgatttttataagtcagaagcttctaagatgtgttttcttactgaaagttgacagaccactttctaaagcatttgcatagatcttccaggcggaattcttatagaagcccgaagtcttaaattgcaaatagaactgcaatgtaatgccatctactgcatattactgtgtgagaatactttggaaatatcactgaaaatcacaggaggctgtgaattccgactaaattacaatcataatcctgccaagatctttgagg

SEQ ID NO: 533682 - DNA, 488 bp, Homo sapiens
tggtgatctctctctccaatagagcataaactgtcaaatgctaactgttaactcaagttgtttctttccttaaaataagctcacaaatatctctttttttcttcctcccttacttataaatgtgaatacacactcacaaaataacagggctttgttgtcacagaaaagtatttaatcacacatgtttcacgtcttaggcttaaaaaagcagagamgtgtccggaaaaattgaattaaaaaccttggaaatatattggttgatttttataagtcagaagcttctaagatgtgttttcttactgaaagttgacagaccactttctaaagcatttgcatagatcttccaggcggaattcttatagaagcccgaagtcttaaattgcaaatagaactgcaatgtaatgccatctactgcatattactgtgtgagaatactttggaaatatcactgaaaatcacaggaggctgtgaattccgactaaattaca

SEQ ID NO: 533683 - DNA, 488 bp, Homo sapiens
tggtgatctctctctccaatagagcataaactgtcaaatgctaactgttaactcaagttgtttctttccttaaaataagctcacaaatatctctttttttcttcctcccttacttataaatgtgaatacacactcacaaaataacagggctttgttgtcacagaaaagtatttaatcacacatgtttcacgtcttaggcttaaaaaagcagagacgtgtccggaaaaattgaattaaaaaccttggaaatatattggttgrtttttataagtcagaagcttctaagatgtgttttcttactgaaagttgacagaccactttctaaagcatttgcatagatcttccaggcggaattcttatagaagcccgaagtcttaaattgcaaatagaactgcaatgtaatgccatctactgcatattactgtgtgagaatactttggaaatatcactgaaaatcacaggaggctgtgaattccgactaaattaca

SEQ ID NO: 533684 - DNA, 457 bp, Homo sapiens
caggggctatgcagcagaccccttcttgctcagggagccttcttaggacaagccttctggactagcacyggacaagagcttcacaaatgtcctcaccacaattgcatccgtgggccagaaattccacttctagaatctttcttaaagaaaaagcaaaagatttaaaaaaataaatagataaataaaacagaatttatggttgcagacaaataaaaacacttttacactgttggtgatgggaatgtaaattaattcaaccattgtggaagatggtgtggagagtcatcaaagatctagaataagaaatactatttgacctagcaatctcattactgggtatatacccaaaggaatataaatcattctattataaagatacatgaacatgtacattcactgcagcactattcacaatagcaaagacatggaatccacccaaatgcccatcaatgataga

SEQ ID NO: 533685 - DNA, 591 bp, Homo sapiens
cgttctgcttgtgcacatctgaggggcatgttggagaacaggccttatgtgggtgctgagaggatttattcacctgatttagagctcagacagcagcagtgtggtttaatcaaggatgaccatgtttttgtcagtgcgactctgtctttcaatttgttcaattctagtcagctttatgtrctaatgtctgccatcacagttctttccaataattctttctgactctatctctctcccctgaattatagttttcttgactttatcagacttccaaagactgtaatgcttgagctgcctttttccagtggaaagtacttcctgaggaccacctcaaacaaagatgcttaaacaaagatacaagagctagacccttgaattgctctttgctttaatcttgtgtctgtatttgaatcttagccagactttttgactcgaaaaattcccaaattcatttaattttattttcttattggagataacaaataatttcattttccaattatgaaattcccagtatttccaaatagtctaatttcttttccatgtatctcttcttgcaaataggcttcttcttttctgagctcatatttc

SEQ ID NO: 533686 - DNA, 407 bp, Homo sapiens
tgccaaactatgtgaagagagtggccatgatacccctggggtcttttttctcacccccatgtgcaatgaaaaactggaaaatccttcaaaagtcaagtgtttcatttctccgaagactattgtgtccattatttgttgctacataacaaattaccacaatactttgtgaaaataatcatttgaaatgttgttagcaggatggtagaccaggaagttccaggctttcattttcccatgaaaattaaataatcaactaattattgactaaaataactttataggagctctgggaaccagcaaaagatttacagcaaccawatggttacacagttgaggaaaaagaatgttcaaatgggagaaaattttgaggcatttttattctacttagcatagttaggaggaagtgg

SEQ ID NO: 533687 - DNA, 578 bp, Homo sapiens
taatgaaagtctactagatcagagctttgctttttctaatagaataaagaaattaaaatgattttaaaggattaacgtcaaaaaggaaaattggcagtgtagtgacaaataagaaattagtgtagttctrctgcagtaaatatctcagccttttagttgtacctgtgtcaagggccattacctccattcagctcattccctgacccctgcccgcctcaacagtggccaagacagatcaacaaaggaaatcccataaagagagataagccaacactctggcatgtctgttctagtgctgactcagccagagagacaagttattcttccttatctctaacctaaatcctattctttgcagtttaagctgtagctcttctctttaatcttgtgctcctggattcaacaaaatgaccattgcatctgaccagaataactacagaccccactacggcttttgctcagtgttgctgaagatgtaagcacacgcatgtacatgaacctccatgaaaggtgggctgtgagtaccaaacattgggagcagcccttgtgagaacagtgtgaaccacctctcagaagga

SEQ ID NO: 533688 - DNA, 578 bp, Homo sapiens
taatgaaagtctactagatcagagctttgctttttctaatagaataaagaaattaaaatgattttaaaggattaacgtcaaaaaggaaaattggcagtgtagtgacaaataagaaattagtgtagttctgctgcagtaaatatctcagccttttagttgtacctgtgtcaagggccattacctccattcagctcattccctgacccctgcccgcctcaacagtggccaagacagatcaacaaaggaaatcccataaagagagataagccaacactctggcatgtctgttctagtgctgactcagccagagagacaagttattcttccttatctctaacctaaatcctattctttgcagtttaagctgtagctcttctctttaaycttgtgctcctggattcaacaaaatgaccattgcatctgaccagaataactacagaccccactacggcttttgctcagtgttgctgaagatgtaagcacacgcatgtacatgaacctccatgaaaggtgggctgtgagtaccaaacattgggagcagcccttgtgagaacagtgtgaaccacctctcagaagga

SEQ ID NO: 533689 - DNA, 578 bp, Homo sapiens
taatgaaagtctactagatcagagctttgctttttctaatagaataaagaaattaaaatgattttaaaggattaacgtcaaaaaggaaaattggcagtgtagtgacaaataagaaattagtgtagttctgctgcagtaaatatctcagccttttagttgtacctgtgtcaagggccattacctccattcagctcattccctgacccctgcccgcctcaacagtggccaagacagatcaacaaaggaaatcccataaagagagataagccaacactctggcatgtctgttctagtgctgactcagccagagagacaagttattcttccttatctctaacctaaatcctattctttgcagtttaagctgtagctcttctctttaatcttgtgctcctggattcaacaaaatgaccattgcatctgaccagaataactacagaccccactrcggcttttgctcagtgttgctgaagatgtaagcacacgcatgtacatgaacctccatgaaaggtgggctgtgagtaccaaacattgggagcagcccttgtgagaacagtgtgaaccacctctcagaagga

SEQ ID NO: 533690 - DNA, 578 bp, Homo sapiens
taatgaaagtctactagatcagagctttgctttttctaatagaataaagaaattaaaatgattttaaaggattaacgtcaaaaaggaaaattggcagtgtagtgacaaataagaaattagtgtagttctgctgcagtaaatatctcagccttttagttgtacctgtgtcaagggccattacctccattcagctcattccctgacccctgcccgcctcaacagtggccaagacagatcaacaaaggaaatcccataaagagagataagccaacactctggcatgtctgttctagtgctgactcagccagagagacaagttattcttccttatctctaacctaaatcctattctttgcagtttaagctgtagctcttctctttaatcttgtgctcctggattcaacaaaatgaccattgcatctgaccagaataactacagaccccactamggcttttgctcagtgttgctgaagatgtaagcacacgcatgtacatgaacctccatgaaaggtgggctgtgagtaccaaacattgggagcagcccttgtgagaacagtgtgaaccacctctcagaagga

SEQ ID NO: 533691 - DNA, 505 bp, Homo sapiens
ctgggcttaaaggagggcatcctcctctgtgaactcatcaacaagctgcaggcaggcccaatgaagaaagtcaatgagtcctcattaaactggcctcagcggagaatattggcaactttattaaagctattcaggcttatggtgtgaagccacgtgacatatttgaagtaagtgatctttttaggatgraaacgtgacccaagttcaggctactctggtggccctagtaggttggcaagcacaaaaggatacaaccacggacatcagggttaaatatgcagaaaaacaaacacgacgttaggatgaaggaaaattaaaagctgctgaaactgtaattggattgcggatgggaaccaacgaagtgccagccaggcaggtatgtcagcttacgggactacaggcatctttatgatcccaacatgcaaactgacaaacgttttgaccagaccacagtttgtctgcagatggtcactaacaaagcagacagccaggcagggatgttagc

SEQ ID NO: 533692 - DNA, 505 bp, Homo sapiens
ctgggcttaaaggagggcatcctcctctgtgaactcatcaacaagctgcaggcaggcccaatgaagaaagtcaatgagtcctcattaaactggcctcagcggagaatattggcaactttattaaagctattcaggcttatggtgtgaagccacgtgacatatttgaagtaagtgatctttttaggatggaaacgtgacccaagttcaggctactctggtggccctagtaggttggcaagcacaaaaggatacaaccacggacatcagggttaaatatgcagaaaaacaaacacgacgttaggatgaaggaaaattaaaagctgctgaaactgtaattggattgcggatgggaaccaacgaagtgccagccaggcaggtatgtcagcttaygggactacaggcatctttatgatcccaacatgcaaactgacaaacgttttgaccagaccacagtttgtctgcagatggtcactaacaaagcagacagccaggcagggatgttagc

SEQ ID NO: 533693 - DNA, 580 bp, Homo sapiens
ggccataggattacacatcctcattttggaggaccagttacttactggtgaatgtccccaattcactaagtcactgaatgcacacttacatatttctctaatgtttaaaaatcctgctgggcgcagtggcacacgcctgtaatcccagcactttgtgaggccgaggccgggggatcacctgaggtcgggagtttgagaccagcctgaccaacgtggagaaaccccgtctctactaaaaatacaaaattagctgggcatggtggcacatgcctgtaatcccagctactcgggaggmtgaggcaggagaatggtgtgaacctgggagatggaggttgcagtgagccgatatcgtgtcattgcactccagcctgggcaacaagggcgaaactctgtctcaaaaataaataaataaataaaaattaaaataaaaaaaaatcctccttcactaaaataatgaatacaaagcccttgtacgaaaacttttcaattaacagaatgaaactgagcaaatcctaaacttgcacttgccctgtgcttgacaagtttttgtttatttgtttgttttaccacatgggaatac

SEQ ID NO: 533694 - DNA, 517 bp, Homo sapiens
acaatcagggcctttgcccaaagttcatgagactgtgaaggacagcacccaagctggtgcaaattgcaaatatttgagggtgcattccagccaagaggggccatarctgattggggaaagtggaaagggtacagcagtagccatccaaagcttctgatcaataaaatgtaacccgtatgttatgtaccagtttcttgctgtaataaaaagaaatctgcaagaggatggtaaacaattaactgtaccacacagaaactgttgtagagacatccaccccctgcccaaacctgccttgccctttcctgcctgtgcctgctcgctgcccaatctctgcatcctctgtagcagcagagcctctattttgttctggtggtaatgcgcgcatctagtcctttcagcttgtgtgggtggggaagaccacacagcacatctctgcgagaagtctccaggtgatgcttctctctacagaggctttctaaaagggggcagactccactggtctgtgccttggcccgtt

SEQ ID NO: 533695 - DNA, 517 bp, Homo sapiens
acaatcagggcctttgcccaaagttcatgagactgtgaaggacagcacccaagctggtgcaaattgcaaatatttgagggtgcattccagccaagaggggccataactgattggggaaagtggaaagggtacagcagtagccatccaaagcttctgatcaataaaatgtaacccgtatgttatgtaccagtttcttgctgtaataaaaagaaatctgcaagaggatggtaaacaattaactgtaccacacagaaactgttgtagagacatccrccccctgcccaaacctgccttgccctttcctgcctgtgcctgctcgctgcccaatctctgcatcctctgtagcagcagagcctctattttgttctggtggtaatgcgcgcatctagtcctttcagcttgtgtgggtggggaagaccacacagcacatctctgcgagaagtctccaggtgatgcttctctctacagaggctttctaaaagggggcagactccactggtctgtgccttggcccgtt

SEQ ID NO: 533696 - DNA, 517 bp, Homo sapiens
acaatcagggcctttgcccaaagttcatgagactgtgaaggacagcacccaagctggtgcaaattgcaaatatttgagggtgcattccagccaagaggggccataactgattggggaaagtggaaagggtacagcagtagccatccaaagcttctgatcaataaaatgtaacccgtatgttatgtaccagtttcttgctgtaataaaaagaaatctgcaagaggatggtaaacaattaactgtaccacacagaaactgttgtagagacatccaccccctgcccaaacctgccttgccctttcctgcctgtgcctgctcgctgcccaatctctgcatcctctgtagcagcagagcctctattttgttctggtggtaatgcgcgcatctagtcctttcagcttgtgtgggtggggaagaccacrcagcacatctctgcgagaagtctccaggtgatgcttctctctacagaggctttctaaaagggggcagactccactggtctgtgccttggcccgtt

SEQ ID NO: 533697 - DNA, 610 bp, Homo sapiens
ctggtatttgtgtgcttttttgtattcagtacctttattaagttcattgacagtgtgtgcatgtgtgtatgtgtgtgcgcrtgtgtatatttacagttttctacatataagaatgtcatctgctaagcaggataattttatttcttcctttccaatttgaatgccttttactatttatattgcctactttctctggctagaacttccagtactatgttgaatagaaatggtaaaagtggaaatccatgtcttgtttctggtgttaggaggaaagctttcaatctttcacagttaagtgtgatgttacttgtgagtttctcacatattgaccaaaagttgtttattttatttagttgtgaaatctgccagttaccggtatagtggcaagatcagcttgggaaccaggcaaatttaggttcaaacgaaataatcttctaaggtttctaggggctttttgtcatgaggaagtaatgagcatcaaacatacccatcaccctaagcaactgtaaaactggataaaatatacaaagcaattattttcaagaattggacaacaggcagcatggggctgtaatacttgaaataagagaaatacaaagtgatgtcctca

SEQ ID NO: 533698 - DNA, 658 bp, Homo sapiens
ttctgcctggcacagggaagtagcacccaaaacacagcagcagtctaactggagtgagaaaacaaagattggagtttggggatattcagataactggattttcatgagccctctggactgtttggctaaatacaaagttatacactatgcagggcaaaattctgcaaagcctcacaaagaacaactaaagaaaggctgggaactgacagagatcctggaggttactcattattgacagacatttgaatttgatcagccagagtaaagagactgtaggaattcaactgaaacccaagaaaagacacatctcagagacagagcccctcttagccctatagtgaggattatkctaggcctacactaacaaaacctaaaccaaatttcagcataatcaacctgagctgccgtgggtttactactcaagattttttgctaacaagactatgttaacaacattcaatattctttgaggcaggtccacataattcaaactctcacaatgaccagcatagaatgaaaacattactagacactgtaaagaagcaggaaaatggaacccataatatatcagttaatagaaacacaaagacatgtctcatattgagtttagctgacaaggactttaagaaaaagataaacataatgaatggacagatga

SEQ ID NO: 533699 - DNA, 658 bp, Homo sapiens
ttctgcctggcacagggaagtagcacccaaaacacagcagcagtctaactggagtgagaaaacaaagattggagtttggggatattcagataactggattttcatgagccctctggactgtttggctaaatacaaagttatacactatgcagggcaaaattctgcaaagcctcacaaagaacaactaaagaaaggctgggaactgacagagatcctggaggttactcattattgacagacatttgaatttgatcagccagagtaaagagactgtaggaattcaactgaaacccaagaaaagacacatctcagagacagagcccctcttagccctatagtgaggattattctaggcctacactaacaaaacctaaaccaaatttcagcataatcaacctgagctgccgtgggtttactactcaagattttttgctaacaagactatgttaacaacattcaatattctttgaggcaggtccacataattcaaactctcacaatgaccagcatagaatgaaaacattactagacactgtaaagmagcaggaaaatggaacccataatatatcagttaatagaaacacaaagacatgtctcatattgagtttagctgacaaggactttaagaaaaagataaacataatgaatggacagatga

SEQ ID NO: 533700 - DNA, 468 bp, Homo sapiens
catcactggaaaattgatcggactgatctataagtactcacctctttcccggcccagcatacgtgttcctcacaccaacaaaaaccatttctgtttgtagtttgccatagtatatgtagacttatttgaaaagtactttgcatagtatgtcctcagaataataaaatattaataataataacaaatggggtaacaaggaaatgaggaaagggtagtgtccaagatagggttatcaatacgtgtttgctccaatggacaaattgtagtaggcctaatgagctaccagtctggagcaaattaaagaaaaaaagtttattgtatatacacaataaacagccagctgaaartatttcagaacacttactccaattttccttgtgaaatccaagaagcttttcaaaaagcagtctcttcttttattaaacaattgtactaaaaatattgtctgtcttttcccactaaaagtta

SEQ ID NO: 533701 - DNA, 579 bp, Homo sapiens
tgttgttgcctacatcattgttcctttttgttgctgagtggtattctattgtatgaatatactgcaatttgcttatctgcttaccagttgggagatatttgggttgatttgagcttttggagattattaacaaagcctgtataaaccttgttaatggattcttgtttagacacatcttcatttgtcttgaataaacaaatacctacatgtgcattgccatgtcatataaaagygtatgtttaattttataagaacctgccaaattagttgtattaatatggctgtgccatttaggattctcatcaggaatgcattggagtcccagttgctccacatagaatatgtgctttttataaattttaaactaaaatttctgcctcagatataatgtatcttcatataaaatacattatatttgagacagaaattcttatttaaagtttataaatttataatatatctgaaaatacattatagttataaaacataccaatttttaatataatgtatctgaggatacattatattaaaaactgatatgttatattggaattgtgtaatattttacaaatacatgat

SEQ ID NO: 533702 - DNA, 579 bp, Homo sapiens
tgttgttgcctacatcattgttcctttttgttgctgagtggtattctattgtatgaatatactgcaatttgcttatctgcttaccagttgggagatatttgggttgatttgagcttttggagattattaacaaagcctgtataaaccttgttaatggattcttgtttagacacatcttcatttgtcttgaataaacaaatacctacatgtgcattgccatgtcatataaaagtgtatgtttaattttataagaacctgccaaattagttgtattaatatrgctgtgccatttaggattctcatcaggaatgcattggagtcccagttgctccacatagaatatgtgctttttataaattttaaactaaaatttctgcctcagatataatgtatcttcatataaaatacattatatttgagacagaaattcttatttaaagtttataaatttataatatatctgaaaatacattatagttataaaacataccaatttttaatataatgtatctgaggatacattatattaaaaactgatatgttatattggaattgtgtaatattttacaaatacatgat

SEQ ID NO: 533703 - DNA, 571 bp, Homo sapiens
tcactgttttatggttttatgtctattaaaatgacataaatgacatattttccagatatatatcaattttcaaactttcccctaactccagactcatatactcactacctactcaacagcttaacctggatgtctagaaggcatcttaaagataatgatagaaaataacctaaaataaacacaacccaggccttgaatagtgttatgaggagaaacccattctgagaagtgcatagtgatctaagaagactggagtttggcactcagactgagagctcttaaagtgcacgacaagagggaacatgatctcctccctggagtgatcagaggctggggcccaacaacattctcaattgccgaaaacktaacattcatccctgctctatcatcttagcctcactggtctgcggagcaccagctccatcccatgcagagtcaggtgatggggctgattccagtcttttcagttgtagctatgtgacacagctctgatcctacccaccactcagcatcctaacaggatcgattggtgttaccactgtgtgtcatggttttcatagaactctggaga

SEQ ID NO: 533704 - DNA, 596 bp, Homo sapiens
atctagttggattacatagaatccctttcattttagctggytgcagaagaacatcattattttctcaaatattctatcccatacatcgattaaatttatgttgtattcaatcttattcccaaatatgtcacatgctccaccaactctgagatctcatcaaaaaagctacatactccatgacattgccaccgccaatatgcagatgcaacagctacacctgtcatattctatgggcacaaactctgtcttaaacccttttaatgatgggagcactttaaaagaaagaacaattaatacaatatcaaatatctggatttctcagttggcacctgaacttcctgattttgtgacattgggttggaatcttagcctctcagttctgtgacggaaaagaaaaatgtataaaccagtacttgcctaccacacagagttgttgtggtgatcaaaagacaccacgtaaagcatatgtacagatgtaatcagtacactagttatagtatggaaaaattggaaccaacctaaatatattcaataagaagtgaatggtcttctaaatgttattaacattcatattacgaattatgtttattaagaga

SEQ ID NO: 533705 - DNA, 596 bp, Homo sapiens
atctagttggattacatagaatccctttcattttagctggctgcagaagaacatcattattttctcaaatattctatcccatacatcgattaaatttatgttgtattcaatcttattcccaaatatgtcacatgctccaccaactctgagatctcatcaaaaaagctacatactccatgacattgccaccgccaatatgcagatgcaacagctacacctgtcatattctatgggcacaaactctgtcttaaacccttttaatgatgggagcactttaaaagaaagaacaattaatacaatatcaaatatctggatttctcagtkggcacctgaacttcctgattttgtgacattgggttggaatcttagcctctcagttctgtgacggaaaagaaaaatgtataaaccagtacttgcctaccacacagagttgttgtggtgatcaaaagacaccacgtaaagcatatgtacagatgtaatcagtacactagttatagtatggaaaaattggaaccaacctaaatatattcaataagaagtgaatggtcttctaaatgttattaacattcatattacgaattatgtttattaagaga

SEQ ID NO: 533706 - DNA, 621 bp, Homo sapiens
tctgtagtttctagcatctatatttaatttagaaagtggcaagaaatcaagttaatccaaaacagagtgccagaatacccaaactgtgcggatcacttctttatgcttcaaaaagctgtatataacctagaatgactttaatgttttattctcttttttgaattaattgtccaagtagggtcataaattctttcttttatggcaaaaaaaaatcrtatttaattgtttccatcattatttttcctttttaatttaagcctaggaaagaaaggatattctttaaaattatatacaaggttactaaaatgtgttgaagtgaaactgagctaaatcaatatagagagagtaaatttgaatggaaaccctttgagactgataagttgaagcccagaccggtttcctgtttttcatctcctacttattcatgttttccccttccttttatgtttcttctaaaggcaatcagtgctttagggcctcattttattcacattaaaatgagctctaaaaagctgattagagtattagtggtattattgcaaaaatatcaaccaagttattacagatttggtagtttcagtctttgtcataattttatacacattgtaccaattgatatca

SEQ ID NO: 533707 - DNA, 607 bp, Homo sapiens
gctgcaggtccttccaatttcaagtaattgctttactgaaatgaacaacctggaagtggagggaagagttttgcacaatctctgatattttgcaaagagcacagacactgaaatctgtgattttgcatatttcattttatttttattattttataggtaagtaacagaaatccaggctttattcaacaatcagttcctctgaggaagagctagagtttgaatatagttctccttactcctgggggaatattctttacttcagatttcacctgctgttttctaaaagtcagtcttattatagcaagctcaaatgcgtatgtggctgttaacagttttgtaaaggaatttyatatattatctatctgattctctcagcaatttcctgattttggtaagccagaagtcctttcagccaattttgtagattcaaagaaaaaagcttagagtgctgactgtttatccctggccaaatagcttatgggcagcagaactgggatttggaccagaactcacagtttgtgattaatgaacatttatttactttccagcatatcatagagcctataacatgcagggggcttgaatatttgttctttcatcctgtagt

SEQ ID NO: 533708 - DNA, 516 bp, Homo sapiens
tgctcctcatgaagccatcgattcgttaacactggagtatctagaaygcatctgggtcgaattattaaaaagaaagttcttctcaagctagttgtaatggtagctaatttaaaaaatcaatgttctgcgattctgataaaaacctatgtggtgaaccaacaataaaggcggctgaagatattggtatgaaatagttatttttctttatatacctggacgttcatgtaagaaattatacttttggaaggtctgtaatatgctcagtgtatgaatcatttttagaagttattgtcagaattttgctttaatagtgcaataaagtgtgcattctctctctctcattttcattcaacagcctctacaagttgagcctggctcaaaggtctttccctcttggaatatgactcctcccctgtccctctacataggctattctataacaaattattttgctgtcttgatttttcagagacctcatgctagtagtagagagccaggagaaagtgagatgtccta

SEQ ID NO: 533709 - DNA, 630 bp, Homo sapiens
tctttgatttattacattcttagtacaaaataattgtttttaagattaaactgcatttctttctctgaatttggaaatttacattaggcaagctcttttgttccaaacactggactaaagctcgragggcctgagataggaaaggcacactttttctctaatgggctcacaacgtaataggagaaatgtgttcttaagccagtaattacagtaggacaagtacggccaggtatactgtctgactctgtaaagtcatgctaaactctacctggggacaagatatggtagcatctcaaataagtataaaatagagaattatgatatcttcttagaagaagaacaaaacagcctgcagaaactattatctggactagactaagcttaagactccccctaggccaagtttatcctcctcactctgtccacttctgctaatctttccctagtctattacttctttttctatttctggatataaagaaggtcctagtattttacatcactgtagaatgagtatagataacaataatataccatatagtttacataggaggaggatattgaatgttcccaatgcaaagccgtgataaatgcttgagatggtgaacaccctaattaccctgttctgat

SEQ ID NO: 533710 - DNA, 630 bp, Homo sapiens
tctttgatttattacattcttagtacaaaataattgtttttaagattaaactgcatttctttctctgaatttggaaatttacattaggcaagctcttttgttccaaacactggactaaagctcgaagggcctgagataggaaaggcacactttttctctaatgggctcacaacgtaataggagaaatgtgttcttaagccagtaattacagtaggacaagtacggccaggtatactgtctgactctgtaaagtcatgctaaactctacctggggacaagatatggtagcatctcaartaagtataaaatagagaattatgatatcttcttagaagaagaacaaaacagcctgcagaaactattatctggactagactaagcttaagactccccctaggccaagtttatcctcctcactctgtccacttctgctaatctttccctagtctattacttctttttctatttctggatataaagaaggtcctagtattttacatcactgtagaatgagtatagataacaataatataccatatagtttacataggaggaggatattgaatgttcccaatgcaaagccgtgataaatgcttgagatggtgaacaccctaattaccctgttctgat

SEQ ID NO: 533711 - DNA, 553 bp, Homo sapiens
taccaccttaccattttatactctttgtttcaactttttgcatttcttctttcatttcyttccctaactaacctgagttaaagatatttttgctttacttttctattttattagttgttagttaaaaaatcttataattttcacatcatctgagaaattaaacatatctttaatagttttaaaaaattcatccctcacctattgaatatttacctcctttttatttttcaaaaaattagccttgagttgtaattcacatatcataaagttcacacttcacgtaatttttgaagtatacaatgtagagaattttagtatattcagagttgtcaatctctattaaattccaggacattttgatcatcccaaaaagtaaccccttatccattctacctttctctatcctttggaagactttctctttctgtagatttgcccaatctggaaatttcatatcaatgcaataaaaatacatgtggccttgcatttggcttctttcactcagtataatgttctcaacgttcatccatgttgtagcacacaacggtccgtc

SEQ ID NO: 533712 - DNA, 553 bp, Homo sapiens
taccaccttaccattttatactctttgtttcaactttttgcatttcttctttcatttctttccctaactaacctgagttaaagatatttttgctttacttttctattttattagttgttagttaaaaaatcttataattttcacatcatctgagaaattaaacatatctttaatagttttaaaaaattcatccctcacctattgaatatttacctcctttttatttttcaaaaaattagccttgagttgtaattcacataycataaagttcacacttcacgtaatttttgaagtatacaatgtagagaattttagtatattcagagttgtcaatctctattaaattccaggacattttgatcatcccaaaaagtaaccccttatccattctacctttctctatcctttggaagactttctctttctgtagatttgcccaatctggaaatttcatatcaatgcaataaaaatacatgtggccttgcatttggcttctttcactcagtataatgttctcaacgttcatccatgttgtagcacacaacggtccgtc

SEQ ID NO: 533713 - DNA, 553 bp, Homo sapiens
taccaccttaccattttatactctttgtttcaactttttgcatttcttctttcatttctttccctaactaacctgagttaaagatatttttgctttacttttctattttattagttgttagttaaaaaatcttataattttcacatcatctgagaaattaaacatatctttaatagttttaaaaaattcatccctcacctattgaatatttacctcctttttatttttcaaaaaattagccttgagttgtaattcacatatcataaagttcacacttcacgtaatttttgaagtatacaaygtagagaattttagtatattcagagttgtcaatctctattaaattccaggacattttgatcatcccaaaaagtaaccccttatccattctacctttctctatcctttggaagactttctctttctgtagatttgcccaatctggaaatttcatatcaatgcaataaaaatacatgtggccttgcatttggcttctttcactcagtataatgttctcaacgttcatccatgttgtagcacacaacggtccgtc

SEQ ID NO: 533714 - DNA, 553 bp, Homo sapiens
taccaccttaccattttatactctttgtttcaactttttgcatttcttctttcatttctttccctaactaacctgagttaaagatatttttgctttacttttctattttattagttgttagttaaaaaatcttataattttcacatcatctgagaaattaaacatatctttaatagttttaaaaaattcatccctcacctattgaatatttacctcctttttatttttcaaaaaattagccttgagttgtaattcacatatcataaagttcacacttcacgtaatttttgaagtatacaatgtagagaattttagtatattcagagttgtcaatctctattaaattccaggacattttgatcatcccaaaaagtaaccccttatccattctacctttctctatcctttggaagactttctctttctgtagatttgcccaatctggaaatttcatatcaatgcaataaaaatacatgtggccttgcatttggcttctttcactyagtataatgttctcaacgttcatccatgttgtagcacacaacggtccgtc

SEQ ID NO: 533715 - DNA, 553 bp, Homo sapiens
tttgccaactgccttagtagttgttggagcatgaatgggtacaaactcattttatttaatactagattatgattcttttctcaaaatactaggaaaaatacttttctactaaatattctccttccctacataatttaaaggaaatggaaatcttattcaaccccaatctcaaaaaaacatgtaaattgcaactgatgatattgtcattgaatgatttttactttatctttccattgcattatagttgagagcaatatttccatataccttgattacaaccctagaaaaatcacaccaggtaacctcasttgagccctgctgagcaggagaaagggagaatccactcaccgaactctgtgctgaaaatgcctccatctacaagaagagatgcgtttttctaattcatgtaaaaattaataaactagctgtatggaatggtgttactctcccacaaacatataaaaaataaagatgcaatcttaaatttatatcacagagttcacttctgatgtaccaaggatagtccattaaattgtggatgcaaaaaaaagta

SEQ ID NO: 533716 - DNA, 584 bp, Homo sapiens
ctgtcctttaagaaaagtatctggagaycatcacaggacctgggggattatatgatattagccagaaactagtagtgtgatcacactacatttttctgggaaatggatttcattctgggcagtcatgtaaccatctaagaattgtaaatcagaagcaaaggacagatatagggggcaaacattagtccctaccacgtgcaatgataatacattgtgaaagaatggtcacaaagtgaaatgggccatgggatgctatggccctgcactttttctagatatagactgaaaataaaagctttttattgaccggagggaaaagaaaaaattatgatgagattgaactctcatcaccataaccaataaccaggtcagtagaaacacaacttattctagttgagaatctgataaaattttcttttgatatactttcaatattccccaaagtaggtacaataggtaattttaatatttcattttttaaaataatgtttctcaatacatgccaaggtgaaattcactaattgcaacaatagaggaatgcaaagttagacagctaatgtatacccagatataagatagtgtag

SEQ ID NO: 533717 - DNA, 584 bp, Homo sapiens
ctgtcctttaagaaaagtatctggagaccatcacaggacctgggggattatatgatattagccagaaactagtagtgtgatcacactacatttttctgggaaatggatttcattctgggcagtcatgtaaccatctaagaaytgtaaatcagaagcaaaggacagatatagggggcaaacattagtccctaccacgtgcaatgataatacattgtgaaagaatggtcacaaagtgaaatgggccatgggatgctatggccctgcactttttctagatatagactgaaaataaaagctttttattgaccggagggaaaagaaaaaattatgatgagattgaactctcatcaccataaccaataaccaggtcagtagaaacacaacttattctagttgagaatctgataaaattttcttttgatatactttcaatattccccaaagtaggtacaataggtaattttaatatttcattttttaaaataatgtttctcaatacatgccaaggtgaaattcactaattgcaacaatagaggaatgcaaagttagacagctaatgtatacccagatataagatagtgtag

SEQ ID NO: 533718 - DNA, 497 bp, Homo sapiens
tcaggaggaggggtttctttatacacatattccagctaagtaaattacagtatcactaatgcaacttctaataaaataaagtatctgaaccagcagatttctgggtatgggctgctgaacatccctaggacccttttagggaaatcacaagttcaatattattttcatggcaatgctaaaacattattggcctttttccctttgttcacatttrtattggtgatacaaaagcaatggtggacaaaaaagctggtgcctcagcacaaatcaaggcggtggcatcaactgtgctactggcagttatattctctaccaccacatgctgcaggaggaaaggccagtttaatgtaagaatttccttcatggagcagtaaaaattattacttgtattgaatcttgaaatttgagtacttaaaaaaaatccatgtaataaaatgtgaaaaacacatgaggcacttgtactgcattctgacccatgctggtcatctccttgaaaa

SEQ ID NO: 533719 - DNA, 497 bp, Homo sapiens
tcaggaggaggggtttctttatacacatattccagctaagtaaattacagtatcactaatgcaacttctaataaaataaagtatctgaaccagcagatttctgggtatgggctgctgaacatccctaggacccttttagggaaatcacaagttcaatattattttcatggcaatgctaaaacattattggcctttttccctttgttcacatttatattggtgatacaaaagcaatggtggacaaaaaagctggtgcctcagcacaaatcaaggcggtggcatcaactgtgctactggcagttatattctctaccaccacatgctgcaggaggaaaggccagtttaatgtaagaatttccttcatggarcagtaaaaattattacttgtattgaatcttgaaatttgagtacttaaaaaaaatccatgtaataaaatgtgaaaaacacatgaggcacttgtactgcattctgacccatgctggtcatctccttgaaaa

SEQ ID NO: 533720 - DNA, 469 bp, Homo sapiens
taggattataataatcaaaatgtagtgtgggatatgactctattccaagtggcaggaaaaaatgtgcacaagtttaggsgcatgccatggagttcattttcagaatggctagctcctgttggctgaaagatagcctgcaagtgatatacatcaggaaagataaggtgggggcatgttgtagagcatattgctaaccaaagtagtttagactttattctttagtaaagagtaagccattggaaattttaaaaacaaaaataacatagtagactccaaaatctttactgaaggagtaggtggatgagtcaaagataaatccaaaatgtttcatttgggtgactaggaagagagcaacactctaaacaaagaaggaaaggagggggcttgctggctttggtaaaaagaaaatgggttcagctttggatattactgaacataaggtgttaaaaagccattcaagttgagatag

SEQ ID NO: 533721 - DNA, 579 bp, Homo sapiens
cagtggagtataactacttagagcacaagccctggggcaaaacttgttagattcagtccttccttctgccacttcttcactcaagttaccccctgcttaggtctcttcacctgtaaagtgtagcactcagttcgatcaggcaaacagaaactactctatagttatttcaggaaggcatttaacacagagaattaggggcctacaaagcctttggaagggctatgagagaaaaggtaagggaactaccagcaaaatgagacagttgtaggaattgcaggaatcatgggaaattttagagattgttaggaaactgctgctaatgacrtcactgaagcagatgtttcacaagagaatgctcagaaatcacttaaatcttttctgatcaagcccacacacctaaacaagacgtcaggaagagcagtgatggtgtctacttcccttctgcttgccaagtttcctgcaagtacctctcatgggtggaatccaaaactgaacttgactgacaaatgagtgtgggaaatgtagcttccaagcttaacaatataggtgagagctagaaaaagcagggatatgacttaa

SEQ ID NO: 533722 - DNA, 592 bp, Homo sapiens
actcctcgggcaaagtgttcacatttttgaccactttttaattaggttgttttcttatcattgggttttgagagttctgtatacattctggttgcttaccatatgtgtaatttgcaaatattttctccccgtctgtagctagtctttcattctcttaactgtatcttttgaagagcagaagtttttaaygctggtgaagtccaatttatttttttaatgaattgtgtttttggttgcatatctgagaaatatttgcctaacacatggtctcaaggatttcatgctttcttctgaagttttataatttttggtttttcacttttagtctatgacccattcgagtaaacttttttatgatactaattatgaatcaaagttcatttggagggcatattagcattatttattgaaaaaactgtttgctcttttctcactgaatttcttttgcaattaaaaaacaactggaccaggcagagtggctcatgcctgtaatctgtattattataaaatggtcatctttattcttggtcatattctttgttttgaaatcattttctgatactaatatagacacccttggtttttttgagag

SEQ ID NO: 533723 - DNA, 518 bp, Homo sapiens
acttgagcaataccttccaatggtggttcagagagsagcctctaaacccacgctccttgagtccttttcttatgacctgggtgatttggggcaagttatttaatctttatgaaactcaatttctttatctgtaaaactaagataataagtttccaactcaataggttatggagaagattgaataaaagactctgtgtaaatgtgcttttagaataaatgtctggcacacaggaagctgaaaaaacaaaaacgatatgacttccattattatctagctcttttactatacttagcttttctttttcatttcttctcacttgtagctctaagaaggggaggaaaatttatttggctagcgatggggtggtggcgaaggagttggatttgacttagcagaagcaaggtggatccattatagtgaagcagagcttggatgaagaagacaagcagtctattagctcagccccttctaggcacattcaatttttcccaagtgctcctggatattttagaagtca

SEQ ID NO: 533724 - DNA, 501 bp, Homo sapiens
tgaccactgggtacctggatgggaaacacttccctaactaacccaagtaggtacagataaactcccaggaccattctyagaaggctcctgaccaagtaagtgccagatgaagctactgattccaagaggtggcgctctctagtgggcaaaacagtgggtaaacagatgtgtcttactgagtgaatgctcttttagcagctgggtactttattctttaaaatactctggattcttaataaatttcagagtgaaacactcagctatgtgcctggcttttccaggagaaaggaagagcctgtttacacctgccaacatctggagagacaacagcagttctcgaccatcatttgagtaagaggctttcctcccatctgacttgataggtatacaaaggcattctatatctaaccccagtgtgaaatcttagtttctcctatcaactaattttatcaagagcactcatacttcctgacattttcagctcgctataaaaacaaacaa

SEQ ID NO: 533725 - DNA, 566 bp, Homo sapiens
aaactaaaggttagccaggacttggatggagagagacagaccttgtaagaagggtacygggacaaggacagacagatagaacaaagagagaaagaaaaaaaattgtagaaagcttttcattcttttaactgtggttgaagatagccaagaacactgtgagaatctgacagaagagttaaaggtcatagacaaagctgcatttacacataccctatctctcaatgactgagaaataaacatggaaacaaactacaaaataccaaaggtggggctacacctgctctaggtagatgcaccttaggggaaggtcgggggaaagtgtgaagggagtttgcatcatgcaaaaagaatgatgcaacaaaagagagtacatatcaggggtctgggagttctctcctttgattctgatcctgtttgtgtatgtaataaatggtatagcttcatagccatgttgacttgcctgtactattagtactggagaaaaaacagatgctccctccctggtgccctgtgagagacagagcagtgacagcagctgcttctggactgcttgtcatacccttagc

SEQ ID NO: 533726 - DNA, 566 bp, Homo sapiens
aaactaaaggttagccaggacttggatggagagagacagaccttgtaagaagggtactgggacaaggacagacagatagaacaaagagagaaagaaaaaaaattgtagaaagcttttcattcttttaactgtggttgaagatagccaagaacactgtgagaatctgacagaagagttaaaggtcatagacaaagctgcatttacacataccctatctctcaatgactgagaaataaacatggaaacaaactacaaaataccaaaggtggggctacacctgctctaggtagatgcaccttaggggaaggtcgggggaaagtgtgaagggagtttgcatcatgcaaaaagaatgatgcaacaaaagagagtacatatyaggggtctgggagttctctcctttgattctgatcctgtttgtgtatgtaataaatggtatagcttcatagccatgttgacttgcctgtactattagtactggagaaaaaacagatgctccctccctggtgccctgtgagagacagagcagtgacagcagctgcttctggactgcttgtcatacccttagc

SEQ ID NO: 533727 - DNA, 642 bp, Homo sapiens
gtcaggagggttggtgaatcctaactgcatgctttctccacacccaggtccttctaagactttagagtgtgaggaataaatgggacagcattggtggggtgcagagtagggtccgaccaaactcagtttcctctcctaggagagagaacttgacaggagcccagtaaaaatgtgatgcatrtgaaacgcgattttccacacgcagatctgccaggaatacaatgccctgctttggtttcactgtgtttcctttctcttgttctcgtctctactcatccccgcagcagaatggcaccgggactgactgtgcctgcttctgttcagattctcagagactgacatggaaagaccggattcttgcaagaatccgtaccttggtccttcccacatgctctcggggaaataaaatcaagcacacaattaaattatactacataactctgaagtgcttgaaaatatagaaaggcactgaaaaatgggcactggtatgttcatttcagtgcttccgcccatgcctgaaacctggcaagcactcagtttattgatgctttattgatggactgacttcactaggtgacatttctgaaccaaatgccacctttttctcatttctctagacagccacagtgtatagtaatgcac

SEQ ID NO: 533728 - DNA, 642 bp, Homo sapiens
gtcaggagggttggtgaatcctaactgcatgctttctccacacccaggtccttctaagactttagagtgtgaggaataaatgggacagcattggtggggtgcagagtagggtccgaccaaactcagtttcctctcctaggagagagaacttgacaggagcccagtaaaaatgtgatgcatgtgaaacgcgattttccacacgcagatctgccaggaatacaatgccctgctttggtttcactgtgtttcctttctcttgttctcgtctctactcatccccgcagcagaatggcaccgggactgactgtgcctgcttctgttcagattctcagagactgacatggaaagaccggattcttgcaagaatccgtaccttggtccttcccacatgctctcggggaaataaaatcaagcacacaattaaattatactacataactctgaagtgcttgaaaatatagaaaggcactgaraaatgggcactggtatgttcatttcagtgcttccgcccatgcctgaaacctggcaagcactcagtttattgatgctttattgatggactgacttcactaggtgacatttctgaaccaaatgccacctttttctcatttctctagacagccacagtgtatagtaatgcac

SEQ ID NO: 533729 - DNA, 622 bp, Homo sapiens
tgggacatgtgacttaacctctctgaacttgagtttccttatctagaaaatcaggatgtaaacagtacttctttggtcacctactagctgtccctgaaagtccattttccccttctttcatgagaattgagctccggccatccagctacaaactacatttcccagcctccatcgaggccacaaatggctatgtgactatgtcctcccaatggaatatgggtagcagtgagatgtgcaacttctcaatatttgcttamaatccatgctggctttcttttctctctccctttttgcggctagaaaacaagagtgatagtgactgaatttcaatcctgtagcattaaggacaacacctgagggaagcagagcaataaaacagaaggagcttgggtccctgaatgacttctgggagcaggatctagcctgttaccattacaggagagggaaggaaatggctatcttatttcagcctttgcctttcatcatctctgtattgcagcttagcctttaccctaatacacctacctcctaggatttctgtgaggatcatctgggatgatgcacatcgaagttcctggtgtatcataagttctcataaatgccaggtatcgatcatagtttc

SEQ ID NO: 533730 - DNA, 612 bp, Homo sapiens
actgtttgtgacctgtctcaagagccatgtagcctcacttccattgccatctattcatcgagatgaccacaaaggcccacctgaattcaatggaatggcaaaatagatcctacctcttgctgggcatagtggcaaggtacagaagagcatgtgggactagaaatagtgcagtgtccctttttggaaaatacaattggcctcagaatccacggtgcaggattgccccagaaagccatatgaattattctttatggaagttggacactctraagagcagatgacctttgccaccatgatatgatgtcccacccctctctaatgccaaccttccatctgtcccaggaagggctgtcttctcacagtaggtgttgggtatttctgcctccccttttggcttctgcccaaccataccctcaccccatgcctcctctagctgctctagttcacaatattctctctcttctctgaacttttacttcctgtagcaccgacagagccttgatatacttcctcctctcatgagttaatttccttgtgtgcctgtttgcctcaaaaccagataataggcccttggcccctctccctgtgtcatgcacagagtgggcattcagt

SEQ ID NO: 533731 - DNA, 649 bp, Homo sapiens
ttaaagtctagccaagttaactatttgatactacaaaactcatcattcacctgggctcagtggctgacgcctgtaatcccagcactttgggagaccgaggtgggtgaatcacgaggtcaggagttcaagaccatcctggccaacatggtgaaaccccgtctctactaaaaatacaaaaattagctgggagtggtggtgtgcgcctgtaatcccagctactcaggaggcagaggcaggagaattgcttgaacccaggagrcggaggttgaagtgagccgagatgtgccactgcactccagcctgggcaacagactgagactccatctcaaaaacaaacaacaaacaaacaaaaaccaaaaaactcatcattctttaaaagaagctaacagacctcagagtcaatagcgccttattcacagtgcctagtatacccacctcacaagaaagtaaaacacaaacacattaaatacataaatagaagggaaatgtgatccttagataagagaataagcggtcaatgataatcaaacctgacattacccaagtgttgaaattaggaaatgagacttcaaagcaaatattataaaaaggtttgaacttaaaggtaaatattattataaagaatgaaaagattgggatatctcagcag

SEQ ID NO: 533732 - DNA, 652 bp, Homo sapiens
actcattgactgatgggcatttgggttggttctacgtttttgcrattgcaaattgtgctgctataaacatgcacgtgcaagtatctttttcgaataatggcttcgtttcctccaggtagatacccagtagtgggattgctggatcaaatggtagttctacttttagttctttaaggaatcttcacactgttttccatagtggttgtactagttttcattcccaccagcagtgtagaggcgttcccttattgccacatccatgccaacatctactgtttttttattttttgattatggccattcttgcaggagtaaggcggtatcacattgcggttttgatttgcatcagtgaacgtttttcttaaatgtccttcttatacctacaaaaggaaactagatcttcatattaaggataatttaagaagagtcctacctgaaaatgggatgaatttgagctatttcatcatctgccctgaacttgcaaattccataatacaggaatgagaagactttttcaaacaaagagcactgaatgaaaggttaacaaaaatcaattaaaaggcagcttgagtcagctttttagtagcaggtcatcaacatacctgcaaagtagcctgtatccttcattacttttattactcctacttaacca

SEQ ID NO: 533733 - DNA, 652 bp, Homo sapiens
ttttcctttatgggaaagttgttgaaggggtgaggcagaagaggaagcaccagggaatgggctgagtgcgtgtcagcacttagcatccttcgcccctgctccctgtccctatcaccttgcccagattcgtccaggtgtccagagcagaaactgcattgagttctagaacagtctgagtgcaagtcacacaagaaattgggtctgaccaactcaaggtttcatattttaatagggccaatattttttaaatcagattttatattttaagaagtccagacttctggtccctcctgaaaagtcacaaatcaggttaccctgggccctccttcctctgtgtcaacaacaaataggctggtactcagtagtgcatgcctcttttagttgaggcaggcggtgttcagtttgccacagtccccaccattccccattgctatccctcatgtacatggtttgcctggccccatgggcatctgcaacattttgcctagagccacatacttagctactttcccagctaaacgcttactctctccatgggtccattattttgtgagaagacaatcagaacgagtcctgcagggtcccatagggtcccctgaagtccttagratgatgccacaagaagaagtcaagatgattatgccctctgagc

SEQ ID NO: 533734 - DNA, 529 bp, Homo sapiens
taacttactaaaatgccaaaactctccctgcttctgagattaaaaaactggctaaaatgaattaaaactattaaggccaactggagttggcacagaacaagctggctggcgtcacagcccaaatttctgccacgtttcaaccaactccccacaaatgtgcacatggaatacatgaggcagcgttaaacagaactgtgcatgcggaggacttacagacctccgctttccttccaccaatcaactattaattccagaggccactccctaaactttttctaataaaatgaccccatgaaagycagcacaggggacaggtttgatctggactcctgtcttattgttcgttaatttacaataaaaaccttcttttctcaaaaacccaaattgggcagtgagcttcttttccttgataacattagttttaatcatttgagacagtcactctgattggaaatagtaaaaactgacttcaaaacaaaaaatgtaatgttcaacattcacaaaacgaagcaagtataaaggaaattta

SEQ ID NO: 533735 - DNA, 477 bp, Homo sapiens
  misc_feature (1)...(477): n = A,T,C or G
nnnnnnnnnnnnnnnnnnnnnnnnnnnnnnnnnnnnnatctggggtctatgaaaacacatccacacacctaaacagaaatagaggactaggtagtagggctgggattggagattgatattgagcctgggactggacctgagtgagatgtggggactgacctctgggcagggtttgaggcgagggtagaggttgggtactaggcaaggacagagtctggggagggggaagtactggggattcatgggatatagatgtatttgtaatgccattgaagaatacaaacatggaggaatggccacgttggacaagaatagtaggatgcagagactcactgtgcaaagatgggagaccccagaagagctggacatatttttgctccaaatggtcctcaaaacacttagaatatgggggctgctgatggatgtgcagttgttctagtctktctttactggccccaaaaaggaagggaggttgcc

SEQ ID NO: 533736 - DNA, 597 bp, Homo sapiens
acctatcacccacctcactcagcaggtgttcaataaatggyagtcgtgatggacccaggcagtaaatgaaacatatgatttttctcccaaagaagctcagaatctttgtctatgttttaccagcttaattttgtttttccctggctgagaaccactttgtgtatcctactctcaattcctgctaaactagagaaaggcaaagttacatgaacacgaatctagagtcagcttctgactgaaaacctctgctattgcactgatgagctctggaatgcttttcccaagcaagatggagttattaacaataacattatgttctaagtcattagtaaggacctgtcagaaaggaatcagtccctgcatcttctggggtttgatagaaaaaaaaaaaagaattaaaaaatgttggaggctgaagcatcagcaactgacatatattcatctgaaacaaagacaactttttaaaaaaggaatctgtggtgcacacagacctggaaagaaagacactttggctgcgaaatccccccatcttctctggggagactcctgcctccgcctgctgttcatcagccctgattttgatggggcgatttttag

SEQ ID NO: 533737 - DNA, 557 bp, Homo sapiens
tgtcgctgcctccattgccccatccacctgccccctacaaccacacacgtccttgttctcatggacactcttgctactggggaatccttgcctcccctaaactgctatgcagaccctggggtgtggtggaagagaactcgaattcaaatccatatctcatcagacagagtacagggtggcttcttgtagtctgcccctcacactgcagcctgggcggccagcagagcctatataaggtggtggtgtccattccccaatatccttctcatcctgatgagagrccaggcctttcaagatgcagaatgcctggtgttctggcttcatcccagaacacacatccacacgacctgaccctagccctccttcacagatggttctgttatgggctgaagtgtatcccacaaaaacatatgctgaaatcctcaacccccagtacctcagaatgtatttggagaaagtccctttaaagaggccactgaggcaaaatgagatcacataggtgggcctaacccaaaccgactgctgtccttataagaagagattaggacaccagggat

SEQ ID NO: 533738 - DNA, 512 bp, Homo sapiens
tgtccttcagacctccctctcctgtgttccctaattcaccaagtcacaacacactgtctcctaagtatctcttggagttgtctctctgatccatgaccatcatcattcttgattcaagccacctattcctcctctcttggcttaatgaacaactctcttgttgttttgtctctttccaatttgtttttttctgtgctgggatggtcattgcccagcttaaaactctttgagtagcttctcatcacactaagcatgaagtataaccccttaacaagacatccaaagccttctctaatcgggtttttccctatttctagatacacctctgatatgtccttgttaaccttgccccctctccactgcctcctttgttttggttccgataaaattctccaaaatatccatgcttgtgcagaggcccattatggcctggattctccctkgggctccagtctttaattttgccatcatcccttcttcctagtcttagccatactgaataacatgtagtt

SEQ ID NO: 533739 - DNA, 632 bp, Homo sapiens
tactatgagatgccaaatacacagtgtgaattattttgtatccaacaatattttattcaacacaagtttccaccttgtgtatatctagctgtcccagcaccatttattgtaatgaccattctttctccattgctggtagtttcattttttgtcgtaaatcaagtgtccatatgtactcaagttctaggcatgactctcctattttattctctctatataatccctatcatcatccattgtaaacacactttgagaaattcttctgtggatcaaagggcaagaaaccttggaacaccccatgaatcattttatgagtgggcataatatcagtaaaatttagwgatggtcatttagaaagcagtgcccagcatttcctggaatcctcatttaaatatatccatatgatctaccaaatacaatttctgatgttttcagaaatctgtatatagttcagtaacacccaggaactactctttttcccctctctattttcattgctttccttccccaaaacctcctttgccaaatcagtagtacaacattttggaaaacaagtcctcttttattaagagcaccttatctgacattcaaatgtcatcaggaaagaaagacaaaatatagacttagttatt

SEQ ID NO: 533740 - DNA, 643 bp, Homo sapiens
gacatttatttagtggaaactttatgtcacatatttttctgagcactttacatgtgttgtctcataggtatacactattattaccccacttacccatatggaaactgaaacaaaaaataagttaagtatttaccaatggtcacacagtgagtagtggcagatagaagaytggaagatctaggcagtgggttccagagaccaagggctttaccttggtgttctccagctattgtgttaccgctggttaatattgagaaattatctcaaaagggaatctccattttctactccccacttccaccctaaacattcatatatagctaccatcaagctccatatatccaccagactctcttaaaagcactgcctttattgtccctacttttcatgattgcaacaagacaacattcagattctactctgtaccagttgcacacaaagcatcataacctcctgaatcaagggatcttcacatggctccacatggctaggagaacttactccatgtggaaggctatggaatgtttcctgcatccccaaactctggtcagagaagctgagtaagaagaacaggcagagacaaaggcatgcatgaatatgagagtaggacttaggggacagacaaagttcaaatgggtgagga

SEQ ID NO: 533741 - DNA, 286 bp, Homo sapiens
tagaagatgctggagtgctggagtgccccgtccggaaatacacagacaagttctaaactaactaactaactaactaactaamtaaataaataaataaataaataaataaataaataaaaacaaaaaactccacaaggaatacactaagggcatgtattgcagattacctgtaaatttaaactttttaatggtcgaaccccagatattatattttaaccccttccccttttggtctgatcttcagcttcacacatggtggccaaggagtcgggaaataagagatttg

SEQ ID NO: 533742 - DNA, 439 bp, Homo sapiens
tttgccatctcctaacacatatctggttttctcccacctttctttccttcgggccagtycccggttgtacattgccttctcctgtctctctgttgcccagccccaccgcctcttcttccctgaagctgtcctatctctcctgccagaaggtagacactgtagaacttctggactgtcattcttgcgacaccatccatatttttgcccctattgggttttgttttaatttactgaggggctctcccatagagtttagtacagtacttatttataatgggttcttatgtaggtggtttttttgtttgttgtttgtttgtttttgttttttttgaaatggagtctgcctgtgtctcccaggctggaggcattggcacgatcttggttcactgcaacctctacctcccaggttcaagtgattctcctacctcagcctcctgag

SEQ ID NO: 533743 - DNA, 611 bp, Homo sapiens
tcaaccccccaacagtcactgtggtcagggagttgggctcaggtacaagaagagcagctcccattcagaacacaggttgagagtgggaggatgagagtcactgtcctaaaagaggtggggctggggggtgacacaaacactgctgctgggggatggtttgagctgggaaaagtcactctgggttgtgactgacataagtgggggcttttcatctcctggcctttcagcagggagatcttttagagtcagtccaggctgaaaacacatttctccaatgaacaacagagatgcaacatcacggcatttctgactgacactactggttccctccccggcagtagcaggtcaaggttttactgtttaatcattgcaaacccctgctatgtggtcattcaactttgggtttcagaggtgctggattytgctgaaagcaccctcatgctttttatgggaatgtacctccattgcctgacctggaacgggtcctacctcctccatcctctctctctgcctggtctgggttggagtcacctgcagtggacccagggtatggtgccatcatttcctactttagggaggccatccaccacttcctgcccctgcccttcagc

SEQ ID NO: 533744 - DNA, 351 bp, Homo sapiens
ggactgggaggtcgggaaaggcttatctgaagatgtgacatttgagttgagacctgagagataagagttggctgagaagagtggatgagacagcatcccaccagaggggacagccttgtggacccctgagctggtgaagagttctttgtttaaggaaatgaaacaagatcaccatgactagggcagaaggaactgcgggtttagcataaggaakatgagattcagaaaagtgcttggtgaccaggaagagagagcaatgtcatgggagtctgcacacaggagagtaggcaggcagaaaggtctgggcatctgtctgggctgcatgccagccagagggagggaggcccagga

SEQ ID NO: 533745 - DNA, 523 bp, Homo sapiens
gaagacaggctgtctggctgcagagttcatgctttcccgagtcgtgggtggatgttggtagttctgtgtgtgtgtgtgtgtgtgtgtgtgtgtgcagtagtatgggcatgtacctgtactggtgtgcttgtgtgtgtacaggcacagcaccagggacaggtattcattcatgcccagttccccccaatgaaaccctaaaggaatttcctccttttctttccccaaggagcctgtaactctcccctgcccaggctgcctttgcctctaatcagttcatgaagctggtgctcagcctstctgccctgttgccagaaggaagaacagcaacaaagcaaggcacatctggacacagaggtgcttgggtgtggggtaggcttgagtcctagcacctgctgcagccagcattctaaccagccccagccccattctgggccaaacaccaagtacttcctccaacatttggtggttgctggaaaatcttgtctccctggagcaaggcaggacagaggctgtatcattaggg

SEQ ID NO: 533746 - DNA, 556 bp, Homo sapiens
aactgcctgcctctctcatcacccttctctgtttccctccctcctgcctctcacctgccttctctcagcctccccacctcccaagccctggagagagggatgctgccattctgcacagcatcacctgtgagactggcaggtgggatggggacaatggatccacatgactcccctcccttccagcagcctctcagaaattgggggcagctctgaagatgctgtttttggcccaggcaccatcagcccaaacaaaggcattttctatggctgctgggaaggagacaattgtttccattctgcaaacatttgctgccaacaccagtgttttctcttggaagccaacgtttggttgagaagacaatgccaagctaaatattttctctgcataaaaatccctttaattttttaatcatttggcaacacctccttcctcctcccctcgcccttctgctcctctcttccctgtcactctcwgtcgctggctgcgtctctgcaacacccaacatctgagcaagagggaaagctttggtgggccacacagtgtttccaaacctac

SEQ ID NO: 533747 - DNA, 598 bp, Homo sapiens
tgcttgataggccttgaggtcaaggagagaaggaaagcatcaagaccagtgaagaaagartcaggagcactggccttggcaagaaataagccaaactagggtccggtgggttcagcccagtgatgaagccaggagggattccagaggcatgctaagaaccattcgtgtagggaatatttatggactacctttattattaggcactaggtacttgcattattttgttggaccaatacaatagctctacaaggtagatactattaatagccctattttacagatgaggaaactgaagcccagaaaggttaaattattcatttaaggtcaggtttctcaaccttggcactactgaattttgggccagataattctctgttgtcagagaaggttctttgtactctgagatggtttgtaacatccctagcctctcccgactttaggccagtagcacttccattcccagttatgacaatcaaaaatatcttcaggcattgcctaacatcccctgggggataaaattaccccttattgagaatcacttgtctaaggtcatatggttagtaacagaactggatttttttttttttgagatggagtt

SEQ ID NO: 533748 - DNA, 654 bp, Homo sapiens
ctggagaatctgaaagctgatgggaggggagggcaggtgggacagagaggtttctctcccatgggggaayggagatctcgaaggaacaaagcaaaagcagaaaccttggggtctgagtctcaccttcctacaggctgtctcactgcagggtaggggagtctgctagtggaatcactcccttttcttgccatgggaatggtaggggaagtcagtactgcccaggggccatccagatcccggttggtctgtttgtccacccttgacctaacagtctgatggagggttgagcaacctggtgaaggggaatgagggcagagactctggagcccagatgggaaagagggaagcgccagagtgagtcaggacattgcctcgctcagcctttcctccccacgtctgtcatcctgtcttcctctgtttccctctccaccatctcctgctacatcttccttccaccttcatgaatgtgtgggcctgcttcacttaatctctttctccataagcagtaaacatcagggggtggggctggagagaagctcagtcaagcagtgagagaaggaagtagcttagtccctcctacttgagtagcattgcacacttgatgaaacactttcaactcatttaattcttataacaattctggcaaagataagt

SEQ ID NO: 533749 - DNA, 654 bp, Homo sapiens
ctggagaatctgaaagctgatgggaggggagggcaggtgggacagagaggtttctctcccatgggggaatggagatctcgaaggaacaaagcaaaagcagaaaccttggggtctgagtctcaccttcctacaggctgtctcactgcagggtaggggagtctgctagtggaatcactcccttttcttgccatgggaayggtaggggaagtcagtactgcccaggggccatccagatcccggttggtctgtttgtccacccttgacctaacagtctgatggagggttgagcaacctggtgaaggggaatgagggcagagactctggagcccagatgggaaagagggaagcgccagagtgagtcaggacattgcctcgctcagcctttcctccccacgtctgtcatcctgtcttcctctgtttccctctccaccatctcctgctacatcttccttccaccttcatgaatgtgtgggcctgcttcacttaatctctttctccataagcagtaaacatcagggggtggggctggagagaagctcagtcaagcagtgagagaaggaagtagcttagtccctcctacttgagtagcattgcacacttgatgaaacactttcaactcatttaattcttataacaattctggcaaagataagt

SEQ ID NO: 533750 - DNA, 604 bp, Homo sapiens
  misc_feature (1)...(604): n = A,T,C or G
gcggatcgaccggagcagagagctggcgagcaaggtgggctcggaaacccctctcctttcgccgcggtcctcgggtgctccccgaaccccggcacccgcggtgcatctcctgtctccccgcctgctttctgggcgccaaaatcgggcggagcggtggatcggcgagcggcgggacggggtgggtggggactgcgagcgagtgggtaggggtggggggagcggcagacgcgacggtgctgggatcccgggagggagcggarcggacctgggcttggtcgcctccaagccggcgggaccgagtgctttaggccgcttgaaagaaagttgctccggtaagggacggagcgggaagagggaggtgtgtgtctcgcgggtgggggcggtggaagctccggcacctcctctcaccccgggccccaccggcttgggcttggcgtggcgaccccccatcactccccaatcgctggcttggtcgttccccctttgtccccgccatccggcggaggggacgggagggggtggtttcccggcttcctcccaccaccaccaccacccctccaagacaaaannnnnnnnnnnnnnnnnnnnnnnnnnnnnnnnnnnn

SEQ ID NO: 533751 - DNA, 357 bp, Homo sapiens
  misc_feature (1)...(357): n = A,T,C or G
gggatcccgggagggagcggagcggacctgggcttggtcgcctccaagccggcgggaccgagtgctttaggccgctygaaagaaagttgctccggtaagggacggagcgggaagagggaggtgtgtgtctcgcgggtgggggcggtggaagctccggcacctcctctcaccccgggccccaccggcttgggcttggcgtggcgaccccccatcactccccaatcgctggcttggtcgttccccctttgtccccgccatccggcggaggggacgggagggggtggtttcccggcttcctcccaccaccaccaccacccctccaagacaaaannnnnnnnnnnnnnnnnnnnnnnnnnn

SEQ ID NO: 533752 - DNA, 424 bp, Homo sapiens
taatcattaaaattggagtcggaagtgttttctgtttttgtttgtgattggaaaaataattcctacaaaaactacctcacaacagaatccttcaatagtcatggcccaggaagctgaggcggaaacaagaaacccaggtgttacctattggtaattgtccaggcagtagaaaccagagaatgagggaaaaccttgtatatgaagttcaccaagtcatgagatgaggggtagctgtcctttttccaggacacttggtggtgaggctactcgtattctcagcagtcatctggaataacatactagtgctaatgggtgggtcctttcattttaagwtgtgccatctgtggttgtgacctaagggccctggcaatcaactatactgccactttcgaaaatcttacagtaaaaattgactgagaataat

SEQ ID NO: 533753 - DNA, 368 bp, Homo sapiens
tgagtttggctgaagccccagagggcccattttgatgccattccttagcaaaaagcccagccctgggtaccactctgacagcagacacaaggtgggtgggaagtttatgatgtgattattatacattgcctgcctatatcaaaacatctcatgtaccccataaatacatactcctactatgtacccacaaaaatttaaaaaaattttaagaagagaggtggaataggccggagtcagaggtgtgcatttttggggggaaaggggaggtttcaaggtccacacataggcccttctctttggcaaataacagattctgtgcagttattgtatgtgttagttygtatatttcattgagctgtatttggagg

SEQ ID NO: 533754 - DNA, 600 bp, Homo sapiens
aattccttagcaaaaacctgcaatcagcaaagggtaccaatcacatatacctaaactgggtagaagaaattcaacttctgagattttcctttttcttttgtttgcctgatgtatyagtccatttttatgctgctgataaagacatactcgagattgggaagaaaaagaggtttaattggtcttacagttccacatggctggggaggcctcagaatcatggtgggagactaaaggcacttcttacataacagtggcaagagaaaataagaaggatgcaaaagtggaaacccctgataaacccatcagatctcgtgagacttattcactaccacaagaacagtatgggggaaagtgcccccatgattccaattaactcccactaggtccctcccacaatacatgggaattatgggagtacaattcaagatgagatttgggtaggggcacagagccaaaccacattgttctgcccctggcccctccaaatctcatgtcctcacatttcaaaaccaatcgtgccttcccaacagtcccctaaagtcttaactcatttcagcattaacccaaaagtccacagtccaaagtctcatctgagacaag

SEQ ID NO: 533755 - DNA, 593 bp, Homo sapiens
gggcgtgggaagcatattcatgcccctaatagagccctaaagatgctgttgcctaattcatgctaacaagctatctgaagtttttttggcttgttaatttcagagcctaattctccatccttccttttgaactgttgagtwttctgaaattttcccaataaatatattttgtatacttcagccagagttatttttctgcagcttggggaaaaacaacaacaaaacactgatatactcttgtaagagaagtataggagatattactgttttcttgaagcgaaagaattcaagaaagaattgccacaccttctgttgatgagaactggattagcagcaagtcagaaggaggctgaccttcctcacaggcattagctgattgctgggggccatgggcatttacactgttatatatagctgacttagaaagacaatcagtatatatgcctcagttacacaaaaatccatgtgtccctctcctggatttgcttctatacttttgcgttctagtttccctcattctgctgcctcatgcctgctgagtgtggcttgtctttgcccctcctatccttcagagtctgggcaaaggcaggttt

SEQ ID NO: 533756 - DNA, 599 bp, Homo sapiens
acccttctaagaattctgtatttgtgggttcagggtcatggtcccccggtgccagcagtcaccttatggaggacaaaaccagcataaaccacaaggcaaaaggttaaagaaacctgttttctgacttttcccctccaattccaggatgcccttgtgcttactccagcctccttgtggaaacccasctctcctgtctcccagtgaagacttggatggcagccatcagggaaggctgggtcccagctgggagtatgggtgtgagctctatagaccatccctctctgcaatcaataaacacttgcctgtgatgcctgccgtctggagtctctttgtcccggcacaggagtcattttgcccctggcaggcttggggactggatggctgagccacacctgggtcatgttcaggcacatctgagccaatctgggtgatgtctgggccacatgtggatgatgtccacagtcttgaccacctccctgtgcttcaggaatcagaaagccagctcttcccacctgccttcatgtcagcctcaagaccatcttcagtgggatggcttttagggtgggggacatatgttttgtttatcttggcagtgtggt

SEQ ID NO: 533757 - DNA, 508 bp, Homo sapiens
aaggacatacggtctggtgtctgagttaggagtctgtggtggccacagccatcacctactaccctgctctacaggagaacagatggtgaaaatagtggagtggagcatgagtgtacgaggtcaatgctaagggcatgaccaagtcatggggcctatctgtaggacatgagagtcacgggactgatgcctacatacttgatggaaaacccaggtgtgaaaacaagaagaccaaaggtagaaaatagagtacgtctcatgaccttgctactcagactgtggtccctggaccagcagcatcygcatcatctaacctgggagctggttagaaaggcagaatctcaggcccatcccagaccaaatcagtatttgcattttggcaagagcctcagataatttgtttgtacattgaagtttgagaaacgctgccttaagtgctcccagtgaaggaccattgggcactcggaggagagtaggtgtctgatgctcacacaagttcctgaagatattc

SEQ ID NO: 533758 - DNA, 599 bp, Homo sapiens
gacaggatcttagtggaatttagaagccaggcaggtggaaaagcattgaggaccccatcccaagggctcgagtccctagagacagcctggaaagattgggtgccagctgcagagaggagagcaaggcgaccaaacgcagggtaaggtctggaggtgctcatagttcactacgggacatgtacatggaagtgaataattatgtcacaaggtgccaagggggctagttacctcacatagratcttagaaaaggtctcctggagaccatgtctgagctggtcctgaggtgtgagtagggattctccgcagggcggggaaggacttgaaagagtctggcaatatggagcacatcaggattatggaaggtgagcttggagaacaaggcagagtctagcctgtgaaaggcctcttgcaatttgttgaggatccatgaccttctcccatgcatggtgaaatgcccttaaaggattttgaatagatttaaaagacactcaaaaacaaaaaacggtagattcaaaatagacggtagggatcgctttcttccgttttctttgaaggatcagaagtgtttaccaccacctggattgtttttgggctttca

SEQ ID NO: 533759 - DNA, 599 bp, Homo sapiens
gacaggatcttagtggaatttagaagccaggcaggtggaaaagcattgaggaccccatcccaagggctcgagtccctagagacagcctggaaagattgggtgccagctgcagagaggagagcaaggcgaccaaacgcagggtaaggtctggaggtgctcatagttcactacgggacatgtacatggaagtgaataattatgtcacaaggtgccaagggggctagttacctcacataggatcttagaaaaggtctcctggagaccatgtctgagctggtcctgaggtgtgagtagggattctccgcagggcggggaaggacttgaaagagtctggcaatatggagcacatcaggattatggaaggtgagcttggagaacaaggcagagtctagcctgtraaaggcctcttgcaatttgttgaggatccatgaccttctcccatgcatggtgaaatgcccttaaaggattttgaatagatttaaaagacactcaaaaacaaaaaacggtagattcaaaatagacggtagggatcgctttcttccgttttctttgaaggatcagaagtgtttaccaccacctggattgtttttgggctttca

SEQ ID NO: 533760 - DNA, 496 bp, Homo sapiens
tctcctaactggcctgtgagaagcaaaggaaaagaaggcaaatgagctcattggcttactcgccgagttacctcccggcttccttatgctcttgtgcaggccacacatgacacaactgcagggtgcaccacttgtacagtagtttacatgaacaatgccacctggagttgggcagtgcacaacctacacaatcttacatggctgccctgatgacccactcattcattcaccatcactcagtcagtcagtaacctcactgactgctctgtgcctggcccggtgctgggcaatgctgagacaaaaagatgagttagactcagccccggaaccctccaggagctcccattctggtggaaaacaataggtgcaggagcagacagatcccagcagcatggtcgggtctggcagaggtttgggcattgtgggtggcaatgcgtgagaggctctagctggtgagsggcccacttcagggcgacccaggcaggacaaaccccga

SEQ ID NO: 533761 - DNA, 498 bp, Homo sapiens
cttttcctcttccatttgaaaggactcrggtttttactctgtgcctgatccatcacagagccttctgaggacattccaagattgtctacagtcctgtggtccacttggaaattcagacagataatatttcaaggggatagttggttttgactgaatactcatgaaaacttttaaagaaatgagtgatagagctaacccatatctgtaagttttgatggtttttcttgttttttatttttttgagaaagggtcttgctctgtcacccaggctagggtgtggcggtgtaatcgcggctcactgcagcctctatctcctgggctcaagtgatcctcctgcctcagcctctcaagtagctgggactacaaggcctgcaccaccacacccagctaatttttttttttttcctgtaaagtcaggaaacctgccacattgctcaggttggtctccaactcctgggctcaagcaatccacgtgcctcagcctcccaaagtggtggg

SEQ ID NO: 533762 - DNA, 615 bp, Homo sapiens
agctgctaattctctagtctctcttcctagcctgctctttcctccagtttttttttttttttttttttttttggagacagagtctcgctctgtcacccaggctggagtgcagtggcgccatctcggctcactgcaacctctgcctcccaggttgaagcgattctcctgcctcagcctcccaggtagctgggactacaggcatatgccaccacgcctggctaattttttgtatttttagtagagacagggtttcactgtattarccaggatggtctcgatctcctgacctcgtgatctagctgccggggcctcccaaagtgctgagattacaggcgtgagccactgtgcccggcctctttcctccaatttttgatatagttgaagctcctccttccttgggacatcctttcaggatcatcagtctcctctttctctacccgtattacctctcgatgtaggttcccagacctacctgctgtcctcctcttatctccagacacgtctcactacctcacaccgcttcatcctataccctaaaggctcttataagtgtctctgtccctgcccacttggccaatctcaaaccaaattaccttttctccaacccatcttccc

SEQ ID NO: 533763 - DNA, 615 bp, Homo sapiens
agctgctaattctctagtctctcttcctagcctgctctttcctccagtttttttttttttttttttttttttggagacagagtctcgctctgtcacccaggctggagtgcagtggcgccatctcggctcactgcaacctctgcctcccaggttgaagcgattctcctgcctcagcctcccaggtagctgggactacaggcatatgccaccacgcctggctaattttttgtatttttagtagagacagggtttcactgtattaaccaggatggtctcgatctcctgacctcgtgatctagctgccggggcctcccaaagtgctgagattacaggcgtgagccactgtgcccggcctctttcctccaatttttgatatagttgaagctcctccttccttggsacatcctttcaggatcatcagtctcctctttctctacccgtattacctctcgatgtaggttcccagacctacctgctgtcctcctcttatctccagacacgtctcactacctcacaccgcttcatcctataccctaaaggctcttataagtgtctctgtccctgcccacttggccaatctcaaaccaaattaccttttctccaacccatcttccc

SEQ ID NO: 533764 - DNA, 218 bp, Homo sapiens
agctgtttttcaatcacagatggaaaatacagtattcacaggatctgaaactcacataaacagatgggtccaacttttcgtatatgcgtgttactagagtggagtacaggaattgagtatgtgtgaatttggttgtacacaagtggtcctggaaccaatcccctgtgtgtaccaaggracagctatgtaatgttttagattcactgtagcagttttga

SEQ ID NO: 533765 - DNA, 609 bp, Homo sapiens
tgccctcagtgctgagaggccgcctacggttcctcgccatgtggccctctccataagtcctctcagcgcggcagcttgctccttccaagccaatgagggagtcagggagcaagtctgctagcagtatggagtcttacattatgtcacatagtcacagaagtgacatcccatctcttccgtcattttctactggttagaagcaattcacaggtcctgcccrtattccaggggaggcaattatacaaaggcatggatactagcaggctgagatcgggggaacactttaatttctgcccaccacagcactgcattcacaatagcttatcagtgagaagtctctgactgaggtttaatcagtgtggtatattacttatgattatttttgtgaaatctagtatagtttgttagaacatgtctactttcatttaagtatacatttatctatttacagcactttaaaattcatttttgatggtgagcacagtgagtactgtggcttgggatagcatatccatttctataatattgacaattgattttttttgtttactaatatccccacttaatagatcattgataactgagtctttttataaagcggattgaaga

SEQ ID NO: 533766 - DNA, 609 bp, Homo sapiens
tgccctcagtgctgagaggccgcctacggttcctcgccatgtggccctctccataagtcctctcagcgcggcagcttgctccttccaagccaatgagggagtcagggagcaagtctgctagcagtatggagtcttacattatgtcacatagtcacagaagtgacatcccatctcttccgtcattttctactggttagaagcaattcacaggtcctgcccgtattccaggggaggcaattatacaaaggcatggatactagcaggctgagatcgggggaacactttaatttctgcccaccacagcactgcattcacaatagcttatcagtgagaagtctctgactgaggtttaatcagtgtggtatmttacttatgattatttttgtgaaatctagtatagtttgttagaacatgtctactttcatttaagtatacatttatctatttacagcactttaaaattcatttttgatggtgagcacagtgagtactgtggcttgggatagcatatccatttctataatattgacaattgattttttttgtttactaatatccccacttaatagatcattgataactgagtctttttataaagcggattgaaga

SEQ ID NO: 533767 - DNA, 609 bp, Homo sapiens
tgccctcagtgctgagaggccgcctacggttcctcgccatgtggccctctccataagtcctctcagcgcggcagcttgctccttccaagccaatgagggagtcagggagcaagtctgctagcagtatggagtcttacattatgtcacatagtcacagaagtgacatcccatctcttccgtcattttctactggttagaagcaattcacaggtcctgcccgtattccaggggaggcaattatacaaaggcatggatactagcaggctgagatcgggggaacactttaatttctgcccaccacagcactgcattcacaatagcttatcagtgagaagtctctgactgaggtttaatcagtgtggtatattacttatgattatttttgtgaaatctagtatagtttgttagaacatgtctactttcatttaagtatacatytatctatttacagcactttaaaattcatttttgatggtgagcacagtgagtactgtggcttgggatagcatatccatttctataatattgacaattgattttttttgtttactaatatccccacttaatagatcattgataactgagtctttttataaagcggattgaaga

SEQ ID NO: 533768 - DNA, 605 bp, Homo sapiens
tgtctgctctcaccagaaagggactggctaagggtgtcctatcaaaccaaatacctccaggcttcccaggggtcaagaggactacttcctcaacacaactgtaacccactcaagacacactgaatggtaagttaccataagaccatagtttatcacagtcgtcttcatgatttacgaacctacatgccgcactatataatgtaggtctccatgaatcctacctcaaattacttaataaaaagcactctttatccctacagaaaggaaaaaaaacaaaatcactaccatcaggtagaggccttgtcagtcactaaaataaaaagcactaaaatctaatgcacagggaacagtactctaactctactgaaagatattatgatttaaaccaccctttacaagtagagaatgtgtggatgcttcctctacccatgaagcatttcagttaagaacatctgtccattatcactgaaataaacatctacttcttgttttcagttggaaataaatttttattggtacgtagctttggacaygtggctcactacagataaataaagcaagcttacacatctcttctttagacataacatactgtttagaagaag

SEQ ID NO: 533769 - DNA, 605 bp, Homo sapiens
tgtctgctctcaccagaaagggactggctaagggtgtcctatcaaaccaaatacctccaggcttcccaggggtcaagaggactacttcctcaacacaactgtaacccactcaagacacactgaatggtaagttaccataagaccatagtttatcacagtcgtcttcatgatttacgaacctacatgccgcactatataatgtaggtctccatgaatcctacctcaaattacttaataaaaagcactctttatccctacagaaaggaaaaaaaacaaaatcactaccatcaggtagaggccttgtcagtcactaaaataaaaagcactaaaatctaatgcacagggaacagtactctaactctactgaaagatattatgatttaaaccaccctttacaagtagagaatgtgtggatgcttcctctacccatgaagcatttcagttaagaacatctgtccattatcactgaaataaacatctacttcttgttttcagttggaaataaatttttattggtacgtagctttggacacgtggctcactasagataaataaagcaagcttacacatctcttctttagacataacatactgtttagaagaag

SEQ ID NO: 533770 - DNA, 613 bp, Homo sapiens
gctggcagcgggaaccttgccctcaacaatttaggattgtgcattttgctcagttctggcagtagcctggggaaacagcacagattcttgcttttgtttctgtccccttaggctgcaacctttcttgtttttttccctttattgagggggatggggatccaaacattatactaaatctgtatcaagtcatagctgtccagagatagtaagacagaaacttcagtgaccacacacaacaaggaatacagactttgcaaatctggtttagaaaagtcattatacaaatggatgactgcaagcctcaaaaaagcaatcactgaggaggtggagaatctgattttcagagtcaccacattacaacattcaaactgttcagttctcacacacacamaaaaaaaatcacaaaacatgccaaaaaaaaaaaaaaaggaaaatatggtgtatttgcaggaaaaaagaatttgacagaaaccatccctgaggaattccagacactggaatgactagtcaaaggtattattaaatcaatcgtatcaacggtatcacactggggtcccaaaacaagagctgagcacgcttacttccccacgactaacgtggttttttcagtgag

SEQ ID NO: 533771 - DNA, 645 bp, Homo sapiens
tattgctattagtatagaaatgtgaaataagcattccaccacaaaaataagttttcttttgctgaactcatttgggttaattctgcaaggattaactgagcactaggttcagaatattgagctttaagaaaatttttataaaagcaatattgttatcagtagtagttcatatctgctgtgtgcctccaattggcaggcacttgtggaattgatggtattattctcattttacagaaaaggaaactgagcccagataacttatgtaatttggccaaggtcatacactgagcaagtagcaagcagaattctgtctcacgtgaaaaccattgtgtgagagagtttgaccagtattttggtagctgtagaatttttctcaagcaactacgaagtctaggggactagtgcatactaatggaaacttttcatgtggagtgtcttcttatctgaagctggaggcttcaaagaattaaagagaggatcttgatagggctaattattttctttcccacagctctgcccagctgttcccattttaccccttttgtatgaaggcattcatatgattttgttgtagaggcttgtgatratgacttcttggcaaaaagcctcaccatgtttttctagtgtgctggaaacatgatttct

SEQ ID NO: 533772 - DNA, 609 bp, Homo sapiens
ctgtgatttcaatccaattcccaaacatttaaaacagcagagatataataaagcagacatttagctaaacagtgagctcaattatgctttgcacagacaacacgaactagatgttaaataaatgccaatatttatcaatatttatcagtgttttccatttccagactccagaatttcaacttcccataaattccttaggagtaaaagtataaccataatcagagcttctattaatattaatttagttcttgtgtatttgaactttgacatttcttgaaagaatataattcttttaaatctgagaaaaaccttcaggatctattagacaaaggtaagtctggcacattaaaattgtaaacagaggtaaatcatgctacagttctatatcaaattctttagccattcgcagcctcttgtgttagtagctccagattgwtggaggaattagactctttgagaaaaggaaatgtaatcaacatagattactgtaatatgttggggggaaaatgatgtgtttttttctctttactctttgcgtgttatttcctctcaaacttaatagtggtgcacccccaggcaggttaaagaaaatgatttctttgtcaattg

SEQ ID NO: 533773 - DNA, 621 bp, Homo sapiens
tttggggagtgaatagtaagtagtgcaatagcagtgacatatatgcttagcatagttatttatcagtctcacaygagagacaggccacattattgtacgtgaagaattgtgatcaactggggatctggagtggtatggctggagcagactgaagctctgggtcaccatgggccttcttttcttctttattatactcacccaacccaactcttatgtcatcatcatacagaaggaagttatcacctcaaaaactgttcacggcctctgtgctcaggaaaaacactttattttcttatctgatagatactttgaaggtattctgcatttaccttttggataaaacaatgtcagttgagtgaatatgagtttgtttacattttacttcttacctggaatttcaaggccatataggtaaggtcagccacaagccaattgaccttgaaggagaagctttggtggccttacatggattccttatttcccttgtctttgaggcttattggccatgaaactctcttgtgctggcattgaccatcactatcgtttatcctctccaggcctaagatgccagcttataaatctgaaaaaaataaaacaatcttctcatgggttaatgggttt

SEQ ID NO: 533774 - DNA, 632 bp, Homo sapiens
aaaaggggattaacaggctttggattctgagtttttggaaggtggttctcactttggggctttgggatggtgaaagcggtcgtgattctgggggatttatttgctrtaaggtctcaattatcccaagactgttggcagcaccttggagatccctttgctacatggattaattactccagggataaagccatcctcgctgtgtctgctggtgagtgtttagggtccgcgaactcatgtaaatgccagtctaaggaagcataattcagaaggccaatctgcccatcccctgctactgttacataattcaaggtgaaggtcccaaccacagctgtccgggggctgcctcctccctcgcagatggaagaagcttgcttgatggactggacttacactaatacgctatctatttggaaagaagagatggcgataaattactaccatggtgaatatcattaaaatgccgcagaaccaaaagcactgtgtgaatgttaactccaggcacctcgcatagccactccacaaagctccggtatcacccaacactttaaattgagctctaaagctggaaaggcatcttagagattagcgggtccagacgttcgtgtctaagacagcaagctccccctaggagg

SEQ ID NO: 533775 - DNA, 484 bp, Homo sapiens
tgagccaccctgcccggccatagtttttttttttttttattttttgtagcgacagggtcttgctatgttgcccaggctggtcttgaactcctggtctcaagtgatccttccatgtgaatctggtctcttaagcctcaactctaataacctagcacagctcaccctccttttatataaactacagtcatgtgctgaataatgacgtttcagtcaacgatggaccacgtacagcatgatcgtcctataatattrtaatggagctaaaaattcctttcacctagtcatgtcgtagcctttataacgtcttagtgcagtgcatttctcatgtgtttgtggggatgctggtgtaaattaacctgccctgccagttgtataaaagtatagcacatacagttatgtatagtacataatacttggtaataactgtgttacttgtttacatatttactatttatcattattttagaatgtactattacttata

SEQ ID NO: 533776 - DNA, 510 bp, Homo sapiens
ttgcaattaatttattaatcaggatagctaagcacagtcatttatggtgggtggagggagacagagggagagggagattgtgtttcatgatgaaaagatcattttgagtatttttgccaaaataataatcatagaataagatggagatccttgcatatgaataatcttctcaatcatgttgttctcagtgttgctacgttatttggcagataactttttgccaggaggataattataacacatttttttttgaaagagtkttctaattgagaagtttctttcctgactaatgacttaacaaataaaccattgttacaacaaactgtgtcataacagcaaagttgcaataactatgaatctaagatagtttcaagttctctgtagtagagtgtactttcaagtctatccaaaacaaaaacgttagctctaatatatatttgtttttaataatatattgctcttaatattaaatatatgttgagtcattatttcgcctcctttcttagcatc

SEQ ID NO: 533777 - DNA, 559 bp, Homo sapiens
tccaccacttttcatgaaaacatatgccattaaagtcttgctttacttattaaacttaaattagcatgtatttactaaaaacagggtgtatataaatatgctaggtactgcagatgaacaaaaattaaaacactcacttggcgaatttaaaaatctartagaatgataagaaaaactcatggatgagtgtaaattatgttagaatataatatgttgaaaatggggtacagataaaatctttttggtgtaggttattggctgagaaaaggtccaagaatcagaggaattagagaaaaaaataggatacagcagcatttgggaacaaattctttgaaaatatgtagttgccagtactatagaagtcaacaaagatagaaactcaagataatagattggatttgccaattaacagtccattttgagagagtaattttgttagaattcctggtggtgaaaagttgataattagactgcagataaaaatatctttcctgtgctattggtctatcttctcccatccattttagaatgcatccttactaattactctaaatgaaac

SEQ ID NO: 533778 - DNA, 610 bp, Homo sapiens
tctcagtgatttagtcagtgttacccagagaactgagaactgggctgtgagtgagcagaactcgggcttctgctctgagaaaatcctaggtcctggtttaattctttcactgctttttttttttttgactgcctatgggaagcattaaagaaaactgcaatgaaagtagggggcaaagattcacagaggcagaggcacattcacggatctggggaggtgagatcttcaggtgactctagggtctgatatacggggaaatgctggctacctaagtttccaagcctttgttgtggctatctgataggcctattttatttcacatgaaattctctatttcttctaattatgtaagtattttacatgtggtattggtcatggakaatttagcctatgtaattgtatgtaagaaatgtagtatttctgtagagaacaaatacgaagcctttattgagttggaagaaacaacaattacctcttaattaatgcttcctcggctaccacccccaacctcctcaaaaaaaaaaaaaaatagcaggatactttcttggcacaaactctcagaagaatttttatttaaaatgccaaggtttgtgggactggaccattgggt

SEQ ID NO: 533779 - DNA, 623 bp, Homo sapiens
ggacctgccgctgtgcctggactgaagccgtcccccacgtccctaccctccagaatgtgctcacctgtccccgtcctcacagcagcctcgggacaaaacagaatgmctcagagacagcacttcctgcagaaagtccggaagtgcccagaatgggaggcacggaagcccctcccggggaggactctccctcactgatggacagaccattcttggtgcagattcctgactgcacgcaccgaaccttagacaagagcgcatccgtccacatcgccccagagtgcccaggaggtaggcagcacagggcgcccagacagacgagttcagcctgcaggactgcgaggcgacctgtgaaaccgacccaggcatcccaacaggaacaaaagtgtggtcctgtggccttgtccacagcaagttccactttcctcttgctcatttctgcattgttggaagtgtttacaaccagcatgtgcttttaaaatacaacctcaggtaagagtggaagagctgctgtgcgtcctagtatgtgacggaagcctgggcgaggccctgggagggcagtggttggacaggggctcctgggtgtggcctggacagcactgatttggggatgtgaatgggggcat

SEQ ID NO: 533780 - DNA, 527 bp, Homo sapiens
gttttaatgcccaattttcaaattatagaaaagagacttagggacatcagtgattttttccagggcaagtatcttaggagcagaattaggcctaaaacttgactaggagtcctttctccaacaagatactatccaagccacccagcagatttcgtaactgtaacatgccaacctcacttccctataaacatgcagttttcctcactgattagtagacaaatatctagtttccttctgtgggagtggggaggggagcccactacaggttcatctcaaaccaaaygtatctttccatttttttgtaaattgacaatttataaatgcatatatttatggggtacaaagtgatattatgatttatgaatataatgtgcaataattaaatcaagctaattaacatatctcctcaaattttttttgtgatgagaacatttgaaatttactcttagcaattttgaaatgtagaatacactattattaactatatttatcatactgtacaatagctctcaagaaaaaataacatt

SEQ ID NO: 533781 - DNA, 543 bp, Homo sapiens
cagctgcccctgtttggcagatgaggaaacaagctcagaaaagccaagccatgtgtgattactacttggtactatcagcagcgccgccaccctttccactccaagcttgacgtcattcacttttgtttaataactccctgcctatgactctaccccatgcatctcagagccatgcaggagcccagcttggccattggagctctcttggcccacctgagcgtcactcagcacccagctactttactcctccatctcgtccaaagcctcacatggagctgaaacgcaccaggcctaacatttaaagcccgtctttccagctcctagatcacactcctggtgctttccgcaccacactccccacctcagcagacagtgccctsaactcgaggcaggcagagatcctgaccaagttctgtcatcctgagctgtgtgaccttgcataagtcactcaacttctctgaggaggcatccttatctagaaagtagaatgacaagaaaatttctgcttttcacagccatcctcacaaggacagttgttataaa

SEQ ID NO: 533782 - DNA, 626 bp, Homo sapiens
aataaaactgtatttgctttttaaacatccataattttggctcactttttgtttgtgttttattttggcctctacatgtctaatattttctatgtaatttcatgttgtttgttgctgctgtattttactgtgtactttcctgagtatttattgttcagaattgatgaagtttctggaattagaatggaaactctctgaggtcttctgttcacttggttggtatcttattcatgagtcactggatgaattgaggcagggtaataattctggcagtggctgtcaatgtcaaaatagaatgctgagctgaactttayggtttaaaatgtgtatcctgagttgtcagggttgctagatttaaagtgtttgactttggaaagaatttggacagaatttgatagacaactactaactcaggcctggaactcaattcacctctgaaatgagaaagggcccatctcctttttttttttttcccctactctattccctttttctcaaccttatttctctgcatagtccaaggaccaatcacccggtagacagatcatgcattaagaatgtacacagtgtgagctgagtcaggagaaacggccccctctccagtagaggggcagcttccattccat

SEQ ID NO: 533783 - DNA, 511 bp, Homo sapiens
gacttttctgctactggatcttacctgaaactatttctatcctgaatcctgagctcacagtgtgtgagaactgagtacgtactaaggcctgaaagagtgatggaataggacaccagaaaggtagatggagatgagtcataaatgtccttaactccatamtatgtcctttctaacctccatcaatcaaaagtggtttgaggttctcacttttccttaatcttgctctattaatggggcattgatgttttgtttgatgacacattgctcaaccaaagcaacattttacaagatgtgttctcttatctatcctaactgaaggaagtgagtgatgagaatttcaggtccttttcagctttagcaggacagtatttctgaccaacctgtcctttcccctccctcggattaccctatatgggtactgcctccatgtaactcagggttggaatatcccagaacttggacggcaaggagatgatattaaggatgtcacttctaccccagaaagaactac

SEQ ID NO: 533784 - DNA, 615 bp, Homo sapiens
ctccaaagtccagggaacatcatctttccactccatcccctttccagctcctcatccatcccactgagagccacctccattcagcaataaaatctcccacatttaccatccttcaatttgtccatgtgacctgattctttctggatgccagacaatgtcccaggtactaagagggcactgagctggttaacacttaagctgtctgcgaacagcagagctaaaagataacygtaacatgcccactgggtcttcgggagttgcaggcacccacccctagacactatcatggggctggatcccaaaagtgcttgccccagctcctgcacctgcacgtctatgtactgcttcccatcctgtaagaggtttgagcacatggtggttgaacagatgagacatacctctgtcacttgtcctgcaagggaggtcagggaactctgccattttaatattgcagtaacccacacaatgctgcctatggaaaagaaaaaaaaaacaacaacagattgttgagcaacttaaaagcatgcaattacaatattagagaatgtatgtttctaatagaattatgttttattgcttctaaaagtttgtaaatttgctacatagaaatggaaa

SEQ ID NO: 533785 - DNA, 509 bp, Homo sapiens
ctgcacttttcttaaagctgagtagtcttgctcaggataaacggggctgtcttggtaccaactatatcagaagcctatactaggctagagaaaactgacaaatgagatgccgaaagtggaaggggaaataaatggaatgtctcagctcctaaaagggaattaccctcaatagtgagtgagaaaaaaagaagaaaaattactgagtgagtactggagagttacttgaaatacatttttatgcattggacaatagcgagaaatttgtcaacactgggtagcattatgttcatcagagctataaaaaggttrtggaaacagtaacccaaaaggaatagaaacacattagaatttataggactaaattgttcactatgtaaatgaagctttcaaatatatatggtttatggaaattaatgtcttatatttattactcagctccaagattaaaattggaaccacactgattaggtagcattacaaatcaattcccatagagagaagtaataata

SEQ ID NO: 533786 - DNA, 574 bp, Homo sapiens
ctttcccctttcccccagttcccctaaccccacacagggattggttgctaatctaaatagtccaactcaggaacgtttactgtgctatgattgctgatggatgtatccctatttggtattattttatctggaatttttttctatcataacataataagataaatatattgagtttggaacccttggagtcctgttgtctctctctctctctctctctctctctctctctctctmtatatatatatatatatatatatatatgtatatatatatatatatatgtatatatatatatttgactcaatatagatagaagggaaaatgggcacagagctttttctgaagcacgttccactctgtctttttcttgtcatttctttaggcagaaatgcctaaacatgccaatgcaagtaataaaatttgggacagggaaagggaggataatacttcctttataccaaagactaatagaaatgctccaatttagccttttataataatactccatatgacccacttttgtagctattaatacttggtattttttttctaacattaagtaccctatagaaag

SEQ ID NO: 533787 - DNA, 637 bp, Homo sapiens
tccataaagaaactgctatgcattgaggtggggaaaaatgctttaaccgtcaccattagcaccataatcagtcagtcagtcaagcaaccaggcaaccattacttatggagttgctactatgggcacaactctgcagcagtcaaaataaaatgtgaggtatgattccatcaagagaaatatttattatatgcttggagaaacaaacatgaagagaatacaaagcaatacatgaaaagaaatacataaggcaaactaataatgggagaatttctctctgagttcccatatatattacaggaataaaaatctaaggagcaatcaatcagaatagaattttatttcttccaacttttagaagctgaaaagatttggaggactataaaatgtacacaggcaaataatccacggcagtagtaataactgatgagrgattattaaaaacacactaaagcctcaaacgtcagcaatgtttatcatcctatttcattaaaacatattcactaattaatttcagtaaccagagttaatttaacaagtcactgtgctaggcttttactgaatgagtcaaaaggaaacacataaaaatactcaaagatttcttatataaagcaacaggactggatgcaagctctaaggg

SEQ ID NO: 533788 - DNA, 456 bp, Homo sapiens
ggtaaatcataccaggaaactgaagccagttttggtttttttgctggttttttttttttttttttgagatagagtcttgctctgtcgcccagaccagagtgcagtggcatgctatcggctcacagcaacctctgcctcctgagttcaagtgattctcctgcctcagcctctgagtagctggaattacaggcacacaccaccaggcccagctaatttttgtatttttagtagagacgacgtttcaccatgttggccaggccagtctcgaactcctgacctcaggtgatccacctgcctcggcctcccaaagtcctgggattacaggtgtgagccaccgcgccyggctggagccaggtttttgacatccacattgggtaaatcctggtgagcagaacagcacccatcacaaaatactgccttaatttaaagctattccagctaggtctgtttcatatt

SEQ ID NO: 533789 - DNA, 634 bp, Homo sapiens
tgagtaagcaaaagaagcaggttgagagaagaacaacggaggtgatcaaatcaagcatttcctgagagagcagcctgatttattgagttatttatcagttgaaactcagtctttgggagtctgggatgtccctatagttctgttgatgagttttttttttttgagatagagtttcgcttttgttgcccaggctggagtgcaatggtgcgatgtcggctcacctcaacctccgcctcccggaggcgttcaagccattctcctgcctcagcctcctgagtagctgggattacaggcatgtgccgccacgcccggctaattttgtatttttagcagagatggggttgctccatgttggtcaggctggtctcgaactcccgacctcaggtgatctgcccacctcggcctcccaaagtgctgggataataggtgtgagccaccatgcccggcctgttgatgagattttacatgaactagtttgggtcattttctgtcacagtagtcaaaacggtatgccraagctgcaacactcatcttttagtttctaaagtgagggacttggctctatactcccaataacattacttaaaaacaaacaaaaaaaacctttccacacctaacgtcagcaggttcatac

SEQ ID NO: 533790 - DNA, 634 bp, Homo sapiens
tgagtaagcaaaagaagcaggttgagagaagaacaacggaggtgatcaaatcaagcatttcctgagagagcagcctgatttattgagttatttatcagttgaaactcagtctttgggagtctgggatgtccctatagttctgttgatgagttttttttttttgagatagagtttcgcttttgttgcccaggctggagtgcaatggtgcgatgtcggctcacctcaacctccgcctcccggaggcgttcaagccattctcctgcctcagcctcctgagtagctgggattacaggcatgtgccgccacgcccggctaattttgtatttttagcagagatggggttgctccatgttggtcaggctggtctcgaactcccgacctcaggtgatctgcccacctcggcctcccaaagtgctgggataataggtgtgagccaccatgcccggcctgttgatgagattttacatgaactagtttgggtcattttctgtcacagtagtcaaaacggtatgccgaagctgcaacactcatcttttagtttctaaagtgagggacttggctctatactcccaataacattayttaaaaacaaacaaaaaaaacctttccacacctaacgtcagcaggttcatac

SEQ ID NO: 533791 - DNA, 519 bp, Homo sapiens
tgagtctccaggttacccttcttcagatttctgggttttttcctgcatagctcccttttctttagacctctgccccttaatgtacaactgcctcagtctccctgaattcactccagtgtgttttttcaactcaagaggactgttttctgcttgggaytcctcttcctgggccttagtttggcgtgtgcctccgggcagaatgctgggctgatcattggtgccacctcatttgtttcctttctccaggtatcatggtcttcctctatctctgttgtctgagaacttgttacatatattttgttcagattttttctgtttacagtgggatgataaccatagttacttcatcaaggccagaagtagaatctgtgttctcattttaataatcaaatcatcacttagtgttcgccatgtgtcagcacaataatatcagaatcccagtgattatctttttattctttggacaatgaaaaagccagatattcttaccctatactttgattttcattacatcattta

SEQ ID NO: 533792 - DNA, 519 bp, Homo sapiens
tgagtctccaggttacccttcttcagatttctgggttttttcctgcatagctcccttttctttagacctctgccccttaatgtacaactgcctcagtctccctgaattcactccagtgtgttttttcaactcaagaggactgttttctgcttgggattcctcttcctgggccttagtttggcgtgtgcctccgggcagaatgctgggctgatcattggtgccacctcatttgtttcctttctccaggtatcatggtcttcctctatctctgttgtctgaraacttgttacatatattttgttcagattttttctgtttacagtgggatgataaccatagttacttcatcaaggccagaagtagaatctgtgttctcattttaataatcaaatcatcacttagtgttcgccatgtgtcagcacaataatatcagaatcccagtgattatctttttattctttggacaatgaaaaagccagatattcttaccctatactttgattttcattacatcattta

SEQ ID NO: 533793 - DNA, 633 bp, Homo sapiens
ttccaaggttgctttgtagcccaagataggtactagggcttcagtcatctagtatttatattctaggtagtagggaggaaaaaagggagagggtctgcaagatctttccctgctgtcattmccccttttatggagacattgcaacagtctttcctaactatttctgggaatataatattagtcttggttacatggccatattttgctttggagaatactgggaaatgtactcttttggctaggtatgttacaactccttagtaataatatagcagcttgccagtcctaaagaggtatgtgagaaatttttttttttaagttactaaagaagactgcaaatacaatgatttcttcaagtgacaactgcttttagttaagacagagaaggagaaggaatcagaaaatgtagaggagtatgctgatgaaaagcagtggttccacgagattttggtagaaggcatgggggtgtggggaagaggcatgggctaggttggggcaagaaaacatagttcataattgagaggagtgaggatgccataaagcagcaagtctcaaccttttgatcacctatccatatgagttagaaaaaacattgaatacaaatctgcaatatgttatgtaaattatttatga

SEQ ID NO: 533794 - DNA, 588 bp, Homo sapiens
actaattagtcaccttcttgaacctaatataacgtcacagatcactgtagaggtacttttggagaagtgcctattggattggatgtcagtgcataaagaaggcagtgccaaccttagtagtcacacttagtaatgaggactctgtcctgtaactcctggacccagccatacctggtttctcttttaacaaagtcagggtacactcattaattcatctcctccaagrctgttacattaatagtcgtgacttactttttatttgcttatttagatatccaacctcaggagaattagaaacctattctatcagttgtattattttgcttagagaaaatttagacaaataaaaaccaaaatgaaaacacactagtcagcccagagctttttattgttttcattgtttttatgtattgttaggaggttatgattcaaacaagacttatgcgaagacagaacttcctacctagttgtataaagcagccatgggcagtagtgttctctctcacttggtgtggctgtctggcttactgactcctgtcgtctgctactgttaactacccaaaatcagcctcatggcagcactgagga

SEQ ID NO: 533795 - DNA, 493 bp, Homo sapiens
tagttttgtgtaacaaaaatgataaagtattgatagtcttatatgttcaaactaatacacagtgtatcctggctagaatattcatgacataaagataaatattaggtggttttccattagaaagttttttgtcataaacagttcaatttgatctagttaactctagcatgagcctcttgttttctctgtcttttgttccttagagggaagaataaaactaaaaaacttagaacttttatagaatgagatcctatcatattttatacactcttgtagccttaccagtcaaatgattatcatggctaatttccacacttattcttgcagcaactatattatgtattactgtctttaacttacaaactctcaagagactaagcaattattctaagaaaacaaacatacccagtaatgacagaaccaggatttgaatccacgtttttttgacttcatgttttagccaygtgccttctatgttccttcctctaaggaa

SEQ ID NO: 533796 - DNA, 393 bp, Homo sapiens
tcattccccagtgacaccatagaggcatatgaygcgtacaggtatacgaggctcagaggcatggaggcaatgacaccacagaggaagtgagaatcaatcgctcccaggaaggcaagattccagaatacgagtgtgtctaaagaaaagaccatctctcaacatctgaaccaaaaagctgcatttactacagtacttacttaagggaggtggagctgggcctgttaggtgcaatccctgtgagtggagcagggcactgatcttatataaggtgctaggaggttgaagatcaatggtgggcacatatcaagggaggtagtgtttagggattggttggccaaccagtgtggctgttaccgattggctggtgtcagatgtctggtcactgaggaaaat

SEQ ID NO: 533797 - DNA, 598 bp, Homo sapiens
gccaacgctgagagtgcccactatgcaaggatcagatagcaggctgtcacccccagcccttaactctttctattatatcccactaaattagaaatgccaaggacttgggattggggctttatatatgcaaaactctcaagtgatgtccagtaacaatgtctggcaatttctgaagattccactgtatcttttggtgctaggttgtcattctcattggctatttggactgaatgcagtttttagyttctctatttgacttttgggcaaataatgaaactaaggcagaagtcaagaagttctttgtaactaatgagaacaaagatacagagtccctgggacacagctaaggcagtgttttccaaaaatttgtctgaagctaggcctttagaacttgtccatgggtcttatcaggaagtttggggagtgggctcctatgctttagagagttgtagacttatgaaaagagccagacaatagtaagcctttagcgtttagaggagttctgtggaacagctaataataccacagaaagcatttcaattcccgtcatggaactgccaggagagaagtcagcgcatgtggtaaacgcagcctggca

SEQ ID NO: 533798 - DNA, 598 bp, Homo sapiens
gccaacgctgagagtgcccactatgcaaggatcagatagcaggctgtcacccccagcccttaactctttctattatatcccactaaattagaaatgccaaggacttgggattggggctttatatatgcaaaactctcaagtgatgtccagtaacaatgtctggcaatttctgaagattccactgtatcttttggtgctaggttgtcattctcattggctatttggactgaatgcagtttttagcttctctatttgacttttgggcaaataatgaaactaaggcagaagtcaagaagttctttgtaactaatgagaacaaagatacagagtccctgggacacagctaaggcagtgttttccaaaaattwgtctgaagctaggcctttagaacttgtccatgggtcttatcaggaagtttggggagtgggctcctatgctttagagagttgtagacttatgaaaagagccagacaatagtaagcctttagcgtttagaggagttctgtggaacagctaataataccacagaaagcatttcaattcccgtcatggaactgccaggagagaagtcagcgcatgtggtaaacgcagcctggca

SEQ ID NO: 533799 - DNA, 598 bp, Homo sapiens
gccaacgctgagagtgcccactatgcaaggatcagatagcaggctgtcacccccagcccttaactctttctattatatcccactaaattagaaatgccaaggacttgggattggggctttatatatgcaaaactctcaagtgatgtccagtaacaatgtctggcaatttctgaagattccactgtatcttttggtgctaggttgtcattctcattggctatttggactgaatgcagtttttagcttctctatttgacttttgggcaaataatgaaactaaggcagaagtcaagaagttctttgtaactaatgagaacaaagatacagagtccctgggacacagctaaggcagtgttttccaaaaatttgtctgaagctaggcctttagaacttgtccatgggtcttatcaggaagtttggggagtgggctcctatgctttagagagttgtagacttatgaaaagagccagacaatagtaagcctttagcgtttagaggagttctgtggaacagctaataataccacagaaagcatttcaattcccgtcatggaactgccrggagagaagtcagcgcatgtggtaaacgcagcctggca

SEQ ID NO: 533800 - DNA, 609 bp, Homo sapiens
aattcatttcaaactgagggaaagaagatgaatctctctcctccatgcctgatgcaaatctagaatgacttcttccaaagcagcttgagcaggggactgagcagaaaagatggagatatattgatatacgggctccacgatgacctggataaaggtctcctagctcctgctcttcagggagaacaagccattttcagaaggaagacagacttacatcagggrcggcaggatagtgcagatcagcagagaagggaaaatggtgcattcttacccagtggaaagcccacactcccacaggaagcccagctacatgaggattggcattctccaaaggagggctgatcaaaaaagtgctcagctgccgaacatgctagggaaacattccttttcttggagattctcaacaagactattcagtgatctaagtattacaacagtaagaaacttatccaaccttgtttaaatcacatagctaatcacagaaccttttaagtatatacatatatattacaaccactaatctacaatatccattggaacacactttgggaaatgctagtccaaacaaataatgtcacaagtttcagctaaattcttgacttgggttgt

SEQ ID NO: 533801 - DNA, 603 bp, Homo sapiens
gaaattgcattaggaagtgttagcagctcaaagcactcgaattattctttgttttaatctcccaccatgataaaaacaatgtgatttttattaggacacagaacaaatattactgctgatatatgttccaccatttacattttttctctgtaaagttgtggctgtgtcaggggctggagaggaaacttttcctcaattattccagctcacgctcgtactcattattattgtattagtggcaaaaaaaaaaaaamccctagatttctaatagaattttggaatgacatagccagtcactatgtcattcctaagacatagtgaatttttcatttgttcattttttatttctttttagtagagatgggtttcaccatgttggccaggctggtcttgaattcctgatctcaagtaatccacccacctcggcctcccaaagtgctgtgattacaggtgtgagccactgtgcccggccaacatagtaaaccttttaaaatatttttgggttgccagtgtaaaaactagtatcctcaaagtagaatctgtaaaattggtttgtattagaggcagagtgagccatagtcgtagctccagccctcataaaca

SEQ ID NO: 533802 - DNA, 603 bp, Homo sapiens
gaaattgcattaggaagtgttagcagctcaaagcactcgaattattctttgttttaatctcccaccatgataaaaacaatgtgatttttattaggacacagaacaaatattactgctgatatatgttccaccatttacattttttctctgtaaagttgtggctgtgtcaggggctggagaggaaacttttcctcaattattccagctcacgctcgtactcattattattgtattagtggcaaaaaaaaaaaaacccctagatttctaatagaattttggartgacatagccagtcactatgtcattcctaagacatagtgaatttttcatttgttcattttttatttctttttagtagagatgggtttcaccatgttggccaggctggtcttgaattcctgatctcaagtaatccacccacctcggcctcccaaagtgctgtgattacaggtgtgagccactgtgcccggccaacatagtaaaccttttaaaatatttttgggttgccagtgtaaaaactagtatcctcaaagtagaatctgtaaaattggtttgtattagaggcagagtgagccatagtcgtagctccagccctcataaaca

SEQ ID NO: 533803 - DNA, 490 bp, Homo sapiens
  misc_feature (1)...(490): n = A,T,C or G
catatatttttaattcattttggcaattttaaacatttacttaatctcttatttataaattgaaatttagaccatttatatgtaacgtagttacacatatcttggagtttattaataccttctaattagttaatgtccctttattctcctttaaantacacattttgtaacattatttttcttttattatcagaattttttcctttatcaatttgtttattatatttattttgctatttatatagttgttacctaaaaactataacatgcatccatcacttacgayaatttataaataattacttttttgacatcagcttataaactaccaagtagcttacaaacattttattccatatatgccttcttactttttcattattgcatatttcatattgtatttcaatttaaagcaaatgttaaactatacaagacactactcagattattttgtattctatatttacttgaattcattcaactgtatacc

SEQ ID NO: 533804 - DNA, 560 bp, Homo sapiens
tggataactcaactgcagaattttcagatgaaattatatccctctcaagaggacaatatttttctgtattcaccttaatgctggaggaactgtagtagaaaaagattaggttgcagttytggtaagcctcagtctatctctagttttcttttttctcttcctgggatatggcttacaagactttcagcttaattccaggtgggtatttctctatatttctgaaaagcatcatatgactgaattctgtcttataggtgttttaagcttagctttcacccgtggcttcattcggttgaagaatctgacaaatgtgttgagaaggagaattactttcattttgattcctctcaacttgccaattttgtcaattcagcctagtgtgaccaccaacacttgtttctttgctaccataaaagtttccctgtatttgggctaagtccagattttcaacatcagtgtgcatcaaatactttcaaatctcctcagagaaatttggccttggatagaaagaatcattgttaaataagcttataaaattctaaaaaaattgttcccccttt

SEQ ID NO: 533805 - DNA, 578 bp, Homo sapiens
cactactccatacagcctctccaaagacaacatacaaaacatgcgcatgtgcgcacacacatacacagacgcacacacacacacgcgcacactccgtaggggaaaagattcatcaatttgagcacattaaaatgaaaaacatacacaaaacaaaacacactctaaaaaataaagacagactgcagacaggaagaaattattttcagtgtacataatgaacaaagaattagtattytgatagatgtaaaaaagacaaataaccaaaaagacaaatgagcaaagaatacaaatagacacttcacagaaggggaaactcagatagtcactaagcatgtgaaaagatgcacagcctcactagtaatcaaggaaataaaaatccaaataacaacgggatactatttcacacctattaggttggcaaaaatcagaaagatgaatgctaccaaatctgtcatcatcatgaattgggaactctccctactagtggacatgtgtgaagattagaagaagacttagaagattcagcatataattgtactcatgtctaagatgtattacagcaatggagtaagaataca

SEQ ID NO: 533806 - DNA, 620 bp, Homo sapiens
atttcttttttgatgtgaaatcagaagggtggttcctttctttctgcctcttacttaagagcacagataatttgggatgtgaacaggtgctttgaaattgctagatggaaagatcaaatgtacttttccttgaccaggtttgaaatacaattaaattatttgacataagtggggtaaatggtggaaagacataatgaaattataattactaccatcaggctactcacctcttgaattcttggtgacatatcagataatattcctccccaagatctcagattgataccttgagaacggctgtctaggagtgtgggaagctgtaattgacagtaaaacaattttttaaatrtatatatgtttgtaggtatatacacacataggcacagtctgatctcctatatgcttgaaaactccccccctccttctttctgatcgcaggatcttttctgcaagattacttttagaaacaaaaaactcttttatttaattgaaaaaataaaggctctcattccaagactccttgctgcacttgtcaatcacagatagtttcatagttatattaaatactatcactatttcagagtgattctaattgctgttttagtgacaccaaacaagat

SEQ ID NO: 533807 - DNA, 620 bp, Homo sapiens
atttcttttttgatgtgaaatcagaagggtggttcctttctttctgcctcttacttaagagcacagataatttgggatgtgaacaggtgctttgaaattgctagatggaaagatcaaatgtacttttccttgaccaggtttgaaatacaattaaattatttgacataagtggggtaaatggtggaaagacataatgaaattataattactaccatcaggctactcacctcttgaattcttggtgacatatcagataatattcctccccaagatctcagattgataccttgagaacggctgtctaggagtgtgggaagctgtaattgacagtaaaacaattttttaaatgtatatatgtttgtaggtatatacacacataggcacagtctgatctcctatatgcttgaaaactccccccctccttctttctgatcgcaggatcttttctgcaagattacttttagaaacaaaaaactcttttatttaattgaaaaaataaaggctctcattccaagactccttgctgcacttgtcaatcacagatagtttcatagttatattaaatactatcactatttcaragtgattctaattgctgttttagtgacaccaaacaagat

SEQ ID NO: 533808 - DNA, 542 bp, Homo sapiens
gaggggacagagcatttcgttgaacagaggaggaackggcacaggaaagttgcatgacccccccaccaacctccgcccccaggttgcacagctagctagtcgggaggactttgcttccgtttccctctgcctctcaatgatgatctcagggccaactaagctaaaagcagacttgatggagcatcagtcctctgaaagagtcactgccgagatacaaaatacctcttcttcaaaggggaagtggagagaagtaggaaatctgggtaacctcacagtcttccagtttctggaaaacagagctggcatcagtcttttttcttgtcctaggggatgtaaatgagctgatggatgtagttctccaccatgttccagaggcaaagctggtggagtgcattggtcaagaacttatcttccttcttccaaataagaacttcaagcacagagcatatgccagccttttcagagagctggaggagacgctggctgaccttggtctcagcagttttggaatttctgacactcccctggaagaggtaaagtag

SEQ ID NO: 533809 - DNA, 519 bp, Homo sapiens
agcaagtccatggctgaacatgtgggttttggatggaatcactttaaggtagttgttgcagttctcagaagaatgaaatcaatttcttttttatttatttatttttttagacagagtcttgctctgttgcccaggctagagtgcagtgatatgatatcagctcactgagacctccacctcctgggttcaagggattctccttgctcagtctcctgagtagccgggactacaggcatgtgccaccgcacctggctaatttttgtatttttaggagaggcagggtttcgccatgttggccagactgctctggaactcctgacctgaagtgatccacctgcctctgtctcccaaagtattrgggttacaggcgtgagccaccacgcccagcctgaaatcaatttcttatccttgctcaaaacaaagtcccataaacttttaggacttctaggaccacaaacttctaggacttttcactgacttaagccagaggtgtaattcactctgtgaccctacagtttc

SEQ ID NO: 533810 - DNA, 602 bp, Homo sapiens
ttttctttttgtttctaatagctcgagtaacaaagggaccttcccattgtccctgcttccagcttctttcctgtgttgttgaggtggggaggaagagacagtgtaaaggtgggagagtcattcaaaggaaaaccctgttttggtatggaaagccctgtttccgtcatcactggaacaatgttctagttcccacaaagagaaacccttttgtgcatgaaactcctggtgaacattctttacctcacatcgtaaaagctttgaagacctaatggcccattcttaggagggcagatctcaatgctgcttatcaacaagccaggcaaaatctcatggctgttgctagtcagatgtttacacatttttactcctttaattctgaggacacaaacatgttggtactgggaaaaggagcagactgagggatgggaaagaacaagggaaacctagataaggacaaggggctcagctcctcccctcatcycttagaactttggtgccctttgcaaatgtaagcccacatccaggtggggtcaggttgtttgagcagaatgacctctaccttagcatttgtcttgttaggactctagcacagagcataacca

SEQ ID NO: 533811 - DNA, 625 bp, Homo sapiens
ctgctgggcttctgctcccatcatacccctctgctcagaggccctcgtgaagtcctggcggccccggaggatgtgatttgcagcgttgtgattcctagaggagcaccagcttggaggctgggcctatttacaggaggcactaacatcatttcctctcctaagcagtgttttttggcttgtattttgttaaaaagctaatatttattaagtgcttactatatgtcagtgctttgcatgaattagctcatttaattctcataacgagcctattaggtaagtgctattaatatccctattttatagacttggaaactgggcacagataataggaatttgaacccaggcagtgtgggtccagagactgaattcttaaccatttaagcaattaatatattttaagtatctgtttggtgcctggggctgcattaggarcaagctgcttggaaaaaataatccttctggaaaacaagacatttatgtcacgatacgaatgtcaagtagacaaggagtattctttatagtactttgcaaaaacattgtgagaaccactgaactccatgctgcacaaatgaagcaacagagcctctctcctccgtccacaccccctcgcacaggtcctgcttat

SEQ ID NO: 533812 - DNA, 519 bp, Homo sapiens
acatggcaagaccccatctccacaaaaaataaaaattagcctggcatggtagcatacacctgtggtcccagctatttgggagtctgggtgacagaatgagaccttgtctcaaaaaaaaaaaaaaaaaaaaaaaaaaaagaagaagatcctacagcatccttgagagcccattgtggaaaaccacctaagggggaagccaggctcatattctattttggaactgcagctcacagtgtgtcctattgtctgcttttcaaaaagtactatggtgagaaaatattttaccagattgaagtttcactgaaagttcytaaggtacattttcttataactctacttactggctatttttttctgaatgctaaaacatgttgaatgaagacaggaaaactcaaacatatctgtttgctttttgcttactttgtatgattgaattttaaattgttcttccaatttttggcagcatatgcagattgagccacaggaaaacatagaattctaattagtgaatcctgtaaa

SEQ ID NO: 533813 - DNA, 622 bp, Homo sapiens
ctgccagcctgccagatttgtcaagtttttcgggcctgggtcagacacgagctccctgtgtccccaggtgctactgttgcagcccacccctcatccctcaccaccttaaaatcaggcacctccaacccacctcctctggggatgggagagtgggatgcccakcagcaaccgtcttcccccaactcctcccaactcatacccttaatgggaaagagggtttgagagttgcctgattcctcccctccaccttcctttttgcaagtcctgcatggtggtctcatgccttactttggaaagtggtatctattgtcatttggaatctcagtgaaatgtgatttgattcctgttcccagggcttactctgtgccaggtcccatgctcatcactgtaatatacagtccatgtgcaccttctcacttaaccctcataccatctctgtgagacagatactattcttgtacccctttacatataaagagactgaggccaagagaaattaatatcttgcccagatcaaccagctacaaaggtgacaagagtccagattcaaatccaggctatctgactccagggccttatatggattactgcaatacacacaatttttgtctgtgagtttttt

SEQ ID NO: 533814 - DNA, 597 bp, Homo sapiens
gtggcaattataactcagtatagccttgaactcttgtgctcaagcaatcctcccacctcagtctcccaagtacttgggatgacaggtgtgagccgctacgcctgcccccatggtgtgggtttgatgattccctgtacctgcctgactcaaggagagagagattgggtgagtgagagcctgctgagttgtgaagatcggattgagggaggaggctgtggagggccagaattcaggtttggaggaatatgaggggccatgaccaggaagagccttctctggggagcctccttggtgcttctttgtctcagcttcatggcagatgggggacttgcacacggtgggcccttcgtagaygctgactggaggaacggctcctgaggagaggctgcatggcacatagtcttcctccatgtgtatctgtgcttgtgtcccttctcttctcatgaggacaccagtcatttgggctgagggcctcccctactccatggaaccccagcctaactgattacatctgcaatgatcctctttccacatgaagccacattctgaggttccaggaagtcacagattgggggctggtggactgtccaaccaagc

SEQ ID NO: 533815 - DNA, 624 bp, Homo sapiens
cgcctcagcagcggttggggatacagcagccaaagagagcagcgctcactgctgggatccgggcagccctgatttttgtggagaacgagcagggaaggaaggaagctgcctcgtggaaaggagaggttctggggatctcagaggcccccttggttcttgaaattccccgtgaaaatcctgagatggaacgctttccgctttccagccagccccgacggtgtctccataattccgccctgcattatcagagctgcacacgttgtgctttgttgaagccgtagtttttcctctctaagctcagttactcccaytgatgggcgcagaatgagcatctggggcaacctcgacgggtgcctcggtggaagggcgggagccctgcggggggcctgcgggatcccgggatctgtcagcttcaggctcccagctcccctctcctccacgacatcgtgacttcccaaggtccagggactaaggtcatacacaagtctcagggacgtgtatacatttgatttagggagaaatatgtagaataaactgcagcaaaacgactgaagccaaaatgatctctcatgagcatcttgaataacagttattaattctaaatgaagtgacctcctcttaagg

SEQ ID NO: 533816 - DNA, 523 bp, Homo sapiens
ccctaaggcagctcagcaggagcccctctgccataatcacctccaccccctcccctgcccccactccctagctgtctagcttgcacctgttcttagcctggtacttggcagtgccttcccaggagcttctctgatccatctcctgctgtcaggctggctctgtggcctttccagggyccctctttctgtaatcctgtctcccaccctcactgcagcctcctgaaggcagaatcttgtacctttgcagccctggtgactctcacacacctggctgcacttgggtgtctctgctatggactgaatgtttgtgtctccccagattcataggttgaaacgctagtccccagagtgatggtatttggagggaggacttcgtggaggtcattagtgttaggtgaggtcgtgagggtggaggtcctgtgatgtgattaatgcccttaaaaggggaggaaggggccagagctcgctctcactgccatgcaagggcacagcgtgaaagcacagcaagaagatggaagacggc

SEQ ID NO: 533817 - DNA, 539 bp, Homo sapiens
cagccccattttcctgataattttcctagctgtaattctcggttattcttagctacacttccttgtttctgtgatcctaacttcacatttccccttgttgtgagataacagtaatctggaatggattccttggtcacttgtcctccttggttctcttgtcgcatctcctgtgtttctcttgctgttgaggtaccttcctctgaactatttccaacttggatctttargaggcaaatatccttcaggttttctataatttcgaatatttctaatacactgcagtgggtaggatttggaagctgccccttcaagtttcctgtaccttttctagaacgatatgttatagaaaacactgatgataggacaactaaccactgtcttagcctgtttcattgagcatggagcataccagccgcaggaaaatccagtattttaagcaaggaaggaaggagtatgaaagtgggaatgcaaacgggaaagaaaaggggggccaggaagaaggggatggagagagtaaggggtgaggggcctagagaaac

SEQ ID NO: 533818 - DNA, 539 bp, Homo sapiens
cagccccattttcctgataattttcctagctgtaattctcggttattcttagctacacttccttgtttctgtgatcctaacttcacatttccccttgttgtgagataacagtaatctggaatggattccttggtcacttgtcctccttggttctcttgtcgcatctcctgtgtttctcttgctgttgaggtaccttcctctgaactatttccaacttggatctttaggaggcaaatatccttcaggttttctataatttcgaatatttctaatacactgcagtgggtaggatttggaagctgccccttcaagtttcctgtaccttttctagaacratatgttatagaaaacactgatgataggacaactaaccactgtcttagcctgtttcattgagcatggagcataccagccgcaggaaaatccagtattttaagcaaggaaggaaggagtatgaaagtgggaatgcaaacgggaaagaaaaggggggccaggaagaaggggatggagagagtaaggggtgaggggcctagagaaac

SEQ ID NO: 533819 - DNA, 587 bp, Homo sapiens
gccatgtcttgcttcctgggtaatggatatccctggaccctcatcgctctcctttctgggaggacctggtccatggctgctgttcatgagaggtgtagataatacaccatgttaccacagtgtgtgctacctttgcagtcttagagcgtactgactgccttccctttctcactccccagtcttctttatgtcaaatagcaattctgccttaatttaatatttatttrttgcctactatatgcaagcattgtgttagctatgaaggctacaacaagggacagtgcagacatagtctttgccttcatggtgcttaccttttaggagaaactgcagaaaacataaacaaaaatcccaacttagctggacttatataatggtcaaatggacataatataatgatttctctctcaacatgccatgtcattcttcaaaccagaattactgtaagctcctcaagggcagggacccagaaacgatggactacagtgatgccatttacatatacacacatttacatacaaaatattcacctcttgggatgactttttgatagatgagggcttattagagaattggtttgattttcc

SEQ ID NO: 533820 - DNA, 656 bp, Homo sapiens
tgtcacttctttcaggaaaccttcctgaagtgaagcagcgcctccactgtgcaaactcattgtgtctggatcctcccttcatgcctggtcccatggcactgtaactgtctgtggacttgcaagcctcgacagctttgtatgcctgtggacagtgtctgaactatttctggtggaatccctgtgtcttacatagtgcatagcatgtagaaggtactcaataaatatttgtggaaatattaataaaagaaagaataaaatctaattgtcagattctagttgattatataacatgtctgtctatgcataaattatgagcagcagaatctttagtatctkaggcagaggttggaagaatactcatcttaaaattgaaaaaacatctataacaccacccaatagttactgagtatttatcacgggtagactttatttattattattaacatgtgtgaagtgcttcatgtgtgttatgtcattttgttctcacagtgatctgggaggcagggactattattttttccacatagcagacaaagaaaatgaggctgagggagatgaagcatttggcaaaagtcagttggcagagctaggattctatgcaatccccaaagctcataaaaaaccatttgacaaaatggataaatatgttcaaccaa

SEQ ID NO: 533821 - DNA, 402 bp, Homo sapiens
accatgagctctttcttcagagccactgcagatacctgcaggytgcagaggtcccactgttgacagttgctcttcctataggtggttgcaaatgtttcctacaccctgatcattccttccataattcacagcactattgattagattgtgactgagatactgacctgggggtaactgatatatacgttaagtcaggtgagaaaacagggttttctgggggcagggactatgcccagagacaggaggaagaaggggtgatgaccttagcactccccaggcagggaaaaaaccaagaggtagatgaggatgtgaatggcaaaaagaaacagcagggagctgttgatgaagtaatgaacaccagtaacccacagaaccggagctggaacagacaggcgggtgcca

SEQ ID NO: 533822 - DNA, 645 bp, Homo sapiens
gagttttgaatgatgggaaagattcaaataggcaaaggataggcagaaggcattttggatggaaacagtggttggagtgaagcttacagtcaagaaagcaagaagacatgctaggaaccttatagtgctatttttgtcagttaggagtaggacctaattttgaaaggtatttagaaccagattgtggagggccctgattgaaatcctaagggacctggagtttatctttagaataatacaaaactattacacgaattagtaatctctttgttcttcagttaactataaagttagggtaataaaatagttcctgtttcataggcttgttgggagaaacaatgcatataaagtctttagaacagggtttgtcacataataagccctcaatgtcagtgactattattttaaattattatttgtattatttgtattrcttagtaggaaggaacattatgaagatgctgaaaccaatctcttcagcagtatacaggaaaggtttcttgggtaatcattcctaaacttcatcttcaaattgctaaattcttctttatagatcttttaaataaaacaaatatatgaaataaagtggaagattctcttccatcattcatcatcagccccttttgtcctgagttatgatggcat

SEQ ID NO: 533823 - DNA, 532 bp, Homo sapiens
agttttgaatgatgggaaagattcaaataggcaaaggataggcagaaggcattttggatggaaacagtggttggagtgaagcttacagtcaagaaagcaagaagacatgctaggaaccttatagtgctatttttgtcagttaggagtaggacctaattttgaaaggtatttagaaccagattgtggagggccctgattgaaatcctaagggacctggagtttatctttagaataatacaaaactattacacgaattagtaatctctttgttcttcagttaactataaagttagggtaataaaatagttcctgtttcataggcttgttgggagaaacaatgcatataaagtctttagaacagggtttgtcacataataagccctcaatgtcagtgactattattttaaattattatttgtattatttgtattacttagtargaaggaacattatgaagatgctgaaaccaatctcttcagcagtatacaggaaaggtttcttgggtaatcattcctaaacttcatcttcaaat

SEQ ID NO: 533824 - DNA, 498 bp, Homo sapiens
ctgaaatcaggctaggccaaagccaggagggcttgtctccccttctgatattgtgtgacaggtgacactgttggtttaagaacagacagccttgagcatagaaagcaagaaatgtatgtttatgaacctgctccccgacctccttcccctaaataagaattgatgctgggaacagagaaaaagatagaaaagactawcctgtgattagacagacaaacccatcaagctaatcaaatctcatcaaacgcaaagttctagggcatgagattccatggaagagagttcccaggaccaccaaactttacctagagcttttcctaactctcttccaaggaatcgcatgccatgaggcacatcactgtgatggggagggtgtggttgaaaatgtccactttgctcagttcctactgagccaatttccaatgataatgcggtagtctggtccagacctttttttgtttgtttgttttttgaagcagagtctcactctgtcgccca

SEQ ID NO: 533825 - DNA, 493 bp, Homo sapiens
cgtatagtcttaaatcaatgtttgtttactacaatatctttcctatttaaatttggttaaaactagtgaatttgtaggggaatggtaacagtctgcaatacagaaggcgaaatcttaattcacttcaaatcagcaaacattgctgtttagggatagtaattgataactgtttagaattgtggttggagagttttattacaggtatgcattataaccagtttcacacaatccagtggcataaatttcagcaaaagtgatgaatttcaaagaaaacatatcttttatttgtagtatttccaatctgactgttttcagttgtgaatcaaaaaacatttgatttgagaccatgagtatagcaatactgttttataagagtgttgtgggctcagtaatgttcatttattttaatcctctctrtaaattttgacagaagcctctttatgaacacatactttatgagttccaccaaatagaaatgtcccagaaaaacatt

SEQ ID NO: 533826 - DNA, 468 bp, Homo sapiens
gtgtgagccaccatgcccagcctccagcacatcttatattatgttatattaatggcttatatcatgtcatctttgcctgtcagtgaactacatgaggatagagattgttatttacctgtgtatatctggtcttataacagtgccagataaatggtagatatccaaagytaacctgaacttttaattttttcttttttgagacagggtcttgctctgtccctcaggctagagtgcagtggtgccatcacggctcactgcagcctcgaccttctggcctcaagtaatcctcccacctggcctctcaggtagctgggactacaggtgcatgccactgtgtctggctaatttttaatttttttttgtagatatgaactctcactatgttgcccaggctggtcttgaacccctgggctcaagtgatcctcctgccttggcctcccaaagtgctggggttataggtgtgagcca

SEQ ID NO: 533827 - DNA, 530 bp, Homo sapiens
aaaatgcactttaattcaggggcacaaataggaccaggatggttggatttcaagtacagtgtgagggctgaggctgggaaggcagccctcgggttaagtcttctcctctggaagggcttgggaagatattttgggaagaaatagagtttgacatgagtcctggggtctgggtaaaattttgaattatcacaggagtccaaatgtccctggggagtggggctgtaaagtctacactttcattctcttctctgacccatggacattttgcacagggcagtgtaacaagtcactcgcctcacagagccctctgggaaaatcccgcagaaattcggaagtcatctcttcctacttgcagtggataccagactctttctcaaaaagctgagcccattcatgtaatagaattgcccttgaagaaataccggaagttatygggaaagaatttttatttttgtcgtgtggaaataaatgaagaaaaatcaaatgagaataagcaaaggctgtttacttactcagaacgtgctatgagc

SEQ ID NO: 533828 - DNA, 599 bp, Homo sapiens
tgttctataagtgctataccctaatgcaaagaacactgttattatacagtaggataaaacagttactgcaaaacaccacaatttagaaaataaaggttacctgagagcatgaaattatttcaagttaattttgcactctgttcttgaagctgattagtataaaatgtaatgaaatgtaatttttgcaaaacagcttaagccaggaaagaagcacagaaacctgcaattagcactgattgatgccgagccttttctgtatcaaagaagattggaatgcacagcgttggttcacaaggtgactcccagcaaggctggtcagcctggcctctgggaagtggaccaacactggtttgtttttctttttgtaattgccttttgggagccatggggacattgacagtcactgtcaattttcctagggcaggaatttgtggcacgttgcagcagattcctctctctctctctgtgtgtgtgtgtgtgygtgcgtgtgtacgcatggtgggaagggcaggagttgtttctcattcaattctcttggaatgagcccaggcctaaccccctactcagctcctgtatccctccccctaaattttcggcta

SEQ ID NO: 533829 - DNA, 592 bp, Homo sapiens
tttcttttataaaaataggatataaagccgaggcaggtggatcgcttgaggccaggagtttgagaccagcccgtgcaacataatcagaccctgtctctacaaaaataaattaaaaaattagctaggcatggtggtgtgtatctgttgtcccagctactcaggagtctgggggaggaggatcacttgagcccaggtgttggaggctgcgctgagtcatgattgcaccactgcactctagcctgagggtacagtgtgacactctgtctcaaaagaaaagaagagaggaaaagggaaaggaaaggaaaggaaaggaaaggaaaggaaaggaaaggaaaggaaaggaaaggaaaggatgtactcactatgattataacattatctcacattaccttttaaataaatttttattttattttattttattttattttattttattttattttattttwttttgtgagatggagtcttgctctgtcgcccaggttggagtgcagtggcaagatctcggctcactgcaagctccacctcctaggttcaagaaattctcctgcctcagcctcctgagtagctggaattacaggcacctacc

SEQ ID NO: 533830 - DNA, 592 bp, Homo sapiens
tttcttttataaaaataggatataaagccgaggcaggtggatcgcttgaggccaggagtttgagaccagcccgtgcaacataatcagaccctgtctctacaaaaataaattaaaaaattagctaggcatggtggtgtgtatctgttgtcccagctactcaggagtctgggggaggaggatcacttgagcccaggtgttggaggctgcgctgagtcatgattgcaccactgcactctagcctgagggtacagtgtgacactctgtctcaaaagaaaagaagagaggaaaagggaaaggaaaggaaaggaaaggaaaggaaaggaaaggaaaggaaaggaaaggaaaggaaaggatgtactcactatgattataacattatctcacattaccttttaaataaatttttattttattttattttattttattttattttattttattttatttttttttktgagatggagtcttgctctgtcgcccaggttggagtgcagtggcaagatctcggctcactgcaagctccacctcctaggttcaagaaattctcctgcctcagcctcctgagtagctggaattacaggcacctacc

SEQ ID NO: 533831 - DNA, 592 bp, Homo sapiens
tttcttttataaaaataggatataaagccgaggcaggtggatcgcttgaggccaggagtttgagaccagcccgtgcaacataatcagaccctgtctctacaaaaataaattaaaaaattagctaggcatggtggtgtgtatctgttgtcccagctactcaggagtctgggggaggaggatcacttgagcccaggtgttggaggctgcgctgagtcatgattgcaccactgcactctagcctgagggtacagtgtgacactctgtctcaaaagaaaagaagagaggaaaagggaaaggaaaggaaaggaaaggaaaggaaaggaaaggaaaggaaaggaaaggaaaggaaaggatgtactcactatgattataacattatctcacattaccttttaaataaatttttattttattttattttattttattttattttattttattttatttttttttgtgagatggagtctygctctgtcgcccaggttggagtgcagtggcaagatctcggctcactgcaagctccacctcctaggttcaagaaattctcctgcctcagcctcctgagtagctggaattacaggcacctacc

SEQ ID NO: 533832 - DNA, 592 bp, Homo sapiens
tttcttttataaaaataggatataaagccgaggcaggtggatcgcttgaggccaggagtttgagaccagcccgtgcaacataatcagaccctgtctctacaaaaataaattaaaaaattagctaggcatggtggtgtgtatctgttgtcccagctactcaggagtctgggggaggaggatcacttgagcccaggtgttggaggctgcgctgagtcatgattgcaccactgcactctagcctgagggtacagtgtgacactctgtctcaaaagaaaagaagagaggaaaagggaaaggaaaggaaaggaaaggaaaggaaaggaaaggaaaggaaaggaaaggaaaggaaaggatgtactcactatgattataacattatctcacattaccttttaaataaatttttattttattttattttattttattttattttattttattttatttttttttgtgagatggagtcttkctctgtcgcccaggttggagtgcagtggcaagatctcggctcactgcaagctccacctcctaggttcaagaaattctcctgcctcagcctcctgagtagctggaattacaggcacctacc

SEQ ID NO: 533833 - DNA, 532 bp, Homo sapiens
tgtcagccacttcctattcatacactcccgggaggagacatgccctcacaagaaacggaaaatgatgtaaacgccaagcaggaggctttgtgcactccgacgcggctcaagtggttcaggtttcccgggtgtttccccaggtggcatcttctcagcttccttggcctccctttctaaaatctccctcacaccttcctaattccacttaaygatctttgcctgtgcccatcccaacttcatgagctatgcgtatttcactcttcttgtctagagtctgtcttttactagaatacagtcaatgcgatgcagggcataatgatgtttctgtcaatcacacaccacatatatggcagtggtctcatattcttactcttccctttctatgtttaggtatgtttagatacacaaatacttaccactgtgttccaattgccagaaatatccagtgcagtcacctactgtacaggtttctggcctagaagcaacaggctgcaccatgcagcctaggtgtgtagtgggctctgccatttgg

SEQ ID NO: 533834 - DNA, 458 bp, Homo sapiens
cttttgtcagatgaggagcctaaggcatagcttttgaggcccaaagtaatacagttaataggcaaagagctcagtgtaaggccaaggtctgtcagatactttgctttttctactctgcaattctgtctgtcatatattactattagcaagctgaatacttaattgtggaagaaacaaacaaaacaaaacataaatcattttctcaaagaagaaaactatctacgagagaatacatactttcaactagttgaggcttcctgaagagcacacctattaaattgtctcatgaagagacagctcaagaacaaaaacagtgtttctattatggcttatatgaagtagcaatgtcttaaatcaattcaataagctatatctcatttcaagarctaccaggtatgttactctttgaaccatgacttcaagaatgattacaagacagaaaccatcaaaatgaagga

SEQ ID NO: 533835 - DNA, 608 bp, Homo sapiens
ctttttcaaagcaagcatttctccttccttcccaagatgtcataacagttgggagtggggagagaaaggttgagaagggaggcatgagtatgtgcagtgtggaattgttcttcaggtcattccatcattcatgcattcattcattcattcattcattcaacaaacattcattgaccgtctactttgtgtcaaacactgtgttaagcactgataatgttagagttgtaaatcaaaaataaaattctaagcccctcaaccaacgaaatggaccccctgcttggcccaggagatcccaaagaaacctgaaacactagttcaggccatgactggaaggtggaggtagagtagccagacatgcctccttataacctcctccctttggagtttaggcacaactgactaccattaacattaaaacagagatcttaagactgacaaacagactctttgtagcagtaaggtatgcaaacccaggtttggctgctaacccctggaaaaccagacatgagagacaagaattggkgggaagaaaagcaggcttctttggaaagcccgcaaaaccaagaagatggtggactagtcacaaagcccatcttaaattttaaaat

SEQ ID NO: 533836 - DNA, 645 bp, Homo sapiens
cttatacaattgacttacttatgaaatgtattgtcttctgctagaacgtaagctgcataagagcagggaacttggcctttcttgtccactgatgtgttgccaagcacttggaatggtgacaggcatatggtaggcattcagtccatagctgatgactcaatttttatgaaaggtcaccctagccttgatctagtaagaggcagagctggactcaactcaaaagctggtcatcttgccttcccaccaaagaacccatggcctgtccaggtagagagcatattgttggttgctcaagagatgcccgtttgttagatttcaccattagactgctccttcctagcagagatgccagactggtgtctgtgaacataggaccttgccttgtctttcctgagtgacaggttttcccatgggcccacctgctgctggcatcctgctgtttcaatgaggtggcacactcctggtcatagggcaccaacctctatggtccttgggagtgtctccaaaacagcacaagctgttgagtccatgctggatgcttaagacacatgcttgagayttctccaagtcagacacctgtcaaatccagggttggctctcagcctctgcttaaaggatttgctttctaggaaatgatggaaggaa

SEQ ID NO: 533837 - DNA, 591 bp, Homo sapiens
ggatgagcctggggccattggaggctcaccaggatggggatgaatcaagagcaggtgttaagactctgccttcaggccctgaggggtcagggtagtgggaccaccatcagtgcaggtgggaagaggctgaatgtagcaagccatcctgagaatagcaccagccatgagctgagagccaagaagtctggcagcaggcaagggagtggcacttttttttttttttttgagtggtagcaaggtttattgtgaagagtgaaagaacaaagcttccacagcatggaaggggacccgagcgggttgcccgggagtggtacttctttgcccattggtagatcaaaaggccattttgggcccaagcaacccctatacctgggctaagggagtgcatcatgtgggcagggccttattttggcctcacttgttcatttcatagcctcttggtcaaggcagggttggggctcagcatgacccaggagaaagggaggggaggaggtggttgctggaatggaaagcttgtggagctcccaggctgcatggggtccgcaggaacctgygggagggagccttaggagccagcttgaagagagccct

SEQ ID NO: 533838 - DNA, 592 bp, Homo sapiens
gtcaatgcctccaatatatactgagtgtctactacgtgccaggcatgataccaggcgccaggtggccaaagctaagtgttcttcaagaaggcagctttggagatgagccaggtatacctggtgactgagcagccaacgctatgtacacagtgctctggcagctcagggccacttasagaaggtcagagaggccttcctggaagggatgacgtctgagctgagcttggaggatgaatagaaattagctaaggataagcttgaaacctcgtggtgtgtggataaatgataaactattcagtaaaacttgaagataaagaatgaggcagggcagagagatgagtctgggaaatagggaggaatcaagtgctggaggatcttagaggacccccaagaaacttgattttaccccgtaggagggtcgttatcagaaccacaattcgatcaggtctttttggcctcagggtggaaatggtgtgagtgggccatgcggcgtggggccgggagaacaaagtgtgtgtcctggtgaggaatcggaactgcctgagttagggtggtaagaccagagagcaagggccaagaaaactggcaggac

SEQ ID NO: 533839 - DNA, 499 bp, Homo sapiens
gctcgcctgcctgctgtgtgtattccactggggagagtgggggcgggtggggtaaccagggtgactccaccagatgccaggctgggtctgtgcccacacatggggccagccagacaacataggagcctgttcagcttcccccagaacaaaacgcaggattgttccagggctgcccracagataggcaatagttacactggatgctactaaaggaaatcctgcctttagatcaggaatgctgtaaaaagatcaatcatgcctcatgcctgggaagtaccttcttaaaaagaacagcatcacctctgtcttatcatttattcccccacaatgatccaataaagttggtgggggtgtggaagctatccagaagacagagtaactcatgtctgggccaccaggccagtatttgccaggagctcaactaatgcttggatgaagaaagaaaggatggaaggaaggcgggggagggaagtgagggtacaggtggcatctctctttt

SEQ ID NO: 533840 - DNA, 499 bp, Homo sapiens
gctcgcctgcctgctgtgtgtattccactggggagagtgggggcgggtggggtaaccagggtgactccaccagatgccaggctgggtctgtgcccacacatggggccagccagacaacataggagcctgttcagcttcccccagaacaaaacgcaggattgttccagggctgcccaacagataggcaatagttacactggatgctactaaaggaaatcmtgcctttagatcaggaatgctgtaaaaagatcaatcatgcctcatgcctgggaagtaccttcttaaaaagaacagcatcacctctgtcttatcatttattcccccacaatgatccaataaagttggtgggggtgtggaagctatccagaagacagagtaactcatgtctgggccaccaggccagtatttgccaggagctcaactaatgcttggatgaagaaagaaaggatggaaggaaggcgggggagggaagtgagggtacaggtggcatctctctttt

SEQ ID NO: 533841 - DNA, 499 bp, Homo sapiens
gctcgcctgcctgctgtgtgtattccactggggagagtgggggcgggtggggtaaccagggtgactccaccagatgccaggctgggtctgtgcccacacatggggccagccagacaacataggagcctgttcagcttcccccagaacaaaacgcaggattgttccagggctgcccaacagataggcaatagttacactggatgctactaaaggaaatcctgcctttagatcaggaatgctgtaaaaagatcaatcatgcctcatgcctgggaagtaccttcttaaaaagaacagcatcacctctgtcttatcatttattccccmacaatgatccaataaagttggtgggggtgtggaagctatccagaagacagagtaactcatgtctgggccaccaggccagtatttgccaggagctcaactaatgcttggatgaagaaagaaaggatggaaggaaggcgggggagggaagtgagggtacaggtggcatctctctttt

SEQ ID NO: 533842 - DNA, 529 bp, Homo sapiens
aacttaagtacatattactaagtaaaagaagccaatgtgaaaaggctacactatgattccaactttatgatattctggaaaaggtacawctatggagaaaataaaattattagtggctgccagaggtcaaggagagggagagatgggtaggcagggcacagtggatgttcagggcagcgaaactattctgtatgatgctgcaatggtataaacatgccattagacatttgtcaaaacacatagactccagcaccaagagtgaatgctaatgtacactatatactttgggtgtcaatgtaggttcatcagtaatgacaaatgtaccactctaatggtggatattaagagaatttgatagtggggaaagctgttgaggggagggagagaatatatgggaactctgtacttttcactcaatttttctgtaaacctaaaactgatctaaaaactgaaaagtttattaacaaaaaattctgtgaacaaaaatggagtaagaaatgcacttaagttgacagagaatcagatttta

SEQ ID NO: 533843 - DNA, 542 bp, Homo sapiens
gctgcaggcattattcttcaaaaagctattcatctcatccagaatcttcaccctactcgaggctgccctgatggattcacggagcatatgtcatcaaaacacttttccaagcagtcctggttttkctataagaaacccaagcttgcatttaaatagccttattctatgcttcttaagaggaactgtactcatcacataaatacaggcccagatttgtgagctaactcctagtatccaattcaggaggatttccccagacatatttaccaccacaaaatactgtaggaattaagtagttaaaattgaaacatacatcagatctcactgtattatgggagacatgatacaatttgggcagcttattaatctttctgttctgccactattgttagaagtatgggtggcagatgctggaatgtttgagagctttattagaatgttttctttaattaaatcgagtggtcaccatatcactttctggatagtccaagattgtgaccagacatagaattcaagggagaagaaaaataattcctttgtgc

SEQ ID NO: 533844 - DNA, 636 bp, Homo sapiens
aaagtcaagaacacatgccccaaaggggctcccaaaataactgaaggggaatggctaaacctaccaatgaagtctattgcttcttgaaagtgggagctaatgtcagccgtgtggctgtcttccacagggatccatttgtagtgtaggtgggtcrcgcaggcctcggaggtccgtcgggagacattcagcagggctgtgatgtgcaggttggcgaggaactcgcacttggatgcatggtaggcacttccaaggtagaggaagggaaggatttcaactgggccaccctggatgcagggacaaaggacaatcaggaaatattggattagcttgttcatttgagagaggaaaaaacaactccgacctatttgtttcttaagatgggtggttccctttctggtttccaagtggagttcagagccagggcagttcaaccaagtgtggttgtatctccatcctggccaactctctaccttatgtgactgccttgtgactcaatgacagcaaaatccacacagcaaagagttcacttttttgcacatatccaggaggcaggatatgccgacagccttcctgcgctgacaaggatgagaagccatgtggtaatatgggaaaaattgacaggcctgtgttgaagtt

SEQ ID NO: 533845 - DNA, 636 bp, Homo sapiens
aaagtcaagaacacatgccccaaaggggctcccaaaataactgaaggggaatggctaaacctaccaatgaagtctattgcttcttgaaagtgggagctaatgtcagccgtgtggctgtcttccacagggatccatttgtagtgtaggtgggtcgygcaggcctcggaggtccgtcgggagacattcagcagggctgtgatgtgcaggttggcgaggaactcgcacttggatgcatggtaggcacttccaaggtagaggaagggaaggatttcaactgggccaccctggatgcagggacaaaggacaatcaggaaatattggattagcttgttcatttgagagaggaaaaaacaactccgacctatttgtttcttaagatgggtggttccctttctggtttccaagtggagttcagagccagggcagttcaaccaagtgtggttgtatctccatcctggccaactctctaccttatgtgactgccttgtgactcaatgacagcaaaatccacacagcaaagagttcacttttttgcacatatccaggaggcaggatatgccgacagccttcctgcgctgacaaggatgagaagccatgtggtaatatgggaaaaattgacaggcctgtgttgaagtt

SEQ ID NO: 533846 - DNA, 636 bp, Homo sapiens
aaagtcaagaacacatgccccaaaggggctcccaaaataactgaaggggaatggctaaacctaccaatgaagtctattgcttcttgaaagtgggagctaatgtcagccgtgtggctgtcttccacagggatccatttgtagtgtaggtgggtcgcgcaggcctcggaggtccgtcgggagacattcagcagggctgtgatgtgcargttggcgaggaactcgcacttggatgcatggtaggcacttccaaggtagaggaagggaaggatttcaactgggccaccctggatgcagggacaaaggacaatcaggaaatattggattagcttgttcatttgagagaggaaaaaacaactccgacctatttgtttcttaagatgggtggttccctttctggtttccaagtggagttcagagccagggcagttcaaccaagtgtggttgtatctccatcctggccaactctctaccttatgtgactgccttgtgactcaatgacagcaaaatccacacagcaaagagttcacttttttgcacatatccaggaggcaggatatgccgacagccttcctgcgctgacaaggatgagaagccatgtggtaatatgggaaaaattgacaggcctgtgttgaagtt

SEQ ID NO: 533847 - DNA, 465 bp, Homo sapiens
taggactctgcaaaatcaatcatctcacttgtcacagaacacttcttttcccttccgtaaaatggttaggttttgatctctggcttctgccagatttggattctcacctgctttttcatcttcctggatggtgctacgtaacccccttccactttatttttccctttaatgagttatcacaaagcactcatttttagaagaaaaacaaaaactcactagtttacagaaacatgaagccctctagtatcttttgatttcctctggtttcagttatctgtggaattgtaagcataagaaccccttagaggagcctacttagccacccaaacaggactttctctgtagcacccccaccaacaccagtttcagttaaacataccaataagacacaccttgacaggtaccgggatggtttgcagaaactgcagagcatgracaattacaaagaaaagcaacacaggaagc

SEQ ID NO: 533848 - DNA, 617 bp, Homo sapiens
ctggcggtgggggtcagggtgaattaatccaactgttcccaagagcaatttgtcagtatttgtgaaaacaaaaattgttatttatcttttgaaccattaattccacttctaggaatttgtgcaatgaaaataccaaagactacatatggggaggttgtctgtgacattccttacagtggttaatcccggaagccatctaaatgcccactttcctctctaacacagctattctatggtatactaggtacccactaaaaagaatgagattgtgatccatggactgatatgacatgatcttcaagaaatatttttgtgtgtgtgaaaaagggtacaagacagtatatatgtgatcttatctttatgtttaaaaataggatgtaattgtgtgtgtgtgtgtgtgtgtgtgtgtgtgtgtgtgtgtgtgtgtgtgtgtgtgctgagaatatttctggaaaaagaatgtgtagaaaacagaattttttccagggagggagggcagaggtggagggagaattatttttcactgtgkgctcttgcacttgaaatttttatgcgtttgtgtaatttaaacacaattttggaatataaaaagtatgtaagctacttccattctaatt

SEQ ID NO: 533849 - DNA, 598 bp, Homo sapiens
ccatagtaaatattcaatacattatctctctcccctgcttttctatagaaaacaggtcattctggcctagtttggggatggttcttctgaagcaggagatagaactatgtgaacttttgaaattacttgcagtctggcaactttagggcattacaggacctgctcctggctccccctcctccttccacacttacactcacgtacatacaggttgcctttgggagcagcttcccttgtgggtcccagacagtagggttccctcgtgtctggcaccagaagccatgcttcctgattctaagtccactgttgtttccttgtggggatagtttttcatctttctaccatggtgacatatatgaggcttcaccatttgggaggttagttccttttaascaaaacattttctcctcacctctggaagaagcccagaatgaaaaatgcacagatacttcaagggcctgctttaagcccctgtttggtggcttcttggtttctgtaaacttcgtaagtgaacgggtgtgtactggggatgggtgatggaatagtgggaagggatcggacctactagtacaaatgaaccaggatttaaatttcagtt

SEQ ID NO: 533850 - DNA, 630 bp, Homo sapiens
agggatggacaataagtgcaaagaaaggattgtggtctcacagcaggtatatgtaggctaaattagtgagacagattacaaatgtcaaggatgttcagaagaaaggcacttcactgttggatggaatggtcagaaagagcttcatccagaaaagggaatttgagctgtgcctgggaaacatttcggagtagctgaagagagaagttagaaaaggaattgaaggcttaggaaaaaacagagaaagagagagtacacagggacatgacacatgatttttctgtttctttaactacaaagacatatttaaaatccaggttcacaagttcagagtctgtcacaaaaagaccaagtcagaaagtagagtaktaagcacccataagagatgcctagtaacttcaagggtggtggtttatcttcacatgtccccacgtcctcagacaccaactctcaccaggtgagggcagagctgacaaggctggttctcaaagcatgaagctcattcttggtgattaagggaaatcaatatatgtctggggttaaaagtaagcagacttaaaaggctcagatcaaaggtgacctatactttacatgcctcatgccggaacaccaacataggatactctcatgagt

SEQ ID NO: 533851 - DNA, 630 bp, Homo sapiens
agggatggacaataagtgcaaagaaaggattgtggtctcacagcaggtatatgtaggctaaattagtgagacagattacaaatgtcaaggatgttcagaagaaaggcacttcactgttggatggaatggtcagaaagagcttcatccagaaaagggaatttgagctgtgcctgggaaacatttcggagtagctgaagagagaagttagaaaaggaattgaaggcttaggaaaaaacagagaaagagagagtacacagggacatgacacatgatttttctgtttctttaactacaaagacatatttaaaatccaggttcacaagttcagagtctgtcacaaaaagaccaagtcagaaagtagagtattaagcacmcataagagatgcctagtaacttcaagggtggtggtttatcttcacatgtccccacgtcctcagacaccaactctcaccaggtgagggcagagctgacaaggctggttctcaaagcatgaagctcattcttggtgattaagggaaatcaatatatgtctggggttaaaagtaagcagacttaaaaggctcagatcaaaggtgacctatactttacatgcctcatgccggaacaccaacataggatactctcatgagt

SEQ ID NO: 533852 - DNA, 647 bp, Homo sapiens
gcagtgccagggctgccaatcttgcatttaaaggcttctacttgctaattaattttggttaaaaaaaaccattcttagagatagccaaggtaaygggcatttaagtgttgcatcaatgtgattttacatatatgtatatttgtccatggctcctggttcataactcccacagccctcgttatatcctaagtgataaaaataataagcatatcttttgttagggtatttagcttttttgtctttgtttcctgaagcagcttcagacagcttcagagcaataaaggtgaaaaagacagtcttttattgtaatgttggggcactttaggcctaagaaataggcctcagaaaaaagaatctccctctctgaacttctcctgcccaccttttctccccaagaccatagaaacagaaaatatcctgtcatctaacatcaccccccacaccttttgtcttggagctggccataaagaaattctttgatttaccttgtctaatcataggccataagaccctcaattcaggaagggtcctcccctctacccaggaggaaggaaggctgctcagagaggccaagaaaaatctgaacaggcaggcctggctgaatttcctcattcaacctgttaatatcaggttatacccttttttat

SEQ ID NO: 533853 - DNA, 647 bp, Homo sapiens
gcagtgccagggctgccaatcttgcatttaaaggcttctacttgctaattaattttggttaaaaaaaaccattcttagagatagccaaggtaacgggcatttaagtgttgcatcaatgtgattttacatatatgtatatttgtccatggctcctggttcataactcccacagccctcgttatatcctaagtgataaaaataataagcatatcttttgttagggtatttagcttttttgtctttgtttcctgaagcagcttcagacagcttcagagcaataaaggtgaaaaagacagtcttttattgtaatgttggggcactttaggcctaagaaataggcctcagaaaaaagaatctccctctctgaacttctcctgcccaccttttctccccaagaccatagaaacagaaaatatcctgtcatctaacatcaccccccacaccttttgtcttggagctgrccataaagaaattctttgatttaccttgtctaatcataggccataagaccctcaattcaggaagggtcctcccctctacccaggaggaaggaaggctgctcagagaggccaagaaaaatctgaacaggcaggcctggctgaatttcctcattcaacctgttaatatcaggttatacccttttttat

SEQ ID NO: 533854 - DNA, 501 bp, Homo sapiens
tgcagatgctgcccacaggcctgtggtaactgaccctctcttccggagaaaagcamacccctccgggtccctgcctgtgtgtgttctgtgaatccttcaccttcacgctggcctcctcaggtctgctccctgcagaggatcactgagaacagacagtagtggcctgctgtggaactctagaacattctgcaactttattggagtcatgaaggggatgtggttaaggaaagggacaggagtcgtggcttagccacaattggctgttcctgctcggcctcagaaacccactccccatccgccacaagacgaaaattaagttagtagctacggggctcacaagtttagtttttctcccaaagtgtttctggaacatttggtgcctgcttctgccacagatggcaaaaacaggaaggcgtaacaaagacaaaatgcaacgccagtgtcggagaagggcgcgcttggcgtcatggcgggttttgttctgtggacacctgcctgccg

SEQ ID NO: 533855 - DNA, 664 bp, Homo sapiens
tggtaaatttcttgttgaattttcatttagtgttttttgctcataaattattgaagtgagagtattgtggtactattttccaaaatgtctgacattgaatgaagaggtgggaggtctactaacataacagtatgttcctccattattctttctttcaatacacattgtgcatacagcctgccaagctgtgtgtcttatccagtgaattcaagtatcttccatttcgttagaatttgactttyatacactggttctcttagttacaagactgagatcaaaattgtgtagataaacattgagctattcttacttttatcatcacattagaattctataaatgtctttttcctcaaagcattcacatcactgtagaacacctttaaaacattagaaatgattctcatgttgaaacaatttaaccaggaaaattaaataaataagaaactaaataattatttaacatatatttaaagtctgttactagccaggtactctggtagatacctaggatagaaaagtcaaccaaatacagccctgctttcctggagtgaacattctactgggggattagttagtaagcaagctgggaacagcaggggatgagggtcagctctgggaaatcatgggagattgttcataagcaatggtggagatttttgcttga

SEQ ID NO: 533856 - DNA, 609 bp, Homo sapiens
ttaagactaggataaatgagactgtaattgattaaactgttagtgcatgcaagaatgtgtctcagatattttattcctcaatgtaatatttttcaaaatatgtgtttttgttagtataagtcagtcttactattggaaagcttctttgttctgatttgttttgttttcagatttctaacaaacttggtgtgcatcatagttatctccgtgcagattgtgttgaaaacayctttgatgcttctcccagtcccaaggtactcctggtaaatacaaaaatccatttttaatacaacatttgttgacaattgtgcatgtctatcaaaaagaaataaatctgggaggaaatttgtgaaggcaggaggctaagagtgcaagggaaatgaaacaggcagagattatgcatgtgaggatatttgcttcactcttagctggatgtgaccagaatatttcttagtggataccagaataatggcagtttcttagaaaacattgtcttctggagtgtaagaacaggaagaagataaatacaactaaaacgttggccaaaaaaaagcagcctacgatcccgcaaataaaaagtaatgaaaaaatgctggtttctgaaagcca

SEQ ID NO: 533857 - DNA, 552 bp, Homo sapiens
actggtgtttccaattggaattcatgggaggagttaaaaacctcttttatgtgggatctctagattttaaatattagcagctaattttaaaatgttctagactaaccccttatcttaagatggggagttgcaggccaggccagaaaggggaygagacttgctcaaagcagctcagcaactttgccacaagatagggattgtaatttcattgcctgactcctagtttagtgctccttccttttcacttcagcttgctttcctctttaacaaaagtctttcctctctgatccctggacccagaaaagacaggggaaggaagaaattggctgggtgggggcatgtcttaagcaaacgagccctaaattttacaagagcacaagataaacacaattattttaacacactctagctcagcaaagttctgggtttagggtacagaagctggggaatggggatatcaggattggagaggcaggggtgctttgcagagatgtgttctcctcttggaccatctgcagagttctggggcatcccttgtggagcacctcttga

SEQ ID NO: 533858 - DNA, 651 bp, Homo sapiens
acaggcctaaggaaagtcacccataggtctcatggccacctggaccgctgtggggtgctcaggggcctgcaccccatgggctcagtgcctccatggtgcctggccctcagggagtgggaatgaaaaccagagtgtggacgatgaagggaaacactgtcaacacgcagggtgacacacccaacctcttgcatcccaaccaactcagaggaaggtagtccatgggtggctacacacacttcagactcacatagccacacctcatggcaccaactgctcaggayaagcagacacgtctgcacattccttcacacacacagggcttcatggattcacatctctgctcacactcactgacctgacatgcacgcacatgcatccatgcacacgtgcatgtctcaccttgtacttccacttggcctctgacttgctcttggtttgctctcgaatttccagcctctccacatcattttctatgtggaccacgtccttgttgggcacactcaggatggtctttgtggcctagaaaaaagtgttgctgtgacccagaggcagacgcagagggccagtgggactcccctgtgccacacagattccctgtctccttctagcccatgtgcttgcagctcatgcccccatccatctacccatcca

SEQ ID NO: 533859 - DNA, 490 bp, Homo sapiens
gctgggaacaggcctaaggaaagtcacccataggtctcatggccacctggaccgctgtggggtgctcaggggcctgcaccccatgggctcagtgcctccatggtgcctggccctcagggagtgggaatgaaaaccagagtgtggacgatgaagggaaacactgtcaacacgcagggtgacacacccaacctcttgcatcccaaccaactcagaggaaggtagtccatgggtggctacacacacttcagactcacatagccacacctcatggcaccaactgctcaggacaagcagacacgtctgcacattccttcacacacacagggcttcatggattcacatctctgctcacactcactgacctgacatgcacrcacatgcatccatgcacacgtgcatgtctcaccttgtacttccacttggcctctgacttgctcttggtttgctctcgaatttccagcctctccacatcattttctatgtggaccac

SEQ ID NO: 533860 - DNA, 389 bp, Homo sapiens
aagtgctgggattacaggcatgagccacsgcgcctggccatgcctatatttttaaaggatcaaaggtttatccaaaataaagagaagctacaggattttgttcagagattcagtcaaaacttggtaagacagataatttagagaaagctttgatcttatcaatgtttatatcagctgaaaggaacacctgcacactcagagtctttcctagtgattaaagaatttaattttcattcaaaattcacagtaaggaattgttgtaagaaaatgctggatttcaatataccgttttctccttccttttgttattttaacagcctaatacgctatgtgtaaggtcaacatgaggagagacaaaaagaacaagtttataaatgcagatatactct

SEQ ID NO: 533861 - DNA, 522 bp, Homo sapiens
ctcccttagttcctgggtctttgccaggcctttgaccactcacctatctctgtcctcctcagtcattcagtttttgaacgcttgatggccttggacctgctttctcatatctatgccctcatgattcctattttttaaatcaggtcatgaatctgcwctttttcccaaccagttctgtgcctccagcttccgtgtcttagttcttcatggattccctgagaacagtagagtgaaggaattacagaaacagtctaagttaggtaaggatattgagtaacattgctaaattaatatttcctcaaactccacatacaccttaaacatcattagtctacattctaataacttaaaggaaaattctcttgtgttttaaaacaaattatacacttttccatactatgacacatagatttattattttttgagccataccaatgatgtttactggctataataatatttactttgtatatctttaaaatgtaagatcaatgaagatcaatattaatcggtatctaggaa

SEQ ID NO: 533862 - DNA, 522 bp, Homo sapiens
ctcccttagttcctgggtctttgccaggcctttgaccactcacctatctctgtcctcctcagtcattcagtttttgaacgcttgatggccttggacctgctttctcatatctatgccctcatgattcctattttttaaatcaggtcatgaatctgctctttttcccaaccagttctgtgcctccagcttccgtgtcttagttcttcatggattccctgagaacagtagagtgaaggaattacagaaacagtctaagttaggtaaggatattgagtaacattgctaaattaatatttcctcaaactccacatacaccttaaacatcattagtctacattctaataacttaaaggaaaattctcttgtgttttaaaacaaattatacacttttccatactatgacacatagatttattattttttgagccataccaatgatgtttactggctayaataatatttactttgtatatctttaaaatgtaagatcaatgaagatcaatattaatcggtatctaggaa

SEQ ID NO: 533863 - DNA, 605 bp, Homo sapiens
tgtgggttgctcttcagtaatattttgtgtatttctccactggtcacagagagaacagggcagatggattgctaggggccccagcactggagtttgccagtagcacggcagaatgtcaagaaagaaagatataataaaaagttggcaaagagtgtatttaaatagctatccatggcatctgggtttcgcaggaacgtaagggtagcttgcagtagtgggaagrctacgaaggaggtacagaagaactggggctttcaataaaggcagaggtcctgtagaagtgaggaaagatggtaacaaaatatatcccctccccatcgcccccacaaattcaaacttcatcatctattttgaaattacagcagtcccagatgttgacattctgggacgcagcaatcacaacacatggttatttgctaaaataggacaaaagtcattggcattggggagctcaaggaagtgagaaacatcttaaaagggaagatgcagaaatgacagacatcaattgcagagtgaggggtaaaagtgtgagccaggtgccagtattcagggaacagtggaagagcaagaatggtggataagaatgaaaggaatggagggctgac

SEQ ID NO: 533864 - DNA, 605 bp, Homo sapiens
tgtgggttgctcttcagtaatattttgtgtatttctccactggtcacagagagaacagggcagatggattgctaggggccccagcactggagtttgccagtagcacggcagaatgtcaagaaagaaagatataataaaaagttggcaaagagtgtatttaaatagctatccatggcatctgggtttcgcaggaacgtaagggtagcttgcagtagtgggaagactacgaaggaggtacagaagaactggggctttcaataaaggcagaggtcctgtagaagtgaggaaagatggtaacaaaatatatcccctccccatcgcccccacaaattcaaacttcatcatctattttgaaattacagcagtcccagatgttgacattctgggacgcagcaatcacaacacatggttatttgctaaartaggacaaaagtcattggcattggggagctcaaggaagtgagaaacatcttaaaagggaagatgcagaaatgacagacatcaattgcagagtgaggggtaaaagtgtgagccaggtgccagtattcagggaacagtggaagagcaagaatggtggataagaatgaaaggaatggagggctgac

SEQ ID NO: 533865 - DNA, 626 bp, Homo sapiens
tagcattggctcttcaagtgttacataccatgttgtggcagatatcgggggatctgggtggccaaggtgacccaaatgaagtgctagaaattttccatacaatagacaagggatggcaggctcttggcccattggtgtcttctgtataatactcatcacctcactgatttttctttatttctggttagtgaaatagatccgtctcaataatatagtacaattttataattttcaaagaacatggtaaaacttaatcatgtagaatctcagaagagcaacatcaaaaatctagacccacagattggaaacctytgggctggacagtttgtagttagttaacttgggcgcaatggccaatttaatatgtcaatttgactaggccatgaagtgcccagatatttggtcagacattcttctatgagggtgagattaacatttgatttggtagactgagtaaagcaggctgccttccctgtgtgggtagccttcattagttgaagttctgaatataacacacagtctgactctcctgaataagagggaacgttatccatctgactgcttgagctaaagcatggagctaccactactggttctcctggttctctggcctgcagactcagact

SEQ ID NO: 533866 - DNA, 626 bp, Homo sapiens
tagcattggctcttcaagtgttacataccatgttgtggcagatatcgggggatctgggtggccaaggtgacccaaatgaagtgctagaaattttccatacaatagacaagggatggcaggctcttggcccattggtgtcttctgtataatactcatcacctcactgatttttctttatttctggttagtgaaatagatccgtctcaataatatagtacaattttataattttcaaagaacatggtaaaacttaatcatgtagaatctcagaagagcaacatcaaaaatctagacccacagattggaaacctctgggctggacagtttgtagttagttaacttgggcgcaatggccaatttaatatgtcaatttgactaggccatgaagtgcccagatatttggtcagacattcttctatgagggtgagattaacatttgatttggtagactgagtaaagcaggctgccttccctgtgtgrgtagccttcattagttgaagttctgaatataacacacagtctgactctcctgaataagagggaacgttatccatctgactgcttgagctaaagcatggagctaccactactggttctcctggttctctggcctgcagactcagact

SEQ ID NO: 533867 - DNA, 667 bp, Homo sapiens
tcaggcccagtcatattatctatgtaatcatctttacttaatcaactgaatatagagtaaatgacagctacaagttactytcaaagcaaaccctcaattaggttttgattgaataactgtggactatagacaagccaatttcacttataaaactgaccattgtattaataaactgttaaaatatgttacaactacctaccttgacaaatataccatcatgacaatatcaaaaggtatgtgttaagcagtggttaactaaatgacttataaattggcaaaatatcaaagatggcttacagtgattattaattgaccatttctgcttgttctcttaatgaaccagggaagtttggatgattagtaaactgaagacagacataatttataaactatacattcatttgtaaaatttatttttcttgcttgaattttaacaaaattactaataatgctattataatcaagatcttgttctgttgatagaatgccaatttaaaaagcctttcttgtgtcattacagaattataattataattatagaattataatgacacaagaaattgtaacaattatagaatcgtcagtaaatgctctaaaacagtaaactcagaaatagccataaatgttacatatcttgtgtacatattataatagaatcacttgtgat

SEQ ID NO: 533868 - DNA, 667 bp, Homo sapiens
tcaggcccagtcatattatctatgtaatcatctttacttaatcaactgaatatagagtaaatgacagctacaagttactttcaaagcaaaccctcaattaggttttgattgaataactgtggactatagacaagccaatttcacttataaaactgaccattgtattaataaactgttaaaatatgttacaactacctaccttgacaaatataccatcatgacaatatcaaaaggtatgtgttaagcagtggttaactaaatgacttataaattggcaaaatatcaaagatggcttacagtgattattaattgaccatttctgcttgttctcttaatgaaccagggaagtttggatgattrgtaaactgaagacagacataatttataaactatacattcatttgtaaaatttatttttcttgcttgaattttaacaaaattactaataatgctattataatcaagatcttgttctgttgatagaatgccaatttaaaaagcctttcttgtgtcattacagaattataattataattatagaattataatgacacaagaaattgtaacaattatagaatcgtcagtaaatgctctaaaacagtaaactcagaaatagccataaatgttacatatcttgtgtacatattataatagaatcacttgtgat

SEQ ID NO: 533869 - DNA, 667 bp, Homo sapiens
tcaggcccagtcatattatctatgtaatcatctttacttaatcaactgaatatagagtaaatgacagctacaagttactttcaaagcaaaccctcaattaggttttgattgaataactgtggactatagacaagccaatttcacttataaaactgaccattgtattaataaactgttaaaatatgttacaactacctaccttgacaaatataccatcatgacaatatcaaaaggtatgtgttaagcagtggttaactaaatgacttataaattggcaaaatatcaaagatggcttacagtgattattaattgaccatttctgcttgttctcttaatgaaccagggaagtttggatgattagtaaactgaagacagacataatttataaactatacattcatttgtaaaatttatttttcttgcttgaattttaacaaaattactaataatgctattataatcaagatcttgttctgttgatagaatgccaatttaaaaagcctttcttgtgtcattacagaattataattataattatagaattataatgacacaagaaattrtaacaattatagaatcgtcagtaaatgctctaaaacagtaaactcagaaatagccataaatgttacatatcttgtgtacatattataatagaatcacttgtgat

SEQ ID NO: 533870 - DNA, 560 bp, Homo sapiens
tcagtgggcacactctttctcgtctaatgcattagggcggctctacaggttacgaagcatcggaaaacaaaaaaatgactttaagttgtctttccttcagcattacaaaaaagaaaagaagctgaaataaaatattactaattcaccctgaaaggctcctcagttctccaaatttaggggcatttgcaatataacagtaatattttttaattcaatctaatttaagagctcccaaagaattttcatatgcatatgttgctcagagcatccatgagttaattgagtcagatattaagctaattttcagggggcaaaatagattaataaatagaaaaatgataattctattcatctacccattgagccagcatgttttgattgcctgcactctgggtactattccttgaattaacccrtagaacacactcaaaattttccaaagatttcctctgttatcacaaaagataggattccagactagaaagaccccttagatactatctagccttggagtaataaatcgttacgtcttaagcacaccaagtctactcaattggtag

SEQ ID NO: 533871 - DNA, 692 bp, Homo sapiens
gtttctgactcaatgttagatatcttcttaagtcagtattgttattaccaacttaaaaaataagctccaccttttctgctctattcaaagcccaggggtgtgggagaaatctscctgactacaagccagacagggaacacacaagaacacacacacatgcacatgttcacaaaccaaacaaccaccagaaagaaaatgcatctcatttgggcctgtccagagggcttggtaaacaatggagaggattgagtggaaaaaataccaaaaaacctacttgaaagccctcatttatatgtttaaaaaataacagggagatgtgagtggctctcaattatggtgtgttgaggtggatatacagtcatgttaaatgaatgagccttactttcctcttttcctctggctatattttccctattacatccagagctacttttttcttaaaccagatttataaatgaataatattgaaggcaaatttgttttgaccaaggtgatgcctgtgtttcaggttgcatgaagagggaaaatctgtgaacaacttattcattgggtctagttcatgggttagttggttagtgctgagaaaaacacaggtccaccttccagtgggttcttctttgcattttgaacatctggatgacttaactgaatcttagcttttatccaatcacctagctttcctgtagacaatt

SEQ ID NO: 533872 - DNA, 692 bp, Homo sapiens
gtttctgactcaatgttagatatcttcttaagtcagtattgttattaccaacttaaaaaataagctccaccttttctgctctattcaaagcccaggggtgtgggagaaatctccctgactacaagccagacagggaacacacaagaacacacacacatgcacatgttcacaaaccaaacaaccaccagaaagaaaatgcatctcatttkggcctgtccagagggcttggtaaacaatggagaggattgagtggaaaaaataccaaaaaacctacttgaaagccctcatttatatgtttaaaaaataacagggagatgtgagtggctctcaattatggtgtgttgaggtggatatacagtcatgttaaatgaatgagccttactttcctcttttcctctggctatattttccctattacatccagagctacttttttcttaaaccagatttataaatgaataatattgaaggcaaatttgttttgaccaaggtgatgcctgtgtttcaggttgcatgaagagggaaaatctgtgaacaacttattcattgggtctagttcatgggttagttggttagtgctgagaaaaacacaggtccaccttccagtgggttcttctttgcattttgaacatctggatgacttaactgaatcttagcttttatccaatcacctagctttcctgtagacaatt

SEQ ID NO: 533873 - DNA, 537 bp, Homo sapiens
gtttctgactcaatgttagatatcttcttaagtcagtattgttattaccaacttaaaaaataagctccaccttttctgctctattcaaagcccaggggtgtgggagaaatctccctgactacaagccagacagggaacacacaagaacacacacacatgcacatgttcacaaaccaaacaaccaccagaaagaaaatgcatctcatttgggcctgtccagagggcttggtaaacaatggagaggattgagtggaaaaaataccaaaaaacctacttgaaagccctcatttatrtgtttaaaaaataacagggagatgtgagtggctctcaattatggtgtgttgaggtggatatacagtcatgttaaatgaatgagccttactttcctcttttcctctggctatattttccctattacatccagagctacttttttcttaaaccagatttataaatgaataatattgaaggcaaatttgttttgaccaaggtgatgcctgtgtttcaggttgcatgaagagggaaaatctgtgaaca

SEQ ID NO: 533874 - DNA, 511 bp, Homo sapiens
ctgactaataccacataagagtggagagcactgagcctccaagttcaagcaaataaatcaaagcgacttctaattttaggatatcctgaatgtttccttcaatttacacaacacacacaggtgcgtgcacmatttatttatgtttaatgaaagtcatgtgaatatgattttaagagtcaaataactctgtgattccctgattctcagagacaagtattttgaactgatttagctggttcttttggtatttttcacttatttctaaataacatgattataatactacttcttggtttctcacttttattgatttacaaaagcaaagaatgaagatttatcaggggtgtccaatcttttggcttccctgggccacactggaataagaagaattgtcttgggccatacataagatacactaacactaacgatagctgatgagctaaaaaaaaaaaaatcacaaaataaactcacaatattttaagaaagtttatgaatttacgttgggctacat

SEQ ID NO: 533875 - DNA, 560 bp, Homo sapiens
ttgggctggtcagtatgattcgtcagggcatcttggcactgcagttactaccctcraactctagtgcaggtcagtagaaggaatattggtgggactggggaagcagggatacaggaagggtggggctgactgctaacaaagatagcagttccagggaatcagtgggccccagggaagaggatctgtttccttgtttgcaaaatgtaagtctgtattagtgtgtatcaggaaccctcggctctgacaaccatcagagaccctagaaggagtagagctccaaggatatcacttaggggaggttatgatctggcattcaagaggaagaagcaggagggtaagggagaaggaaaggtgtttgaagtttataaaacttcacagtttatgaaactgccgacattggtgggaagacactgagccgttcaggaccctgtcagttgggtgcctccctgtgagtttggtctggccagtgtctccaggtctgatctggtgtttcctgctccagggattatcgtgatcacggatggggtgaccagtgtacctgatgttgctgtctgtgagac

SEQ ID NO: 533876 - DNA, 625 bp, Homo sapiens
gcttcatctgatgccgaactcccttcacctctgaggttcagtatctgagcacacacagggaggaagcacagtcaagactcagccgcatagtaggggaattgaggttctcacaggattcggcctgtctggcctgagaagtgctgggctataaattctggctttgctatggatggggcagcaatgccatctgccccattctgtcttttctgtaacttggggcaggcagaagaccagtccccagactcaggggacctactgggccggaaggtaggcgtctccatggtgacagctgatcttgggctggtcagtatgattcgtcagggcatcttggcactgcagttactaccctcgaactctagtgcaggtcagtagaaggaatattggtgggactggggaagcagggatacaggaagggtggggctgactgctaacaaagatagcagttccagggaatcagtgggccccagggaagaggatctgtttccttgtttgcaaaatgtaagtctgtattagtgtgtatcaggaaccctcgrctctgacaaccatcagagaccctagaaggagtagagctccaaggatatcacttaggggaggttatgatctggcattcaagaggaagaagcag

SEQ ID NO: 533877 - DNA, 521 bp, Homo sapiens
ctgcattgcggcggccgaggcggctgccacgatttcacttccggttttccagtcagcaaacgcctacgagaaggcttcgtccaccaatcagaaaactggaactcggccctcccaccracttccggttcctgctgggtgccgaggtagccaggtcaggggtcaagagtggaacaccctcactggcccgggccggcgcgggagggctgtgtgatggcctcggagcgcccggagccggaggtgaggggcgggcgggcgcagcactgggccccgagatccgagggggagggtccggcgggcaggcgtggcgttggcctcctctaggtctgggggtggccgggctgcgtagcctcggcagggaccagcccagcccggaaggcccgactatggtacccctgcggactgtgtatgggacgcggtccgcagtttcctcggggagctaaaggagtaactgttcgctttgttttgtttactgacatgtcatccgcgtcgtcgtctctaagacttatagcggtgttaacaaa

SEQ ID NO: 533878 - DNA, 521 bp, Homo sapiens
ctgcattgcggcggccgaggcggctgccacgatttcacttccggttttccagtcagcaaacgcctacgagaaggcttcgtccaccaatcagaaaactggaactcggccctcccaccgacttccggttcctgctgggtgccgaggtagcsaggtcaggggtcaagagtggaacaccctcactggcccgggccggcgcgggagggctgtgtgatggcctcggagcgcccggagccggaggtgaggggcgggcgggcgcagcactgggccccgagatccgagggggagggtccggcgggcaggcgtggcgttggcctcctctaggtctgggggtggccgggctgcgtagcctcggcagggaccagcccagcccggaaggcccgactatggtacccctgcggactgtgtatgggacgcggtccgcagtttcctcggggagctaaaggagtaactgttcgctttgttttgtttactgacatgtcatccgcgtcgtcgtctctaagacttatagcggtgttaacaaa

SEQ ID NO: 533879 - DNA, 521 bp, Homo sapiens
ctgcattgcggcggccgaggcggctgccacgatttcacttccggttttccagtcagcaaacgcctacgagaaggcttcgtccaccaatcagaaaactggaactcggccctcccaccgacttccggttcctgctgggtgccgaggtagccaggtcaggggtcaagagtggaacaccctcactggcccgggccggcgcgggagggctgtgtgatggcctcggagcgcccggagccggaggtgaggggcgggcgggcgcagcactgggccccgagatccgagggggagggtccggcgggcaggcgtggcgttggcctcctctaggtctgggggtggccgggctgcgtagcctcggcagggaccagcccagcccggaaggcccgactatggtacccctgcggactgtgtatgggacgcggtccgcagtttcctcggggagctaaaggagtaactgttcgctttgttttgtttactgacatgtcayccgcgtcgtcgtctctaagacttatagcggtgttaacaaa

SEQ ID NO: 533880 - DNA, 647 bp, Homo sapiens
ctgtgttggggtttctcagcctcagcaccattgacattttggatcagataacccttattgtgggggcagggcttgttattgtagggtgtctagcagcatccctggtttcttccccctagatgccagtagcatctccccgctttccccagtctcgacaatcaaaaatgtctccagtcgttgcgtaatgtcccatgggggcaaaattrccctgaattgagaacctctggtctacagcctcttgctgctttcactatactgtacaaacctggaaaattggggagggtcagtggggaagatggatagtgatgggccacttgagcagagttctgaggggtgagtgagtgctggggcaggagaaggacatttttttccaatagacagaacggcaggtacagaggcttggaggcacaaagttgggaaacagtaatccaagggggaccccagccccagaggaaggggcctgtaggcttaggggttacagccgcaggaagatacctctgctggtcccctttggtcatttgcctccagagttagtctcctgctgaccctttgccgcctccaagtctctgcgacactcctcctaatctccccctccactcctcagtgagatggagaagctgagagctgcaacagggtgggactcagtc

SEQ ID NO: 533881 - DNA, 543 bp, Homo sapiens
caagtcagaacctgggcctcctccagcctcctccctccgtgatatcccacatctaatccatcaccaagctccgttgcttctaccttctgaatatctttggaatgcatccacttctctctctaccgccttcatccaagccaccctcggctcttgggcttttgcacgcaacagcctcctgacggtttccctgcctccagtcttttccttcctaatccattctgcattccaaaggtagagtcgtgtcacaaggtgaaaacatcatcctgtcactcttcagtttagaatccttcattccctcccacccccaggcccccagggtcgtaacccttctataggccctgcattatcaagcttctatcaacctcatccctcgctgtccctccacccaccccactcacccaccacgctgacttctttcagtggttcaccaattcccagtagtaattggtaggggyaagggggaacagtttttaaagcagagaacctccatgctggttccttaggaaccaaagcccaaacaccaggtcttgacggtagaaagca

SEQ ID NO: 533882 - DNA, 639 bp, Homo sapiens
atttctcctctattccttcctgcgcagtggggaagcactgaaccctgaatattactgcggtgagaggcacactgaggtgggtgtgggmaggagggaatatagaatgggcccagagatgatggggccctggaggactgaaagtgtaactggggctggctctgctggcactgttacctcacagtcatttcagcatagccccttccccctacagatctgtcagttggcagataaccagtttctccttccccatctccactggtcttccaggctctcagcaccgcctatttaatgagcacctggtctctgcaagcagcaaccctgccctggccttgcgccggaagaagcacactgagaaggaggtgccagccgacttggtcagcactgtgtccgtacggcttcgagagggctacagtgtccgagaggtcacactggccaaaggtaagggtcattaggccctgctgtaatcccatagatctctcaagaatttgtgtgtgggaagacccacatgtatcacacatgaaagagtgtcacattgaagtccttatcacttgagacagtgggttttgaattgtcatcagggcttaattctcttagcatggagcttcccaattctatctccttttgcccaaggtgaaccag

SEQ ID NO: 533883 - DNA, 563 bp, Homo sapiens
tttcttctttcagttatgaatttttaatgcaaaatgctgttgacctgtgtttgcttcatctctaggtcaggagaggatctagaacccttttccctctgatcaaatgataaaattggattgttagggcaaaaaatttttgttatatagattttgagatatttatttatttatttatttattcttttaggttttcactctgttgcccaggccggagtgcagtggcgccatcacagcccactgtagtctcgacctcctgggttcagggatccttccacctcagtttcctgagtagctgggactacaggtgcatgccaccatgtgtggctaattttttgtagagacgagttttcgtcatgttgccaggctggtctcaaagcaatcctcctrcctcggcctcccaaagtgctgggattacaggcatgagccaccgtgctgggccaattcttaaagcaatgcacaggagtaaaaaattcagagccactacgccagtcaatagtatgataattttgttttcgggatatttcacttaaaagcgggtttctatgacttttttagatatccag

SEQ ID NO: 533884 - DNA, 563 bp, Homo sapiens
tttcttctttcagttatgaatttttaatgcaaaatgctgttgacctgtgtttgcttcatctctaggtcaggagaggatctagaacccttttccctctgatcaaatgataaaattggattgttagggcaaaaaatttttgttatatagattttgagatatttatttatttatttatttattcttttaggttttcactctgttgcccaggccggagtgcagtggcgccatcacagcccactgtagtctcgacctcctgggttcagggatccttccacctcagtttcctgagtagctgggactacaggtgcatgccaccatgtgtggctaattttttgtagagacgagttttcgtcatgttgccaggctggtctcaaagcaatcctcctacctcggcctcccaaagtgctgggattacaggcatgagccacygtgctgggccaattcttaaagcaatgcacaggagtaaaaaattcagagccactacgccagtcaatagtatgataattttgttttcgggatatttcacttaaaagcgggtttctatgacttttttagatatccag

SEQ ID NO: 533885 - DNA, 563 bp, Homo sapiens
tttcttctttcagttatgaatttttaatgcaaaatgctgttgacctgtgtttgcttcatctctaggtcaggagaggatctagaacccttttccctctgatcaaatgataaaattggattgttagggcaaaaaatttttgttatatagattttgagatatttatttatttatttatttattcttttaggttttcactctgttgcccaggccggagtgcagtggcgccatcacagcccactgtagtctcgacctcctgggttcagggatccttccacctcagtttcctgagtagctgggactacaggtgcatgccaccatgtgtggctaattttttgtagagacgagttttcgtcatgttgccaggctggtctcaaagcaatcctcctacctcggcctcccaaagtgctgggattacaggcatgagccaccrtgctgggccaattcttaaagcaatgcacaggagtaaaaaattcagagccactacgccagtcaatagtatgataattttgttttcgggatatttcacttaaaagcgggtttctatgacttttttagatatccag

SEQ ID NO: 533886 - DNA, 414 bp, Homo sapiens
cacacagccactaggagcacccccaccccgcaacataacctgagttactcctcccagtgagcccctcccctgtgaatctgggctggccctgtgaccagtttttgaccaaaagaacttagtggaaatgatataatgtaacttctgagactgggccttaagagattcacagcttcttataagtctttgtcagttgaaatgttccctcttgaaaacatgctgtgaggtaagaaatgtaaccatcccatgaccatcaatctgagaggaagttcaagccacatggagggggagaggctacctgctggagcaccgaagcttcagccaygcaaatgaagccttctaggccagccaagccaccagccaaatacagccaagtaaatggccccagccaataacgtggagaagaagagccaccca

SEQ ID NO: 533887 - DNA, 620 bp, Homo sapiens
gtctgcaacccagaagagggttctcaccagaacccgcccatgccggcaccttgatcttagacttccggcctccagaactgtgagaaatcactttctgttgtttataaaccacccaatctatggcattttgttatagcagcctgaactgaccaagacacctggctttgtggttgcatcactccagtctctgtctctgtctattctccctttcataaggacacttgtgattaattttatggcccatctaaataatccaggataatctccccatctcaaaatcctaaaattaatcacattttgtgccrtataaggtaatgttcacaggttctggggattaggggctgatatcttttgggaaacattttccagcctaccacgcaggggctgccgctagtcttccagggggacaagatgaagaatggcttccaagcagaggcatgatggaactgtgagcagttgagcattgctgagatggagggggccggctcaggacaagggtgcagtgagcgagtgctttgctctgaagtcaaagtccgtgtgggattcctctgtgttcctcctataaaacaggctagcccagggcacaagccagtactaggtctcaggcaggcttggaagga

SEQ ID NO: 533888 - DNA, 640 bp, Homo sapiens
ctgcagatgggagcacacagggttttaagtggatgcttttatgattttttataaatggccctgactggatcctgttcccacctcccaggactcaccctgcctctttgctccctggaggcctctctccttttatctctcttaaaggattcccatttcttcctaatggtccattgtccctcagcatggaaaatggtgactccctaccctggcaggaagcaggaacttttgggccagttttctgtattatcttgtggccttgggccttctttaccaccatgctcctgggcctggaaggaatcttaaagtgaggttgttcaatcttttcccagccctgtctgtgactcccagatccagcctccaatgtgagaaagaatgggcactcatacattctctcctaagtgtcccctgagaaccttcctccagcaccatactggttgcagaagaaagagctatayaaaaaaaaggaaggtctaccagaaacctcttatatattttatgacatctgcttagtcttgtctgtctcttattcctgccacctctgaagcacccacttctttctgtgtggtctccaacaaatttcatgcaggtacagtttgatagcacgtcccttcaggcttacaccccatgcctctacctgacc

SEQ ID NO: 533889 - DNA, 586 bp, Homo sapiens
tgaaaccaggaatggatgggcacaatgcatggtgctacctaagcatttgatcaaactcacttcatagtgcccaaagcacaggctggagtgttccaccagctaggcacatgtccttcctcacaagtgctttctgaatgtgcgtgtagaacgaaacctctttggccgtagttgcttcttccatcagctgctctctctaccgaatggctccaaaaagtgggggggctcagagcagtagggacctwgttccatgatgccttgcaatttgtggctctatttgagaatcatactcagagggataagggtacagtgattgactaaggtcccagagcaagtaaggtgccaggctttaattcaaacccaggtccgtctgataccaaaacgcagatttgttccactataccacagctagatacttgtgactgcaggatggctgccaggtctgtttgcagactgggctggccttctgaagactcagcattaaggaataccctaatgctgaacaataataaggcactttagatgaggtcctatcatggaccaaatgcaggaatcacccaagagaccagcgaacatggcaccaaacaac

SEQ ID NO: 533890 - DNA, 607 bp, Homo sapiens
ccatcctgggggtctagagaaaaatcaacaggggttcacagataaaggttttctgaggtcaaagcagctgggaaaaccctgcagattccactgttgccttggagaatcccaatgcacatggcaaagaaaaggccctgagaagtcctgcagtttaactttgttgaatttagcatttatcaagtgagtttcaactggaaaattttgctgtgacacccctgttacaaagtgtcagtggtatgtgatgtgggaaacaggctggacagtatgtgtagggattccagaaagggcatagagctaggagtcaacacacctcgattccaatcctagccccgtcactgactcactaggcractttgagcaaatcccaatcccgtctgggcttctgttgcacctcatggctctgagagtctgtgctaagaggaaaaagcggagaaagtcaactgtggggcatgcataggagtccagagtacctggtcccaggcctgactgtcactttcttgttctgtgataggtgagctctttgccctctcaaggcctcggattcctctcggagaaatgaggagttgagctagatgggctctactctgtggttcctctggtcccgctg

SEQ ID NO: 533891 - DNA, 608 bp, Homo sapiens
tcttccacacacattttgcgtaagtctggctctggtcccaggccacactgcaacaggaagagccatttaaaaggggtaacaggttttagaggctgaattgcttctgtcagccttgtcataaaaggggctaagaaaatgctggaattcaaatgaccatccatattctagaacattccagaatcttcccaggagttctcaagccactagccaagctgaaacatgccaacaaatatttaatgggaaaaaaactgttgccatcttttgctttcagaatatctgccacacatttcaggacctgtcttccaccttgccctctatctcccctcccactggagccaagtgctcacgggattctggcagcttcctcttccctcacaccaagttctagccttctcaagaaccaagcacctgccaccactgcttccactggctggacttccaggggcaccctgctcttggttgggatatgatgaaaactacagtgattgagaagcagccaggccttggcctcctttcctctgcccagaacatmcatctcctgtcacatctgcccacctgattgaccacaagcccctttctgcaagggcaggctaaggtcagagccaaga

SEQ ID NO: 533892 - DNA, 584 bp, Homo sapiens
taccagctaccctacctatatcatgggagttctgtatcccatgtacaatcagcaatcagcaagatgcctgatatacagtggcctttccaaaaacatagaggaaactgaagagattccaattaaaatcaatccgtggtaacaaagggcctttttgttgagtcaagcattacagaaatgaaagcttcatctctacttaacaaaattttgtgcatccttcaaggcctaagtgaaatgcagttttattcatgaagtggtccctccctccaaccccaagacagaaaagagccaaggagattgagtggcatctgggacataaggccacacctaggaagtgcagctccctggagcaaagctcttgagagttgccaggagaagggattcactgcagaaaatggagtttgtaaacctagggcctgccagagaggaaagacaaaccaaggacccagactgaaaaagaaaaggagggctctsagccatggagagcagacatggagcagagaggagatttgagaaacaaagttaggtggtgttatggagcaagtagagtggtgtccaggggcaaatagacactgagtgcttggaat

SEQ ID NO: 533893 - DNA, 584 bp, Homo sapiens
taccagctaccctacctatatcatgggagttctgtatcccatgtacaatcagcaatcagcaagatgcctgatatacagtggcctttccaaaaacatagaggaaactgaagagattccaattaaaatcaatccgtggtaacaaagggcctttttgttgagtcaagcattacagaaatgaaagcttcatctctacttaacaaaattttgtgcatccttcaaggcctaagtgaaatgcagttttattcatgaagtggtccctccctccaaccccaagacagaaaagagccaaggagattgagtggcatctgggacataaggccacacctaggaagtgcagctccctggagcaaagctcttgagagttgccaggagaagggattcactgcagaaaatggagtttgtaaacctagggcctgccagagaggaaagacaaaccaaggacccagactgaaaaagaaaaggagggctctcagccatggagagcagacatggagcagagaggagatttgagaaacaaagttrggtggtgttatggagcaagtagagtggtgtccaggggcaaatagacactgagtgcttggaat

SEQ ID NO: 533894 - DNA, 603 bp, Homo sapiens
ctggtttaaagtattgagccaatgtcaaccaatctagaatttctaagttgtaartttaaaaattgaatagtaagatttttatctgagctgcttcatgaaagccactattcagagtccagtttatcacagtcctcacgtagtctgagctaaggtctggggtcatgccagtctagggaattcagtgagaaagttttcatttctacctggctcaggctgtggggcttggatatggcacttctactggatctttgtgattctcctccaacttgtttccctcaacagatttcctggactgtgaactgatcatgcagaaatattcagagcaatgaaggacactgcagggccctgtacaacctcatcatccaggattaaagagtcagtcgatatcacatattcagcactatactaggcactgtggaaaataacaatgatgtcagcaacaacaataatagtaatgacaatgaatgtttattgagcacctactgtatgccaggcactcaactagatacttttcctagattatttctgagtcttccaaaaattggataaagtggttgtcattccctctgttttatacacaaataaatgaagacttaaagaagt

SEQ ID NO: 533895 - DNA, 658 bp, Homo sapiens
atctttcattacctgagaaaaagaattccaaaaatacagaacaaacatcgtattttattttaaaatttgaaagaatactccttagtaatagtagcaagagtggtatttgtcccaccactattaaagattgaataggatctaagaaaatacctgtaatttattaatggagaaagttataaagattttatggagtatataaaagtcaccataaataaatggtgatctatatgcataggtacaaaaaaattgatatgttaaaaaagtcaaatctttctaaaatcacaatatttttagcaaaattatcatgctgataataaaatgataagaygagagaaagacaaaaacagacaaaaaattttgaacaagacaatgaacagggaggaggtagcagaattataaaatatcaagaaatataattactatggtaattacaccataattataattacttggtataattaccataattataccaagttgccttggtaaaaggatagaaatacagaatagagatactcaaacagaatcaagtttctatgaacacttgtaagagatacaagattacaattaagaggagggaaagatgcatatatgcgggggggggaatgtcataaatgggaaaaataaggtcaaagcattacttaatatcttacttgaa

SEQ ID NO: 533896 - DNA, 494 bp, Homo sapiens
aaatgcgaccatagatgcctattccccaaggctttccatcttgctcccagttgctctagctcctgctgacggccaggctgggagagagaagggtggtctttcctgatggacttgggcatgtctgatctgcacaccccgctgtctgctggcccctcccaagacccctgcctggccactcccatgagagcatgcacactgcacagcctccactgccccacctgggtactttgccagtggcctaggacactatggtcacctcagcacagccagrgctcaactctgaggggccagaggacaaagccaatcccaacctcccagggttcaagcacacagctcaggaatatcaagctgagatctgtagccagagcatgagttggataggagcccccactctctgaacactgagtagggtgagatgtgggtttcagggatggcacaggagctgcgagtacctccctccacaagactggtccaggaagggtgtagcctgtttg

SEQ ID NO: 533897 - DNA, 499 bp, Homo sapiens
ttactatcgctttgaaatatattttaaaatcagaacttttgaggcctctagttttgttttttttccctcaagattgttttggctgtttggtcattaaaaatttttttttaatttattttttttgaaatttttccaaaatctaaaattatgtgaactatttataagaatattttctttatgacaaatgatgttttacatagtgttactatatgttcacttaaataaaagcaaatttccatttttaagctatattcastattctgcggcattcaaaaaggtacatcttttttaatgtttacaaggtacatctttagcaatttaaaataaaaaaacatatttctgtgaaatgtataatttttgacagtacatgatttatttgtctacccacactctcactgaataactattgagcacctactatgtgcctggcaagataatccagctctgaagatgaaagacctggtttctgccatcatgaaacttatatcccagacaataa

SEQ ID NO: 533898 - DNA, 624 bp, Homo sapiens
acagttagttgaacaagataaagctcctcttgtcctaaggagactacactagggagataacgtacgtaagaacacctaatacagtacaaagaaagtttagtatctcttcccatgaaagggacccaggggtccttgattcaaaatttcaaaaaagggataacatttagctgatcacactgaggaactggcatttgagatttgaaggcatgataaaatttgaccagagaagatgaggggtagaggttattctaggctgcaagggaagcagaaatgagaaagtgtagggtcttctggatcaaactgggtctgtgtggctggagtatagggaatgcaaaaggttaaagtgagcaggaatagaggaaatgaaaatttgatggggaagctttggatgccaagttgaggcagatacaattcattagggtggggagtcactaaaggctttatcagagtgacaacttaggaagatgaatctggcagcattttcaagggtgaattgaaaaagggaaacccatttagaaagccaatatgaaagtctggacttgaggtaatgakctcttacaccgatagagtagcaatggtaatgaagagaagaggtgttgcagaggaagaacatacatgacttag

SEQ ID NO: 533899 - DNA, 642 bp, Homo sapiens
attagattgtgcccactcagattaagggtgggtctgcctattccagcccactgactcaaatgttaatattctttggcaacaccctcacagacacacccaggatcaatactttgtatctttcaatccaatcaagtcgacattcagtattaaccatcacaaatayctataacatgcaaaaaaatgttaatcaactgtttatgttatcagtaaggcttccagttaacaataggctattagtaagtaagttttggaggagtcaaaagttatacttggatttttgactgcatggggtggggcagctctcctaacccccatgttgttcaaggaccaattgtacaacaatgtatttaactgtgcttctatggatagtcatttattttcttcccaaattttcattattttgacatattcctatagaatagattggtagaagtaacatgcttttgaaaaccataaaaggtaatgttaaagaatccttcatgactacttacttttttaggggattggactgctgcattctaaaaataatggtgagaagaatgaataaattagagtttactatgtaataaaaccttctaaaaaagaggagaggtagcagaatttacaagaaggttaaacctgaccttactgaagagaatgata

SEQ ID NO: 533900 - DNA, 319 bp, Homo sapiens
taccttatagagtttgaagatcaaatgaaatgaaatgatttatgtaagatacgtagcagggtggatggcctattagaagcgtccaacaaattcaagttattgtatataagaaactcaactcccttataattatgtagagcactaaattttctaaataatttctatcatagcatccaaatgtattttgagacaaatgagtggatgataagacagattttggtgttattattttattttattttatttttatttttttgaaatagggtcttacagtgttgctcaggctaaartgcagtggagtaatcatggctcactgcag

SEQ ID NO: 533901 - DNA, 654 bp, Homo sapiens
aagtactggtacagacattgcctacatagcagttaacaaaatgcacacaatccctgtccttgtgaatctcactttctaatgtgmgggtagttggaacagatactaatcaatataaatacataaaatatatggcatgtttatgtaacataaagcaaagaaggagaataggaagtgctgggtgtgtggtgaagtgctgggtatggatacatggagggatgctggacagggccaggctagagtggtcaaggaggccctcccaagaagatgatacttgagtaatacctgaagaaagaaatagagtgagccatgtgattgtttgggggaagaacattccaggcagagaaaaaacaagaggtgggattgtgcatggtaagagcagtttggctagataaatgtgagcaaggagtagaatgataggagcctggtttggggaattcacatatgacataggaccttggataacaccactgaaggggccacagcttttacccaagaagcccctggaagttttgaatggagaagctacagaatctactttataacattaaaaaaagatgactgtggatcctgtgctcataagagaatataatctatagtgaagtctccttgtctaaactctatatggttattaagttctgtaagtttcagggaagt

SEQ ID NO: 533902 - DNA, 654 bp, Homo sapiens
aagtactggtacagacattgcctacatagcagttaacaaaatgcacacaatccctgtccttgtgaatctcactttctaatgtgcgggtagttggaacagatactaatcaatataaatacataaaatatatggcatgtttatgtaacataaagcaaagaaggagaataggaagtgctgggtgtgtggtgaagtgctgggtatggatacatggagggatgctggacakggccaggctagagtggtcaaggaggccctcccaagaagatgatacttgagtaatacctgaagaaagaaatagagtgagccatgtgattgtttgggggaagaacattccaggcagagaaaaaacaagaggtgggattgtgcatggtaagagcagtttggctagataaatgtgagcaaggagtagaatgataggagcctggtttggggaattcacatatgacataggaccttggataacaccactgaaggggccacagcttttacccaagaagcccctggaagttttgaatggagaagctacagaatctactttataacattaaaaaaagatgactgtggatcctgtgctcataagagaatataatctatagtgaagtctccttgtctaaactctatatggttattaagttctgtaagtttcagggaagt

SEQ ID NO: 533903 - DNA, 654 bp, Homo sapiens
aagtactggtacagacattgcctacatagcagttaacaaaatgcacacaatccctgtccttgtgaatctcactttctaatgtgcgggtagttggaacagatactaatcaatataaatacataaaatatatggcatgtttatgtaacataaagcaaagaaggagaataggaagtgctgggtgtgtggtgaagtgctgggtatggatacatggagggatgctggacagggccaggctagagtggtcaargaggccctcccaagaagatgatacttgagtaatacctgaagaaagaaatagagtgagccatgtgattgtttgggggaagaacattccaggcagagaaaaaacaagaggtgggattgtgcatggtaagagcagtttggctagataaatgtgagcaaggagtagaatgataggagcctggtttggggaattcacatatgacataggaccttggataacaccactgaaggggccacagcttttacccaagaagcccctggaagttttgaatggagaagctacagaatctactttataacattaaaaaaagatgactgtggatcctgtgctcataagagaatataatctatagtgaagtctccttgtctaaactctatatggttattaagttctgtaagtttcagggaagt

SEQ ID NO: 533904 - DNA, 623 bp, Homo sapiens
ttattgcaggacaggtaggagttagtcaagtgtgtgtgcttgtgtgggcctggggtattacagtgagggtggattaggcagtgagtaccgcagtcacacaatcataccatcataaaagtggggatggaaacaaggagtaaaagagcatggcatattatagaagtgcaggggacatttctagtgcaagggtccaggggtaggcagtaatgaaacacaaggccacacatttgaggcaagtcataggaaggctttgcacaccgcactaagaaaaaaaaagtatttgagtgcctgctatgtgccagatgctgttttattttggagactgggtaccacagtgaaaaatgcatagcctctatatttggcatggcctaactgaaaagataaatacataattaaatgataacatgataaatgcttaattgaagatgtaacaagcactatgaaagcacaatgcctaagtttgtttttcccagagacatragcaacatcttaacagataggtaaatgttcaccaaacaacaggcaagcaatcagaaaggttatgtcatttaccaaacaaccgttaattatatagcactatgtgccagaccctttaaaaatattatatgagggccgattagaaa

SEQ ID NO: 533905 - DNA, 483 bp, Homo sapiens
cagctacttggggggctgagccaggagaattgcttgagcccaggaggttgaggctgcagtgagccatgtttgtgccactgaactccagcctggtgacaaagtgagaccctgtctcaagaaaaaaaaaaaaattaaattaaaaaaaattaacagagcttctgatcatcaagaaatactttcttttcactatactatcctgaaaaaattccagccaaacatcaagaatcttgatgtttttgtatcaagcatatcatgaataaaaataaaagaaaaaaataaaatttcacttaggcttattttacaaaattggctatttttaaaattaaaagttaatacataaacaggatrattgtctatcttttctaagacttgtattcttcatctgcttcctcttctcctactcttcccatctctaccatttattctgctcctctcacaggcaactcctctaaccagttgtgtttggtggcttcctcctaggaa

SEQ ID NO: 533906 - DNA, 421 bp, Homo sapiens
gtttctctagctgtgaaatgactgttctaaaagagccctgccggactttggcagtctgtaagaagacctgagttcttctctcagttccaagcaggaaaattgaacrtaccctgagcccagagcctgcaacaaactctgggcagcctcaggaagtcaggcagtgaagtcggaaaaatgatctcttctgtatagggagaaaataaaagtttaaaaatttgtagtttgaagatgtcagttgccatgtcaatttttatattattattttttccatttcctggtaatgagatgctatgttatctttatttatttatttatttatttgttagagacggggtctcgcttcgtcgcccaggctgcagggtagtggcgcaactataagctcactgctgtctggaattcctgggttcaagtgaacctccca

SEQ ID NO: 533907 - DNA, 640 bp, Homo sapiens
ttgctaaggggctctggaggcctctccaggctctacagcccagcctctgctctgaacttttgctctgctctccccagtgtctattccaaggctttgtacctaaatcctcccccttcactcagtaccctcggatcagcatcttggttggatggcctcttcarcattaaaaaaaaataggttaatatattcatatacctctaaaatcagaggtatacaaagaaatctcctacctacccctgtctttttctatatagttgcccgccacctacctccaaacaggtaacagtttcttatgtgcccctaaggagattgcttatattcataagtcaacatgaatatatacactttccctcttttcatacacctggcgctgtatatttttgtacataaccacattagtatataaagtgtttccacatcctttttcacagtgacttggccatggtacagacagctagccgatcaccagatcttttcctcttcttcctggtctcacagctaaactgtttcccagcagttagataaggacttgtgattgttctagccaacagaatgtgagcaaaagtgatatctctacttccagacctggtccataaattgtctcatacaaatctctatgccctttcccattctgttggct

SEQ ID NO: 533908 - DNA, 640 bp, Homo sapiens
ttgctaaggggctctggaggcctctccaggctctacagcccagcctctgctctgaacttttgctctgctctccccagtgtctattccaaggctttgtacctaaatcctcccccttcactcagtaccctcggatcagcatcttggttggatggcctcttcaacattaaaaaaaaataggttaatatattcatatacctctaaaatcagaggtatacaaagaaatctcctacctacccctgtctttttctatatagttgcccgccacctacctccaaacaggtaacagtttcttatgtgcccctaaggagattgcttatattcataagtcaacatgaatatatacactttccctcttttcatacacctggcgctgtatatttttgtacataaccacattagtatataaagtgtttccacatcctttttcacagtgacttggccatggtacagacagctagccgatcaccaratcttttcctcttcttcctggtctcacagctaaactgtttcccagcagttagataaggacttgtgattgttctagccaacagaatgtgagcaaaagtgatatctctacttccagacctggtccataaattgtctcatacaaatctctatgccctttcccattctgttggct

SEQ ID NO: 533909 - DNA, 508 bp, Homo sapiens
ggcagcctcccaattggtcctcagtctgcccctcccacataggcgctcataacccaaatccctacggaggggtcaggagaagaggcggcaccagaggggacagagcaggcagcacactggagagtgcaggccccacccgggcaggaggacgagcatgttctgctgataccttaaaaaaaaaaaaaaaattggcttggcgcggtggctcacgccagtaatcccagcactttgggaggccaaggcgggaggatcatgaggtcaggagatcgagaccatcctggctaacgcggtgaaaccccgtctctactaaaaatacaaaaaaaattagccaggcatggtggccaggtgcctgtagtcccagctactcgggagcctgaggcaggagaatggcgtgaacccgggaggtggagcttgcagtgagccgaggttgcgccactgccctccagcctgggcgacacagcaagactcggtcttgaaaaaaaaaaaaaraaaaaaaaatttttccagc

SEQ ID NO: 533910 - DNA, 581 bp, Homo sapiens
acttgtgactttccagtctaattagtgaaaaattgggctcaggtttctaaggtttcattgccaagaggccttgtcttgacagaaactaaagatggcaaagaaagtctgggaaggggctttggcacatactgtgaaatgccatccattgattggcattccacaattcaagtggaggggaggagaggcttgtgggaaaggaagagcatttgcccttctccctgagattatgatacaaggccaactctcctcctggcagctataggggycaccaagtatcctggaaaaccagacatgaaaaatcacagatatatagggaattttaaggtaaagtggtgacagaagggactctgctgaccactaactatgggttatgaaatttgcacacattatatgttccctaagtgtcctaacacagcacttaacacactttgctgtttgtcacttgccagttctccactagcacactaagcttcctaaatacaggaaatttgccttactcatcttggtatctctagcatcttattatgttatctgttgcagagcatatgctcaaaaatgtgtgataaacgaatggatgggtg

SEQ ID NO: 533911 - DNA, 482 bp, Homo sapiens
ggtaactgagtagaatcgtgattaggagtacggaccctagagctacctgggctcacattttggccctcccgctcctagctatgagattacaagaaagttgcttaattcccctgttccttggttttcttacctataaaatagaggtattaatagcatttgctgcatagtgttttaaaagtttgtattagtaaaatgcttagaactcttcctagcacactgtggtgttaaaaatgtgttaagcaaataaggacacaaaattatctgaagtgatacaaggaggagaaaaccatggtgtgtccaggaatcagtgaacatttctatatgagtggggtgtagtttgcttattagctagtcctctctgaacgttagccatgaaaatctagacaaattatttgatgttgggactttctttcctgcataatattgttttactcttacgtactgctgattgcatgwccctatagatctactgcagctggttc

SEQ ID NO: 533912 - DNA, 537 bp, Homo sapiens
tgcttggtgtgtggagggaaaaaaactccactcatctgagtcaaagaagcattctgtgttgtgagagcacaataggaaaaactgactttgtttattcttatatccttacagaggcaatcatatcagaaaccacagcagaggtcctcacatagctgccaatcttattttagttataagagagtcttggatgctttatgggcagttcacacttaaaatattgagtctgtgttttcctcaacattcaatcagcaaattttacttgatactctgttacatgctcctgctagttaataagggatacatcacacatacacacatgcatgtaagtatatacatatgcatatacttatgtatgtgactatatgcctatttttttttaattcaagtgacttataatctarctgggatattctttattttttaatctaaaaacctaagattctccatagctgggatattccaacagtaaagactgacaagcaagtcttgtgatataaagtgtattacaattaaaatatcagtaacaaatttttatgc

SEQ ID NO: 533913 - DNA, 450 bp, Homo sapiens
aaaagaagccaaatacataactatgttaatagacatggtgtttgcaatgtgatatatccattaatttaaataaggggtattataataattattattttatctataatatcattagtcattataatttccaaatgtaccttaacttcttgttttttttttttttttttttttggagatggagccttactctgttgcgcaggctggaatgcagtggcgtgatcttggctcactgcaaccttcacctcccaggttcaagtgattctcctgcctcagtctcccaggtagctgggattacaggcacctgccaccacttccagctaatttttgtatttttagtagagacagggtttcaccatattgctcaggctggtctsaaactcctggcctcaagtgatctaccctccttggcctcctaaatttctgggattacaggtgtgaaccacgctcctg

SEQ ID NO: 533914 - DNA, 450 bp, Homo sapiens
aaaagaagccaaatacataactatgttaatagacatggtgtttgcaatgtgatatatccattaatttaaataaggggtattataataattattattttatctataatatcattagtcattataatttccaaatgtaccttaacttcttgttttttttttttttttttttttggagatggagccttactctgttgcgcaggctggaatgcagtggcgtgatcttggctcactgcaaccttcacctcccaggttcaagtgattctcctgcctcagtctcccaggtagctgggattacaggcacctgccaccacttccagctaatttttgtatttttagtagagacagggtttcaccatattgctcaggctggtctcaaactcctggcctcaagtgatctaccctycttggcctcctaaatttctgggattacaggtgtgaaccacgctcctg

SEQ ID NO: 533915 - DNA, 426 bp, Homo sapiens
gaactaggtaggcaggtcattttcaggcctttcccaaaactcatcttcttgtagtaaaaatcagcatatttattattattatattattattcaagtattatttcccatgaattataattatgtacataaacagcttatcttttactgccttttttcagagacataacaccaggctgagtgtggcttttggctgattgaaaaccatgcaagcattcttcaggtctgatggaatcttgctgtctgtgtatgttcccacttgcagccacatgctcctgcatgcttttcagtgcttcaggcaccacatttccctcttttaacagaccagaatggcaccaaagtgtgactcattaggtgacttaggtaaatcaggaaaaacaaaaaggaatgtcccactcaaatattgyctgagtaattttgtcaggcctg

SEQ ID NO: 533916 - DNA, 425 bp, Homo sapiens
agctgcccggttcatccttttcagcacgctgcctgagatcaaacggaccagagatgaatgcctaaaacacagagtggctgattgggcagatatgtcttaagtttccaaattaataaatatatcgttgtaggctaaagtttccaaataataacaatactaacaatagtaagctaatagaaaggaatggctcaacagggtaacgccggcccactggcgtccagaaacagttgaaaggcgtttgtcccacaacgtttggtaagcgaacgctgcaccgcgcactcgctggttatgggctcccaggtgaccgctgtttccgttcccaccaatcccgtcccgctgcgcctcgcctgtgtccgctgcgagtgggattcgccattcccagactccaggtagccaggaacgcsccgcgcgggccgcgtccccat

SEQ ID NO: 533917 - DNA, 632 bp, Homo sapiens
tgccatcaaccgacatgtagtagattgtgaagcaggtttggggcaaaggtgttttaacgatgaggagttcagtttggacatgttatacgtgagatagccactagatgtcaaagagaaaatgtcaagcagacagttggatatatatgttgctataggtactctttttttwaaaaaatttatattctttttctaagaagttttagagcaggaattctgcagtatacctccttatgtgtacactttctagtaaagtgccatattcttactggagtcctagagagaaagatctgggctgaaggtgtaaatttgggagttcttgggagttcttaaagccaagagactagatcagatcactaatgaagtgggtgtagataaaaaggagaataaaaggattgagctatagggtccccgaataataagaggtaggggagaaaaggaagataagcaaggaagagtacggtgaagtgtaagccaagtgcagaaagaatattaagtgggaaagtaatcaacggagccacattctgctgatgcctcaagtacaatcattactaaggattgatcattgaatttagcactgtgcagtcattggtgatcttgataggaacagtttctgtgtagtgatggggtgaaag

SEQ ID NO: 533918 - DNA, 409 bp, Homo sapiens
ttgccatcaaccgacatgtagtagattgtgaagcaggtttggggcaaaggtgttttaacgatgaggagttcagtttggacatgttatacgtgagatagccactagatgtcaaagagaaaatgtcaagcagacagttggatatatatgttgctataggtactcttttttttaaaaaatttatattctttttctaagaagttttagagcaggaattctgcagtatacctccttatgtgtacactttctagtaaagtgccatattcttactggagtcctagagagaaagatytgggctgaaggtgtaaatttgggagttcttgggagttcttaaagccaagagactagatcagatcactaatgaagtgggtgtagataaaaaggagaataaaaggattgagctatagggtcc

SEQ ID NO: 533919 - DNA, 632 bp, Homo sapiens
tgccatcaaccgacatgtagtagattgtgaagcaggtttggggcaaaggtgttttaacgatgaggagttcagtttggacatgttatacgtgagatagccactagatgtcaaagagaaaatgtcaagcagacagttggatatatatgttgctataggtactcttttttttaaaaaatttatattctttttctaagaagttttagagcaggaattctgcagtatacctccttatgtgtacactttctagtaaagtgccatattcttactggagtcctagagagaaagatctgggctgaaggtgtaaatttgggagttcttgggagttcttaaagccaagagactagatcagatcactaatgaagtgggtgtagataaaaaggagaataaaaggattgagctatagggtccccgaataataagaggtaggggagaaaaggaagataagcaaggaagagtacggtgaagtgtaagccaagtgcagaaagaatattaagtgggaaagtaatcaacggagccacattctgctgatgcctcaagtacaatcattactaaggattgatcattgaatttagcactgtgcagtcattggtgatcttgayaggaacagtttctgtgtagtgatggggtgaaag

SEQ ID NO: 533920 - DNA, 520 bp, Homo sapiens
agtaagaagtcaatcttccctgaagcaaaattgaaatttgtaaatgcgatttctgggagcttattttgtaatacatgattccagagtgtccataacacacacaattgtcttttttcccctacatgggctatttacaacaaaattggacttataatgtttatttccagggatgactagaactttaataacaaaccttgggccaggcatagtggctcatgcctataatcacagcacttcgggaggctgaggctggtagattacttgaggccaggagtttgagaacagcctggccaacatggcaaaaccctgtctctactaaaaatayaaaaattagccgggtgtggtggcgcatgccagtaatcccagttactaggtaggctgaggtacgacaatcgctggaacctgggaggcggaggttgcagtgagctgagattgcactactgcactccagcctgggtgacagagaaagactctgtctcaaaaaaataataataataataataataataataaaccctga

SEQ ID NO: 533921 - DNA, 500 bp, Homo sapiens
acaaacatatacacaatactgtcttttgtctggttagtttagaggttagaataaactgcagtatgttgtagtggacagatcatagaactaggagtcaggatgtctggattcctaggaagcaatgaataggttgcacggtgcagctcaaggttattcaaagtgtggtgcccagaccagcatcatgagtatcctcagggagcttgttagaactgcagatcctttaactcattgaatcagaatccctaggtgtggggccctgaaatctgtattttagcaggctctctgggattgtgatgtgccttagagtttgacaaccactgggtagctgatcctgacttagacttatcaggcatgtgatcttgaacaagtcacataatctcactgagttcagttttcttatgyttaaaataggcccaataatatctatttcacatggactgctttgaggattaggcaagagatctgtaacagacactgtagaacagtgtctctggtctaca

SEQ ID NO: 533922 - DNA, 623 bp, Homo sapiens
ctggttaactatgagcaagtaatttagttcttctcagtttagtttcttcacctgtaaaagaaggaaaataactgttatactcaatttctgaagtggctataaaaatcagtttaaattatgggcattgaagctctttgtacactgtataaggactgtacatctaagggattaatgagaccaggcttatgattttaagcatggagtaaatagtaayactgactctgttctatgaaccacatggaaactctaaagaatatgcacatttgaaacacaggtatcatctggggaaggtgatctgctcacccaaaccagttcatgaacatcaatctccagtggcgtgctggagctagctgtaccagctcatgagggccaattgtttcatttttaggaattttgtttgctggttaaaaatagtcattatttaaaattaaattatgtaaacaataatattagataaaataagttaaaataaaaacaaaggaactaattatccccaaactcttccccacctaattattttactatctgtgccttgggattatttacattgattttatccatatggtgacaatactattcatatataaatggtgtgcttctcttcataactctacatagcctga

SEQ ID NO: 533923 - DNA, 475 bp, Homo sapiens
cctgaagggttacattggtatgaaacctgggtttaaaaagggaccgaatagactagccattaaaagacctgcgtacaacctctctctctctctttgagagataatgtatctggacaataaacatgaacagagtggagtctatcctgtttaaaacattgcctactgtacaggcaccaggagctgaagggtcagaatattagcagtgggagcttgattagaagttgatgagagatgggtagtaggaggaaagagtgagatagaggaagaggacatgggggttacccrtaagtggagagtagaaaagtagaatcagctggccatcaaagggcgtgggactgaggaacagtatggcatgtattaaatatactaagcgctgacattggaggagaactaggaaggtaaatgaaatcaataggggatgatggagaatagttaggtgtgcagggattagggttatgatagaaatacatgtgaa

SEQ ID NO: 533924 - DNA, 612 bp, Homo sapiens
aatgcttaatttaaaatactatctattcatgaattctctaattttcttagtttttccttcatgataaaggagaaactttctttaccttttcattataatttctaggaaatttcctacactttattttcccaaattttattgcattttaagtttggttactgcttatttatttacttatttatttatatttttgttttctgattgtccccttattattattatttttaaagaatatccacttttgttttatggtgcacaatctttgcgtatcatttgactttgtttcctttaatttcattttctttgttttgtttctatcttttatgtctagtgaacatttactgtccttatttaggagaaaattatggaaaaaaggattaggcaaagcttattaactatcaggcttcactgtatagtgatccagaagctggattttcatttggttggaagatgccaaatgacagtatcttttgtcttggaaccattmaacgtctgcagataaatatccttcagttttctgtctgggggttattcatttgattattgatgttctgggaaccggaggaaaagatggcagggaaattttatcattcattatgtagattttcactt

SEQ ID NO: 533925 - DNA, 507 bp, Homo sapiens
ggcgagagtggggcccgcgccgcgccccctccagccccggggcgccccgggagagctcgggcccgcgcggagccctgaccaacggggagctaggcatttctcgagcgttccagatgtccgcagcgacttctgatccgctgctcagcacgaacattttcacaatcagttatgatgcccagcaccattttcttgggataatatttaaaaatcagaaattgtccaagttacttatgaaatacatgcgcattgtgaaaaattcacaaaagtgtaaaggttcagttatgatctatgagtgcctctctctttccccatyctcttctctctagaggtgaccccttctaacatttatttagtcatcatagtgatgttaataagtagagtttatgatggacttgctaagtgccaaacactcttctaagcgctttatgtcaattttctcatttattccctacaacaactctgtgagttgctagaattattatgctggatttacggagagaaatcgag

SEQ ID NO: 533926 - DNA, 613 bp, Homo sapiens
tatttcttttaatttcaatttccagtttgtagactttaaaaaaataatcagggaaatctttctttggtgatatttcctcgcccatatctctttattttttatttttgtggttacgttataggtgtatatatttatgggataaatgagatattttgatacaggtatacaatgcctaataaccacatcagggtaaatagggtattcattacctcaagcatttatcctttctttgtgttataaacaattcatactaattatactttctacccattaaccatccccatttcccccactccaatacctttcccagcctcaggtaaccatcattctactctrtctccatgaattcaactattttaatttttagctcccagaaataactgagaaaatgcaatgtttgtctttctgtgcctggcttatttcatgtaatgtaatgatgtccagttccatccatgttgttgtgaatgacaggatatcattcttttttatggctgaatagtactcccttgtgtatatgtaccacagtttatttatccattcatttcttgatggacattttggttgcttccaaattttggctgttgtgaatagagctgcagaaaacattgaagta

SEQ ID NO: 533927 - DNA, 613 bp, Homo sapiens
tatttcttttaatttcaatttccagtttgtagactttaaaaaaataatcagggaaatctttctttggtgatatttcctcgcccatatctctttattttttatttttgtggttacgttataggtgtatatatttatgggataaatgagatattttgatacaggtatacaatgcctaataaccacatcagggtaaatagggtattcattacctcaagcatttatcctttctttgtgttataaacaattcatactaattatactttctacccattaaccatccccatttcccccactccaatacctttcccagcctcaggtaaccatcattctactctatctccatgaattcaactattttaatttttagctcccagaaataactgagaaaatgcaatgtttgtctttctgtgcctggcttatttcatgtaatgtaatgaygtccagttccatccatgttgttgtgaatgacaggatatcattcttttttatggctgaatagtactcccttgtgtatatgtaccacagtttatttatccattcatttcttgatggacattttggttgcttccaaattttggctgttgtgaatagagctgcagaaaacattgaagta

SEQ ID NO: 533928 - DNA, 617 bp, Homo sapiens
ttaattgggttcccatggtaactgtacaattgggtttttcaatataacatccccaaggcccaacgcatacttgtaaaatatacttccaacagcctgaattgtttttacattacagcactcccaggaagatcaattattatatgtccccaccctaactattagtggcaggagatgttaacactatttgccatattaacataactcatgtaaggaacactacatatcacaataattatataaaactaatcatacacttcagattcatcaaacatgttctgggtaataaactgatacaactgctgtcacagaaccgtgtttacgaaatgtaagaaatcacgcccaactacagaccaaaccattatgcctctcttattgatttcaaggataaacagaatcaatcattaataattacaggataagatgaccctcaaggttaatcatattcttagagattctcactatggaactgaacaacaaacaagctgtgctaataartaaataaataaataaaagataacgaagaactgaaatccacacttcaaatagagcactacaggaagcagaacacattccccaagccaggactctggcttcacctgtattcaccacagcatctg

SEQ ID NO: 533929 - DNA, 512 bp, Homo sapiens
ttatactgtgtttcgaacttccaaatagataatgtcagaacatttctgaaatgggatactaacatcaagatatacgacaccaatcaacaagcatcaggcaaagcagtgcatagaactcggggtggaagagactcctagagaatttccatttccattccctgtgtcaacagcgtggtaactcacctcctagattgctttatggtttcaggagaaattctcagtaggctccctgtgctgtactcagctccgtgttcaaagcccaggaattagatatgtcgtagtttatgaaactgtttatgaaaggatcktttttgaattgttcaaaatccaaaaggagtcaaactttgacagtttaagacaacggcaagagggtcatagcgatctccccagtgcagccttggcactgaggctctctggttgaaaatgcaatttcttttttgtgaatttcttccagcccataatgctctgtttgaaacttttgcctttttgaaaggatttctttactatgaagc

SEQ ID NO: 533930 - DNA, 584 bp, Homo sapiens
tgaactaaagtgtgcttcctctaggaagctgccctggatccctccagtaaaacagatctgtctaccgtgtctgcacactctcgattgcatcagaggacagttacttgaatcctccctgcctcccatctgggctgtgggcaacctggaccaagtgcccacacctgagcatcattgcatgttctgttcccagcccggtgcctgccactgtgctgtcctcagtacacacttttcacaggatattgaaatgcaacttaccattatggcatgtttttaaaaataagctttaaaaaatggggatctttatttctcctggaaaatagcatgcagcttacaatttgaatcaggagcgtatcgggtacaatcagctaaaaaacctcggtgtttatttttccagaaatgcactaacatcacacaaataaaattaaagccactttaataaagactraaagttaatactaaatgaatcaagtcctagtgcttagcaatacagcaatttttttcccatttagagagtgtttaatacttaaggcttggtgcctccgtatgattaattaccaggatatgcagcagactcgagtcttatg

SEQ ID NO: 533931 - DNA, 600 bp, Homo sapiens
gactctactacataaatgcaagaattagtatctcaaaattttgtcaaaactaattcgagctttttttaaaccataatacatttcagatgattttccaaatgtaatattatttatttaatattaaattttttggtagaaaattattggacttcctagacttttcagagttgccagaaatcaatgatcggttttaaccaagtcattgacaaatttgcaaaagtaaaggtccaaagcatgtacagcattattagatattactgtgataaatcatgaatatgttttcccytttctttcaaaaagtacattgatgtaattaaaatatgctatgacttttttccctctgtacaattagtttcctgttgctactctaaaatattaccatcaacttagtgacttaaaccaatataaaatttattatctcacagttctatatgtcagaagtcctaaaagtgatgtctctgaaggactgtatttcttctaaaggtcacctggcatttcttggctcatggcttcttcttacatcttcaataccaaaaaataatatctacaaatctctctcctctctcttctttctctttgtctctccctctctctccttct

SEQ ID NO: 533932 - DNA, 659 bp, Homo sapiens
cagcagggaagtcccagaataggaggcaagacctggtcatgttgtcaaaacccatccagggatgggacaaggagcaggggaagctgagagaggctgaggagttcttaagaggtgtctgcttcaatgggaaagcttgagctggggctgtggaatatccctttttggtgacatgaggacaactttctctgggaataattatatgatagcttctgtctgcaggaattttgtttgtttgtttttgtttttgtttttgagatggagtctcrctctgtcacccaggctggagtgcagtggtgtgatcttagctcactgcaacctccgcctcccgggttccagcaattcttctgcttcagcctcctgagtagctgtgactacaggtgtgcaccaccatgcccagctaatttttgtatttttagtagagattgggttcactatgttggccaggctggtctcaaactcctgacttcaggtgaccaacctgccttggcctcccaaagtgctgtgattacaggcgtgagctattgcaccaggcctgtttgtttttgatagtattgtaaatgaaattgttttcttaatttcatctttggactgctcattgctagtatatagaaatacaatagatttttgtacattgaccttgtatcccgcaacctcactga

SEQ ID NO: 533933 - DNA, 659 bp, Homo sapiens
cagcagggaagtcccagaataggaggcaagacctggtcatgttgtcaaaacccatccagggatgggacaaggagcaggggaagctgagagaggctgaggagttcttaagaggtgtctgcttcaatgggaaagcttgagctggggctgtggaatatccctttttggtgacatgaggacaactttctctgggaataattatatgatagcttctgtctgcaggaattttgtttgtttgtttttgtttttgtttttgagatggagtctcgctctgtcacccaggctggagtgcagtggtgtgatcttagctcactgcaacctccgcctcccrggttccagcaattcttctgcttcagcctcctgagtagctgtgactacaggtgtgcaccaccatgcccagctaatttttgtatttttagtagagattgggttcactatgttggccaggctggtctcaaactcctgacttcaggtgaccaacctgccttggcctcccaaagtgctgtgattacaggcgtgagctattgcaccaggcctgtttgtttttgatagtattgtaaatgaaattgttttcttaatttcatctttggactgctcattgctagtatatagaaatacaatagatttttgtacattgaccttgtatcccgcaacctcactga

SEQ ID NO: 533934 - DNA, 659 bp, Homo sapiens
cagcagggaagtcccagaataggaggcaagacctggtcatgttgtcaaaacccatccagggatgggacaaggagcaggggaagctgagagaggctgaggagttcttaagaggtgtctgcttcaatgggaaagcttgagctggggctgtggaatatccctttttggtgacatgaggacaactttctctgggaataattatatgatagcttctgtctgcaggaattttgtttgtttgtttttgtttttgtttttgagatggagtctcgctctgtcacccaggctggagtgcagtggtgtgatcttagctcactgcaacctccgcctcccgggttccagcaattctyctgcttcagcctcctgagtagctgtgactacaggtgtgcaccaccatgcccagctaatttttgtatttttagtagagattgggttcactatgttggccaggctggtctcaaactcctgacttcaggtgaccaacctgccttggcctcccaaagtgctgtgattacaggcgtgagctattgcaccaggcctgtttgtttttgatagtattgtaaatgaaattgttttcttaatttcatctttggactgctcattgctagtatatagaaatacaatagatttttgtacattgaccttgtatcccgcaacctcactga

SEQ ID NO: 533935 - DNA, 659 bp, Homo sapiens
cagcagggaagtcccagaataggaggcaagacctggtcatgttgtcaaaacccatccagggatgggacaaggagcaggggaagctgagagaggctgaggagttcttaagaggtgtctgcttcaatgggaaagcttgagctggggctgtggaatatccctttttggtgacatgaggacaactttctctgggaataattatatgatagcttctgtctgcaggaattttgtttgtttgtttttgtttttgtttttgagatggagtctcgctctgtcacccaggctggagtgcagtggtgtgatcttagctcactgcaacctccgcctcccgggttccagcaattcttctgcttcagcctcctgagtagctgtgactacaggtgtgcaccaccatgcccagctaatttttgtatttttagtagagattgggttcactatgttrgccaggctggtctcaaactcctgacttcaggtgaccaacctgccttggcctcccaaagtgctgtgattacaggcgtgagctattgcaccaggcctgtttgtttttgatagtattgtaaatgaaattgttttcttaatttcatctttggactgctcattgctagtatatagaaatacaatagatttttgtacattgaccttgtatcccgcaacctcactga

SEQ ID NO: 533936 - DNA, 347 bp, Homo sapiens
tgtgtgtcccacttacttgtgggtaggagcatcctagcgattgtgttacatggtaggttctgagccagtgagycggggtggtatctgagagcctacatttctaacaagctcctaggtgatgctgaggctggtgtaaagaccacactttgaggagcgaggctcctctgcaactcacggatcacaccagcctccacctcattatttcaacggagccttgaattgctatctccttctactaatgctcaggattggggatggatggaggcaagccttctagatcttcttctgtagcccccatagccaaaaatctgagtgattttgtccaaacttcacattgtatggctggc

SEQ ID NO: 533937 - DNA, 608 bp, Homo sapiens
gctgccatcacttttagtaaatgaaacaatattcaaggcaaaatattcaaagcaaatgatttaaaaaaaaactgcacaaaaarttaatttttttctaaaaaaagcttaataaaagcaatgcatggttattgtagataatttgaatttgacaaaaatcataaattttaaaaattaaaattatcttttaatctcaccaccctgaaattgccttgtttactattttttcacatttccttccagtcctttttctaagtgcatgtatctgtgcctatttataacaaaagttgaatcctattatgtgtaaagtgtgtgcttggctttttaaaattaaacctgtatgtgccattaaatatttttggaaaatattttaataacttctcatgtgttccccagagatatatttcaagcattttaattccacaaatacatcccaggcacctatcacatgtcagacattctggctgatgttgaaagggtaaaagaggaatggatgtttttcctgctctcaaggagcttataattttgtaagaaatgaaagagcaagcaggcacttttgtagtccataatacaaggtaggctcaaataagtacaatttttaaaaaatacag

SEQ ID NO: 533938 - DNA, 609 bp, Homo sapiens
accaaatatctaaggatacacggaggttagtaaaataaaaaaacatgccaactggaacaggcatgctgccgcatgagttagtctaacagttctgcacagtgctcaaaatgcaccaaaggaacctcattaaaaaaataaaaagatgataaacaaataaagtcgaaggcaatgtaaggcttacatttcaacttgagtccaaagaaataacattctctaactattatgctaaagctactttgtttaattttaatttttgaaaagtctactgcatkaaaaaaataatttacttttgttaaagctcgatcttagtgtaataattaggcagctactgattttctgggggttttctttatagaagtctcagagaagagtggaacagcttttttggtcagcattttgaaataaaaattgtggaccaggtagagctttttggcattccatctgtgacttagggaaggaggagattggaaaatactgcttattttatacttactgctcttcccattctttcagcactctaatgagctaacaagattagaaaacggagctcggactttggctcaagaccccttaggacacactgaccagtccatttcctacaccccagga

SEQ ID NO: 533939 - DNA, 574 bp, Homo sapiens
tttccctggtcctccgtcccatgatggactgtgcttctagggcataaactttcaagtccaagaagtggccaacagtagatgtttgcaaggtacgcagaaggagctcagaggtgcaggctgcggtgtgcacatgcatacatttgaagccctttacagtgtggagcaaagccggggtgtgaagccagacagggtttgctttgagggctgagggatggttctccccacttaggaaactcccaggaattcaggaaatccaaattcaaatctagcttttcagttcattaagaaggatatctgccaagatgacaggataaggtagtcatttaacaattagtttgctttatttataaactgtaaatatttagacatatggcaggtagagctccatatgtactcttgctttgagcctgcaaaagttaggggtgagtctgtcacctagyaaaccccagaaacagcatatattgatgggattctgacactgatcccgttaattcaattcagtctcggctacagaggccacagctagctcatccaaaccccaaacacctctgcgatccccagggaccctgggagc

SEQ ID NO: 533940 - DNA, 430 bp, Homo sapiens
ctgcaagctggtagtgctcccagcagtggagggggtwgggacaagtctttccttgatgggggatctgggtggagcatcgtctggtgaccaccacaaatttcagtgtctatactatgccaaaaatgatatccattcacaatggtttaaatttatgatgaaaatctccaggtgtaaactttaaaacgcaaagttctacaatgtgtaaaagcagttgttgtttttttttgtttttttttttgagacagtctcgctctgtcactcaggttgaagtgcagtggcacaatctcggctcactgcaagctctgcctctcgggttcccgccattctcctgcctcagcctcccgagtagctgggactacaggcgcccgccaccatgcccagctattttttgtgtgtttttagtagagatggggtttctccgtgttagcca

SEQ ID NO: 533941 - DNA, 430 bp, Homo sapiens
ctgcaagctggtagtgctcccagcagtggagggggtagggacaagtctttccttgatgggggatctgggtggagcatcgtctggtgaccaccacaaatttcagtgtctatactatgccaaaaatgatatccattcacaatggtttaaatttatgatgaaaatctccaggtgtaaactttaaaacgcaaagttctacaatgtgtaaaagcagttgttgtttttttttgtttttttttttgagacagtctcgctctgtcactcaggttgaagtgcagtggcacaatctcggctcactgcaagctctgcctctcgggttcmcgccattctcctgcctcagcctcccgagtagctgggactacaggcgcccgccaccatgcccagctattttttgtgtgtttttagtagagatggggtttctccgtgttagcca

SEQ ID NO: 533942 - DNA, 430 bp, Homo sapiens
ctgcaagctggtagtgctcccagcagtggagggggtagggacaagtctttccttgatgggggatctgggtggagcatcgtctggtgaccaccacaaatttcagtgtctatactatgccaaaaatgatatccattcacaatggtttaaatttatgatgaaaatctccaggtgtaaactttaaaacgcaaagttctacaatgtgtaaaagcagttgttgtttttttttgtttttttttttgagacagtctcgctctgtcactcaggttgaagtgcagtggcacaatctcggctcactgcaagctctgcctctcgggttcccgccattctcctgcctcagcctcccgagtagctgggactacaggcgcccrccaccatgcccagctattttttgtgtgtttttagtagagatggggtttctccgtgttagcca

SEQ ID NO: 533943 - DNA, 503 bp, Homo sapiens
ctcagaaagctgaggcaggaggatcacgtgagtctagaaatttgacactacagtgagctataatcgcgccactgtacttcagactggatgacagagtaagaccctgtctctcaaaaaaagtttttttttcaaagacaaggaaggagcagaggaggagaaagaagagatgaatgaccctccttatttgacacaaatgcagaaagatacacagttgaccattgagcactgtcrgagttatgagtggtgatcccttgagccgccaaaaattcacacagaactttcaactccttaaaaacctaactactaatagcctacttttgactggaaaccaagaagataagcagttgattgacacatattttgtatgtcttatgtattacatactgtattcttacaataaagtaaactagagaaaataaaatgttactaagaaaatcataaggaagagaaaatacatttactagtctataagtgaaagcagaccatcctaaagacctcattgt

SEQ ID NO: 533944 - DNA, 574 bp, Homo sapiens
tgaggcaggaggatcacgtgagtctagaaatttgacactacagtgagctataatcgcgccactgtacttcagactggatgacagagtaagaccctgtctctcaaaaaaagtttttttttcaaagacaaggaaggagcagaggaggagaaagaagagatgaatgaccctccttatttgacacaaatgcagaaagatacacagttgaccattgagcactgtcggagttatgagtggtgatcccttgagccgccaaaaattcacacagaactttcaactccttaaaaacctaactactaatagcctacttttgactggaaaccaagaagataagcagttgattgacacatattttgtatgtcttatgtattacatactgtattcttacaataaagtaaactagagaaaataaaatgttactaagaaaatcataaggaagagaaaatacatttactagtctataagtgaaagcagaccatcctaaagacctcattgtcttcatgtggagtaggacgaggaggacgaggaggaggaggggttagcctcgctstctctgggggcagagatggaaggaaaa

SEQ ID NO: 533945 - DNA, 572 bp, Homo sapiens
ctgccccaggacagcccaccccgggcaggctccaactgcagcattttctagaagtgtgagaactcttaccaacgtgctacctggctctgtggctccccagtcaacacaaacacaattttgaggtctgcagttcaaatttgcttcccctacaagcttctgagctgggttcatagggcaaaaaggcccgagtttcttttcaagtcaattggaaaccctccagccaagacccgtccccatacaccaactttaccaaggttttccttctcactaacacaacaaaagataaagcctctgctctgctctttttgagcttattcttgtccatttttcaaactcggcctcgttgttttgatcctcttggatcctggggattgaaagtgccacctgatttctgcaagcttgggggtgcacgggtggtcctgtcctcttagcatgctrtggggcaagggaaggcagttggggtttgaagccaggctaattcagggtgccgctgaacaacagccaccacagagaaagcagagagccatgcacacacactcgccaggggccagcaaagggtgctgccatctgca

SEQ ID NO: 533946 - DNA, 465 bp, Homo sapiens
gggagtaatggctccccctcacccccattgtagtcaaaatctgggagtcascaccagatgcagaatcccggaaggaggggagggattttgacctgggatctgggaacatcaggagctctgttctgacaggcaacaaaagtctgcgttgggtggacaaccagaaagttgcaggctgagcagggactaagtgcacagaactctggtgaaacaggtgctgtgcagtgagaacactatccatctgcatttcggaaaccaagaccccatggtgggctctttgtgtgtgtgtacagatgcaggcgtattacatgtgccatctgtatctatgtcacatggtgatatacatacacaccttgatagaaagccaagagagtatgcttatgtgtgaatgtgtgtacatacatgcacatacatgtatacatgtatataatcaataaatatgcattacatatatccatgccccataaa

SEQ ID NO: 533947 - DNA, 562 bp, Homo sapiens
cgtgtatgttactgcaaagaacaccgtttcattcttttttatggctgcatagtagaatcatcttttaagaattattcatagatttgttttagaataggtttaggttcacagaaaaatgattggaaaataaggagttctcttacagtccctcagcctcccccaacccccaagtttcccctgttattaacatcttgcattagcatagggacatactttacaaccagtgaacctgtactgatacattacctaagtccaagcttacttctttgtgtygtacattctgtgggttttgacaaaggcataatggaatgtatccaccatcacagcatcatccagaatagttcccagccctaaaaatccctcgtgctccacctgtgtattccttcctcccttaaaaccaaaaataagatcatgttattcccctgtttacagccattaaattcaaatgaccctctggaacctccaacccgccccgctaccacacatgtgccaattaatctgctccattcctccttcatatctcagaactattaaataaagcccagactccttagctgtgggc

SEQ ID NO: 533948 - DNA, 562 bp, Homo sapiens
cgtgtatgttactgcaaagaacaccgtttcattcttttttatggctgcatagtagaatcatcttttaagaattattcatagatttgttttagaataggtttaggttcacagaaaaatgattggaaaataaggagttctcttacagtccctcagcctcccccaacccccaagtttcccctgttattaacatcttgcattagcatagggacatactttacaaccagtgaacctgtactgatacattacctaagtccaagcttacttctttgtgttrtacattctgtgggttttgacaaaggcataatggaatgtatccaccatcacagcatcatccagaatagttcccagccctaaaaatccctcgtgctccacctgtgtattccttcctcccttaaaaccaaaaataagatcatgttattcccctgtttacagccattaaattcaaatgaccctctggaacctccaacccgccccgctaccacacatgtgccaattaatctgctccattcctccttcatatctcagaactattaaataaagcccagactccttagctgtgggc

SEQ ID NO: 533949 - DNA, 582 bp, Homo sapiens
accgtaagagacaactttgtccaactggccttattttgttgtttttgttgttctgttttgttttgttttgttttaggcttttagcagcctgaagccatggtttttagtttctgtctctagtaataagcagawaagaaggatgaggaaggagctttactggtccaaccagaaacagaaactaagaacccatgactgtattctcgcccttggacaccctaaagcttccgggtagataggcactgcaccctgggcctgcaggatggtctggtgccaggtgtggctgccttctcagcccagttagtctcagcctgggaccccctggctctgggcatgtagattttggtctttctattgttttctcctggcaagacagcaaatcagaggggctcaaagaactcaaggcagttttctattgtccataataggtgggaatgggattagcaagaatacgtaaaatccacactccacctgcttcttaaacaaatcctttactgtaatcacccacaggctctaacattgattgatcttatgtcctctgcctaatcctcctctggtgggtgtattaatgatgagagcctaaag

SEQ ID NO: 533950 - DNA, 582 bp, Homo sapiens
accgtaagagacaactttgtccaactggccttattttgttgtttttgttgttctgttttgttttgttttgttttaggcttttagcagcctgaagccatggtttttagtttctgtctctagtaataagcagataagarggatgaggaaggagctttactggtccaaccagaaacagaaactaagaacccatgactgtattctcgcccttggacaccctaaagcttccgggtagataggcactgcaccctgggcctgcaggatggtctggtgccaggtgtggctgccttctcagcccagttagtctcagcctgggaccccctggctctgggcatgtagattttggtctttctattgttttctcctggcaagacagcaaatcagaggggctcaaagaactcaaggcagttttctattgtccataataggtgggaatgggattagcaagaatacgtaaaatccacactccacctgcttcttaaacaaatcctttactgtaatcacccacaggctctaacattgattgatcttatgtcctctgcctaatcctcctctggtgggtgtattaatgatgagagcctaaag

SEQ ID NO: 533951 - DNA, 614 bp, Homo sapiens
ttgcaaagggattgccatcatattgtccaattcttcttggtattttgaatagaagtgttaaaaactgctgagatattatgccctagaaaatggacttgagtgttgtacaataacagcttttcatttgggttatgagtcttaacattcacttagagcatcaactccagtagtttcaaatatgcttatgagccatttggaattttaaaagcattcataaatgaatgcaaaccagaacagttccaactggttggataaataatgtacatttttaaaattaaagtaaaataatatcaaaatgcatacagacwttggttaaatagaataagtgtcttttgagccattcaaatagattctttatcacattgagtgggcctttcagaaatgttgtttttacattttataacaagtagcaaagagtacactagaactagcaaatgtcaggaagagtagtcaagatttcaaataagaagaggatattactatatgatttttatgaagagtgaaaatcagaaatctgttgccatttcatttttaagaaaccttatttattaagaacattaaagcaaagatacacaaatgaatgagaagccttatattacttgtgttcatcaggc

SEQ ID NO: 533952 - DNA, 477 bp, Homo sapiens
gaatacatgatcaagttaatattttaggaaaatctgatgcttttacggaataaaatggaagaaaagaatggtggcaaataagccagttcataggtgaagaatgactgggaccattgtcaatggccttaaaaggaaatggatcaagagatatttaaatgatagagctgtcaagctttactgcactgattagatgacaggaagaggtaagaccaagatgattcccaacattctaacttgggcaactggttggatagtggtgccaaccactgggtmaaggaacaaataaatagtagcaaatttttctcacaatattccttacattaggtgttattatagacactttagaaatgaagctcagagaagttggataatatcctaaggtcaaagatctagtaagtggtggaatctacaggattatgcctcttacagactctagagtccatgctagcagtagatgttgtggtctgcttcccagat

SEQ ID NO: 533953 - DNA, 602 bp, Homo sapiens
cagaagctagaccagcaggaggttgtagatggtaatatagtacaggcctaatgtgtgacaagggcttggtgtattttatgatatgttctgtacactaggtcacccgaggtaagactgttgcttaataagctcttctcccgaggctgtcgtgttgtcagtgatagtgtcattcttaaatggtttgtttactcagaaggcccagtcattagaagccagaatgggcttcttatttgctttgccattttatctcacttaataaaactatattctatgttctataactgtagtgttctataactgtattctattgactatattgtattatggaataacaaggtccaaatttacccttctaccttaaaaaacaaaagacaaaatatatgaaatgaaggctttcagacttgagacaacaggcagcataggacagtgatctctgagtgaagggaaacaaatgaggtattcctggagagttccagtctgcagaacaagaagaacctggasagcccagcagtctacctgaattgaggagatagagttcaaaatatggggaaccaaggcagagtcccagaaaagagaaaaatacaacaatgtgcagtgagttc

SEQ ID NO: 533954 - DNA, 687 bp, Homo sapiens
gctgctaatttggtgaacctggatatatataccaagcctatttttctccaaarctaatatatatgaccttgctaatgaggccctaggctgaacgttttggtaaattgctcaagaacaaaccaaataggtatattcttcaatacccctttgtaccttattctaaccagtgcatcattcaagatacatatacaggttgagcatccctgatttgaaaatctaaaatccttaagtttttgagtgaccacataatgccacaagtggaaaattccacacctaacctcatgtgaggggtcatatattttatttataatattacataaaattaccttcaggctatgtgtataacatatgtatcaaacataaatgaattttgtgtttagactagggttccatccccaagatatctcattacatgtatataaatcccaaattgaaacacttctggatccaagcatgccagataagggatactcatcctgtgtaaagaaaggagtacaatgactctagcatcctggatttgggttatacatttatctactaacgaataatattcagagacatgttctggaatttcaattttagcacacattttaccctcttgaagtatcctagaggagaaatattaccagaaggcaattttctcttgcaattattttctgcaactatttttatgtcagtttaattctt

SEQ ID NO: 533955 - DNA, 519 bp, Homo sapiens
ttgggcaagtcacctgacctttctgtgttaaatggggataatagcaatacttatcttgtgggttgttcggagaataacctgtaataatatgtataacaggcttcaaagtgcctggcacacagaaagcactatatgaggactagctatcattagtctgtacctagaagctgcctaagtacaactatttygctaggaaaacactgatcctaaggaagagctgaacacaataagaacgtgaaaactgagtagaataaatccaccctacttccaaaacaatgaaataacctatttagtgatggcgagttgaaacattgccattgtttgaaaaaaaattgcacatctatgttcatatttgatgaagactgaatttgacattaatatttgggaacatgtatcttcacaggaatttattgtaaacaattttagcttttaaatctggtggtaaaaaagttgatattttcctctttttaaaatgcatcatttggcatgtatggaaattactatatattagcttcacct

SEQ ID NO: 533956 - DNA, 603 bp, Homo sapiens
atttgatgaagactgaatttgacattaatatttgggaacatgtatcttcacaggaatttattgtaaacaattttagcttttaaatctggtggtaaaaaagttgatattttcctctttttaaaatgcatcatttggcatgtatggaaattaytatatattagcttcacctttgtatatgtcccagtaggtcatggttctttcaatgtaatattcatcacatttttgtaagtaaattgttttccatttaacttttcagtaaactgaacagttactgaagtttgttacggaaatttgagtctgaatttctgatttatgtagccaagcctcttttgaacacaaattactctatagttcaaaggaaatgcattcttttaaaaaaagaacaacatcaagtcagcaggtgaagtaatgctatctttttgaaataaacataacctacaactaaaagaagcattaacattataatacctgaataaagacatatatgccatccagtcaacatttatgaaaactggttcactacacaactagttataattctgtgggagaattagtgaccctgtttgattttcaaaatagcccttgacctaaattcactttttt

SEQ ID NO: 533957 - DNA, 638 bp, Homo sapiens
taatagccctactcatctaccagatgtcatccccaactgtaaagcattgctggagaaagccattcaaccagagttgctacttctacaagcttatgatcttcagcctcagctggcattcaaatgctgccaagcagtgtttcttggcagctctgattagatatctctccttctctttcagcagctatttcaaattttcaccactcttaagccttctatatctcttcctcatcccaccatcactgatacctcctactccacacacacgtgctcaacagatgaccttttctgtgttttactaggaaaataaatttaaatgcaatgaagtaggaatttctaagctcctcacttgccaccatcataaatttatatgtaaacccacttatttttatgtcttttcctcttggagcagtaaaaagamgtccttccctatgtgcaaagctaatcttttcatctatactctggattccctcctaactctgtgatatcactcaaccaattaatttctctcaatttaaaattttccatcttccctctctactacctctttccttttagcaaattttcttagagttctactagttaaaagcctcttttaatccatctcccctgacattcttctccatctccctcgttctttc

SEQ ID NO: 533958 - DNA, 627 bp, Homo sapiens
cacaggtcccagggctggggcaggtccctgggcagcacctgtctgttctgacttcagtttctggaatcagagtcttgaggctgtgagaactggcagccacagccgagggccagcaggggcatcccacgctttttgtgagcgaggcctggggagccctgctcccggctggcatctcacctggcgtgtgagcgcacctccagtgccaacctagcccaggtgctggccagggggcaggaagctgatgacagtgtctctcctccatcgtaacagtggctgtggcagaaagaagcccccaggcccaagcacagagsggctggcaggattctggagccggcctggaggcgcctgtgcctccctggagcggcagggctggcagccttggttcctgacagcgccaggggaacccacagaggctcctcctgctcctcctggttctgtgtgtgcccaccccaccgggctccagctccttgcacccaggggaggaggaatgggggtcacctcccgtcggagtccctggcttgggagccactgtggtcagtcaggaagctttgagggactgctgcgttggctttaaaactcaggctccctctgatgggacagagaaggagacacctggagacccccatt

SEQ ID NO: 533959 - DNA, 562 bp, Homo sapiens
ctgaaagccctgatttgagcactgcgcaacctacgtgtgtaataaaattgcacatataactcatacatttacacaaatttttgaaaagcacttataataatcaaatctctacctcccccttctcctcctagacctcccctgtttatgggaaggtgaagtaatacttttcctaataccacataatttcctagcaaaacttttacatattccataagctggaaagaacaaatacaaaacttatacctaatataaatgcttaagaaaagaatatcatttatcagtgaaaactagcaatgtttatyatgtaaaaggttttatcagtggatttttctgtggttatattgtagttactattttttcttatactggaaatctaaatagtcataatcctaaaaaagatgactttataaagtagtttatgcagatgtcccaattctaacaatgattaaaaatattttttcaaaaaataaactatgatttagcaagcattattttattacaatcatactcttaaaacactttaattagacattttagctatgtgtagactacatcattacaa

SEQ ID NO: 533960 - DNA, 562 bp, Homo sapiens
ctgaaagccctgatttgagcactgcgcaacctacgtgtgtaataaaattgcacatataactcatacatttacacaaatttttgaaaagcacttataataatcaaatctctacctcccccttctcctcctagacctcccctgtttatgggaaggtgaagtaatacttttcctaataccacataatttcctagcaaaacttttacatattccataagctggaaagaacaaatacaaaacttatacctaatataaatgcttaagaaaagaatatcatttatcagtgaaaactagcaatgtttatcatgtaaaakgttttatcagtggatttttctgtggttatattgtagttactattttttcttatactggaaatctaaatagtcataatcctaaaaaagatgactttataaagtagtttatgcagatgtcccaattctaacaatgattaaaaatattttttcaaaaaataaactatgatttagcaagcattattttattacaatcatactcttaaaacactttaattagacattttagctatgtgtagactacatcattacaa

SEQ ID NO: 533961 - DNA, 606 bp, Homo sapiens
gggaggtggacgctgcagtgagctgtgattgtgtcactacactccagcctggacaactagaatgagacagggcaaccctgtctcaaarcaaacaaacaaacaaaaacagtagaaaagaatgtttccttctgggacttaaaatataaatgaaaatgtgttattttaagaaataatatacagaaatgcaattttaaaactaaaaacagaagatcacgataaaacttcatagtggtaggatgcaatattgctagaggaaaaacaagaattagaacaggatagataaatttgtctattcaacaaatgcataccacctgctaactctgccatgcatttcgaagcctttattttaaagaatctctctgatagtccttaactgttgagttggactagaacatttctaagatttcttccagctttaaagttctagagtaaaccacaaatgagaaaacacaagtaatttactcatcaatgcttctcaggaaggttcaattcctagtcatccagggaagaacttgcctgttatccatgttgctaccactagatggcaaaattagcctggtgatggcaaatctaacgcaggtatttaaaatgtttacacttactcag

SEQ ID NO: 533962 - DNA, 459 bp, Homo sapiens
atataaatgaaaatgtgttattttaagaaataatatacagaaatgcaattttaaaactaaaaacagaagatcacgataaaacttcatagtggtaggatgcaatattgctagaggaaaaacaagaattagaacaggatagataaatttgtctattcaacaaatgcataccacctgctaactcygccatgcatttcgaagcctttattttaaagaatctctctgatagtccttaactgttgagttggactagaacatttctaagatttcttccagctttaaagttctagagtaaaccacaaatgagaaaacacaagtaatttactcatcaatgcttctcaggaaggttcaattcctagtcatccagggaagaacttgcctgttatccatgttgctaccactagatggcaaaattagcctggtgatggcaaatctaacgcaggtatttaaaatgtttacact

SEQ ID NO: 533963 - DNA, 683 bp, Homo sapiens
gccaagttagtcttttagctggcacagtggcttaaattctcagctacagcctgcctcatcaaccaatcaggaagtayaatggctatatatttttaaagcgtttctcctggcaggaaccctcttgatgattcaaagaagtcttgggctgcaacagctacaactactgtggcccccagactcttcctcatcaatgtgaccaagctttgaggactgtcctattctgtattctgcaagaataaggctggaaaaatagagaataatatttgtaaaagcaaaataaaaacaaacacacaaatcctttcacttgggttttagaaaatagcaaggaatagataaaataaacttagggattgtgtctaaacatgctatctgaatattatcccaacatgtaaccttcatatacataataaagcaaataaatattatatcaatatctcaattccaaaaatgcagtaaaatctgaatcatttcttatagcaaaaagtatcaatgtttagacacactaattgttatttaaaatgataaacagatatataaaaatcataatcttcatgtgaacttaattcaaaaaataattgagctgctagaagacataaaattagtacaacataattgttaccatcaggaaattacagatcagtgagagcacatgaagaggttattttcatacatgaggtaagtgt

SEQ ID NO: 533964 - DNA, 639 bp, Homo sapiens
tgtttctcaattgccttcagtttaaaataatactcatgccaaagttacatattttggggtggcatattctgatcccctttacrttctaagagaacacatgaggatccaaaaaggaatgagttatgtaatgggtaatcctgacatatagaacatttgattcaaacctcagaattaagaagcagaggggaaaactaatgaccttgaactgagagtacagaacacaaaaaccagaggtgtgtcagggatttctacattgtatgccatggaagagaaatcagaaactctgaatgttaaagtcaaaagggaaggcagaaagccttccccttcaacttgtcagctttaatgataaagaaatacgggtgtagaaaagttaagtgatttgtccaccatgacatagatagatagataggtaggtaggtagctagatagatagatagatagatagatagatagatagatagatagatagatggaataaatgattatagggcaagataccagttggaaggaacagaaatctcaactcagagtggcttaaacagtaagaagattgctatttcttagaagttgctggagaatagcatcagggtgattaattcagtgattccacaaggtcatcaaggatcacattccaccctt

SEQ ID NO: 533965 - DNA, 643 bp, Homo sapiens
acagactgaaaatgtgttcgccagatgaaaaacttacatatgctgagggccaacttttcacatattgggttctcacagggctgactgagggacttgagtacatgtggatcttgctaaatttgggaggtcctggaaccaataccccatatatatctagggattaatttactatgactagcagaagggctaacaataggctactgagtttgagataataggaaggaaaaagtcgcattgatctttcaaagaagtatgagatgcagagctactgaagagttaaaataatttaatcttacgcttctataagatttttaaaacgttattattagagagtttagggcaggttacaaggagtgtcttataggggcaagaagacartttaagagagatctttgcagtagcccaagtaggaaaagatggatttaagcagtaattgtggtcactcagaactggcaacaaatgtgagaactaggagacatcactgacagaatacagcatcagatgaaacgtggagtttgagaaagaggcaggtcgtgtttaacattaacattattttcatgttgctattaataaaaacaaaaattatagaagcataatgagatggtaatgggggaaacctaagtacatatttttattagatttg

SEQ ID NO: 533966 - DNA, 504 bp, Homo sapiens
tgctgttctgtaagattcagacatttcttactcactagttgcctcatttcaacgtgcactgttaaagaaatcagcctgttagagaagtgaggaaataccctaaaagaaacctgcacacctgagcatctctgtgcttggaaaagtcacttcccctttgagggtctcaatttgcccatcagtaaagtgtgaggcatggactaggtggtttctaagttctttccagctttaataatatataaatcattaacagtatatctaacaatatataaatctaacaatatgtaaatcaytaaaatggtgagaattttaaattctgatgtagctttttaataattaggaaaatcacttcagtctagaatacaacccaccaacactgtgttaattccatcagtctgatcaggtggaagttatctagaaactttattttcatgattgggtaagagttttggaggaagtagtacattataaatacagtaatatctaaatgtcaatatcagcaattat

SEQ ID NO: 533967 - DNA, 577 bp, Homo sapiens
tcttcctcagattcgtgatgccatctctgttgtttccatggctctgtgtctagaagctctgctgttttccgctagtaaagtcatctatccctgcatcaataccaacttccttacttacatagctgtaaaatgtcttgatactttcccatcactgctttattattctttaagaatgccttggtcattcttgaggtttttaatctttcaaatgagttttagaatcagctagtcaagttctgataaaaaaaattgtggtttttgataggtttgggattttgacagaaatattgaatcagcagctctacttggagaaagatgactttcttacaatattgaatcttgctagctgtgaacataataggctatccatttatttaagtctcattaatattttatagtttcayaattttcttaaaagtcttccacattttttgttagttttattcctaggtatcttataaggttttttttgcaatttaattttttttttttgcaaaatataattgtaaaaaattgtattttctatgttagcgtatgttagaatatttatcttgtattcagttgctctgaaaaactc

SEQ ID NO: 533968 - DNA, 577 bp, Homo sapiens
tcttcctcagattcgtgatgccatctctgttgtttccatggctctgtgtctagaagctctgctgttttccgctagtaaagtcatctatccctgcatcaataccaacttccttacttacatagctgtaaaatgtcttgatactttcccatcactgctttattattctttaagaatgccttggtcattcttgaggtttttaatctttcaaatgagttttagaatcagctagtcaagttctgataaaaaaaattgtggtttttgataggtttgggattttgacagaaatattgaatcagcagctctacttggagaaagatgactttcttacaatattgaatcttgctagctgtgaacataataggctatccatttatttaagtctcattaatattttatagtttcataattttcttaaaagtcttccacattttttgttagttttattcctaggtatcttataaggttttttttgcaatttaattttttttttttgcaaaatataattgtaaaaaattgtattttctatgttagcgyatgttagaatatttatcttgtattcagttgctctgaaaaactc

SEQ ID NO: 533969 - DNA, 604 bp, Homo sapiens
tgtaggtagatttggatcttcaaatttggcacacaaaaatctttttatctttttttcaacaaaacattggtctttatgcctcttattcatgactagaggtctttagtgtctgtctctttctcatwcatatgtataggcctcactgagaaaattttttaaaagtagtgattatttgattaaacattagactgaatagattaatttgttcataaacataatgaatattattatttttctctgcagtatactgtgtccattttaatgtactgtcacttttctcttaattcttatctttccactgttgaggatgacagctttggttctacaaataaaatttatcagattgttgaatcaagaatcaggaaggatgaccattccttccatatggtaattttagttattcgcagtcagcctaaaatattttttactcactgtggaagcacacaacccgaaaccaagtggggcaagtgagaaaagagtttgatcacatacctttggtcaattttcatcacagaaaacttcagaaatatagaaaacttcttaaaaattttcttttccatgcatgtcaatggtttgagaggagagtggtacgaaatagggtccc

SEQ ID NO: 533970 - DNA, 608 bp, Homo sapiens
cttgcagatggctcccttattcctctgtccttataaggagagagagagagagagacagagagagatctttcccttattataaggcaacagtcttatcagattaggaccccaaccttagtctttactaaggcttaattgtctcttaaagaactcttctccagacatagtcayattgggggttaaggcctctacatattaatttggagttggggacacaattcagttagcaaggacacagaaaatatttttagagagttacttacacagcaactatttccaaaagaatctgagatagctaaatagtgatttggggttacttgtaaaataacccttatttcatgccatttcagaaaactgaataaaatgtctcacaaagtgatagaaaattaaactcatccatttaatggtatctggttaagctggaacatctgggtttgatgtttaaaataagtttgaaaccataaaatgttttattttttatgtcaattctgtttcatttcttttattggagaaagagcttaggcaacaacatctgtttccatgagcattgggagaggactgcatattgacaaagcatgtagtcataaacagacaagtaagaggacaaa

SEQ ID NO: 533971 - DNA, 608 bp, Homo sapiens
cttgcagatggctcccttattcctctgtccttataaggagagagagagagagagacagagagagatctttcccttattataaggcaacagtcttatcagattaggaccccaaccttagtctttactaaggcttaattgtctcttaaagaactcttctccagacatagtcatattgggggttaaggcctctacatattaatttggagttggggacacaattcagttagcaaggacacagaaaatatttttagagagttacttacacarcaactatttccaaaagaatctgagatagctaaatagtgatttggggttacttgtaaaataacccttatttcatgccatttcagaaaactgaataaaatgtctcacaaagtgatagaaaattaaactcatccatttaatggtatctggttaagctggaacatctgggtttgatgtttaaaataagtttgaaaccataaaatgttttattttttatgtcaattctgtttcatttcttttattggagaaagagcttaggcaacaacatctgtttccatgagcattgggagaggactgcatattgacaaagcatgtagtcataaacagacaagtaagaggacaaa

SEQ ID NO: 533972 - DNA, 649 bp, Homo sapiens
  misc_feature (1)...(649): n = A,T,C or G
gtatgctggaaatctctaatcaaggaatagaattagtatgtaatatttccacaacacagaacctttaggcatgaggttctacacatgcaagtggtacaaaatgatgggatcttgcatttccctctcagatccttgctccactgccctgggactcaggatctaaacgtgtcaattcaacacctgtgtggtctttgatgccccccctcctcccccgcagtggtgactgggcttctctaatcagattcttgaaacttccctcttcacctcattatacatatcggttcacacaccttgtttctgttttgttttctacagcaacaaccgactggtgtcccaggccttttgggaggcctgaagcatatgctcctcttgtctggagccctgagtcctgggaaggcttccagacactgctggcctacctgcacttcctagagctgcttccgctttgggaccacttgttagaatcgagagcagaattttttcaaatctccttggactctgtgtcttagtgactacccrgacaagaacaacaataggtaaaactaatgagctcctaagcatttttttcataaattaattcattcttctatgtattttacagataagaaaagtgagacctagtaaggttatataacttgtctnttgttac

SEQ ID NO: 533973 - DNA, 649 bp, Homo sapiens
  misc_feature (1)...(649): n = A,T,C or G
gtatgctggaaatctctaatcaaggaatagaattagtatgtaatatttccacaacacagaacctttaggcatgaggttctacacatgcaagtggtacaaaatgatgggatcttgcatttccctctcagatccttgctccactgccctgggactcaggatctaaacgtgtcaattcaacacctgtgtggtctttgatgccccccctcctcccccgcagtggtgactgggcttctctaatcagattcttgaaacttccctcttcacctcattatacatatcggttcacacaccttgtttctgttttgttttctacagcaacaaccgactggtgtcccaggccttttgggaggcctgaagcatatgctcctcttgtctggagccctgagtcctgggaaggcttccagacactgctggcctacctgcacttcctagagctgcttccgctttgggaccacttgttagaatcgagagcagaattttttcaaatctccttggactctgtgtcttagtgactacccagacaagaacaacaataggtaaaactaatgagctcctaagcatttttttcataaattaattcattcttstatgtattttacagataagaaaagtgagacctagtaaggttatataacttgtctnttgttac

SEQ ID NO: 533974 - DNA, 373 bp, Homo sapiens
tcttgaactcatctgccaatatatcttaatgcttttctatagytctttttaacatttcctattccagggtcccatcacctctcatttatattgtttatataacctataaacaagttcctccacatcaactcttgcccctgttcaatcagttctccttaaagcaatcatagtgatcatttgccttttcaaaaacacatctcatcatatcactccactttctctcctgctcagaactctttggtagtttccaaatatcctcaaaataaaggtcaaaatccttaacatggtttagaaactaaggcataatcttaatctgctgtaaaacttctctcttccaccctcctaccctcccctcctctccttttccctcccc

SEQ ID NO: 533975 - DNA, 172 bp, Homo sapiens
ttggttatcagcttgattcctgaaacagttgttgaataygtaactatagccacatcttaaattatcacagccttatagcttaaacccgtagtattgacaggtggtagagtcttccagcaaaccctaatctgttgtgctgacagaattgctacataaccctcatatttgctgg

SEQ ID NO: 533976 - DNA, 605 bp, Homo sapiens
tgggcatgagatgtaactctgagtctaataagaatttgctttctgtctcttgatgccttytctacatgcctacttcattcttctctcttcattacattctttgtttttccaagaccacatagccaaagaaatttgacagtttctgaattacaccaattacaaaaacacaaacaaactgaaagataattggtttgagttaggaataggttcctgctatgtctaatccactgtgtaagtggattagagggtggaagtacactatttttaataaaagaaaagataaaagaagttcttagagaagttaaggcaggtagtggttattgaaaaggcaaaacaaggtatatacaccattttattatcatggagcttctttcatgatcccttgccttgctgttccctctttagtactgtcttctaggcaatccatggtccccaaccaaaagcctatcttctatatttttaaacaaaaaataactagatctgaaaatatccatttgtttgatcttgtgtgtttcttctttagaaatcgtattttattcaggcaaggtgtccatgaagatattaaaacttcactggtacgcctccatagtcttgactcagtgatt

SEQ ID NO: 533977 - DNA, 605 bp, Homo sapiens
tgggcatgagatgtaactctgagtctaataagaatttgctttctgtctcttgatgccttttctacatgcctacttcattcttctctcttcattacattctttgtttttccaagaccacatagccaaagaaatttgacagtttctgaattacaccaattacaaaaacacaaacaaactgaaagataattggtttgagttaggaataggttcctgctatgtctaatccactgtgtaagtggattagagggtggaagtacactatttttaataaaagaaaagataaaagaagttcttagagaagttaaggcaggtagtggttattgaaaaggcaaaacaaggtatatacaycattttattatcatggagcttctttcatgatcccttgccttgctgttccctctttagtactgtcttctaggcaatccatggtccccaaccaaaagcctatcttctatatttttaaacaaaaaataactagatctgaaaatatccatttgtttgatcttgtgtgtttcttctttagaaatcgtattttattcaggcaaggtgtccatgaagatattaaaacttcactggtacgcctccatagtcttgactcagtgatt

SEQ ID NO: 533978 - DNA, 515 bp, Homo sapiens
actttattgctatgttggttgcaactcagttaaaattgctccaaatacaaattgtaatgcctttttaaatcaaatccaaattttaatgcttttaaaatactcctttgtttgtgttgttattgttctttttgctcctaccaaaatttattcaaaagctacagctttcaaatagcagttttctcacatacctaggaaaytggcatttctcatactgactatatactttcatttcctatttttaaggattctatgtgtaaaagatgaaggctcttttaacttcattttctatatgcaatagtaatctaaaatgtatgaaagacaatttggcaaggttattttattaagacatccttttgaaggggcaagttggacttccatcttaagcaatcatattaattagttttctagtgaatattgttctattatgtataatacattattgatccatattatgtaccaaatgtgtgttgacagtgaaaactgtatagaaacatgagtattactacaattattag

SEQ ID NO: 533979 - DNA, 515 bp, Homo sapiens
actttattgctatgttggttgcaactcagttaaaattgctccaaatacaaattgtaatgcctttttaaatcaaatccaaattttaatgcttttaaaatactcctttgtttgtgttgttattgttctttttgctcctaccaaaatttattcaaaagctacagctttcaaatagcagttttctcacatacctaggaaactkgcatttctcatactgactatatactttcatttcctatttttaaggattctatgtgtaaaagatgaaggctcttttaacttcattttctatatgcaatagtaatctaaaatgtatgaaagacaatttggcaaggttattttattaagacatccttttgaaggggcaagttggacttccatcttaagcaatcatattaattagttttctagtgaatattgttctattatgtataatacattattgatccatattatgtaccaaatgtgtgttgacagtgaaaactgtatagaaacatgagtattactacaattattag

SEQ ID NO: 533980 - DNA, 420 bp, Homo sapiens
ttgctctattgttttcaacactgtcctggaccatatgttgctcttagtttgctcttgttaaatttgggttccttctagagggctgtctttgaggctttgagtttgctttttatgttgccattctgaaagtcacctcctagaaaacataaatttaaaaatcatgactgtggaaaatctgtgtatgtatttgtatgagtgtttctggtagataggaagacatctaattgccctggatgtctcttcttaggcatctctttcccttgctctctccagtaaactttcagttggtctrtggtttagcttgttgctgtcatagaactgctaccctcttcttaattggttatcattgaatttccattctttttgagggtgatcttaggcttgcactcacccaaactctgttctgaacaaagtgagttt

SEQ ID NO: 533981 - DNA, 631 bp, Homo sapiens
tgggggtcctggcctggaagctggtggggagggagctagggagcaagacacatgggggaggggaggggggatcgcatcagcgaggctggcatcagggactcctgagttccgctcctagttttgccaaaggttagcctgggtgccccagtatgtcttcatcaggaactgcagagccagaaataccatctatgcctctgtcccaggaagcagccctacctctgcctgaagagagagactcccccgtcaacagccagctttctgccttctagtcacgtctctcaagtaggggtaaagagaggggtattcttgctttttttgtagtggggagcgtctcactgtattgcccaggctgttctctaactcctagcctcaagtgatcctcctgcctgtagctcccaaagcacaacaattacaggtgtgagctgccacacccagcagcttcttactctttaaacgccagacaaaattcttctggagttcctggaggggattgtctctttgaactgaaaatctttcccaggacacctttatcaatccatcaggctctttctggattggagacagaagaaactgcagttcaatgaccccytttgcaagagccccctctgcagcccttgaggggagcgaaagc

SEQ ID NO: 533982 - DNA, 488 bp, Homo sapiens
acttgaactagctcactgaatgcaagaactcttctgagagtaactactgtgataaatccagtctgatccaaaatcataatccccagacccctccttgactaagcattctcaaaatccaatcttacaaataatttccgggctttaagtatagaaattaacaaattcccataaatccttctgggactattagcttcactmtttgaattctgtatttcagtatctgtatatattcctgattttggctacaacgttctccatacaaagattatttgatgtctcttgcaagagaagatggattctttctataaggggatatatcacaaggatttgagggatcagagttctccaactgatcttattttcccatatattgcactctaatgcttccaattgttggggctatattagttctagagctgtgcctgaactttacatgagagagctaaaaaggttgtaaatttgactgacttaattcagcacagtacaaa

SEQ ID NO: 533983 - DNA, 488 bp, Homo sapiens
acttgaactagctcactgaatgcaagaactcttctgagagtaactactgtgataaatccagtctgatccaaaatcataatccccagacccctccttgactaagcattctcaaaatccaatcttacaaataatttccgggctttaagtatagaaattaacaaattcccataaatccttctgggactattagcttcactatttgaattctgtatttcagtatctgtatatattcctgattttggctacaasgttctccatacaaagattatttgatgtctcttgcaagagaagatggattctttctataaggggatatatcacaaggatttgagggatcagagttctccaactgatcttattttcccatatattgcactctaatgcttccaattgttggggctatattagttctagagctgtgcctgaactttacatgagagagctaaaaaggttgtaaatttgactgacttaattcagcacagtacaaa

SEQ ID NO: 533984 - DNA, 560 bp, Homo sapiens
tgtggagcccagaaggttcagtgtggaagcactggtactggaacatggccagggacagccattccccctaggttctacttcctctcatagagactttagccctaggggatttctagagggcagtcttgcccatcagatgagkctggtttcacttcagcacaccttggtctctcctggggcccaagcctggccaagcctgcttgccaggcactctttggtgccctggcagcccataccatagcttctgtgccagtggaccatgcctgactggtggagagctccagtgaggcagcccctacagccatgcagcagcctgcccactccttccccatactgcagctttccacgggctcacaacatcccaacattgctttgttggcatgtcttcaggtggatgggttttgctttttttacctgccagcacacagaagagcagtctgccttcacctcctcatgaccactgacattgcagatgaagccttggtgggcatagagccagcaaaccccaccctcactagtgcacagtccttgtgctaacactgagcaaagaacagtgatcc

SEQ ID NO: 533985 - DNA, 560 bp, Homo sapiens
tgtggagcccagaaggttcagtgtggaagcactggtactggaacatggccagggacagccattccccctaggttctacttcctctcatagagactttagccctaggggatttctagagggcagtcttgcccatcagatgaggctggtttcacttcagcacaccttggtctctcctggggcccaagcctggccaagcctgcttgccaggcactctttggtgccctggcagcccataccatagcttctgtgccagtggaccatgcctgactggtggagagctccagtgaggcagcccctacagccatgcagcagcctgcccactccytccccatactgcagctttccacgggctcacaacatcccaacattgctttgttggcatgtcttcaggtggatgggttttgctttttttacctgccagcacacagaagagcagtctgccttcacctcctcatgaccactgacattgcagatgaagccttggtgggcatagagccagcaaaccccaccctcactagtgcacagtccttgtgctaacactgagcaaagaacagtgatcc

SEQ ID NO: 533986 - DNA, 634 bp, Homo sapiens
agatatttgttgcctatattatacattatcaagtaaattttatactgggaatgtaagatatagaactatatcaaaagtttgatcaatgtaatctattaaatcagtagcttaaaggctataacctgtacctttcaacagaatatacaatttaacattcattcatgattaagataacaagcaaacaaaattaaacaaaatttctaactatatcagaatagccaggaacatccttaattttataaaagaacattaacatatgtatggtaaaactcacattgccattaaagtcaagaagaagctaaggaagccctccttcccctttatgacacggtattagaaatcagcattgtagtaagatatataaactgaaaaagaagaaataaaatctgtattatttaaagttaatgtgagtatcttcatgggaratcaatataaaaataaactagaagaatataagaaaattttatcatgattgttggaaacataactaatatgcagtaattaatggccttatgatacaccagctataagaaatttttagaatcgtgtagaatgtatttgattcttaaatgccaaaaattccatatgaaacattaaattttaacagattttcaatatatttgattttttttaa

SEQ ID NO: 533987 - DNA, 379 bp, Homo sapiens
gattttttaatattaaaaggctatcatgctgctttgtatacaggctttctttactgatatgtaatataatacacagacaaatatacaaatcctaagccatcaactcattgaatttttattcrttgtttttaatacctgcattgtgttccattgttaggctatgtcacaacatatttaattaagcccctattgatgaatattaatttactctatttgccagttcattccagtccaacatttattgagtgtctacttacgggccaggcactcttgtattcatcaagatcaccacattatctgtatcagttatttattgccacaataaaactgcataacaaatcactccaaaatgtagcaccttaaaactacaactacttat

SEQ ID NO: 533988 - DNA, 431 bp, Homo sapiens
aacttctcatacagctgatgtttgactctttcataaaaactgttttattaaaacaaattctaggccaagcatggtggttcatgcctgtaatcccagaattttgggaggctaaggcgggcagatcacctgaggtcaggagtttgataccagcctggtcagcatagtgaaaccccgtctctaccaaaaatacaaaaatttagtgggatgtggtggcaygagccgagcctgtggttccagctactcaggaggctgaggtgggagaatcgcttgagcctgggaggcagaggttgcagtgagccaagaacatgctactatactccagcctgggcaacacagtgagaccctgtctccaaaaaaagaaagaaaaaggaaggaaggaaggaaggaaggaaggaaggaaggaaggaaggatcaactatatacaaacaacc

SEQ ID NO: 533989 - DNA, 431 bp, Homo sapiens
aacttctcatacagctgatgtttgactctttcataaaaactgttttattaaaacaaattctaggccaagcatggtggttcatgcctgtaatcccagaattttgggaggctaaggcgggcagatcacctgaggtcaggagtttgataccagcctggtcagcatagtgaaaccccgtctctaccaaaaatacaaaaatttagtgggatgtggtggcacgagccgagcctgtggttccagctactcaggaggctgaggtgggagaatcgcttgagcctgggaggcagaggttgcagtgagccaagaacatgcyactatactccagcctgggcaacacagtgagaccctgtctccaaaaaaagaaagaaaaaggaaggaaggaaggaaggaaggaaggaaggaaggaaggaaggatcaactatatacaaacaacc

SEQ ID NO: 533990 - DNA, 668 bp, Homo sapiens
ttagacaatgctgctacaaacattctagtgattatcttttggtaaacacccatacacatttttgttggatatacaatgtccggatcacaagttaagaatatattcaaattttgtagattctgtcaaatagtttccaaaatggtcctactagtacatactctctcaccaccagggtatgacaatctgttcatttgcagcttagataacacttcgtattttctcttttctattttaacaattgtgataagcgtgcaatatatcattttgtggttttgatttgtattgttctgatataacaacgaaggtgttgcagaatctcagctacagaaaacaaataatagatgttatattcttgggtaagatggggaaatttcagaggaagggtaaaacagattatgggagacttaacaccctcaacaatatcagcagtaagtgggaagggagtgtgggtattacgagagaatattttttggagagctcttagctctccatagagggattattaacccctcacactaacatcatgtcaaacttggcaaaagattctgacaggacaagtcatagagtttttacaatctcttgtattttgyggggagacacagtaaactggtgtgtaactatggcatgaaaaatcttaaatatgatgggtaggcagaataactttgata

SEQ ID NO: 533991 - DNA, 517 bp, Homo sapiens
tcttaccagacaccagggtgtagaattggagctagaacccagatctcccaatcccacccagggctctgtccctcatgccaccagattgcaacactgatttttccatctggtgtcatatttctagagytatcattcacagtctcgcttctgtgtatttcacagaccttggttttattgcataattgcacagaagagcttaattcattaccattctgagaaaccagatttgactgtcattgtggcaggttgtattgaattactaaaaacattcagaatttacttttcaactgattcacaagagtcacatcgaagactaaactcttgtgtttctaaccttacacctaccaaggaataaattatgtgatttttgcatttgctaaaattctgtttactcacctgttctgttagggcacgtgtaacatgggtgacactgccttctctgtacagccctgctcacatttcttttgtgttatggacttcattatatgaccagatataatttttttcctgtagaaat

SEQ ID NO: 533992 - DNA, 517 bp, Homo sapiens
tcttaccagacaccagggtgtagaattggagctagaacccagatctcccaatcccacccagggctctgtccctcatgccaccagattgcaacactgatttttccatctggtgtcatatttctagagctatcattcacagtctcgcttctgtgtatttcacaraccttggttttattgcataattgcacagaagagcttaattcattaccattctgagaaaccagatttgactgtcattgtggcaggttgtattgaattactaaaaacattcagaatttacttttcaactgattcacaagagtcacatcgaagactaaactcttgtgtttctaaccttacacctaccaaggaataaattatgtgatttttgcatttgctaaaattctgtttactcacctgttctgttagggcacgtgtaacatgggtgacactgccttctctgtacagccctgctcacatttcttttgtgttatggacttcattatatgaccagatataatttttttcctgtagaaat

SEQ ID NO: 533993 - DNA, 464 bp, Homo sapiens
gtctcttaccagacaccagggtgtagaattggagctagaacccagatctcccaatcccacccagggctctgtccctcatgccaccagattgcaacactgatttttccatctggtgtcatatttctagagctatcattcacagtctcgcttctgtgtatttcacagaccttggttttattgcataattgcacagaagagcttaattcattaccattctgagaaaccagatttgactgtcattgtggcaggttgtatygaattactaaaaacattcagaatttacttttcaactgattcacaagagtcacatcgaagactaaactcttgtgtttctaaccttacacctaccaaggaataaattatgtgatttttgcatttgctaaaattctgtttactcacctgttctgttagggcacgtgtaacatgggtgacactgccttctctgtacagccctgctcacattt

SEQ ID NO: 533994 - DNA, 630 bp, Homo sapiens
ctcttaccagacaccagggtgtagaattggagctagaacccagatctcccaatcccacccagggctctgtccctcatgccaccagattgcaacactgatttttccatctggtgtcatatttctagagctatcattcacagtctcgcttctgtgtatttcacagaccttggttttattgcataattgcacagaagagcttaattcattaccattctgagaaaccagatttgactgtcattgtggcaggttgtattgaattactaaaaacattcagaatttacttttcaactgattcacaagagtcacatcgaagactaaactcttstgtttctaaccttacacctaccaaggaataaattatgtgatttttgcatttgctaaaattctgtttactcacctgttctgttagggcacgtgtaacatgggtgacactgccttctctgtacagccctgctcacatttcttttgtgttatggacttcattatatgaccagatataatttttttcctgtagaaatgtatactataatagtagaaatgttaataccagacaaaatatttgttaatatctacagatagatgcttgcagaaaactggaaattggttaagtatgaggtcatgagacatttt

SEQ ID NO: 533995 - DNA, 430 bp, Homo sapiens
tatattgggctgtagagaagttgagtaatgattgggaagttccatatttaatcactgcttggctgcctagcactgcataggtmatggactctagacaggtatttttggattacaacattcttagggaagaataattacatctcagaattttatcctatccttctattgcccccttaccttaaagaagtggaaatactagtgacattttgccccaaaatgtgaaagtttaccatgacaatattttagtctttccaaactgggagggatttttttgccatttccaacaatatatgtatgtgcttgtgtatgtatacatatacacacatacatatagttgaatacatatgtacatgaatacacatattgttttgtacatatatacacatacatatacataaacacatatatatacattcatatacatgtctat

SEQ ID NO: 533996 - DNA, 584 bp, Homo sapiens
ttgtataactgtgagataacttaatattttataatccaccagatatttaataggtagttaaaatatgaaaggcattatgttagatctaagaccatttcacagcattctgaaatcatattgaatcaaataacttttataatatcattaatattatttttttcaatttagcatctggacctctatctgaatgagcatttacataaagcatgatatacaaaccttaaaaatgtggggctgcccttctgaatcaactgtgatatttgttctttcagtttccctgttgctcctgtggctttccttgagtcatctgcagagaatctttcyctggaatacattggatgcagttgtatcttatgcattggttttatgacaaggggatctgtggtcaaaacaagataagaaatttcaccatggaaaaggaggtgggacaagagctctgttctcttcattgatttcaaatcctgtaaatattttattaaattataccactctcaggacaatcttcgtatctcacagcttttgacaatgagatagattttttagcatgtatattctttacataattcattatattttgtaggatt

SEQ ID NO: 533997 - DNA, 621 bp, Homo sapiens
ccactcattcttaatatccaactatacttagactattctgatatttgtttgatattcaatgatgaaaataaactctttctccaccgagtttgcactttatttgtatccattacttggtaggtagcatattctgctttacattacaattattttcatttctattttatgtctcataaaaaaawacagctttcctctttctttcctctgtgatggctaaacctgtcttttatgtaatattagtttaaatatttgtttaatttaattttattcactgactcttaggatataaggtgatttactgcaattcattacagactttcaataagtgaattaaggtaaggatggttacattaaacatcaaataagataacgtacattaggttacaaaattaaagctctagatattttggaaacatatctactacctttttttccttcagagtgagctcctcctctataatccatatatattcctgggtatcagaaaataatctgtcatttaccatgttattttcttaaatcattgaattacatggggaccttttggaagtcttgtgtttttctttgatatcaatagtctactatgattttttttttattagccggatgtcagtgagttaa

SEQ ID NO: 533998 - DNA, 150 bp, Homo sapiens
agtagacgcccagtgaaatgggttcagctaaaacactaaaggagttgaatggctgcaacctagcagatgcattygtacactgcaggctgggtcttaatgcacactcacaaaactgacagcaagatcaattacctgcagaaggtgaagcag

SEQ ID NO: 533999 - DNA, 541 bp, Homo sapiens
ctcatttgtaatcataactgagtcaggcaatcagataccttggaacactgtcttttcttacctaagtttcttttctacctacatttacttgtgtatgttggcttcagaatttctctagaactgggaagaaacataaaacaattataaatacatagcagaagcytgaagagagataccagagatgaagatgactgtccaaggatcatctacatagagactgaccattttttgcagatgtgaaatgaatgaggtctttaaaaaagataacagcccaagtaaggagaaaagacatttagatcacagggaagtcttgattttcaggatgaaaacttttatattataatgtatgtatgagtgtgtatgcgtgtctgtctggccagggaaagatttcatagaccctcgactagagtaagttactagtagtaactggtagtaaacacactctctgcctcacctatttcaaactgaagttgtaaccttaagaaagaaatgagataacacattgcttattgggaaaagactgcagttgaacttagcagac

SEQ ID NO: 534000 - DNA, 449 bp, Homo sapiens
ttataaacagtagaaaatggaagcccaattggctcacttactgtttytgctttcaatctatagtcccttttgagatctatccttcataaattaaaaaatatatatttttatgcaatattaattatttcttcaggccatggtagagcctacagtagctttattgccaaatgtagtcatttgcaaaggttctcgaaatcattactgcaacctgacaatgctatgctgtccactgaaagctttgaaaaactgaaaaattcccctttgggctcatgaacaatcacagaatatatactcgtaaagcattaaaattcaatatgaccttagagttcatctaatctattatctctcttgcacacgcgcacacacaaacgtgtgcgtgcacacacacaatattttgaagataaggaaatgggcccagagaaacttacaaccacccccaaagcaacgca

SEQ ID NO: 534001 - DNA, 541 bp, Homo sapiens
tctgctcaggcttatcacaaccttcactgtacttcttagataaaacagaatacttgaagttactagttacagagaacaagaatctataaactcataccataaaacagaggaaaatttgtttttcctctccctatgttgagggagtgctggggagagtctccagagcacattcctttgtgtctaggcttcttagatagtattatcaagactttcgctgggtctgggctgtgcccattgctgcctctgggacaagtcagcctattacaggaaagcttatttctttctctttttaatttatttttctttatttctttaatttctcacctcatcacatggcagaagacaagagaagcatgagagccaagtgaaaggggtttccccttataaaacgatgagaacttactcactaccacgagaacagtatgggggaaaaccacagccatgattcaattatatcccaccaggtccctcccacaacttgtgggaattatgrgagatacaattcaagataagatttgagtgtggacagagccaaaccata

SEQ ID NO: 534002 - DNA, 518 bp, Homo sapiens
ctgttactgtttttgtgaaagattctgagctaggatgtgtgtgtgtgtgcacgtgcatgcatgtgtgtgtgtgtttgagtgtgtgtgtgtatttccttagctatactgtaattaataattacaattagaggttctcaacttttactgcacattacaattacttaggaatgacttaggaattatacaaatgcctgggccccaccctagagattctgatgcaatttgtctggattatgcaatttggcatcaatactttttaaatgttttccagtgatttaaatgtgcagcagggttacaaactactgaaggaaaggcagcagagcacacaattcagagggtagacttacctccggggccacctgagctcccattctggttttatcatccaatggctatgygacctcagccaagtgtctacagtgtctgaggctccctcaatcacacaaaacacataacaggctgcttcatgaggctgtgtgacagttaaatgaagcactgtttgtgaagtgcttagcaag

SEQ ID NO: 534003 - DNA, 547 bp, Homo sapiens
tagacacgtacatgtagtatgaagagtgtgaaatctggaaagggagggcctaggtttgaacccctttgctaccagtgagtgagcaaaatggaaatgataatacctaccttggaggtagtctgagaagcaagagaatttatatgaatatgctttgcaaaatgttaaacactaagttatcgttacttttattctttttatttgttgatggtatattgaggagaaaaatctttcattgataccaaacttccatctctgcaacattattaaacctacccaatattaatagcaaatgcctgccaaacacattgttctgtttagtcctcacagcctcatgagataggcacttttattttccaccttttgcagataagggaatgggggtgtagagtggctgagggcacacatctaggaagtgggagagctggaactgcacgtrgtggactcccatgccccaggtcctaaccgctgcattctaccgcctccatttgttcgctcctctgctactgtcataaaattcagttcacttcatttgaccacttaccttgaa

SEQ ID NO: 534004 - DNA, 547 bp, Homo sapiens
tagacacgtacatgtagtatgaagagtgtgaaatctggaaagggagggcctaggtttgaacccctttgctaccagtgagtgagcaaaatggaaatgataatacctaccttggaggtagtctgagaagcaagagaatttatatgaatatgctttgcaaaatgttaaacactaagttatcgttacttttattctttttatttgttgatggtatattgaggagaaaaatctttcattgataccaaacttccatctctgcaacattattaaacctacccaatattaatagcaaatgcctgccaaacacattgttctgtttagtcctcacagcctcatgagataggcacttttattttccaccttttgcagataagggaatgggggtgtagagtggctgagggcacacatctaggaagtgggagagctggaactgcacgtagtggactcccatgccccaggtcctaaccgctgcattctaccgcctccatttgttygctcctctgctactgtcataaaattcagttcacttcatttgaccacttaccttgaa

SEQ ID NO: 534005 - DNA, 616 bp, Homo sapiens
taaatttgaaagtagacctcacctttcaaggacatctttattagagagcatgttgatactctctagtggcttgggccagatggccctataattctccccccttcaggttctataatgcatggagatggaagagaatgaataaagagaacgtcagaaaggctcaagtgtcaaaagagaaatgtaccaattatactgcttcccttagcaaaagtgaacctgggattagcatggcagcgatggaggtcacatctgtctgtgaggagcagagacatcattaaatagcttttgttttatcaatgaataatgtcatctggcttttcttcccttaaactagagctaattgatcagctctctcttcctcaaaaaaggtgttatcttacacattaactgcaaagcactttcaaagtttttcctcgagcagcccacagcaaccaaggaaagaaactccacatgtgcacaggaagttgggatgaccctgaatctaatataagagcatgycatgcaaaattaaactggggggcattctccaaaagaagtggcctgtattcttcaaaacttccaggatctttaaggacaatgaaaggctgcagttctgatgaaaggagacgaaggagac

SEQ ID NO: 534006 - DNA, 614 bp, Homo sapiens
tgcttagagagttctgtaattggtccaaggccattttgtaatactyatacccagacctgcatgattccatgctctcctgttaaccatgaggccatgttttatttggcctgaccaatctcaagcacgacagagcactgactggcttgctatgcatctacaaatactcagtttttttagttcacactcattttcttatgactttaatgatgtggcttagctcttctgttcagggtcaaaacatgcatttaaagggatttcagtgaactaacattaggataaactcactttgacaggtagaaaataaaatcactactattgttatcactgtcattattgtccctgataattatacatgtgatagtaatgatacagaatcatagggttggaaagcccatgaaatgacacttagtgtttctcctactttaaacatttgcaacatcagatgacccactgtccaggttcgtgcaggagtttcccaggatgggatcttcattgctaaaaccctgaaggccctgggcaagcttggacaagctggtcccattataaatgaatgctaacctttcttgcttagtttttgccttctatctttgcaccaaactgggtggaagcagatg

SEQ ID NO: 534007 - DNA, 637 bp, Homo sapiens
ttcaggggaaatagagaaatagagatcatgttttccctgatgagcagagctagcctattctgccagaaccagaactttcccaggttgggaagaccatctggtcaacacgctggtttccaaatgatagaacagaaggatgaaataaatcttgctattctgtagacagcgtgcaagaaacactggaaagaacaaagaggtgtatgcaggccttctctgtgagtggactgggtccttgctagcactggctctttggagacaaggctctattcccatctgttgttggtgaaagttacgtctttgaaatctctacccttaagagtctaacaatacatttctataagtatattaccaacccatatcaaactgacggggtgtcttgtcctttatcttgactaatttataaagaagcatgaatgtgagggagaarggtgtaaaggtcaaccatgttgagttgtatattggatgttgttgtatgtatgaagagttgcaaaataaaaattaagatggtgtcctccgaatgttggacaactttgaccatctgggtcacctaaatatagatgttatactgctagtctctatgggctatgtatagagttttcagtgttgtttcatgtgatgacaatcactttaaagtttg

SEQ ID NO: 534008 - DNA, 508 bp, Homo sapiens
ttattaagctggcaaaaaataaaaaattgcacaatactatattttggagggtctaggaaaccttgggttttgattcactggtggtatgaaaatcgaaacaattttggagggcatttatatatattcagcaaatgaagttaaataattctaagttttaaaaactgcacacatcataaaagatatactaatttaaagatagactaatatgaggtaatattctttgttaattttgagttgtttgttttgtaatttcaacgtaaccaaaaaaataaagctagtaaaacacataagtaaaacattgcatacagaaagtaagatataataaaggcacttgatcataygaaagaaaaaaatggaaagaaggaaacaaaatagatttggaaaagataaaacaagtacaagatattgaaagtgaacctaactctatgtattcaaattagaagtaaatggacataatactataattaaaagggaaaaatcattacagattggattaaaataaacaaga

SEQ ID NO: 534009 - DNA, 563 bp, Homo sapiens
taggctctcttgagcctgcaggtgaggtgtagtggattaaagtacaaaacgcagagaaaccagaggtagggaaatgagcactgatatagctttgcctttgatgtcataaaacattgagtgcttgttatattcttccagcgttctttgttcacatgcatctaatccatctaattgtgttcagaggagtacttacaatagtggtagagagaaaatatgtgtaattttttcaataactcagtcttgttttttcttacatatcattgctcatgagcatgattttttaatacctgaatattagaacaaatggaattatacaagctccaagtttgaattatatcaatacatgcaagtgttatggttaacttattcatgtataaaactagtgaaccaattcaaaatagttaaaagkatatatgaaatgccaaggtcctagagttacaaaaatataactagttttgtattaatttaacctgctgaattgtggtaatgttaaggagaacagaaagctaacacactgtagaaattctctaatctgtctacaagcctctttgctaatatactta

SEQ ID NO: 534010 - DNA, 622 bp, Homo sapiens
tcagcttgaataacctcattgaactatgcaartgaactgtggaaaatatcataaaacgtggctttactggaatttttaaaataatactcaagtgtcatgcaatgatttagttcagaaagagcaattatttttaagaggacaattctctcaaattatatgtattttaaaaagaagaacttgtcctgacaaggcaaagtaaaacaagaaaacaaggggaaaaaaaccctaaaataatatcgttctaaaacatgcataaataaattgaatacaaattattttaatatgtacaatctcatcattgttgttctgtagtgactcaccttctgtataaaacttatctaaagcagattctgcattgtatatataaaaggaaacagcacaaaacaggacaggacttgaattatttaataaatgtgactagaatattatttttatgaaaaaatatgtactaacactattcatcatataattctaggtgggttagagagataaaggaaaaatcaaaccataaaaagagaaggaaatgttgattaatatttatctgatttctagatgtggagagcctgctgagcttaaataaatgaaacctgatttcaaccatagattatttcccgtgactgtc

SEQ ID NO: 534011 - DNA, 587 bp, Homo sapiens
gctgtttttcaggactaaaatcccaatttgataagtatctgactttgatttttttcttgtttttcatgcctttctagcatgagttatgtgttaaaagatctagcttatgaragtgtagtttctatcactctcacagcatgctatgctacattacataatgatactgaggctaaatctagctacaatctgttgtttcaataataacaaaatgcattaagcaaatggactaaaatggaattatagctgcagatgctcaattctcatttctttttattttgcatcttattacaatatcaggcttcagtgttggcctctgatcaggttgatcaactagtaattataagtctgtatttaaatgttcatatctttctgcaaagcagtaaatgtctaagtttctctatttgactctttgaaacattcagtaagtaaactaattcattaccttatcagcaaaattccctactgaatgatactgtgtttggacttttacaaaattattcaagtgcaaattcacttaaaagagatctctcatctaatttattcagctaaaaatgtgggccatttgtgctttattcacagtgataccc

SEQ ID NO: 534012 - DNA, 387 bp, Homo sapiens
tcctttgacctatgatgtctatagccaaaccttgtttccccaagccctcccaccatcatctgaggtctaattgctgtaataatcctgcactttccaacactcatgactgttctgcaccccccatcagtgggtgtcagacagagtagctgcagcaacaaacaccttacctgtcccatgagcctgggtttggggccaggcagagttctgaaggggtagaagcaagagtgctagaagattcaggaagagcagccagaaggggtcctgggaaggtggagrgagccaacccctgctgccagcacgctcacatgtggccgtggggaaggcagagctgacttaagcgcccctggattgtgccaaggagacatccaggccaaatgttgaaagtga

SEQ ID NO: 534013 - DNA, 663 bp, Homo sapiens
tttggggcgatcaaaacatgaccaaaacactatgcataattagacagaaccgtggtttaaaacatcacagaaatcatatttctctaattttctcatgcgctaaatccacrgaggtcaaaagttaagtacttttttaaatttcaaattttatcatcagcagggtcctgaactgtgtgtgcgtgtgtgctttttaccttgccatattttagcttttcagatttttttgctcttgtgctttatagaaatgtgtcgatgactttacctcctctttgacaatttaaaaatgtctttctgttttcaatttaaggattcatttcaccatatggtctgtttagcctgataaaccctcctgcccattatgaaataattgtagctgtagagaaccatccgtatctctgtaggtgaggttatgccagtgttttcatgtgcactgacctcttctcctactccaggaatttatcaccgagcagtcaatttattttaaatctgcaacctggtgtataggaactatttgtcatgatgtatgtagcccaacagatcatttttgttcagaaatgtgactgtcgtactcaaatccattcttctgggaagctggagtcaggcaaacatctatgttccttatggatggtgtcgcaaatcaatgcaatggcgttctctcagatt

SEQ ID NO: 534014 - DNA, 663 bp, Homo sapiens
tttggggcgatcaaaacatgaccaaaacactatgcataattagacagaaccgtggtttaaaacatcacagaaatcatatttctctaattttctcatgcgctaaatccacggaggtcaaaagttaagtacttttttaaatttcaaattttatcatcagcagggtcctgaactgtgtgtgcgtgtgtgctttttaccttgccatattttagcttttcagatttttttgctcttgtgctttatagaaatgtgtcgatgaytttacctcctctttgacaatttaaaaatgtctttctgttttcaatttaaggattcatttcaccatatggtctgtttagcctgataaaccctcctgcccattatgaaataattgtagctgtagagaaccatccgtatctctgtaggtgaggttatgccagtgttttcatgtgcactgacctcttctcctactccaggaatttatcaccgagcagtcaatttattttaaatctgcaacctggtgtataggaactatttgtcatgatgtatgtagcccaacagatcatttttgttcagaaatgtgactgtcgtactcaaatccattcttctgggaagctggagtcaggcaaacatctatgttccttatggatggtgtcgcaaatcaatgcaatggcgttctctcagatt

SEQ ID NO: 534015 - DNA, 663 bp, Homo sapiens
tttggggcgatcaaaacatgaccaaaacactatgcataattagacagaaccgtggtttaaaacatcacagaaatcatatttctctaattttctcatgcgctaaatccacggaggtcaaaagttaagtacttttttaaatttcaaattttatcatcagcagggtcctgaactgtgtgtgcgtgtgtgctttttaccttgccatattttagcttttcagatttttttgctcttgtgctttatagaaatgtgtcgatgactttacctcctctttgacaatttaaaaatgtctttctgttttcaatttaaggattcatttcaccatatggtctgtttagcctgataaaccctcctgcccattatgaaataattgtagctgtagagaaccatccgtatctctgtaggtgaggttatkccagtgttttcatgtgcactgacctcttctcctactccaggaatttatcaccgagcagtcaatttattttaaatctgcaacctggtgtataggaactatttgtcatgatgtatgtagcccaacagatcatttttgttcagaaatgtgactgtcgtactcaaatccattcttctgggaagctggagtcaggcaaacatctatgttccttatggatggtgtcgcaaatcaatgcaatggcgttctctcagatt

SEQ ID NO: 534016 - DNA, 663 bp, Homo sapiens
tttggggcgatcaaaacatgaccaaaacactatgcataattagacagaaccgtggtttaaaacatcacagaaatcatatttctctaattttctcatgcgctaaatccacggaggtcaaaagttaagtacttttttaaatttcaaattttatcatcagcagggtcctgaactgtgtgtgcgtgtgtgctttttaccttgccatattttagcttttcagatttttttgctcttgtgctttatagaaatgtgtcgatgactttacctcctctttgacaatttaaaaatgtctttctgttttcaatttaaggattcatttcaccatatggtctgtttagcctgataaaccctcctgcccattatgaaataattgtagctgtagagaaccatccgtatctctgtaggtgaggttatgccagtgttttcatgtgcactgacctcttctcctactccaggaatttatcaccgagcagtcaatttattttaaatctgcaacctggtgtataggaactatttgtcatgatgtatgtagcccaacagatcatttttgttcagaaatgtgactgtcgtactcaaatccattcttctgggaagctggagtcaggcaaacrtctatgttccttatggatggtgtcgcaaatcaatgcaatggcgttctctcagatt

SEQ ID NO: 534017 - DNA, 493 bp, Homo sapiens
ttttacattagaataaagtaggcctaagatctttttcaaatttattttcatttttacttgacaaattttatagatattgatggggtacaatgtgatattttgacaagtataccaggaggaatgataaagtcaagctggctagcatatccatcacctcacatccttagcatttttcttgtggagggaacatttgaaatgtaccttcttggcaatttggaaatatacagtacattatgaatgatagttaccatgctgcgcaatggtctaaaacatttcttcctcctgtctaactaaactttgtaccctccaaccaccatctcccctcccttccccacatccatcccctggcagccacccttytactttccccttttatgacttcagctattttagattccacatgtaagtgagatcaggaattaggacctttatggaaatagcaaatagcaaagaataatagcaacaaatgttaaattatatcttccatacacac

SEQ ID NO: 534018 - DNA, 553 bp, Homo sapiens
ttagctatttgtctccattgggcctaaaaagaaaatgtttttatatttctcttaccagagaaatagaaaacatcgagtgaattatctccatattataggaaaccttttgttaacatcgagtgaattgtctccatattacagaaaaccttagtaactaaaggatgaattccactgtaagataatagagacaataatttagtggatagtatattcataagtattaacactgatagaacaatgactartttacatccctattgtcctttgtgatttatctaaaatataatgtcgtttataaaaccttattttaaaaacttttttctaataaaaaatatttttactaaaattattggaaatagtaaagcagactcaagatccccaaaaactcttccagctctgttagtattctgtaaccattttttttttttttttgagactgagttttgcactcttgttgcccaggctggagtgccgcagctcaccacaacctccacctcccgagttcaagcgattctcctgcctcagcctcccgagtagctgtgattacaggcat

SEQ ID NO: 534019 - DNA, 553 bp, Homo sapiens
ttagctatttgtctccattgggcctaaaaagaaaatgtttttatatttctcttaccagagaaatagaaaacatcgagtgaattatctccatattataggaaaccttttgttaacatcgagtgaattgtctccatattacagaaaaccttagtaactaaaggatgaattccactgtaagataatagagacaataatttagtggatagtatattcataagtattaacactgatagaacaatgactaatttacatccctattgtcctttgtgatttatctaaaatataatgtcgtttataaaaccttattttaaaaacttttttctaataaaaaatatttttactaaaattattggaaatagtaaagcagactcaagatccccaaaaactcttccagctctgttagtattctgtaaccattttttttttttttttgagactgagttttgcactcttgttgcccaggctggagtgccrcagctcaccacaacctccacctcccgagttcaagcgattctcctgcctcagcctcccgagtagctgtgattacaggcat

SEQ ID NO: 534020 - DNA, 524 bp, Homo sapiens
ctaattgctaaggaagaacagtgatgtattaggcatactgaccattttgtttttacaattactttttaagcatgagaattatgtattggacacagggagcactcatccatcgactggtaagatgtttgtttagagaatgtcactggtctaacaatgaatgaatgagggctggaaatcaccagacacacagccacagcacatttatttcttacagcccattaggccttggctccattttaatacaactcaaatgtctctatgtgagcgtcacagctcaccctgcaggcagggcaacacattcaagtagtcaaacatcaaccatcatggaatctgcaagttcaacactgttgcaaccacaatratatcataaactttagtattccatgtctcagagtttaacataaagagctatgttgctgaaagtgcaaacaaaatttttttaactttgtagaaggtcagttttttaatttggtgaaatctgactaaaagttagcccagccatggagagttttacattgatatat

SEQ ID NO: 534021 - DNA, 673 bp, Homo sapiens
aatttcttgcttttgataatgatcaccatagttatgtaagaaaattccttctttttaggaaatatatagtaaagtatttagaaataaagaggcatcatgtctgtgactcacaaataattcaggaagaaaaatctatattatgtacctatatttatatttgtytagaaagagaagaggaaaagaaggagaaagagtaaagcaaatgcagtaaaatattaaaatttgggatatggaactcaagactttttggtcctattcttttaatttttctttaagtctgaaattgccaaaacagaacatgtctaaaaagaaaaacaaatttttagaaatattaacaaattatatcccattgtatgaaataaaccatgcatccatgttgatctaagtaaatgaataaattgaagatttcaagaggaacagagatatttacctagtcttaaactacctccccacaatatactaactgattacaagattaaaaagcaacactgcagaaaagaaacccagcagataccaccattaatgatcaatgctaatatcactagtaataagacaaatcaaaatcaaggtcaaatgacaggatgcaatgagaagatcagaggatcgcctctgagatactcttgccaaaaataatacaatctaagcctattcataatgaaacatcagaaaaaac

SEQ ID NO: 534022 - DNA, 635 bp, Homo sapiens
catagaggatatgtaagaattgaaaaggtttaaaccaactaaagaatacaaacaaaagtgtgattaacatccatcctgaccttctttcgccactgaagcctctaaattgagagttactctaggaaagcatatcaaaaatagccttagactagccatatgcagaagactgaaattggacccccacctttgaccatatacaaaaatcaactcaagatggattaaaggcttaaatgtgaaacctaaaactataaaaaccctgaagaagatctaggaaataccattctagacaacagcccaggcaaggacttcatgacaaagtcaaaaagcaactgtaggccaggtgcggtkacttactcctgtaatcccagcactttgggaggctgaggcggacaaatcacctgcgatcaggagttcaagagcagcctggccaacatggcaaaaccccgtctctatgaaaaatacaaaaaaaattagctgggcatggtggcgggtccctgtatcccagctacttgggaggctgaggcaggagaatcacttcaggctgggaggcagaggttgcagtgagctgagatcgccccactgcactcccctccacaacaagagcaaaaactctgtctcaaaaaaaaacaaaagca

SEQ ID NO: 534023 - DNA, 635 bp, Homo sapiens
catagaggatatgtaagaattgaaaaggtttaaaccaactaaagaatacaaacaaaagtgtgattaacatccatcctgaccttctttcgccactgaagcctctaaattgagagttactctaggaaagcatatcaaaaatagccttagactagccatatgcagaagactgaaattggacccccacctttgaccatatacaaaaatcaactcaagatggattaaaggcttaaatgtgaaacctaaaactataaaaaccctgaagaagatctaggaaataccattctagacaacagcccaggcaaggacttcatgacaaagtcaaaaagcaactgtaggccaggtgcggtgacttactcctgtaatcccagcactttgggaggctgaggcggrcaaatcacctgcgatcaggagttcaagagcagcctggccaacatggcaaaaccccgtctctatgaaaaatacaaaaaaaattagctgggcatggtggcgggtccctgtatcccagctacttgggaggctgaggcaggagaatcacttcaggctgggaggcagaggttgcagtgagctgagatcgccccactgcactcccctccacaacaagagcaaaaactctgtctcaaaaaaaaacaaaagca

SEQ ID NO: 534024 - DNA, 635 bp, Homo sapiens
catagaggatatgtaagaattgaaaaggtttaaaccaactaaagaatacaaacaaaagtgtgattaacatccatcctgaccttctttcgccactgaagcctctaaattgagagttactctaggaaagcatatcaaaaatagccttagactagccatatgcagaagactgaaattggacccccacctttgaccatatacaaaaatcaactcaagatggattaaaggcttaaatgtgaaacctaaaactataaaaaccctgaagaagatctaggaaataccattctagacaacagcccaggcaaggacttcatgacaaagtcaaaaagcaactgtaggccaggtgcggtgacttactcctgtaatcccagcactttgggaggctgaggcggacaaatcacctgcgatcaggagttcaagagcagcctggccaacatggcaaaaccccgtctctatgaaaaatacaaaaaaaattagctgggcatggtggcgggyccctgtatcccagctacttgggaggctgaggcaggagaatcacttcaggctgggaggcagaggttgcagtgagctgagatcgccccactgcactcccctccacaacaagagcaaaaactctgtctcaaaaaaaaacaaaagca

SEQ ID NO: 534025 - DNA, 614 bp, Homo sapiens
tttgtatttttaatagagacggggattcaccatgttggccaggctggtctcgaactcctgacctcagggtgatctgcccaccttggcctcccaaagtgctgggattacaggcatgagccaccacgcccggcctatatcgtttacttgctacaatcgtgtattcttttaaaacttaagattgtaagacatgttgttctctgttgccacagtgttagttatacttttgttgaatgtaataatatattgcctggatataccacaattcacataatcatcttcctgtcatttaacctgtctctgtcacaggtataaaaaattctgcaatgaacatcttcatgcatacagcttttattatcttgtgrattaatttgtttgggccagattcccaggtgggaatttctgggttaaagggtgctattttatttcaaaaaaatgtttctgatgatctaagtatagatttgaggatacagtagaaagaaaggcagatttgcaacagataggagcaaattttaaaatcctgagggagaagcagggctgtgtcaccaaggcatagatagtcctctcaacataggggtgtttggtgctcatctttctaaacctttcttgatgccccc

SEQ ID NO: 534026 - DNA, 540 bp, Homo sapiens
ctgagcacacttagtgaccaagaataaattcttctatcgtcaagtccattctcctgcctccactttttagggatactcaataagactgatgtgactttccccatgttacttgaaaatgaacagtttaaggaagagggaaaagtaaaccaagagccagaggatcaagtgaccacgaggggcttagggaaggcattcatycctgttgactgtgctaggagaaccctgggtcaggagatgctggactcctggggtagaaaacctagttcttttcaaagatttaaagtaaagttttgaggtggaaagccctactgttttctggactatattagaatcattcctctcctcatggctgtggatcatattgcttataaaataccagcctcgtgacccatttgagaacatcactgaaggtccacaagataggaacaaatgggttttaaaaaacaccccagggtctctccctactgaatccctacccagtctaacagaattagactcaaagcagcatttgcagaagatagccctctttgcatgagcttt

SEQ ID NO: 534027 - DNA, 540 bp, Homo sapiens
ctgagcacacttagtgaccaagaataaattcttctatcgtcaagtccattctcctgcctccactttttagggatactcaataagactgatgtgactttccccatgttacttgaaaatgaacagtttaaggaagagggaaaagtaaaccaagagccagaggatcaagtgaccacgaggggcttagggaaggcattcattcctgttgactgtgctaggagaaccctgggtcaggagatgctggactcctgggrtagaaaacctagttcttttcaaagatttaaagtaaagttttgaggtggaaagccctactgttttctggactatattagaatcattcctctcctcatggctgtggatcatattgcttataaaataccagcctcgtgacccatttgagaacatcactgaaggtccacaagataggaacaaatgggttttaaaaaacaccccagggtctctccctactgaatccctacccagtctaacagaattagactcaaagcagcatttgcagaagatagccctctttgcatgagcttt

SEQ ID NO: 534028 - DNA, 540 bp, Homo sapiens
ctgagcacacttagtgaccaagaataaattcttctatcgtcaagtccattctcctgcctccactttttagggatactcaataagactgatgtgactttccccatgttacttgaaaatgaacagtttaaggaagagggaaaagtaaaccaagagccagaggatcaagtgaccacgaggggcttagggaaggcattcattcctgttgactgtgctaggagaaccctgggtcaggagatgctggactcctggggtagaaaacctagttcttttcaaagatttaaagtaaagktttgaggtggaaagccctactgttttctggactatattagaatcattcctctcctcatggctgtggatcatattgcttataaaataccagcctcgtgacccatttgagaacatcactgaaggtccacaagataggaacaaatgggttttaaaaaacaccccagggtctctccctactgaatccctacccagtctaacagaattagactcaaagcagcatttgcagaagatagccctctttgcatgagcttt

SEQ ID NO: 534029 - DNA, 540 bp, Homo sapiens
ctgagcacacttagtgaccaagaataaattcttctatcgtcaagtccattctcctgcctccactttttagggatactcaataagactgatgtgactttccccatgttacttgaaaatgaacagtttaaggaagagggaaaagtaaaccaagagccagaggatcaagtgaccacgaggggcttagggaaggcattcattcctgttgactgtgctaggagaaccctgggtcaggagatgctggactcctggggtagaaaacctagttcttttcaaagatttaaagtaaagttttgaggtggaaagccctactgttttctggactatattagaatcattcctctcctcatggctgtggatcatattgcttataaaataccagcctcgtgacccatttgagaacatcactgaaggtccacaagataggaacaaatrggttttaaaaaacaccccagggtctctccctactgaatccctacccagtctaacagaattagactcaaagcagcatttgcagaagatagccctctttgcatgagcttt

SEQ ID NO: 534030 - DNA, 565 bp, Homo sapiens
tggagggggctggattggggcagggaaaccctggtggcccaggtgagaggtgcgagcaggttcctgggtgatgatgaaggcagcaagcaagaagagaggcatggggttgggagctatttgggaggaggattcatcaacagggcctggtgttgagtggcttggtgtgggagggctgggagcgggggcaggggagagcacctgtcctgggcaagagatggagggyggggccttcactgagatgcaggcactgaggatgaggggctgtgacttaatccattctggcagctacaaccaaatgccacagcctccgtggcttataaagaacagatatttatttctcacagttctgaagactaggaagttcaaggtcaaggtgtggcagattccctgtctggtgagggtttgtttcctggttcatcaatgacatcttctatgtgtcctcaggtggaagggataagggagctctctggagccttcttttgttttattaatttttttctttataattgacacatattaattgcatatatttatggagtgcattgtgatgtttcaatgcatgtat

SEQ ID NO: 534031 - DNA, 565 bp, Homo sapiens
tggagggggctggattggggcagggaaaccctggtggcccaggtgagaggtgcgagcaggttcctgggtgatgatgaaggcagcaagcaagaagagaggcatggggttgggagctatttgggaggaggattcatcaacagggcctggtgttgagtggcttggtgtgggagggctgggagcgggggcaggggagagcacctgtcctgggcaagagatggagggtggggccttcactgagatgcaggcactgaggatgaggggctgtgacttaatccattctggcagctacaaccaaatgccacagcctccgtggcttataaagaacagatatttatttctcacagttctgaagactrggaagttcaaggtcaaggtgtggcagattccctgtctggtgagggtttgtttcctggttcatcaatgacatcttctatgtgtcctcaggtggaagggataagggagctctctggagccttcttttgttttattaatttttttctttataattgacacatattaattgcatatatttatggagtgcattgtgatgtttcaatgcatgtat

SEQ ID NO: 534032 - DNA, 434 bp, Homo sapiens
cgcatttatctcagtgagcagagggatgactttgaacagaatgggaggcagatttgtcmtaagcagttcccagcttgacttttccctttagcttagtgattttggggtttcaagatttatttcccttccacaacctcgctaccacagtgatttgaaagctgtgtagataatatgtaaaccagtgaacagggctgtgttccaacaaaatttatttacaaaactgggcaggagggccagatgatgaacggatttggcccatgagtgatcgtctgccaacctgtgatctacaggttgacaggatgctgagatgtgaccagccagtggatcgcagcaaatttgaacaaacaacgtactaatggaagagtaaaagacaggaaagaagcatgaaacgcggcttggcagttaaagacaggtttcctttatgtaaaacctga

SEQ ID NO: 534033 - DNA, 639 bp, Homo sapiens
cctgccagccagcaggatggtctaagggcaggcctgcagtcccactgaggttactcatacaccctcttcactctctgcaggcctggttgagataatcaattacatattcatgtcattactttgcaatgagagggctggtcattcaggcaataggcctctgtttcccagcatcgggctctgaagagactaagatcaataagataaaggtatattgtatacagatacaattgcccctgcctccagcagcccctggtctagtagaggaggcagaggagaccagggcaccatggcaggagaagtcttagtgccacaagaccaggtagaacagacttcctggaggagggggaatctggacagaaccttaaaggatgcagaggaactgrccaagctaaggaagaaatcagagcgcgccctttggggcagtagagacaccagtgtcacggtcataggagtgaaaagcagcttgtttatggcatgtgctaccaacattctagtgttgttggaaagcagtgatctttcagggaaaaaaaagaattctaatataaccacttattttatactatcctggatttatctttattaataatagacctcatcatttacatttaatttgttactggtttaatatctaattgcgaa

SEQ ID NO: 534034 - DNA, 531 bp, Homo sapiens
tggctgggcctcatgctagtcccgtgagaaaagcaactaaaatatgccatggttgaagaaaagcacatgacaaaaacayaagtccttgaattctacggtagaaattatttattgttcataagcttattgatgttttattattcaatttgaacattcattttctgaatgtgtgctttcttacacctatggctggcatctgttaaaacactgggtccagaatgatatgcatcattctaaaagatgatgaacactgtgaacacagctcagagagaggggaaaacttgaggcccaggagccagcagcagggtccagattcaaattcacactcatgcaacgtcgggagcagcacaagtcatgtggccaaaaagtggtaataaccttatcctgaggggaaggggtaaatccagaaaagtttaagcaggggaatcatgcagtcatatttgtgtttagacagattattctggaggacttgtgattctggcaagatggcagaccaaagacctcaaagttatccccagctatgctggataa

SEQ ID NO: 534035 - DNA, 531 bp, Homo sapiens
tggctgggcctcatgctagtcccgtgagaaaagcaactaaaatatgccatggttgaagaaaagcacatgacaaaaacataagtccttgaattctacggtagaaattatttattgttcataagcttattgatgttttattattcaatttgaacattcattttctgaatgtgtgctttcttacaccyatggctggcatctgttaaaacactgggtccagaatgatatgcatcattctaaaagatgatgaacactgtgaacacagctcagagagaggggaaaacttgaggcccaggagccagcagcagggtccagattcaaattcacactcatgcaacgtcgggagcagcacaagtcatgtggccaaaaagtggtaataaccttatcctgaggggaaggggtaaatccagaaaagtttaagcaggggaatcatgcagtcatatttgtgtttagacagattattctggaggacttgtgattctggcaagatggcagaccaaagacctcaaagttatccccagctatgctggataa

SEQ ID NO: 534036 - DNA, 591 bp, Homo sapiens
ctatcccctctcaggtccaactccccagggcactacctctgagaaagccagaagccacctatcagctggagcctgggcaatcaggtgccagggcaggtagtcatgacgccccattggtggggctgagcactgagggcggagtggagggctgggtggctggaaggcagggggctgccaggcagggaagaggccgctgagcagctgtcaaagccacccaacaagtgctttcctggttggagtgggacgtggagttctggcccaggatgaacatgactgagagaatgtgagagcagggtcctcgagtctattgcagacgatgacatctgtgtcgagaagagtagatggatgtgtgctcttcttctgagacaggtaccaaatgacactgtaagaccatggcttggtgtatggcctcatgatagtttaaaagctaatgagggcacccttaggatgtgctgtaagtgactttgctgcagcaactttctttttrttattattattatactttactttctagggtacatgtgcacaaatcaaatcaaaaccatctcacaccagttagaatggtgatcattaaaatgtcaggcaacaaca

SEQ ID NO: 534037 - DNA, 638 bp, Homo sapiens
ctgcaagccaagtcaacttcgtcatagttagcaacactgctcatttactaacaaacaaaactgaatttcccataaaattacgtgtcatacctggctttttctgaaattagaagggtaacaatcaagaatttttgtagctctaaactgttatccactgctttactcaataaattttggatgcttttaacaatgaaaggaaagaagagatcacagaaaaagcagtttctagataaagcttgtgcattggctaatggtagtaagtccttctgatgaccctgagcatcactgctagctttccagtatgaaaagctgtttttaaactctttaagtaagtgaaaaattaacattgcataccatctcacccctaagtatacttgcctatctcctgacttaktcatcccttaacattcaacaactcaagtggtttattgctccagtttattaagcattccagttttcccaaaaactgagctaaaggcaaccacaaaatagttgtgttcatcatataagccagagctgaagactgatccctagtttaaaaagtctattgaaaatgtcaattcagctttttctctggcatacactgatgttattaatcaggccattataaacaaaaccaagagttatactagataggt

SEQ ID NO: 534038 - DNA, 503 bp, Homo sapiens
  misc_feature (1)...(503): n = A,T,C or G
tattaaatggtttcattgaaacaaataaatatgtacttttgaggcagtggaaaatatacttatcaaggatccacgaagttcatcatcacgacaagagcagcagtaaaatggaaattgtaccactgaaatgcacaatagcccaatccactgaacttaaggaaatggtcatttgacacaaacaattactygtccatttcctactttacaaggatacagtgaagataaaaagatttccgtgagaatgcttcagggtgtttcaaaggaagctacattctttgtatgatcaccattattgtcaagactaccaatttaaaaatgacctatctctggggtgaccaaagggtatggacatttatggtgtggtttgcaaagccttcaactatgaaacatgattattatttttggctttgctacaaaatggaattattcaataggtcccatgtgccagaccaacagtaggcttttcncagagagctctcagggtaaaattagatgatagttgc

SEQ ID NO: 534039 - DNA, 503 bp, Homo sapiens
  misc_feature (1)...(503): n = A,T,C or G
tattaaatggtttcattgaaacaaataaatatgtacttttgaggcagtggaaaatatacttatcaaggatccacgaagttcatcatcacgacaagagcagcagtaaaatggaaattgtaccactgaaatgcacaatagcccaatccactgaacttaaggaaatggtcatttgacacaaacaattacttgtccatttcctactttacaaggatacagtgaagataaaaagatttccrtgagaatgcttcagggtgtttcaaaggaagctacattctttgtatgatcaccattattgtcaagactaccaatttaaaaatgacctatctctggggtgaccaaagggtatggacatttatggtgtggtttgcaaagccttcaactatgaaacatgattattatttttggctttgctacaaaatggaattattcaataggtcccatgtgccagaccaacagtaggcttttcncagagagctctcagggtaaaattagatgatagttgc

SEQ ID NO: 534040 - DNA, 580 bp, Homo sapiens
ctaagggggacagcagggaaaggagctctctgctggacccacagctcctcctacggtgaggtaggtctgcttggcctcacacttgtaggtgtatgtatgccgggggttctataagtggagggaggtggccgctgaacagagcacaggtacttcacccatgggggttaggacctgttagaattttatgtatacagttggcccttcatatccatgggttccaaatctatggattcaaccaaccatggattggaaatgtttgaaaaaaataaaaaataaactcacgacaataaaaaataatacaaaattttaaaaatacagtctgacaacttcatatrgcatttacattctatgaggtattatgagtgttttagaggggatttaaagtacacaggaggatgtgcctaggctatatgcaagagcaataccattttatatcagagacttgagcatctgaagattttggcacctgcggggtctgttaaccaaccagtcccacttgggtaccgagggatgaccataaaataccctcttgaatcttctctgaggatattgatgaggctaattttaacatattttgctt

SEQ ID NO: 534041 - DNA, 479 bp, Homo sapiens
aactactgctgtaaagtgtaattctctctcctttgcattaagctcctgcagggctctgattacacaggaaaacaaaatgttgctgaagaagatggctcttctgggaaacctgtctccagcactctgcaggagggagaggtcctcccaagctcacatttagtaagaagagaaggggactcttcaaagagatgagagtgcatttggcttcagagtgtgccttcgccaagagagggtgcacttcagcaggcagtggcatcaagctctcactccacaggatgaccaacgatgtttcagtcgccctttttctgatgcttcctaaacaaataaagtggcagtaattctagagcttaaccagaagaaaactgcacattccctcctgaagatattgccctgactatatccatccggttgttactcctacataaatgttascctgctacatgagtgtcctgagactttgatgacatttaaatcagcag

SEQ ID NO: 534042 - DNA, 469 bp, Homo sapiens
ttgcacctccaaacatccaatcactgttttcacatttttgagttttatggaatgtggacaaactggagatcttttgtgctcagaaaacatttcaaatttctgcacatcacctggccctgtgtttatgtggggctttgctctgtcacattctagaaagctctgagcccctgtgtcagttgccggccsacctgactcatggtcctgctcctcctcacagcagggtgtggactcaacagacccagagttccctcctgggaccctccttgggccccagaggtccccattgtttctgcaagggtaagggtggattgacccacagtctcatttctcagtgatggagtagggagagaagcctgccccacatgggtttaaagacatgatgggagcccaggcatggtgcctcatgcctgtaacaccagcactttggaaggctgacgtgaggatcatttgaacctaggggtttgagacc

SEQ ID NO: 534043 - DNA, 615 bp, Homo sapiens
atagagtgaaaaattgggtttgccacttaacctttgtgtgatcaatgtcacgtagataggtatttattaacatttcagattcctcatgtgagggacagtatccatcttaaggtttgttgtgaggattgaaagtgataatatgcagagaacaaaatttggaacactgcctggcatayagtaaatactcaaaataaatgtcaggtattatgattatttctctagatcaggcagcaaaatagcagcaaatataagactaaagccaatgtctttttactcctaagttgaagtcctttaaacattgcttcaatgacaatattaatagccatttgtgactatgcactcagtatgtgccagcctgggtattaggcaccattgtatgttttttccactcttttctccactcttttcaataatttttctccactcttttcaataattctgtgagattggtatgatcagttttgtttcatacataaggaaactgaggctcagaggcatgaagggatgtgcctaacgtaaaattaccaggaagcaggaagtagaagagactatattcagagccaggtctgctgaattccatcgctctgctttttttctctgcatcctgccacctgc

SEQ ID NO: 534044 - DNA, 292 bp, Homo sapiens
ctcccctgccagactccagagttccaagctctcccagcctgtcgggatgctgttcagggctggggaggtagscaggcctgtgagcgttcagactcagaaaggcttcctggtgctggcacttcatgcagataagaacctctgggtgtgtggccaaaatggggtggaagaaataaggcataggagctgctcaggctactgcatttccgaggccagtagtcctgaggctgacctcagcttcattctaggacaagaggttatcgtaggcccatcctccccacaattctgccccagc

SEQ ID NO: 534045 - DNA, 576 bp, Homo sapiens
ttacaactgtccaaacaattttcacacatttttctttttctttttttttagaatctttagatttatcttagcaattccagagttactatattagttgatttctataatagccatgtatgacatataggacagtttatatcaccactttatagataaagaaacagagactcaaagagagtgcataatttaactttgtagctgggtgaaaaatggaaatttcagctcagaccttgaagtgacacatatcagaaatcaaaatgagttggaggtagatcacccaatagatcatgagaaaagcagatagataagaaccagttagtaaactattaaacttttctatcctatcaggggaagaacaggtaacttttgaagagatgatttatagaggattttttgggaaacagcattattgtgagcctcacctcctccttcctggaggtgagtgcctgctctcttggcaagtgtagagagaagggttctctcaggactactcayggagcttcacttgtggtccctggccagtgatctggtgtccaggtttacaccagggaaatgtatggaatgagatgggctggc

SEQ ID NO: 534046 - DNA, 546 bp, Homo sapiens
cccgccatttgcatttacactgacgtagagtgtatgagtcttttgaygaacacttacaacatgccttgtatgattttagttcattacagtcagtacttttcttcagtctctgcacagtaggtattgttacatctgccttacagaagagcaaatggaggctcaagaaggtgaaatatcttcctgaaggtcatctgggcagcaaggggcaaggcttagattctgagttcaagggctgggctcctttcaaagtgcttgagtggagccctgcctgactgacccagattgaagtgattcccatacctctaaactgcggctcctcttttcctgatactgtcttcatggaatgcagaactgcgcagcacggaagtccaacagttaactcatgataatggatagttacttgtgtcatgagactttggggtcctgagagtgagggccacctgtgttcactctgcattccacacaaacccttagcccagcacccagcacactatagatatttaaaattccagtggcaaaatgtcatcctctttctccataatttca

SEQ ID NO: 534047 - DNA, 509 bp, Homo sapiens
tcccctaagttgtgacaaccaaaaatgtctctattaccaaatgcctcttggggggcaaaattgccaccagttgagaactgccatcctagacccttgttaaaatctacctcaatggtatccctgttttcaatctccccatcatgcccactatgatctttccaaggtatacagctgattttgccaccctacggcataaaaaaattttagatcctcagtgtctaaaagtctttagatccttatgccttttgcaatatgttctgaactttcttattatcttattctccagctgctcccttctgagatagtgaacccatggtttattgggaattgcccccagtggaaaatcttatcatatatgttttctacttggttrtatggttttaagcagtttctcttctgagtctccttttttttttcatctgtacactgggcataataatctaacctgtagggcagctaagtaaagagcatcaacaactctaatacaaggtaggaaatgctgaagatcc

SEQ ID NO: 534048 - DNA, 513 bp, Homo sapiens
atcaaccctggaggtcaatggrgtgacagatgttgcagccagatcgccctcatgtccacctacagttcatcgaaaccattagggggaaagtcacagccttaacatgctaatttttaaaattattatttaattctcacaaaatcccacctggcaagcattgatatctccatcttatggattggatcattgtggtacatcaagtgaaatggccttgcccaagaccacacagctagggagagactgagctgggatccacatcctgtgtttgctctgttggcagcaaagctcttgctttcccatggcagccttatctcatccccctctcccccgcccttgtctctctgtgccctcagccctcccttcctcctctaaaattctgcaggggtacaagcacaagcagctccgggctttccccatggacaccctcttcggttcctgttttattacagtccttatgtgtcctgatgttcccctaatgaagtgtccagaggcctgccctgtctcagctttcct

SEQ ID NO: 534049 - DNA, 580 bp, Homo sapiens
aaccctggaggtcaatggagtgacagatgttgcagccagatcgccctcatgtccacctacagttcatcgaaaccattagggggaaagtcacagccttaacatgctaatttttaaaattattatttaattctcacaaaatcccacctggcaagcattgatatctccatcttatggattggatcattgtggtacatcaagtgaaatggccttgcccaagaccacacagctagggagagactgagctgggatccacatcctgtgtttgctctgttggcagcaaagctcttgctttcccatggcagccttatctcatccccctctcccccgcccttgtctctctgtgccctcagccctcccttcctcctctaaaattctgcaggggtacaagcacaagcagctccgggctttccccatggacaccctcttcggttcctgttttattacagtccttatgtgtcctgatgttcccctaatgaagtgtccagaggcctgccctgtctcagctttccttaatagrgagtgaaatatgttggtggctgtgccagaggctttgtttagatggtgtgtaaagtcaccagag

SEQ ID NO: 534050 - DNA, 566 bp, Homo sapiens
gccattacaaacataagaatctcgtctattttgctcagaakcttcttccttgttctctgtcccgacctagaggctgctgacttgggctgtcagagggccactaagtgagcacaccttccttttctcatcattgcttttcagggccctgcactcggggaagcagcccacaaggggattagaagatctgtggagacagagctggagtaactgtcttcaccctgccacctccatggggctgtataacaaaattacaaaagccacccagggtaagtgctgctacaaaagtaacagcaaaaggtaactgtcaattacaaaagcatctaggagcctcattttactcatccgtttaatgggcatcatgagggtcccatgagtgtattgtcttgttttgaggattaagtgaagatgtgcatgtaaacactctggatagtattaggaaatgtttcttctttataccccaggttttgatcaagataaatttcccccaaatctctctcttgcccaacatcctttactcctccccactaaggtagactggatctggaatgaggctgtgagcttgcata

SEQ ID NO: 534051 - DNA, 620 bp, Homo sapiens
ttaaaagtagtaagatggaaaaaattgggaaaaatgtcaataacccaaaatgtgcataagtgaaaaatggcattgagttcctttttagaagcccttctcttagtggcagaaacagcaaccatttaaaattttcaacaaaaatttgagactctaagaatatattttaggaatactttaaacaattttatggctatrgccagtagcaaaaacaaagagctccttgtttttgttgttttgttttgttttaattgaactcgtatctgaaacagagaacctagaaaaaaataaattacaataggattgtaacaatttagaaatagtgtgcatatgtttgggcattattaaaaagtcttagactagcttagaaaagagcttagaacaaagtacaaaatcaaaatattctgtttcttaaagaatcatgggcttgaggctttggaaaacagtagataataaaagcagagtccactgcaagaagttatattggctaaggataagaaagacagatgtgcaaaataatatttattttcaggaaatcattggaccagaaaatggtgcattgtttataaatacattttgaaaatgaaagggcttttttggtgacatacatgctactaccacta

SEQ ID NO: 534052 - DNA, 633 bp, Homo sapiens
aaaatacagtgtcatatattaagttcatccattgtgctagtcagtgttctctagagaaataraacctatagcatacacacacacaaacatataacatagaggtgtgtctgaacatatatatatatgtatgtatacatagatgtataaaatatgtatgtatttatttacttatgtcactatatactatataccagcttgtagatggtagagaatgggatatctaaccttccacaatcacttgagcatatatttatttatttattataaggtatttattttaaggtatttgcttatgtaattatgaaagctgaaaagtcccatgatgtaccttctgcaagatgaagatccaggaaagctggaggtgtagtgtaaagggctaatgatgtaaattccagtccaggtctgaagacctgagaactaagtatgcctagcacaggaaaagatcaatgttccagttcatgttgtcaagcagagaaagggagaattcccccttcccctatctttttgctctattcaggaattcaatgtattggatggtgtctacccacataagtgagtacgatgtactgtactcagtctaattcaaatactacctcctctggaaacaccctcacagacacacccagaaataac

SEQ ID NO: 534053 - DNA, 560 bp, Homo sapiens
ttgtatgtcagtttcactctctctactcagagatctcagaggctcctgcttatggctgcctccctcaccctctgtcaagatttgctctagactcatttcaggactcatacattcatctttgtcttttctgaaacaggacctgcaaaaatctgtcttcaactggtacatcacagtaggatgtgaaatgcattttttgactcaaatataaacacacaagtttatatttatcttattgataaatgcaggaggcagacaaatgcctaggcagataaggaagggtccctggagaatctccaccttaccccacaagtgtttatgccagatgattttgtgcagataagggaaactgccgagggtcttgcctgggmatggtcagaacgggctgaaggcccacaggcactggggaaatgggatagagccacaaggagttcacgcgttatgctgggaaggatcctggcctcttcaactggcctgtggtggcctggtattcaattcatgaggtggaaacctccgtgcaggacgcctgcattcctaatttttcctgattgtgagataagaag

SEQ ID NO: 534054 - DNA, 560 bp, Homo sapiens
ttgtatgtcagtttcactctctctactcagagatctcagaggctcctgcttatggctgcctccctcaccctctgtcaagatttgctctagactcatttcaggactcatacattcatctttgtcttttctgaaacaggacctgcaaaaatctgtcttcaactggtacatcacagtaggatgtgaaatgcattttttgactcaaatataaacacacaagtttatatttatcttattgataaatgcaggaggcagacaaatgcctaggcagataaggaagggtccctggagaatctccaccttaccccacaagtgtttatgccagatgattttgtgcagataagggaaactgccgagggtcttgcctgggcatggtcagaacgggctgaaggcccacaggcactggggaaatgggatagagccacaaggagttcacgcgttatgctgggaaggatcctggcctcttcaactggcctgtggtggcctggtattcaattcatgaggtggaaacctccgtgcaggacgcctgcatkcctaatttttcctgattgtgagataagaag

SEQ ID NO: 534055 - DNA, 616 bp, Homo sapiens
tttgagagttcttaaaattcttccaaacataaattgggtgtcactgtcatccttattgacaagagcagtagaaaaaaagtgaaattcttagaaaaaagtaagctataatctttggagcaaggtgaaaccttaacacataggagaaccaaaatctgcttttgacctccagtgaaatatttaaggagaaacccacatgtcatctcaaaagcagcaacagcattctactaataatattcctccaaattattkcaagacactaattaattgggaaagatcctactttttatagatctggagatcactgtgagtctcctctaaaaactctggacatcagttactttttaatgattcaaaccatgtagtaaactttaccaagttgttctaatcaagcccactattaaaagggacttggattaaggtccaggatgtgcctcttacttcaagaaggtatatgtaacagtcagtggatggcctgatatttcctcttcataatggtatctgtgcatttattctgttttcttgaatacatgtttctatgattatttttggttattttgcttcttgtagaagatacaatgctactataccaagaaccttagttgaacaagttcccagc

SEQ ID NO: 534056 - DNA, 616 bp, Homo sapiens
tttgagagttcttaaaattcttccaaacataaattgggtgtcactgtcatccttattgacaagagcagtagaaaaaaagtgaaattcttagaaaaaagtaagctataatctttggagcaaggtgaaaccttaacacataggagaaccaaaatctgcttttgacctccagtgaaatatttaaggagaaacccacatgtcatctcaaaagcagcaacagcattctactaataatattcctccaaattattgcaagacactaattaattgggaaagatcctactttttatagatctggagatcactgtgagtctcctctaaaaactctggacatcagttactttttaatgattcaaaccatgtagtaaactttamcaagttgttctaatcaagcccactattaaaagggacttggattaaggtccaggatgtgcctcttacttcaagaaggtatatgtaacagtcagtggatggcctgatatttcctcttcataatggtatctgtgcatttattctgttttcttgaatacatgtttctatgattatttttggttattttgcttcttgtagaagatacaatgctactataccaagaaccttagttgaacaagttcccagc

SEQ ID NO: 534057 - DNA, 616 bp, Homo sapiens
tttgagagttcttaaaattcttccaaacataaattgggtgtcactgtcatccttattgacaagagcagtagaaaaaaagtgaaattcttagaaaaaagtaagctataatctttggagcaaggtgaaaccttaacacataggagaaccaaaatctgcttttgacctccagtgaaatatttaaggagaaacccacatgtcatctcaaaagcagcaacagcattctactaataatattcctccaaattattgcaagacactaattaattgggaaagatcctactttttatagatctggagatcactgtgagtctcctctaaaaactctggacatcagttactttttaatgattcaaaccatgtagtaaactttaccaagttgttctaatcaagcccactattaaaagggacttggattaaggtccaggatgtgcctcttacttcaagaaggtatatgtaacagtcagtggatggcctgatatttcctcttcataatggtatctgtgcatttattctgttttcttgaatacatgtttctatgattatttttggttattttgcttcttgtagaagatayaatgctactataccaagaaccttagttgaacaagttcccagc

SEQ ID NO: 534058 - DNA, 606 bp, Homo sapiens
tttccatactaattggcttccaaggatgtgaataggccactgactgatccagatttgctktagacacatcatgtgttacatacatcacatttccagagttgattaccactcaaaatcctgacctgctcactttatcattaacagctatattctgttttaggagacactagctgactaggcatcccaaaaccaaattcaggggctctttagaaaatcaagctaccaataatctcagtcatctttccttggggatagaactaatttaaataatttaagtttagtgccagaccacagaccacaaattaaatacagtaaaacaaataattcatccacaattttcacactataaaatcgtgttcattactgaatggatttagaaagtaacaactgactctgtaagaaattaatctatttgctaaatatgtgtacatgaactaatcaatgtgcatcaaggtctgagctccatcaatatttccaccagacagactactgtatagcaagcatgaaacttatagtaaaacaaaaaatattatcttggggagtagattttgctaataagcagtaaaatataaatgttgacaagtagacaatgagttttatagttgt

SEQ ID NO: 534059 - DNA, 647 bp, Homo sapiens
tgggtggctgaaacaacagacagtttttggtgaaggcctcttgctggctggcaaattggttctttttcactgtgtccccacatgttggaaaaagaactctgatctcctcctgttcttaaaaggatactaattccctcatgggagacatgtcctcatgacctcatattaacttaattacatcccaacagccccatcttcaaataccatcacattatttcttaaggctttaacatacaaatttgaggagacaaaaaggttagtctataacaataatatatatcacaaatataccacccragttaatagcaaaagctaactctctcattgtgatttatgcttttacacagctaggaaaagaagcaagtgttttattcttaatttaactaaaatactggtaatatgactaaaattcatttgataactgatattttgaaatctgaaaagtgttcttcattcctctgatagtataaggctatgtaatacatatgcctaaggcagagcctgaactcagctttcactagataattgtggcttctgccacatggctgcaataaaaaccatgtattccaactgcttcatacactgaacaatgatttattttatttataccctagctcatagtatcaaatgattctgatgattgggac

SEQ ID NO: 534060 - DNA, 642 bp, Homo sapiens
cccactccttctttattacacataagttcaattattttaaaaactcagaggaatcaaaacatacatactacttaattgccagtaaatttggccaacaattagaatgaaatgtaaggtgcttaacatgtcagctgtgtatacactctgaaaacactaatatattcctaaagaaaaattaaaaagttggaagaggcattcataaaagagaagcatttccaggtggctgtagatttgtttggttaggtggcttgtagttatatagctgtttgtttaacagttcattatcaccktcaagaggagtcagaggatgcaatgtaagaaatgtagttagagaagataatatgacaaatttcttttctgttccatccactatttatgccataataaactataaatatgctgggttttggtgcatttgattaccattatacttcattatcttcatttacctttaaatggacatttaattcatttctacgttgagatattataatcaacatattaatacataagtatatttttatggatatagactatgatttctatgaaatgctggctgaaccaagttgtatgtcactgtagattttggatactgagcaattttcctccaaaaaaaataaagtaactatcaatagcagtttt

SEQ ID NO: 534061 - DNA, 488 bp, Homo sapiens
ccactgtgactgcttctaactatggcacatgcgatgaagagatgataccaatatttaggtagcaaatgaaactcagaaacttcctttgggaaaggtggtgggttttagtgtctttaggttcaaratggtgtcttccactcttcctcctcctcctcctcctgttcctcctccattttcttttcattatccattctttcatagaacagtaatcaatctatctaactcaaagtctgttctttcatatatctgtgtttaaattttttttttttagacagagtttcatcttgttgcccaggctggagtgcagtggtgcgatcttggctcactgcaacctctgcctcctggattcaagcgattctcctgtctcagcccaccgagtagctgagattacaggcacctgccaccacgcccagctaatttttgtatttttagtagagacagggttacaccatgtcggccaggttggtgtttgtaattttttatttcac

SEQ ID NO: 534062 - DNA, 488 bp, Homo sapiens
ccactgtgactgcttctaactatggcacatgcgatgaagagatgataccaatatttaggtagcaaatgaaactcagaaacttcctttgggaaaggtggtgggttttagtgtctttaggttcaaaatggtgtcttccactcttcctcctcctcctcctcctgttcctcctccattttcttttcattatccattcyttcatagaacagtaatcaatctatctaactcaaagtctgttctttcatatatctgtgtttaaattttttttttttagacagagtttcatcttgttgcccaggctggagtgcagtggtgcgatcttggctcactgcaacctctgcctcctggattcaagcgattctcctgtctcagcccaccgagtagctgagattacaggcacctgccaccacgcccagctaatttttgtatttttagtagagacagggttacaccatgtcggccaggttggtgtttgtaattttttatttcac

SEQ ID NO: 534063 - DNA, 488 bp, Homo sapiens
ccactgtgactgcttctaactatggcacatgcgatgaagagatgataccaatatttaggtagcaaatgaaactcagaaacttcctttgggaaaggtggtgggttttagtgtctttaggttcaaaatggtgtcttccactcttcctcctcctcctcctcctgttcctcctccattttcttttcattatccattctttcatagaacagtaatcaatctatctaactcaaagtctgttctttcatatatctgtgtttaaattttttttttttagacrgagtttcatcttgttgcccaggctggagtgcagtggtgcgatcttggctcactgcaacctctgcctcctggattcaagcgattctcctgtctcagcccaccgagtagctgagattacaggcacctgccaccacgcccagctaatttttgtatttttagtagagacagggttacaccatgtcggccaggttggtgtttgtaattttttatttcac

SEQ ID NO: 534064 - DNA, 644 bp, Homo sapiens
gttttagttgctgaagataaagtgttaaatatgaaaagaacttgtcctcctagaaattagcactgtaataacagtgatgcctaaaaatgtatatgtacacagacttacatcagttaagatgcctaactgtatcttcatgcttgaagaaataattactttgggatcctttctgttttactatttcagtactttgaaaaagctgtaggtgtatctatgtaaaaataaaaatcaactaatagcactatctttagaattatgatgtctagcatttagaaagtataaacgacaaaatgttataaagttgtyagacatttttatgcctgtttatgtagaaatgattttaatctgagaagaagggcaaagtctggcataatgacagaaataatggcatgaaataaatgatatgaaataaatggctatttagaactaaaaataatgaaatgaggtgagttctacgaagatagtgggtaattatctaagggctagtgattaaaatgtagatgtgatgtccaaaactgtagcagccatttgggactatgaagcaacaatcctgtgaaagaagagcatgcatggtgaaaatagtggaaatcaacaaactcattatttgtttaagctactgttacaggtttttttcttatttgcag

SEQ ID NO: 534065 - DNA, 644 bp, Homo sapiens
gttttagttgctgaagataaagtgttaaatatgaaaagaacttgtcctcctagaaattagcactgtaataacagtgatgcctaaaaatgtatatgtacacagacttacatcagttaagatgcctaactgtatcttcatgcttgaagaaataattactttgggatcctttctgttttactatttcagtactttgaaaaagctgtaggtgtatctatgtaaaaataaaaatcaactaatagcactatctttagaattatgatgtctagcatttagaaagtataaacgacaaaatgttataaagttgtcrgacatttttatgcctgtttatgtagaaatgattttaatctgagaagaagggcaaagtctggcataatgacagaaataatggcatgaaataaatgatatgaaataaatggctatttagaactaaaaataatgaaatgaggtgagttctacgaagatagtgggtaattatctaagggctagtgattaaaatgtagatgtgatgtccaaaactgtagcagccatttgggactatgaagcaacaatcctgtgaaagaagagcatgcatggtgaaaatagtggaaatcaacaaactcattatttgtttaagctactgttacaggtttttttcttatttgcag

SEQ ID NO: 534066 - DNA, 644 bp, Homo sapiens
gttttagttgctgaagataaagtgttaaatatgaaaagaacttgtcctcctagaaattagcactgtaataacagtgatgcctaaaaatgtatatgtacacagacttacatcagttaagatgcctaactgtatcttcatgcttgaagaaataattactttgggatcctttctgttttactatttcagtactttgaaaaagctgtaggtgtatctatgtaaaaataaaaatcaactaatagcactatctttagaattatgatgtctagcatttagaaagtataaacgacaaaatgttataaagttgtcagacatttttatgcctgtttatgtagaaatgattttaatctgagaagaagggcaaagtctgrcataatgacagaaataatggcatgaaataaatgatatgaaataaatggctatttagaactaaaaataatgaaatgaggtgagttctacgaagatagtgggtaattatctaagggctagtgattaaaatgtagatgtgatgtccaaaactgtagcagccatttgggactatgaagcaacaatcctgtgaaagaagagcatgcatggtgaaaatagtggaaatcaacaaactcattatttgtttaagctactgttacaggtttttttcttatttgcag

SEQ ID NO: 534067 - DNA, 644 bp, Homo sapiens
gttttagttgctgaagataaagtgttaaatatgaaaagaacttgtcctcctagaaattagcactgtaataacagtgatgcctaaaaatgtatatgtacacagacttacatcagttaagatgcctaactgtatcttcatgcttgaagaaataattactttgggatcctttctgttttactatttcagtactttgaaaaagctgtaggtgtatctatgtaaaaataaaaatcaactaatagcactatctttagaattatgatgtctagcatttagaaagtataaacgacaaaatgttataaagttgtcagacatttttatgcctgtttatgtagaaatgattttaatctgagaagaagggcaaagtctggcataatgacagaaataatggcatgaaataaatgatatgaaataaatggctatttagaactaaaaataatgaaatgaggtgagttctacgaagatagtgggtaattatmtaagggctagtgattaaaatgtagatgtgatgtccaaaactgtagcagccatttgggactatgaagcaacaatcctgtgaaagaagagcatgcatggtgaaaatagtggaaatcaacaaactcattatttgtttaagctactgttacaggtttttttcttatttgcag

SEQ ID NO: 534068 - DNA, 515 bp, Homo sapiens
atttactataacaatgtttatgaattcaagatggtctagaaatggatatcattgactaaaagagagatgattcgatttaagtattttcaagtaattatattataaaaaacaatatattcattattctaatcttatcataccttattttattctgtatttgttgatcagattctagtggagttcagagtcattgaaatgaaggccaatttttgttgtaaaatattatgtcttgtaaatttagaaagtgttcagatggggctaaataaaatttgatggttcaagcaacccaggaatgtatgtgctgtttatttatttattatttttgtgagtatatagttggtgtatacatttatggtgtacatgagatgttttgrtataggcatgcaatggagaaaggtgtaatcatcccctccagcatttatcctttgagttacaacaaacaatccaattacactctttaaattattttaaaatgtacaattaagctattattgacaataatcacccaattgtgt

SEQ ID NO: 534069 - DNA, 520 bp, Homo sapiens
caatattaagcaattgcctctgatgggttgtgctakttgcacaaagcaagctctgaatcagctcaaataaagacaaatgtcgacagtagagctttttatgcgactttcagatgggctaaatagtgacaattttctgggaatgggactttctccaaacacattctgcccttacagtgacttctaggatgctcgttttcacaactcctgtatttgcaaagttatggttttcaaggctacgtggaactggaaagaagggaataagaatgggacaaagtaaaacaccacaaaactcactgttcttactaagatacacacatttgtcttgaataattattccccagattgtttcaacccttggcttattcctagaattctttattttgaaattgaattctaaaaaaaaaattgattttaacaatttttgcaagtgctctcattttttttattttggaggagtagatattggaggttttcatttttttttatttcagatgtgcttttgtatttagattatttttaa

SEQ ID NO: 534070 - DNA, 606 bp, Homo sapiens
ctgctggaatctttgaaacaagtgatttttggggaattttctggagacagctatagaagatcaatagtccaaatcgcttgtttaaaagtttatatttttccaaaaatggttgcagtgatatcccgttttctccgtacttttctgccatgctgctttccactactacaataagayatggaattctctattaccattgttatggactgaatatttgtttccctgcaaaatttaaatgctgaagctctaaaccccattgctatggtatttggaagcaattatctttgaattaggtttggatgtggtttctctgatggatgtgttgatattgacatctatatgattaagatgaaatatattaatgtagctagaattcagaataaagctaattacatttcaagaagtaagaagaaacaaaacacctcccatttgttactcattattaggcctatattattcaaatgattttcacaaatgttctgaaaataaacgtaccagaaagaaaagctttatcatccacagtgatctcctacactatcttgtttcccctgttctctctctgaactacctctttctgtaggtctaaactggaatagttagtgccattat

SEQ ID NO: 534071 - DNA, 606 bp, Homo sapiens
ctgctggaatctttgaaacaagtgatttttggggaattttctggagacagctatagaagatcaatagtccaaatcgcttgtttaaaagtttatatttttccaaaaatggttgcagtgatatcccgttttctccgtacttttctgccatgctgctttccactactacaataagatatggaattctctattaccattgttatggactgaatatttgtttccctgcaaaatttaaatgctgaagctctaaaccccattgctatggtatttggaagcaattatctttgaattargtttggatgtggtttctctgatggatgtgttgatattgacatctatatgattaagatgaaatatattaatgtagctagaattcagaataaagctaattacatttcaagaagtaagaagaaacaaaacacctcccatttgttactcattattaggcctatattattcaaatgattttcacaaatgttctgaaaataaacgtaccagaaagaaaagctttatcatccacagtgatctcctacactatcttgtttcccctgttctctctctgaactacctctttctgtaggtctaaactggaatagttagtgccattat

SEQ ID NO: 534072 - DNA, 606 bp, Homo sapiens
ctgctggaatctttgaaacaagtgatttttggggaattttctggagacagctatagaagatcaatagtccaaatcgcttgtttaaaagtttatatttttccaaaaatggttgcagtgatatcccgttttctccgtacttttctgccatgctgctttccactactacaataagatatggaattctctattaccattgttatggactgaatatttgtttccctgcaaaatttaaatgctgaagctctaaaccccattgctatggtatttggaagcaattatctttgaattaggtttggatgtggtttctctgatggatgtgttgatattgacatctatatgattaagatgaaatatattaatgtagctagaattcagaataaagctaattacatttcaagaagtaagaagaaacaaaacacctcccatttgttactcattattaggcctatattattcaaatgattttcacaaatgttctgaaaataaacgtaccagaaagaaaagctttatcatccacagtgatctcctacactatcttgtttcccctgttctctctctgaactacctctttctgtargtctaaactggaatagttagtgccattat

SEQ ID NO: 534073 - DNA, 596 bp, Homo sapiens
tgacaataatgaaacactttcatttattcaccaatggaactataaactgaaaagagcttaatgagtaaggatgaatataatgtccctatataggagttcctgacacaacaaaatgggcacaacacagtgaaatgggaaataacattattttattactcactatgatctgtccagctctattacatgaataaatgaaccacagacaattgacagggtgggaaagcctagtgggtgtgcttaataaaaagacaaagtgaaaacgatgaaggtccgggtagagtrttttgggggaaacatcctattaaagatactcatgcagccggctgggaggcttttaatgatcagatggtctaagaatcactttgataactagtgactgtcttgttaatagaaatctctcttcatcattgttaggcagtaagtaatctttcatagatcagcgaatttccattaaattctacaagtacttattgatccactatcacgtatgtatttagtattgtgtcagcgactgagaatgctagaatttagtattgtaaggctaatagcagctaaatagggagatgtaacatctgatgaccaaatagttaagagtc

SEQ ID NO: 534074 - DNA, 523 bp, Homo sapiens
cagctgcattcgtctcattaagagagtcagcctgttttttgaaactttgaagccaggcayttattctctctggctatgaaagtcctagctgaattattcttccaatagagggctattttgtccacattaaaaatctgttgtttaacgtaaccaccttcatcaacgatcatagctagatcttctgcataacctgttatggcttctgtattagcacttgctacttcaccttatacttttatgttatggagatggcttctttccttcaacctcatgaaccaatcgctgcttgcttccaacttttcttctgcagcttcctcacctcacttagccttcataaaattgaagcaagtcagggttaggctttgggttaagggaatgttgtggctggtttgatgtctatccagaccactcaaacattctccatattagcattaagtctgtttctctttcttatcatttctctttcttattacttgataataaagattacttgataagaaagattacttgataataaagatta

SEQ ID NO: 534075 - DNA, 561 bp, Homo sapiens
gctgcctcattgacattttgctattttactgcttagtgctcatgtgttcctgcacatgagtctatatcttcacaggatgataccataagaaaatcaaacactttttatccatgctagtgtttataatcctcaagttctaaactctatattgtatcatctttattatagagtttgtggatgaaataatatcagttaagastttttgaaaaacttgattttgttagtaagttctagatttgcattgttcattgctttgctttgataaatagaaaatggcaaatgcctttaattaagtaattaaaattaagcaaaaattggagcataagaaatactaattttctttagcaacctctaggttcttcttggatttctatctgcagaagtgcaaaatgtagtaaacaataatatgacacagcaaagggcatggatatctgatttttcattcaaatatattttcacaggttttcttctccttctcctcctcctcctccttcttttttctgctatcataaaacaaatattaagcacagcccctaaataatctttggcagtgtatgtctt

SEQ ID NO: 534076 - DNA, 557 bp, Homo sapiens
cctcattgacattttgctattttactgcttagtgctcatgtgttcctgcacatgagtctatatcttcacaggatgataccataagaaaatcaaacactttttatccatgctagtgtttataatcctcaagttctaaactctatattgtatcatctttattatagagtttgtggatgaaataatatcagttaagactttttgaaaaacttgattttgttagtaagttctagatttgcattgttcattgctttgctttgataaatagaaaatggcaaatgcctttaattaagtaattaaaattaagcaaaaattggagcataagaaatactaattttctttagcaacctctaggttcttcttggatttctatctgcagaagtgcaaaatgtagtaaacaataatatgacacagcaaasggcatggatatctgatttttcattcaaatatattttcacaggttttcttctccttctcctcctcctcctccttcttttttctgctatcataaaacaaatattaagcacagcccctaaataatctttggcagtgtatgtctt

SEQ ID NO: 534077 - DNA, 476 bp, Homo sapiens
gtacatccttctgtttccactctgccttgctaacgctgaggcccttaataactttcagcctcttatacatctttttgcattgatgccagatcaaacttctcaactcacagcacaaagattcaggggtttcccaatcattaattaatgcataagttcagccattgttcagtcttacctatcttatcatcagtaactggctttcaatattgataactgtgggaggcasaggcaagaggattgtttgagcccagaagttcaagaccagctggggcaccatggcaagactccattcctacaaaagacataaataaataaataaataaataaataaataaataaataaataaaataaattagctgggcctggtgaaatgcacccatagggccagctactcaggaggctgaggtgggaggattgcttgagcccaggggtttgagactgcagtaagctatggtcgtgccactgcactctagct

SEQ ID NO: 534078 - DNA, 620 bp, Homo sapiens
ggtgtatatttaatttctgaatttaaatgttcattattaatattaaagccactatacagtagtcccctcgtattggcaggagatattttccaagacacccagtggatgcctgagaytgagggtagtgtggaacactgtacacactattttttttctatacatacctacctatgataaagtttaatgtataaatgagtcacagtaagagattaacaataactaataatataataattgtactataataaaggttatgtaaatgcggtctttttttttctctctctctgttaaactatcttacaccatacttgcatattttcagactgtggttaaccacaggaactgaaactgtgaaaagcaaaaccattgtacctactaaattaagaggactgtaatcagtgtaactctagggagatcctgatatccttacttaaaagttttacctaaaaccaaataactaatagttataaatagtagtgtactttaaactaggtttagggcctataaggggtccttattacaatgtatgtaatccctgaaatatatttacatatctacaaaaatatttaagaccaataaagatgagagaaaacctgaatgtgagattaattagatccaga

SEQ ID NO: 534079 - DNA, 620 bp, Homo sapiens
ggtgtatatttaatttctgaatttaaatgttcattattaatattaaagccactatacagtagtcccctcgtattggcaggagatattttccaagacacccagtggatgcctgagattgagggtagtgtggaacactgtacacactattttttttctatacatacctacctatgataaagtttaatgtataaatgagtcacagtaagagattaacaataactaataatataataattgtactataataaaggttatgtaaatgcggtctttttttttctctctctctgttaaactatcttacaccatacttgcatattttcagactgtggttaaccacaggaactgaaactgtgaaaagcaaaaccattgtacctactaaattaagaggactgtaatcagtgtaactctagggagatcctgatatccttacttaaaagttttacctaaaaccaaataacyaatagttataaatagtagtgtactttaaactaggtttagggcctataaggggtccttattacaatgtatgtaatccctgaaatatatttacatatctacaaaaatatttaagaccaataaagatgagagaaaacctgaatgtgagattaattagatccaga

SEQ ID NO: 534080 - DNA, 625 bp, Homo sapiens
gtggactactatctcatccacttttggatggcttccacaagccattcctaatattatttccagccaagtcctctgaagacattggttttcaggtggtactccctaaccaygagttttaatcactggttgtttctggtacactacatcaagtacgtattttcttttctttctttggagattttctgaagcctcatgtatgctatgtgtcaggaaccgtgctaaggaagggggaacaagacacagcccctgcaatttttgattttacactctattagagaagacagccactgaacaagtaattacaaggacactgaattttagaaaagaaaactgcagcaagtcatgtgaccatttaaagggggccttatttaccttattttgctttacgtactattcctctccttgtattttttcctcctatgagcattcctttgaagttaggcatactaaactacttaacatttactaaacacatttacttaacatttactagacatatacttgtgtcatattccccattcttgatcctccgctgtacaagattcttaaaaatctaaggaaggtggtgtctcaagtataatacccacttttgtggtttctgtgtatcctctacatacttctatta

SEQ ID NO: 534081 - DNA, 625 bp, Homo sapiens
gtggactactatctcatccacttttggatggcttccacaagccattcctaatattatttccagccaagtcctctgaagacattggttttcaggtggtactccctaaccatgagttttaatcactggttgtttctggtacactacatcaagtacgtattttcttttctttctttggagattttctgaagcctcatgtatgctatgtgtcaggaaccgtgctaaggaagggggaacaagacacagcccctgcaatttttgattttacactctattagagaagacagccactgaacaagtaattacaaggacactgaattttagaaaagaaaactgcagcaagtcatgtgaccatttaaagggggccttatttaccttattttgctttacgtactattcctctccttgtattttttcctcctatgagcattcctttgaagttaggcatactaaactacttaacatttactaaacacatttacttaacatttactagacatatacttgtgtcatattccccattcttgatcctscgctgtacaagattcttaaaaatctaaggaaggtggtgtctcaagtataatacccacttttgtggtttctgtgtatcctctacatacttctatta

SEQ ID NO: 534082 - DNA, 606 bp, Homo sapiens
ctgactgcaacctctgcctctcggttcaagcaatcctcccgtctcagcttcctgagtagctgggatacaggcgcacgacaacatgcctcgctaattttcctttcctctgctccttccttgacaaaagtgctagctttacctgagtggctttcggagcttgataaaaactctcttttttcaggagatttttggaagccaaagaaatttttatttgctcttgcttcatcatctgttttgaggtggtgagtctgtagtcccagccactctgaargctgtggtgagaggatcatttgagcctgagagttcgaggctgcagtgagctatggttgggccacagcactacagcttgggtgagagaatgagacagtgtctcaaacataaataaaatgaaatccaaaagtatatttagaaaaaaataagtaaataatgatagaaagaaaaatgtgacttaatatgcagtaattaaatatccctatgcaaattaagatttctctattcctgctcacttttggtgtctatttgcatggaatattttttccaccccttaaccttaagtttatgtgagttcttatgtgttaggtgagtcttctgaagagagcacaaact

SEQ ID NO: 534083 - DNA, 606 bp, Homo sapiens
ctgactgcaacctctgcctctcggttcaagcaatcctcccgtctcagcttcctgagtagctgggatacaggcgcacgacaacatgcctcgctaattttcctttcctctgctccttccttgacaaaagtgctagctttacctgagtggctttcggagcttgataaaaactctcttttttcaggagatttttggaagccaaagaaatttttatttgctcttgcttcatcatctgttttgaggtggtgagtctgtagtcccagccactctgaaggctgtggtgagaggatcatttgagcctgagagttcgaggctgcagtgagctatggttgggccacagcactacagcttgggtgagagaatgagacagtgtctcaaacataaataaaatgaaatccaaaartatatttagaaaaaaataagtaaataatgatagaaagaaaaatgtgacttaatatgcagtaattaaatatccctatgcaaattaagatttctctattcctgctcacttttggtgtctatttgcatggaatattttttccaccccttaaccttaagtttatgtgagttcttatgtgttaggtgagtcttctgaagagagcacaaact

SEQ ID NO: 534084 - DNA, 606 bp, Homo sapiens
ctgactgcaacctctgcctctcggttcaagcaatcctcccgtctcagcttcctgagtagctgggatacaggcgcacgacaacatgcctcgctaattttcctttcctctgctccttccttgacaaaagtgctagctttacctgagtggctttcggagcttgataaaaactctcttttttcaggagatttttggaagccaaagaaatttttatttgctcttgcttcatcatctgttttgaggtggtgagtctgtagtcccagccactctgaaggctgtggtgagaggatcatttgagcctgagagttcgaggctgcagtgagctatggttgggccacagcactacagcttgggtgagagaatgagacagtgtctcaaacataaataaaatgaaatccaaaagtatatttagaaaaaaataagtaaataatgatagaaagaaaaatgtgacttaatatgcagtaattaaatatccctatgcaaattaagatttctctattcctgctcacttttggtgtctatttgcatggaatattttttccaccscttaaccttaagtttatgtgagttcttatgtgttaggtgagtcttctgaagagagcacaaact

SEQ ID NO: 534085 - DNA, 470 bp, Homo sapiens
ttttttttaatctacagtagtggaaatttagtgagcactttgttaktgttagattttgttttgagtctggttgtaaatcagtaattgaattgtgcagagtttaacagtttaaacagtcattaaaagtaaatgaaacattggaaaaacattaagagattctactacatttttaaatatgaaatatatataaatacatatgtaaaatgtatatacaaatataatatgtatataagtatataaaatatttgtatatatttaaatatgaaatatgtatatataatccttttagaaaaaaattatgttgagtagccttaagatgtttaagaaattgaaggggcagttaactataatagacttatttaaataaaagcaatttttaatttgatattattttttaaaatacaaaattgcaaataaattgaaattgatggtagtaaaattgaaaatttaacctaaaacaaacctcttgc

SEQ ID NO: 534086 - DNA, 665 bp, Homo sapiens
atagcctgtcattcgtgataaaagtactactaattatttgccttccatgggtatgaaaacaatattcttcttctatccaaattatatatagaactaggtgtttatatacaaacatatcagtgggtaataaactgacccattttttcattgctcttggattttctgccacagctttgttaaggcatatctgacatacaatraactgcacatatgtaaagagttataacttggtaagttttgatgaaggaatatacctgtgaaaaccttgccacaatcaagatagtgaacatgtgaaaagtgagcacaaattcccagggcaaggtatacaatttgcagtaaccagtgcatagcaaaaatgtgggatccctgcggggtgcagggaagtcaatctcctctttctacgggttcatagtcccttagtcccatctctgtggtccggacacctccaaggaatgcgacctctatcctgcaacatgctctattcctggatctggatagctaagagctcccctgtggatcgcctgtcaaatgtgctgaggtggtgccaaccaaaagcagagtggtcttctctttacccttccctaagacgcctctgggccacaccggccctccctctcccctctctgcccacgcacgcaggctcccacaggggcagagggatgcag

SEQ ID NO: 534087 - DNA, 517 bp, Homo sapiens
ctgacttcttgggcagggatgatacaacctttatgaagccccacactccagaggctgggtccttagctttgtaagtcccagaaacctttttatttttatttttttttcaatgtatgtagagttgttcagtttttcagggctatatcatgctcaccaaacttacaagagacactttttgaaaagtcagattggcaatatattattttacaattagaaatgtgtaatcaatggtaaaccaaagcacatgtggtagatgagaagttcatttttcaccctgcaggaaatttatatgggcagacaaaccataccaagtaggttgcttggtgaaattgcagtagggtsggggaaggaggttgcatgtcttaaggttactaccattaagacgaagctatcttcaccactttagggatatacatgactctgggctggggatacttacattgctaggcagtacggaatcctggacagtgctgatgataggtcaacttaatctttttctttggatactctttttgaa

SEQ ID NO: 534088 - DNA, 568 bp, Homo sapiens
agctgctgagaaagaggcaaagcatgggttatcctcaggatttgatatcatggaaatgtagggagaagaatggtatttttttttgcagtattcaaggaacaatatttttgggcaatgtctggaacatagcttagcccttttgcaagcttgtttacatcaaaagttcatggatcaccttcagacaatatattcagagtttgtcaatatagagaggtatcatttgtgtctggggaagaattgaagatttctgaatcagtgatgctgaaatactacagatacatcacaatttaaattcggaggtggtagacttgtttcttctactgtaaacagatagatactacagatacatcacaaattaaatttggaggtggtagactactccaatactacagatacatcacaaattaaatttggaggtggtagtactacagatacatcacaaatactacggatacatcacaaattaaatttggaggtggcagtactacagatacatcacaaatactacagatatatcacaaattaaaatacrtaatacacaaatactacagatacatcaaaaattaaa

SEQ ID NO: 534089 - DNA, 629 bp, Homo sapiens
ttacttttgatttacagactcataggcggaagggacttgctttgtctcagatgagactttggactgtggacttttgagttaatgctgaaatgagttaagactttgggggactgttgggaaggcatgattggttttgaaatgtgaggacatgagatttgggaggggccaggggcacaatgatatggtttggctstgtccccacccaaatctcatcttgaattcccatgtattgtaggagggacctggtgggtgggtaattgaaacatgggggtgggtctttcccatgctgttcttgtgatagtgaataagtctcacaagatctgatggttctaaaaagaggcattcccctgcacaagctcgctctctctctttttccctactgccatccatgtaagatgttacttgttcctccttgtcttccaccatgattgtgaggcttctccagtcacatggagctgtaagtccaattaaacctttcttttgtaaattgttcagtcttgggtacatctttatcagcagcatgaaaatgtactaatacagaaacaaataaaaaattaaagataagtcagaggtaattctcagaagacagtggcctaaatactttgcttctttccttagccaatgtacag

SEQ ID NO: 534090 - DNA, 615 bp, Homo sapiens
gctgagatcagcaaccgggttgtgagttttgtttgtaatacattgttagatgaatccttttgtataaaaaaaagaatgtaaacattttctttaaggatctttcttggaaattttcacccccggttaaataacaatttgtattctttcaggcacattattacttttcttggttaatgtatctttcatctttgtaccttttctttcaagaaaaataagatgttaaagaaggcctccaaatgttatggggtctttaaatgttcactgtaggaaatctgagtttctaawattagcactggtgatttgacagggtagggagctactctgctattatttgtacatgttattagaatggctataacctagagtcctggctggattttccagaaaagaagtccaaacaagtgttctgtttcaagataccataatttttaaataatttttcaagaaacttagtatgctcaatagttctgtgctgttgcatcaaagaaaaggtaaaaatatgcaatgggccagctagaagtgacataattaatttaaagctgcactttgggtaggtagtttcagttgggcagattgctcttttagaattactgagaaggtttcctctagaaatga

SEQ ID NO: 534091 - DNA, 615 bp, Homo sapiens
gctgagatcagcaaccgggttgtgagttttgtttgtaatacattgttagatgaatccttttgtataaaaaaaagaatgtaaacattttctttaaggatctttcttggaaattttcacccccggttaaataacaatttgtattctttcaggcacattattacttttcttggttaatgtatctttcatctttgtaccttttctttcaagaaaaataagatgttaaagaaggcctccaaatgttatggggtctttaaatgttcactgtaggaaatctgagtttctaatattagcactggtgatttgacagggtagggagctactctgctattatttgtacatgttattagaatggctataacctagagtcctggctggattttccagaaaagaagtccaaacaagtgttctgtttcaagataccataatttttaaataatttttcaagaaacttagtatgctcaatagttctgtgctgttgcatcaaagaaaaggtaaaaatrtgcaatgggccagctagaagtgacataattaatttaaagctgcactttgggtaggtagtttcagttgggcagattgctcttttagaattactgagaaggtttcctctagaaatga

SEQ ID NO: 534092 - DNA, 653 bp, Homo sapiens
tacagatcataatgcagagctctgagaagacgttaacatggtagccagaggccctctagttcattgtgaggagtttgtaatctattctagcacaaaggaaagcaattggaagatttttcaaaataaagtaaatcagaggtcttaaatttttcccaaggtctttctgacttccagggaccataaattataaaagactatactgggcaaccaaaagaccataagcatgagacttccccagtgtattacaatcttatggataactttcttcaggtcattgtctaatgtagacaaagcccaaatggctctagtmctggctaaactctataatacaagcacattcaattaatttttttaaaaatttacaaggcatcctcattgaccagtgaaaatcatttagtaagtttgtgggtttctgctgttcaaaaaagagtttttagcatagaggcatctctgttctttttctactataaacaaagtggcatttcttctgtgaggttttgaaagagcttattttggagattttatcaatttcttttttaaaactgcctttcctttccacattgacctcagcatttcttatttgatatacttttcattattaaagcttgaatttaaggtgaactaactcaataaatgtcttcttgtaattgact

SEQ ID NO: 534093 - DNA, 653 bp, Homo sapiens
tacagatcataatgcagagctctgagaagacgttaacatggtagccagaggccctctagttcattgtgaggagtttgtaatctattctagcacaaaggaaagcaattggaagatttttcaaaataaagtaaatcagaggtcttaaatttttcccaaggtctttctgacttccagggaccataaattataaaagactatactgggcaaccaaaagaccataagcatgagacttccccagtgtattacaatcttatggataactttcttcaggtcattgtctaatgtagacaaagcccaaatggctctagtcctggctaaactctataatacaagcacattcaattaattttttwaaaaatttacaaggcatcctcattgaccagtgaaaatcatttagtaagtttgtgggtttctgctgttcaaaaaagagtttttagcatagaggcatctctgttctttttctactataaacaaagtggcatttcttctgtgaggttttgaaagagcttattttggagattttatcaatttcttttttaaaactgcctttcctttccacattgacctcagcatttcttatttgatatacttttcattattaaagcttgaatttaaggtgaactaactcaataaatgtcttcttgtaattgact

SEQ ID NO: 534094 - DNA, 412 bp, Homo sapiens
accccctgaggatataaaatctctgagatgygtctgttctcaaggctgcttgccaatcctgcttcccttgagggatgcctttcaataagcagttactgagttcctgctgggtttttattattattattattattatttttgagacagtacacagggtcttgctctgtcactcaggctggagtgcagcggtgggatcataacttgctgtagccttgacctctgaggctcagtgatcctcctgcctcagctacagatgtgcaccaccatgtccagttaatttttaaaaaatttttttgtgtgtgtggagatgaggactctttatgttgcccagactgggctccaagtcctggcttctaacagtctccctgccttagcctcccacaatattgggattatgggcatgagccactgt

SEQ ID NO: 534095 - DNA, 423 bp, Homo sapiens
ttcatctttaccgtgaagacagtgaacgaaacaaaaacgaacagtgtacaaagcatgatgcttttgtgtgtacaagaaggacaaacgccaatgccagggcaagccatcttttttcttttttttttgagatggagttttgctcttgttgctgagactagagtgcagtggcacagtgctggctcactgcaacctccgcctcccgatttcaagcgattcttttgcctcagcctcccgagtagctgggactacaggcacatgccaccacamccggctaattttttgtatttttagtagagacagggtttcatcatgttggccaggctggtcttgaactcctgacctcaggtgatccgcccacctcggcctcccaaagtgctgggattacaggtgtgagccactgcgcccggcccgccatcttttttc

SEQ ID NO: 534096 - DNA, 452 bp, Homo sapiens
aggcaagagaacacttgaatccaggaggcagaggttgcagtgagccaggatcatgcactccagcctgggcgacagagcaagactctacctccaaaaaacaaaacaaaacaaaatagctaggaacagtggcatgygcctacagtcgcagctattcaggaggctgaggccagaggaccgcttgaatccatgagtttgagaccagcctgggcaacaaagcgagaccccacctcgacaacaacaaaagaaagagagattataagacctgagctgggaaatgcactgggacatgaaagaaacaagatttggtgactgattggatgtagatgaggcaaaagaaaattgaggcaaccaggagagctttctaacttgggtagtgtcatttgctgtgtgaaagagaacaaaagagacagtcatggggacagaggggccagaagaaggggaatggtggtaaa

SEQ ID NO: 534097 - DNA, 650 bp, Homo sapiens
gttgaaatgctaataaccaatgtaaggagacttggaggccgggccactgggaagtaatcagatcatgaggatgaagcccttatgaatgggagtagtgcytttataaaatagatcccagagagctctctcatgctcttcatgccccgtgagaatttggaagtcagtagtctgcaatctggaagacagcccttcgccaaagtcaaatatgctgtgccctaatctgggacttctagcctccagaattgaaaaaaaaaaattgttgtctttaaacagccaagtattataacagccttaagtaacacagcttataactgaacactaaagggaaatgtaaaagaaaaatgtaattttactaattgctgaaggcacaaaatcctcactttagaatcttgtttcctactggatggatgctgattttattcatgaaatctaaagtaaacgcaatatatcatggtcttccctcatttatttatttcataaatatttattgggcaatttttctgagctgggcactgtattaaacatcagggcttcaacaacatataaaaacatccactatcagagaataattctagtagtttaaggagtgatatattcaccgatgctctttatttttctccagaacttccttgcaaaaaataaaaacttta

SEQ ID NO: 534098 - DNA, 650 bp, Homo sapiens
gttgaaatgctaataaccaatgtaaggagacttggaggccgggccactgggaagtaatcagatcatgaggatgaagcccttatgaatgggagtagtgcttttataaaatagatcccagagagctctctcatgctcttcatgccccgtgagaatttggaagtcagtagtctgcaatctggaagacagcccttcgccaaagtcaaatatgctgtgccctaatctgggacttctagcctccagaattgaaaaaaaaaaattgttgtctttaaacagccaagtattataacagccttaagtaacacagcttataactgaacactaaagggaaatgtaaaagaaaaatgtaattttastaattgctgaaggcacaaaatcctcactttagaatcttgtttcctactggatggatgctgattttattcatgaaatctaaagtaaacgcaatatatcatggtcttccctcatttatttatttcataaatatttattgggcaatttttctgagctgggcactgtattaaacatcagggcttcaacaacatataaaaacatccactatcagagaataattctagtagtttaaggagtgatatattcaccgatgctctttatttttctccagaacttccttgcaaaaaataaaaacttta

SEQ ID NO: 534099 - DNA, 484 bp, Homo sapiens
cctgtgaaatctttcctaaatttttgtttaaattgttataaatttgatgctgaatcatactttatttacaaaaacatcctgtgtcccagtgaaatctttctttatgccatttccaattagacccactttcttaaaaataaatttgtaacacagtttttttaaaagagaaatctcaactagcagatgtatattatatatattatcaaataaaatataatgtcatgtataaaatacataaattttctccttcaacatagaaatgcctcttaatatattaaaattattcctttataaattatatctatataatttgtctcagcgtagcattaaagatggttaatgtaatctagtgttttgcactttctagaaaaaaaaaatcccattaggagaaattcaaaatgttttacaaatrtgccagggagtaggttttaatcattgcccttctcttcacctggacaggaagtgaaaacaagactgttggttg

SEQ ID NO: 534100 - DNA, 641 bp, Homo sapiens
tgcttcatggtctccccgcccttggcgatgaccaggccggcgttgcccgcagggatcatgtcctgtacagtgccattctggccccctttggcggtgtcgtggaactgtcctgggggccccccatgaccccgagacacaatgtcatccagcatcatcttcgctttctggagagattctggggctcttgtcaaggacacactgtgcttgggtaggccactgctgcctggagtaatctrtactttgcaggctgaatcctgttagattttgtcaatttgttcgcgccctctgccaaagatcaggcccaccacaccgtctgggaccctgcactcttctgtcattgaagtccttgggggacgatggatgggtccaagttgagaactgattgagtctccctgggaagccagcttcttgctctccggttgatctccatcttccaactgtctcttatggccccctagaccaaaatctggagtgctgttattcactgtcgttgcagcatcacctacaattttggctgcgatcttgggaggagccagtctacagccccagaggcattgagacagcccaggagccggtctgtttcctgaaaggaggcaaagtcctcccattctacagacctccacccctccaggccatgggga

SEQ ID NO: 534101 - DNA, 635 bp, Homo sapiens
ggccctgaccagcagacgcatgttaactgtgcccttggtatgggacgttcaccagccatggtaaggtgctcatgcgcaggcatagggaaggtggaggcagagttcctctaagtttgagactgatggaagaatgaaggagtgagcagttaagggtattcatgagtgagtgactataatgccaggccagggattggataaaggatgtaaaaacaggagtggtgtctgtggatggagagaaaatacagggaataatgattgtatggagacagacagacagaccaggaactggctgctggtcttcacgtgcagggagagggatacagggaaggggagctgaaggttgccaagaggaagatgaggtagtgaagactgatgatgtgatttcaaaaaagaaagggcttacaagaaagagcggagcagtcgtcctgaatgacacgaggaggaaagtaatcccacctcctgtcttggaggtgcgtgtggtatgagaacaaaactaccctaaggttttagwtagggtaagtaattagtggaacattccagaaaaggctgatacaaaaggctgttggtctgaaagtgggcaatacagggggcacagtggaaggggctgggaggcagtggagagatgacagagaagg

SEQ ID NO: 534102 - DNA, 524 bp, Homo sapiens
caacaataaatgcatttgatattctgttttctatgctcctatctaccaaggattttccagcaggtttgcattctgttttttagcctctggggccaccagtgacattattcctaatatgtacatactaaaatattaattatattttacattataatacaaataacatgtttaatagttttatgtttctatcttaaatttatttgctacaattttattcccaaaataattggtggattacaaattgattaacaggattcttttgtaagcatgaacaataaaactcctttttcttttcatttgttygctatcatggtttgtccaatttctttgataggtaaaggtgagatatagaaactgatgccccagacccactcatcacatacatccacagaataagctaacaatcagccgtttactctgtgcccattacatctcaaggaagaccctggtttaaaaaaaaacaaaactaactatccattaggttgatcataataaagcatgcacttgtacagagtatacagggc

SEQ ID NO: 534103 - DNA, 611 bp, Homo sapiens
ttcttcaccatcaaatataaaaaatttagttatgtcgagcatattcatcctggctggctgatgataaagtggacagacctgggttagagctattattttatttgctttgtgagtcactgtttatgtgagttcttttttactggggtttttggtttttgtttgtttgttgaagaaataacttaattggtatcagctttgcaggtgactaataagttgcacagattaaatttttggtcagatgacagcatctttcactagaaatgtacttcgttaaaggaaactgtatcattactatggtgagttgaagttctaagaccttttccytattgtcagagagttgttcataaaaatcttctttgagactattttgaatttaatggatctgtgtaattcttttctaaacatttagcacataattgtaggtaattgttactatcataaatctgtctgtgctggttaaattaataagaatgtttcaaagtaagtattataaatgtattttcagtgattttgcagaaatagagcatgcattctttcaggtttgtattttttaaaatttatagcttatttctattgcagagcatatttatatctgccagttaactggcata

SEQ ID NO: 534104 - DNA, 482 bp, Homo sapiens
aagaaagccttaggtattcttggaaagactcactgagattcagactggattaatttaaaaagtaactccactaggcatataaaaaacaaatactttttwaaatcttctaaaagaaaagaaagaagatgcaaggaatgtacagtgagattatgttcatactctataaactggaagttagaaatcttagaatagtgtctgctacataggaaagaatttgactcaagagtactatacccagctaagatatcgtcatcaatataaacaaatttgttttcagttaaataaggattcagaactattttaccatatatactccttttgaggaaattgctaaagaaagtactttaaccagtttttaggtaagatgatagcttaaaaatatacatatttttccccctacccccaaatccactaacttgagttttttaaagacacaagcccactaggaagaagaaaggaaatagcatttggtaaaatgaaca

SEQ ID NO: 534105 - DNA, 482 bp, Homo sapiens
aagaaagccttaggtattcttggaaagactcactgagattcagactggattaatttaaaaagtaactccactaggcatataaaaaacaaatacttttttaaatcttctaaaagaaaagaaagaagatgcaaggaatgtacagtgagattatgttcatactctataaactggaagttagaaatcttagaatagtgtctgctacataggaaagaatttgactcaagagtactatacccagctaagatatcgtcatcaatataaacaaatttgttttcagttaaataaggattcagaactattttaccatatatactccttttgaggaaattgctaaagaaagtactttaaccagttttkaggtaagatgatagcttaaaaatatacatatttttccccctacccccaaatccactaacttgagttttttaaagacacaagcccactaggaagaagaaaggaaatagcatttggtaaaatgaaca

SEQ ID NO: 534106 - DNA, 597 bp, Homo sapiens
ctgcacagatgggtcacctgagcggcttcagaaaaaatatagatgcggtcgggtgcgatggctcacgcctgtaatcccaacactttgggagcccaaggcaggcggatcacttgaggtcaggagtttgagaccagcctggccaacatggtgaaaccctgtccctaccaaaaaatacaaaaattagcgggacgtggtggtgcacacctgtagtctcaactactcaggaggctgaggcaggacaatcatttaaacccaggaggtggaggttgcagtgagctgagatgcagtccaacctgggcgacagagtgagattcagtcaaaaaaaaaaaaaaaaagaaaggaagagaaagaaagaagragagaaagagagagaaggaaggaaggagggagggagggaaggaaggagggagggagggagggagggaaggaagtaaggaaggaaggaagtaaggaaggaaggaaggaaggaaggaaaagaaaaaagaaagagggagagatgctcaggtgctagctgctaccaattaaaccgaagtcctgaaaagcctcccaggtgatttcagtggacatacagtgtctagaactgctgccatccccaag

SEQ ID NO: 534107 - DNA, 635 bp, Homo sapiens
ccctcatttgctcaatcaatcacaacctcccgccccccgcccttcacgcggcccctttagagttgagagccttgtaagggacaggaattacttattcagggagctcggttaccaggacgtgagtctgccagtgctcccagctgaataaaactctttccttccacaatctggtgtctgagggattttgtctacaacttctcctgctacatttctccatagccttaaacaacaacaayaaaaaataatgcaagaaaaaataatacatgttttctggggaaaaaggaagtaactagaagaacccagtgaaaagaaaatttagcacaacaatttttgcagtcttacaaagcaacttaggaagcaattgatccaaattaaaacaaaagatcaccaggttctgtgaaggtcttcaaaaacaagatggctttatttacgattaagaaactggaagctcttaaagacatgtttctttggtcaaacaacaataaaaaaagaaagataattagaaactccaggaaaaaaaactgtacagaaaaatcacttcatatataatataaactaaattgtgaaaaaaaattgagtaattatcacattgagacagagtagagacagggtttggcttcagctcacccccatta

SEQ ID NO: 534108 - DNA, 635 bp, Homo sapiens
ccctcatttgctcaatcaatcacaacctcccgccccccgcccttcacgcggcccctttagagttgagagccttgtaagggacaggaattacttattcagggagctcggttaccaggacgtgagtctgccagtgctcccagctgaataaaactctttccttccacaatctggtgtctgagggattttgtctacaacttctcctgctacatttctccatagccttaaacaacaacaacaaaaaataatgcaagaaaaaataatacatgttttctggggaaaaaggaagtaactagaagaacccagtgaaaagaaaatttagcacaacaatttttgcagtcttacaaagcaacttaggaagcaattgatccaaattaaaacaaaagatcaccaggttctgtgaaggtyttcaaaaacaagatggctttatttacgattaagaaactggaagctcttaaagacatgtttctttggtcaaacaacaataaaaaaagaaagataattagaaactccaggaaaaaaaactgtacagaaaaatcacttcatatataatataaactaaattgtgaaaaaaaattgagtaattatcacattgagacagagtagagacagggtttggcttcagctcacccccatta

SEQ ID NO: 534109 - DNA, 270 bp, Homo sapiens
ctgttgaagcttctacaggacttgcaaagaacagaaaaaaaataatgtttaacatcctattatatctatataaggtgactaataattcctcacatcttaatctcttaaacgttagctcagataatttttctcctacaaaggggggtaaaatgttacttttgataatggagataataaaggtttgattccaaaactcccartgcaatagttaattttagatgtgaatttgatcataagtgtgaatttagttgaggaaatataaagtgatgt

SEQ ID NO: 534110 - DNA, 270 bp, Homo sapiens
ctgttgaagcttctacaggacttgcaaagaacagaaaaaaaataatgtttaacatcctattatatctatataaggtgactaataattcctcacatcttaatctcttaaacgttagctcagataatttttctcctacaaaggggggtaaaatgttacttttgataatggagataataaaggtttgattccaaaactcccaatgcaatagttaattttagatgygaatttgatcataagtgtgaatttagttgaggaaatataaagtgatgt

SEQ ID NO: 534111 - DNA, 576 bp, Homo sapiens
ggaagaaaaagcagctgtattcttccacaggcgaatctgaggacagggattttatattccmggggtggaccagtaactaagaccaccagatcaaggagttttcaattatatgatctgggggtgggggagcgtggacagagttcattcccaagtaactacaacaccaagccacgaaataacagacagccgggatgtgcagagaaggccaatgggaagcccaggcagagacttcacagcactttggagggtcatggaaggctgagggagaggagagctttggaaattctttctgaagatggagagcaattttgacagagggccaactttgatgtggaagaaggctcagtgagaaagtggtgattcttttagacgtggtgattcttttagacatggtcattctgtacctctataaaccactttgccacctttcagatccctttcacatgccttgcctcctctcatgtttgctcattaccatgagcagtaaacctccctgttcaatctgccacaaaacctgtgagatggatagagacacaatatatgcacgttgtttccttatcttcagttaaaaactca

SEQ ID NO: 534112 - DNA, 576 bp, Homo sapiens
ggaagaaaaagcagctgtattcttccacaggcgaatctgaggacagggattttatattcccggggtggaccagtaactaagaccaccagatcaaggagttttcaattatatgatctgggggtgggggagcgtggacagagttcattcccaagtaactacaacaccaagccaygaaataacagacagccgggatgtgcagagaaggccaatgggaagcccaggcagagacttcacagcactttggagggtcatggaaggctgagggagaggagagctttggaaattctttctgaagatggagagcaattttgacagagggccaactttgatgtggaagaaggctcagtgagaaagtggtgattcttttagacgtggtgattcttttagacatggtcattctgtacctctataaaccactttgccacctttcagatccctttcacatgccttgcctcctctcatgtttgctcattaccatgagcagtaaacctccctgttcaatctgccacaaaacctgtgagatggatagagacacaatatatgcacgttgtttccttatcttcagttaaaaactca

SEQ ID NO: 534113 - DNA, 475 bp, Homo sapiens
tgaagaaaccatccccaaaagttggcagcttaaaacaactcattattacttgttktttggcttagagagtcttggtggccagctcatctcacacacatttgcagccaagctggattgtgtgaaagcacagtggggtggtgtgcagggtggcccactagtggttgggagtggatgttgctggaggctcactagttgttgggagtcggtgttgctggaggctcagtgggggatgtcaatgcgtgtagctagtcatggactggccatgtggtttctatcatgaggtctcaggggagtgggatttcctgcctggtgactggctttctcctggataagtgttctgttttctcagcctggcttctgaagtccccaaataccacctttgtcaccttctgttggccaaacaagtcagtagtctgggcaaggtttaaggggaattggttctcacagagacaggagcaggaaagaatttgtcacc

SEQ ID NO: 534114 - DNA, 475 bp, Homo sapiens
tgaagaaaccatccccaaaagttggcagcttaaaacaactcattattacttgttgtttggcttagagagtcttggtggccagctcatctcacacacakttgcagccaagctggattgtgtgaaagcacagtggggtggtgtgcagggtggcccactagtggttgggagtggatgttgctggaggctcactagttgttgggagtcggtgttgctggaggctcagtgggggatgtcaatgcgtgtagctagtcatggactggccatgtggtttctatcatgaggtctcaggggagtgggatttcctgcctggtgactggctttctcctggataagtgttctgttttctcagcctggcttctgaagtccccaaataccacctttgtcaccttctgttggccaaacaagtcagtagtctgggcaaggtttaaggggaattggttctcacagagacaggagcaggaaagaatttgtcacc

SEQ ID NO: 534115 - DNA, 475 bp, Homo sapiens
tgaagaaaccatccccaaaagttggcagcttaaaacaactcattattacttgttgtttggcttagagagtcttggtggccagctcatctcacacacatttgcagccaagctggattgtgtgaaagcacagtggggtggtgtgcagggtggcccactagtggttgggagtggatgttgctggaggctcactagttgttgggagtcggtgttgctggaggctcagtgggggatgtcaatgcgtgtagctagtcatggactggccwtgtggtttctatcatgaggtctcaggggagtgggatttcctgcctggtgactggctttctcctggataagtgttctgttttctcagcctggcttctgaagtccccaaataccacctttgtcaccttctgttggccaaacaagtcagtagtctgggcaaggtttaaggggaattggttctcacagagacaggagcaggaaagaatttgtcacc

SEQ ID NO: 534116 - DNA, 475 bp, Homo sapiens
tgaagaaaccatccccaaaagttggcagcttaaaacaactcattattacttgttgtttggcttagagagtcttggtggccagctcatctcacacacatttgcagccaagctggattgtgtgaaagcacagtggggtggtgtgcagggtggcccactagtggttgggagtggatgttgctggaggctcactagttgttgggagtcggtgttgctggaggctcagtgggggatgtcaatgcgtgtagctagtcatggactggccatgtggtttctatcatgaggtctcaggggagtgggatttcctgcctggtgactggctttctcctggrtaagtgttctgttttctcagcctggcttctgaagtccccaaataccacctttgtcaccttctgttggccaaacaagtcagtagtctgggcaaggtttaaggggaattggttctcacagagacaggagcaggaaagaatttgtcacc

SEQ ID NO: 534117 - DNA, 265 bp, Homo sapiens
tggatagatatttatgctgtttctgaactggaggttactggtattctctaaggtataggaaaattgatcttatgtggctaactgaggtggatatrgttgtatcagtcagacagtaatgatataatcatgatagtttacatttaacacaacttacatgtgttatactttagaaagcacttcattcatattattacttcataccattttccccttaccatatttgtctctcctttctctgctgacttcagaaaatgtctcttccaca

SEQ ID NO: 534118 - DNA, 265 bp, Homo sapiens
tggatagatatttatgctgtttctgaactggaggttactggtattctctaaggtataggaaaattgatcttatgtggctaactgaggtggatatagttgtatcagtcagacagtaatgatatawtcatgatagtttacatttaacacaacttacatgtgttatactttagaaagcacttcattcatattattacttcataccattttccccttaccatatttgtctctcctttctctgctgacttcagaaaatgtctcttccaca

SEQ ID NO: 534119 - DNA, 593 bp, Homo sapiens
cagctgtggatagatatttatgctgtttctgaactggaggttactggtattctctaaggtataggaaaattgatcttatgtggctaactgaggtggatatagttgtatcagtcagacagtaatgatataatcatgatagtttacatttaacacaacttacatgtgttatactttagaaagcacttcattcatattattamttcataccattttccccttaccatatttgtctctcctttctctgctgacttcagaaaatgtctcttccacactactcaattcatctccttattttgtcaaaattttaagtctcagagtctccaaaaaaattccagacaagtctcatcagctttcagtcattgattaatcgatatccttagaggctttcccttccccttctcaatttaacatagcttccaaatacacttgccagtaaaacaaagttgtttatatggttttgtatttcttcctgctgaattatgaacattttttcatattgacattgatttccatctggccatgaaatactcaaggtgaagaaaatgaaacaaaattgttaatatttatcaagagccaggtactgttttcagtgt

SEQ ID NO: 534120 - DNA, 593 bp, Homo sapiens
cagctgtggatagatatttatgctgtttctgaactggaggttactggtattctctaaggtataggaaaattgatcttatgtggctaactgaggtggatatagttgtatcagtcagacagtaatgatataatcatgatagtttacatttaacacaacttacatgtgttatactttagaaagcacttcattcatattattacttcataccattttccccttaycatatttgtctctcctttctctgctgacttcagaaaatgtctcttccacactactcaattcatctccttattttgtcaaaattttaagtctcagagtctccaaaaaaattccagacaagtctcatcagctttcagtcattgattaatcgatatccttagaggctttcccttccccttctcaatttaacatagcttccaaatacacttgccagtaaaacaaagttgtttatatggttttgtatttcttcctgctgaattatgaacattttttcatattgacattgatttccatctggccatgaaatactcaaggtgaagaaaatgaaacaaaattgttaatatttatcaagagccaggtactgttttcagtgt

SEQ ID NO: 534121 - DNA, 265 bp, Homo sapiens
tggatagatatttatgctgtttctgaactggaggttactggtattctctaaggtataggaaaattgatcttatgtggctaactgaggtggatatagttgtatcagtcagacagtaatgatataatcatgatagtttacatttaacacaacttacatgtgttatactttagaaagcacttcattcatattattacttcataccattttccccttaccatatttgtctctcstttctctgctgacttcagaaaatgtctcttccaca

SEQ ID NO: 534122 - DNA, 593 bp, Homo sapiens
cagctgtggatagatatttatgctgtttctgaactggaggttactggtattctctaaggtataggaaaattgatcttatgtggctaactgaggtggatatagttgtatcagtcagacagtaatgatataatcatgatagtttacatttaacacaacttacatgtgttatactttagaaagcacttcattcatattattacttcataccattttccccttaccatatttgtctctcctttctctgctgacttcagaaaatgtctcttccacactactcaattcatctccttattttgtcaaaattttaagtctcagagtctccaaaaaaattccagacaagtctcatcagctttcrgtcattgattaatcgatatccttagaggctttcccttccccttctcaatttaacatagcttccaaatacacttgccagtaaaacaaagttgtttatatggttttgtatttcttcctgctgaattatgaacattttttcatattgacattgatttccatctggccatgaaatactcaaggtgaagaaaatgaaacaaaattgttaatatttatcaagagccaggtactgttttcagtgt

SEQ ID NO: 534123 - DNA, 593 bp, Homo sapiens
cagctgtggatagatatttatgctgtttctgaactggaggttactggtattctctaaggtataggaaaattgatcttatgtggctaactgaggtggatatagttgtatcagtcagacagtaatgatataatcatgatagtttacatttaacacaacttacatgtgttatactttagaaagcacttcattcatattattacttcataccattttccccttaccatatttgtctctcctttctctgctgacttcagaaaatgtctcttccacactactcaattcatctccttattttgtcaaaattttaagtctcagagtctccaaaaaaattccagacaagtctcatcagctttcagtcattgattaatcgatatccttagaggctttcccttcmccttctcaatttaacatagcttccaaatacacttgccagtaaaacaaagttgtttatatggttttgtatttcttcctgctgaattatgaacattttttcatattgacattgatttccatctggccatgaaatactcaaggtgaagaaaatgaaacaaaattgttaatatttatcaagagccaggtactgttttcagtgt

SEQ ID NO: 534124 - DNA, 533 bp, Homo sapiens
ctttaggcaatgtatttgtgattggtatgactttgttcccagagggcagttagcaacacaatattaaggctatgtgtacaaggaaaacaaattttaaaaatctcctttaaaaaaaaacagttcccratcctaaccagtatcatgcacagaatccgtttccacctcttcatatggaagcagctctgggtggacatctagaaagttggataactatttatcacatatgatctgtaaagggagagatttacaagaaagtgttaaatttaatccataggaaagcaaaatcaaaaatcaatgaattttccatttgtagttttccctaggggctccactctctagatggcttaaatgcgttagaattaaatgactaggcacaattgtttgttagtgacataaaagcaaggtaagcatttctgctttatgagtccaagcacagggaaacttggttttctttggaaggatatcataaaggcaatgtttatgagtaatccctcattgtctttccttctgtagcattcaatggtatgtactat

SEQ ID NO: 534125 - DNA, 533 bp, Homo sapiens
ctttaggcaatgtatttgtgattggtatgactttgttcccagagggcagttagcaacacaatattaaggctatgtgtacaaggaaaacaaattttaaaaatctcctttaaaaaaaaacagttcccaatcctaaccagtatcatgcacagaatccgtttccacctcttcatatggaagcagctctgggtggacatctagaaagttggataactatttatcacatatgatctgtaaagggagagatttacaagaaagtgttaaatttaatccataggaaagcaaaatcaaaaatcaatgaattttccatttgtagttttccctaggggctccactctctagatggcttaaatgcgttagaattaaatgactaggcacaattgtttgttagtgacataaaagcaaggtaagcatttctgctttatgagtccaagcacagggamacttggttttctttggaaggatatcataaaggcaatgtttatgagtaatccctcattgtctttccttctgtagcattcaatggtatgtactat

SEQ ID NO: 534126 - DNA, 204 bp, Homo sapiens
ttttcttactcaccatatgtctggtggttctcacagccaggggcactgaggggctctgccctgggatctggaggccagcactgttcacctgatctccaccactgagatacytctggctagagccataatcaggtggcccaaaggactgaacaaggaagaatgggagggcactctagactaattaaggttgtcttttcagtctaa

SEQ ID NO: 534127 - DNA, 204 bp, Homo sapiens
ttttcttactcaccatatgtctggtggttctcacagccaggggcactgaggggctctgccctgggatctggaggccagcactgttcacctgatctccaccactgagatacctctggctasagccataatcaggtggcccaaaggactgaacaaggaagaatgggagggcactctagactaattaaggttgtcttttcagtctaa

SEQ ID NO: 534128 - DNA, 460 bp, Homo sapiens
gttggccaggctggtctcaaactcctggcctcaagcgatccacccacctcggcgtcccaaagtgctgggattacaggcgtgagccaccttgtctggcagtcttttctttactgatgtcatatcagttccattcccaacctgagaaggaacctgtgtgggtttttgtaaggatgttggactacaattcktagggctaacacatgaacagattaaactggctttcccctgcagttcttttgtagttggtggcccagcattttctagccaccatatgatcagttttaaaagtttactcttgcttttcagaggtttctcaccatccccttcccccgcccttcccagccacctgccccggccagcgacatgttttgtggtccgttgtcatttggatgtgcagtctctacagcttgtgcttgtcctcctgtgagcatcagaactgatgagggctacgactttggga

SEQ ID NO: 534129 - DNA, 237 bp, Homo sapiens
agcaatactagcaaaagtggggaccatgagttcatttgggaatattttaagtttgggctactctaattccctgaaaatatcaggtgcatagtttgatgtgtctartcaaacttatacagcactcaagtgtgtgtttcaaaataaatattcaatacatattgatatgatttattaataaatattcaatatgtaactgactaaattgaaatcagaggaaagcaaacaaccatgtattaa

SEQ ID NO: 534130 - DNA, 237 bp, Homo sapiens
agcaatactagcaaaagtggggaccatgagttcatttgggaatattttaagtttgggctactctaattccctgaaaatatcaggtgcatagtttgatgtgtctagtcaaacttatacagcactyaagtgtgtgtttcaaaataaatattcaatacatattgatatgatttattaataaatattcaatatgtaactgactaaattgaaatcagaggaaagcaaacaaccatgtattaa

SEQ ID NO: 534131 - DNA, 579 bp, Homo sapiens
ctctctggctgtggagagtatccatgggctcgacatctgaggattcaaccaaccttgcattaaaaaatacctggtaaaaatggatggttgtgtttactgaacatgcacagacattttttcttgtcattatttcctaaataatagagtgtaacaattatttgcatagcatttatgttgtattagatattacaagtaatcaggagatgatttaaagtatatgagaatatgtgcataggttatatacaaatactacaccattttatataagggacttgagcatccaaggattttggtatcctctgggagttctgaaaccaatacactgtgcataccaagggacgactgcactcaacrccaacatcaatggatggcagaaatttaccatcagtaccattaagagtgtgagatgaaaacatgctcatgtgttgttggggaaaacagagattgacctcatcaagaggttagaggattcactgagcatgaagtgatatgtgtgatcatcatcatgccaaacccaggccagtacaagatcccagattggttcttaaacagacagaaggacgtgaaggatggaaatta

SEQ ID NO: 534132 - DNA, 688 bp, Homo sapiens
atttttgcaccttctgatgggtagatacaatgctcaaattctccatagaaaagatatttacatttttaaagaaaaaattataattatgtcattattaattgttaatgttcatcacttagtaattatcatttttaggtgactaaagactgacattttgggcatgtttaagcactgaattttgacataaacatgtcattcaccagatgtgtgtccttgtgtgatacctatcttctcagagccttcatttcttcacttgcacaatgaggataatatattttgcagagaagtggaaaggatgagaggcataacctctaaagcataatatattgccagatgcaggtgccctggaaatggtaggtattaggataatttgttacacttatcaatttctgctcaacgaaccaccccaaacttagaggtgtaaagcagaccattttattatggctgcaggttctgtgggtcaggaattccgacagtccacagcagggctagcttgtatcagctccatgatgtctgtgacctcagctgggaagacttgagcagttgggggtgacccaaaaagcaggaaactgggctcatctggagggtttttcactctcttkcctggtccctgggctgagctaggactggcagtgatgagatccccttctacagcccctccgggtgtcctgggcttctactatcgagg

SEQ ID NO: 534133 - DNA, 662 bp, Homo sapiens
gcaccatgatcactggttttcctggttgtgttcttggaagaacctatcagtttgctcaagacatgggactagcatgtctattatayggattgctacccaatgtccttggaaactagtaaaaccctactgaaatattttgaattctcccgaaagagcactacccagtgtttacatattgtgaaatcaacacttaataggactgggcttttgaaatatatttgagtcattgtcagtgggatcaactccataaaaagaagaccagtctttttaaaaaaacctatacaaaatatagtcttatttcctgagaattacagctaaagagatttggattaaacataagctctaacttcaactagtacagtaaattcaggactttcttacatttactgaacaaaaaaaagttactaaataaatgccacagaaattatgtacacctaactttgagtcaagccaacatctacttgtatttgtttaagcaaagctcataagaacactttagctgtaagacatgtggatacttctcacttgttcagttaactatgatattaataaaaatgataaggctttttataaactaaagttgtatttaccaatgaagttcaacatgtaaatgctgaaatgattgatatttgttatgcttttatttactttttatcccattt

SEQ ID NO: 534134 - DNA, 662 bp, Homo sapiens
gcaccatgatcactggttttcctggttgtgttcttggaagaacctatcagtttgctcaagacatgggactagcatgtctattatacggattgmtacccaatgtccttggaaactagtaaaaccctactgaaatattttgaattctcccgaaagagcactacccagtgtttacatattgtgaaatcaacacttaataggactgggcttttgaaatatatttgagtcattgtcagtgggatcaactccataaaaagaagaccagtctttttaaaaaaacctatacaaaatatagtcttatttcctgagaattacagctaaagagatttggattaaacataagctctaacttcaactagtacagtaaattcaggactttcttacatttactgaacaaaaaaaagttactaaataaatgccacagaaattatgtacacctaactttgagtcaagccaacatctacttgtatttgtttaagcaaagctcataagaacactttagctgtaagacatgtggatacttctcacttgttcagttaactatgatattaataaaaatgataaggctttttataaactaaagttgtatttaccaatgaagttcaacatgtaaatgctgaaatgattgatatttgttatgcttttatttactttttatcccattt

SEQ ID NO: 534135 - DNA, 662 bp, Homo sapiens
gcaccatgatcactggttttcctggttgtgttcttggaagaacctatcagtttgctcaagacatgggactagcatgtctattatacggattgctacccaatgtccttggaaactagtaaaaccctactgaaatattttgaattctcccgaaagagcactacccagtgtttacatattgtgaaatcaacacttaataggactgggcttttgaaatatatttgagtcattgtcagtgggatcaactccataaaaagaagaccagtctttttaaaaaaacctatacaaaatatagtcttatttcctgagmattacagctaaagagatttggattaaacataagctctaacttcaactagtacagtaaattcaggactttcttacatttactgaacaaaaaaaagttactaaataaatgccacagaaattatgtacacctaactttgagtcaagccaacatctacttgtatttgtttaagcaaagctcataagaacactttagctgtaagacatgtggatacttctcacttgttcagttaactatgatattaataaaaatgataaggctttttataaactaaagttgtatttaccaatgaagttcaacatgtaaatgctgaaatgattgatatttgttatgcttttatttactttttatcccattt

SEQ ID NO: 534136 - DNA, 662 bp, Homo sapiens
gcaccatgatcactggttttcctggttgtgttcttggaagaacctatcagtttgctcaagacatgggactagcatgtctattatacggattgctacccaatgtccttggaaactagtaaaaccctactgaaatattttgaattctcccgaaagagcactacccagtgtttacatattgtgaaatcaacacttaataggactgggcttttgaaatatatttgagtcattgtcagtgggatcaactccataaaaagaagaccagtctttttaaaaaaacctatacaaaatatagtcttatttcctgagaattacagctaaagagatttggattaaacataagctctaacttcaactagtacagtaaattcaggactttcttacatttactgaacaaaaaaaagttactaaataaatgccacagaaattatgtacacctaactttgagtcaagccaacatctacttgtatttgtttaagcaaagctcataagaacactttagctgtaagacatgtggatacttctcacttgttcagttaactatgatattaataamaatgataaggctttttataaactaaagttgtatttaccaatgaagttcaacatgtaaatgctgaaatgattgatatttgttatgcttttatttactttttatcccattt

SEQ ID NO: 534137 - DNA, 595 bp, Homo sapiens
ttcacattgacctgagagtaaaattttgatgctttatttttcacttgagtagcccaggttaatggcttcttaataattatagwcagttttttttttggtatctggtggtacctcaaggctacaatgctgtagcatggacattcacatcaggatttaccaacaattatatgttgaatagaaagtatcaaatgaacaacataaaagcaaaaggtcagcaggtgccagaacaaatgctgggtattgagcatggatgtggacttctgacatgatttaaggcagctttaaggaagtagcaagataaaaataaattagagaaggatgaatagagttccatccagtttggggccgtgcctacgccagactggttcgctataaacttggcagttctaactgatgacaatgcagaaccacttccttagtttccattataatttgatcttaatggctagagaaagctctccttagtccattttcttctgtatcataagcaagtgctctcatttcacctgtaatttgaagacagatcgtaacctttagactgaatgtgatagaaagtagctgctaaagggacacatatattgcaaatacatgaagc

SEQ ID NO: 534138 - DNA, 468 bp, Homo sapiens
gcgctggaatcatctgaagttttcctgggtctgggcagtgaaaatggtgtcttcacttcacatctgatgcctccatgccccaccatgtggcttcattgccgacacagtagccaggacttcttcatgactgctcaaggmcagaagaggcaggatttaagtactatgttcaccatcacttctgttctattctatgtgtcaaagtacattcaagggagagggagagaaatggatcctacctcttaatggggaaggaagatatggccatgactagctttggaaaatacagtctactacagatggcataaaagttagatttttaaaaataagctagatatttaaatcagaaactaatatcccctacaattgagggcaagtcaaataaaataaatagacaaagctttataaaatgctaaactaaagaaaattacctgtgaaaaaaaagaatgacagaaagaaaaagaaaaagct

SEQ ID NO: 534139 - DNA, 468 bp, Homo sapiens
gcgctggaatcatctgaagttttcctgggtctgggcagtgaaaatggtgtcttcacttcacatctgatgcctccatgccccaccatgtggcttcattgccgacacagtagccaggacttcttcatgactgctcaaggacagaagaggcaggatttaagtrctatgttcaccatcacttctgttctattctatgtgtcaaagtacattcaagggagagggagagaaatggatcctacctcttaatggggaaggaagatatggccatgactagctttggaaaatacagtctactacagatggcataaaagttagatttttaaaaataagctagatatttaaatcagaaactaatatcccctacaattgagggcaagtcaaataaaataaatagacaaagctttataaaatgctaaactaaagaaaattacctgtgaaaaaaaagaatgacagaaagaaaaagaaaaagct

SEQ ID NO: 534140 - DNA, 468 bp, Homo sapiens
gcgctggaatcatctgaagttttcctgggtctgggcagtgaaaatggtgtcttcacttcacatctgatgcctccatgccccaccatgtggcttcattgccgacacagtagccaggacttcttcatgactgctcaaggacagaagaggcaggatttaagtactatgttcaccatcacttctgttctattctatgtgtcaaagtacattcaagggagagggagagaaatggatcctacctcttaatggggaaggaagatatggccatgactagctttggaaaatacagtctactacagatggcataaaagttagatttttaaaaataagctagatatttaaatcagaaactaatatcccctacaattgagggcaagtcaaataaaataaatrgacaaagctttataaaatgctaaactaaagaaaattacctgtgaaaaaaaagaatgacagaaagaaaaagaaaaagct

SEQ ID NO: 534141 - DNA, 503 bp, Homo sapiens
ttactttttgttttggctgctcaacttctgccttatatcttgcttcttgctctcccaccccatcaccttgcttctttctctgctttcactcactctgccttttatccaacttccaattccctctgctgttctcctgcatcataatggcagttagtgaggggagggttttgaggtggcatgtccaacctcctagcctgccacatccagaaactgctttcgargtttctctgtggtcctgtcagccaagagggagtccattcagttggttgtagggcctagggcttatttttatttctcaaacctgacaagataaagctggattaatgcagattctctgcaggtgtaaatttcccctacaaaagacagttttgcagagttccttctgtttgctggctctctgacagccatcttaaaatatgccaaagaaatatattctggggtaaaatactttgattttcttcatctatcaacagcttcaccatgctgacagcctccaatccaag

SEQ ID NO: 534142 - DNA, 476 bp, Homo sapiens
catgccctttaaggattaagtttaaaccacactaccaaaagagaaaagatttatatgatcacatataagcaatggaatcagcaatatgagtacttttcacaactatacaaatcaaatttaataatctccagaacattaaggaagttcagcccttaatgaaaatgaatgaaaattcattattctcccactgttgcatgccatggaaacataatgtcctgccaaactcaaaatagtatcacastgttactcagattttcagcaatgaaggccctccaaggatctaatgatgttcatcttttcagtttatttccttcactgataaacattgttaatagataccattgcctctgttttcactttaagtgatgttacttagcacaattcatttctttagaatgcaccctagtttggtggaaggaattttcctgctttataaatataggatattttctcatgaaacaaattggcatactctt

SEQ ID NO: 534143 - DNA, 476 bp, Homo sapiens
catgccctttaaggattaagtttaaaccacactaccaaaagagaaaagatttatatgatcacatataagcaatggaatcagcaatatgagtacttttcacaactatacaaatcaaatttaataatctccagaacattaaggaagttcagcccttaatgaaaatgaatgaaaattcattattctcccactgttgcatgccatggaaacataatgtcctgccaaactcaaaatagtatcacactgttactcagattttcagcaatgaaggccctccaaggatctaatgatgttcatmttttcagtttatttccttcactgataaacattgttaatagataccattgcctctgttttcactttaagtgatgttacttagcacaattcatttctttagaatgcaccctagtttggtggaaggaattttcctgctttataaatataggatattttctcatgaaacaaattggcatactctt

SEQ ID NO: 534144 - DNA, 476 bp, Homo sapiens
catgccctttaaggattaagtttaaaccacactaccaaaagagaaaagatttatatgatcacatataagcaatggaatcagcaatatgagtacttttcacaactatacaaatcaaatttaataatctccagaacattaaggaagttcagcccttaatgaaaatgaatgaaaattcattattctcccactgttgcatgccatggaaacataatgtcctgccaaactcaaaatagtatcacactgttactcagattttcagcaatgaaggccctccaaggatctaatgatgttcatcttttcagtttatttccttcactgataaacattgttaatagataccattgcctctgttttcactttaagtgatgttacttagcacaattcrtttctttagaatgcaccctagtttggtggaaggaattttcctgctttataaatataggatattttctcatgaaacaaattggcatactctt

SEQ ID NO: 534145 - DNA, 624 bp, Homo sapiens
ctcctcgctttctcagctttcaccccacctaggttttgtgagcctggaacttgggagactgttctgtagcccaggtctcctaagattggctgctggacttgcctgagttgagggtgcggtgggttgaccctgggctgcccagcattcatgtggtagtgaaggaaggagsactggatcaatcccatttcaaagcatgtctctctgcactccacactgtcctccaatgacactgtaaggaaaccgctttaagacgtatcaacggctttaagtaaatgtattttctggcatctgggagacctgacattctgtgtcataatgaaaatctgtcatgtttctttattttaaaaatgataaaactgcaggttcacagagttacatggcttacttgaggtcacacggggatgagttttcagcactgccaataaaagcaatcacatgaattattcagtaattattcataggatccatataattcagtaaatattcacataattatttactagttgttcattgaccaattcgtacaaggcattttgctcaaaactgtgcttatatttggacattgtatcttcatcataatcctgtggtaatgctgttatccgtaagtaacaggtaagaaacctg

SEQ ID NO: 534146 - DNA, 624 bp, Homo sapiens
ctcctcgctttctcagctttcaccccacctaggttttgtgagcctggaacttgggagactgttctgtagcccaggtctcctaagattggctgctggacttgcctgagttgagggtgcggtgggttgaccctgggctgcccagcattcatgtggtagtgaaggaaggaggactggatcaatcccatttcaaagcatgtctctctgcactccacactgtcctccaatgacactgtaaggaaaccgctttaagacgtatcaayggctttaagtaaatgtattttctggcatctgggagacctgacattctgtgtcataatgaaaatctgtcatgtttctttattttaaaaatgataaaactgcaggttcacagagttacatggcttacttgaggtcacacggggatgagttttcagcactgccaataaaagcaatcacatgaattattcagtaattattcataggatccatataattcagtaaatattcacataattatttactagttgttcattgaccaattcgtacaaggcattttgctcaaaactgtgcttatatttggacattgtatcttcatcataatcctgtggtaatgctgttatccgtaagtaacaggtaagaaacctg

SEQ ID NO: 534147 - DNA, 624 bp, Homo sapiens
ctcctcgctttctcagctttcaccccacctaggttttgtgagcctggaacttgggagactgttctgtagcccaggtctcctaagattggctgctggacttgcctgagttgagggtgcggtgggttgaccctgggctgcccagcattcatgtggtagtgaaggaaggaggactggatcaatcccatttcaaagcatgtctctctgcactccacactgtcctccaatgacactgtaaggaaaccgctttaagacgtatcaacggctttaagtaaatgtattttctggcatctgggagacctgacattctgtgtcataatgaaaatctgtcatgtttctttattttaaaaatgataaaactgcaggttcacagagttacatggcttacttgaggtcacacggggatgagttttcagcactgccaataaaagcaatcacatgaattattcagtaattattcataggatccatataattcagtaaatattcacataattatttactagttgttcattgaccaattcgtacaaggcattttgctcaaaactgwgcttatatttggacattgtatcttcatcataatcctgtggtaatgctgttatccgtaagtaacaggtaagaaacctg

SEQ ID NO: 534148 - DNA, 624 bp, Homo sapiens
ctcctcgctttctcagctttcaccccacctaggttttgtgagcctggaacttgggagactgttctgtagcccaggtctcctaagattggctgctggacttgcctgagttgagggtgcggtgggttgaccctgggctgcccagcattcatgtggtagtgaaggaaggaggactggatcaatcccatttcaaagcatgtctctctgcactccacactgtcctccaatgacactgtaaggaaaccgctttaagacgtatcaacggctttaagtaaatgtattttctggcatctgggagacctgacattctgtgtcataatgaaaatctgtcatgtttctttattttaaaaatgataaaactgcaggttcacagagttacatggcttacttgaggtcacacggggatgagttttcagcactgccaataaaagcaatcacatgaattattcagtaattattcataggatccatataattcagtaaatattcacataattatttactagttgttcattgaccaattcgtacaaggcattttgctcaaaactgtgcttatatttggacattgtatcttcatcataatcctgtggtaatgctrttatccgtaagtaacaggtaagaaacctg

SEQ ID NO: 534149 - DNA, 323 bp, Homo sapiens
agggtttgcttttaggctttagcaggttggtctacaataggccttattgaaaagtgtgacacttattcctaaagcacatccattctagtgtctcagttggatacctgggtgctaatgaggtgtgcatcagttcttcccaccatggatggcagaaactccatcatacattccccaaccctcctccacctcaagtacctctggtccaaactcaatttcatagcagccacccytctgttaaatctgttagtcttttccttgtgcaggtagagtccactccttaataagtatgcacatggaaccccacatagactttgagagctgca

SEQ ID NO: 534150 - DNA, 323 bp, Homo sapiens
agggtttgcttttaggctttagcaggttggtctacaataggccttattgaaaagtgtgacacttattcctaaagcacatccattctagtgtctcagttggatacctgggtgctaatgaggtgtgcatcagttcttcccaccatggatggcagaaactccatcatacattccccaaccctcctccacctcaagtacctctggtccaaactcaatttcatagcagccacccttctgttaaatctgttagtcttttccttgtgcaggtagagtccactccttrataagtatgcacatggaaccccacatagactttgagagctgca

SEQ ID NO: 534151 - DNA, 630 bp, Homo sapiens
ctgagaaatagcacttaaagaacagttctgggtaccgggccggggctttttgactgcccctcctgccactctccccacaggaattaagtctgaagcttgacctccagatagggcagccaatgtgggggaggcttaggratcagtaaagcaggaaggcttcctgcctgcaagctgggaagaagctgtgtgcaaaaggcacgctggtgacaatcgcccagcctggggaaggccagaagcatcaaactggtctggagggccggcggcgggggggggcgcccggagaggtaaaagaaaagggctggcaccccagcgtggtcagaagctgacactagacacccgcttccggaatcccagggtctcctaagggctcctcagcacaaactgccagggcaaatgctctcagattcccacacccgaggtgctcactccaaacgaaatctcatttcccaccactcaccttggcacaccttatgctgtacccatctccctaaatacaccaggtgtctaaaagtctgggcctcattcgtgttcttctctctgcctggaatgccaaccactcccactctatctccttccttcaaggtccagatcaatgtcacctctttcatgaaacctctccagatcacagca

SEQ ID NO: 534152 - DNA, 630 bp, Homo sapiens
ctgagaaatagcacttaaagaacagttctgggtaccgggccggggctttttgactgcccctcctgccactctccccacaggaattaagtctgaagcttgacctccagatagggcagccaatgtgggggaggcttagggatcagtaaagcaggaaggcttcctgcctgcaagctgggaagaagctgtgtgcaaaaggcacgctggtgacaatcgcccagcctggggaaggccagaagcatcaaactggtctggagggccggcggcgggggggggcgcccggagaggtaaaagaaaagggctggcaccccagcgtggtcagaagctgacactagacacycgcttccggaatcccagggtctcctaagggctcctcagcacaaactgccagggcaaatgctctcagattcccacacccgaggtgctcactccaaacgaaatctcatttcccaccactcaccttggcacaccttatgctgtacccatctccctaaatacaccaggtgtctaaaagtctgggcctcattcgtgttcttctctctgcctggaatgccaaccactcccactctatctccttccttcaaggtccagatcaatgtcacctctttcatgaaacctctccagatcacagca

SEQ ID NO: 534153 - DNA, 581 bp, Homo sapiens
caaggtcttaggacatcaataagagatggaaaccacctgctagaaggtgccacagtgggaagcttgttggaagggagcagtcactgaactgtcagggtgaatcctggctcctggccctcacacgccctttctccccttccttccttctctcctccctcctgtctgctytttcccctctctcccctgcatccctcaggtaccttccatgggccctcacccctccttttcagaggctccaaagtgagccctcaaaatacttggtaaccttgggcatttccaaaactggagagatttggccacaccatttttaggagctaggaacgtcctccagaactcttgcctaaatttttctgctgatgagaagagaacaaaagagtttccatctgatctggtcctaaggcaactgctccttggagcagagtctgggcaggaaaaagggggttgcccagggccccagacttgcccctcccagctgctgtgctcctctccccttcactgcgggaggctggccagggatcgggaacctctgttctccacagttgctgcgatcccaggcccaaatctaaatattggctgattta

SEQ ID NO: 534154 - DNA, 468 bp, Homo sapiens
tctctggccacatgaacctttcataatccattccagactacttctcattcaccaagtagaccgtgcattttcccctctttaagcgtctgctcttttccctttgctgagaatgccatctttctctgctcacttggtcaacttcttctgctcatcctttaaggccagctccagatgtcatttcttttctgcacacattccctgatctccctccctstcttccagacaaaattaattgctcttccctttttgtttccatagcattttgtatgtgcctctagcagagtgctatactttgtaacagttacaggtttatatgcctcctttctttactagactgcgagctgctcattggtggggaccagatcctgagcatctgtctctgtaaggcttactgtagtgctcagtgcatcgctgggactcagtagggacatcagcaacagaaaggagtcttcctgcagtatatgagca

SEQ ID NO: 534155 - DNA, 468 bp, Homo sapiens
tctctggccacatgaacctttcataatccattccagactacttctcattcaccaagtagaccgtgcattttcccctctttaagcgtctgctcttttccctttgctgagaatgccatctttctctgctcacttggtcaacttcttctgctcatcctttaaggccagctccagatgtcatttcttttctgcacacattccctgatctccctccctgtcttccagacaaaattaattgctcttccctttttgtttccatagcattttgtatgtgcctctagcagagtgctatactttgtaacagttacaggtttatatgcctccttyctttactagactgcgagctgctcattggtggggaccagatcctgagcatctgtctctgtaaggcttactgtagtgctcagtgcatcgctgggactcagtagggacatcagcaacagaaaggagtcttcctgcagtatatgagca

SEQ ID NO: 534156 - DNA, 468 bp, Homo sapiens
tctctggccacatgaacctttcataatccattccagactacttctcattcaccaagtagaccgtgcattttcccctctttaagcgtctgctcttttccctttgctgagaatgccatctttctctgctcacttggtcaacttcttctgctcatcctttaaggccagctccagatgtcatttcttttctgcacacattccctgatctccctccctgtcttccagacaaaattaattgctcttccctttttgtttccatagcattttgtatgtgcctctagcagagtgctatactttgtaacagttacaggtttatatgcctcctttctttactagactgcgagctgctcaktggtggggaccagatcctgagcatctgtctctgtaaggcttactgtagtgctcagtgcatcgctgggactcagtagggacatcagcaacagaaaggagtcttcctgcagtatatgagca

SEQ ID NO: 534157 - DNA, 459 bp, Homo sapiens
gtacccatcctgcaccctcgctgcagccacaagctcrtcttgggctcccctcaacctacctgactgatgaggaccagaaacgcgggaacattctgccaccggtttccaaatcacagacgatcccagacattccactggctccaagttaatgaagcagcttgcaaactcctgctactccgccgtctccctttgtgcaaatgcgttcatcagccccatgcttgcaaaaagctgatctcttctagtgccacacaaaagccagatgcaaatggaaacctgcaggagggagacttgtctgtaatttgtgcttttaggttggaattgccacctctgtttctgacttcagtgcctctgacccgggcctggaaagatgaggagtgggaacctcctggcagccaagagcatcctgtggacaaaggagacaggggaacgcaggagccaaacgcacacccacactttgtc

SEQ ID NO: 534158 - DNA, 392 bp, Homo sapiens
agggcctgtccccatcctgtccctgagcccagcccagaaccctggactctctccaggccccaactcagctgcctcccagccatgctcggctgtccataccttatgctccatacmccagcacgcccagctgagcccagccacgtccacagttccccagctccctcagggccctcaaaccgacccactccccctttagtgcttcccatgttcaggctccccacagacccacccaggtactccagccaggaccctgggcagcctggacctctctccacccctttgtcctcaccaaccctccacacaagtcacgggaacctttctagattccaactctaacatccctctttcaccaaagaccttccgctgcctcgggataagtccaagcacccccc

SEQ ID NO: 534159 - DNA, 555 bp, Homo sapiens
gtctttttcatccaatcttatggggaagaaaatgttcaaaattcaataaatattcattgaacacctactatgtgctaaggactatttagatagtagaaacactgcaatraataatgcaaaatgcctttgtgaaagttataatctatggaaaatggaagagagagagtagaaatacccagtatgaaacttgacaattcaatacaaagtagccaaattatttaaataaacactttaagcacctggtatatggcacagttttgagtgatgatgtgttaaattcaaaatcaggaatttttatctaaactgtgtatctacaataatggattatataaaatgagacagtcttataagccttgtttctagatattttatagccttttgacaattatttaagtctgcatgtagaatttatcaccacttaagtagaatctattaggaccgtagaatctcagagatgaatttaaatggtctaccttctctatttctattatctatactacactcctgctcccatggctgaatcctctccctgatacattaagcagtaattatcag

SEQ ID NO: 534160 - DNA, 492 bp, Homo sapiens
atgttgagaggaaaattgaattcatttgaaatcatttattcatatccctaaactgaacggcatattgattttgatattcattttcactatattcaagaggccttcgatgtggagccctttccatttttaagtgtcctcaaatcaccatgattgtactgcctctctctgaatggcaaaaaggcacagccacacacaagggagacgtttcctgctcagtttagctgaatttaacaaacattggctgaatggcttttatgtgccaggtactgcacaagggctggaaaagggaagatgaaaattctgtatctttgctctaaagaatctttaaacctaccggggagaacagaggcataaataccygagctgtgctcaggtcactgtgggaggaaaggggaggggcaccgcacacaggctagggatgtgagcagcagcaggagttagtgagtgggggaaggtaaaaggtggaggcaggtccatgggcctgaaacagca

SEQ ID NO: 534161 - DNA, 394 bp, Homo sapiens
aaatttcagaaaaaaagaaaacagtcttggggctgttttcagagtgagacttagtctcaaaaaaaaaaaaaaaagaagtctttgcattaaatggttacmaaattatctgaaaatttataggatgataacaattatagggatataataaacatgaaatgcaaaactgggctatttgcctgggctcgtacttctttttctttcttatggtttctgtatattttgttttttttatcctacttatttcattaatggcaggacatcaagtatacaagaacataaaaatttgtttcatctgtcaaatgcaagtttgtattaggtaatctctttgattttatgattttatttgctattatgggaaacgtttgtgattcatccatgcaagtgttgagtctaa

SEQ ID NO: 534162 - DNA, 456 bp, Homo sapiens
tttcaagtgggagtcttacaggtgtagaagatagaagatgaaaggtgttttatgacgtaggctccaaaatcagagtcaattctgccatattcatyggtcaaagcaaaccacaggaccagtccagattcaaggaaaagagaaacagactatacactctgaagcacattggatatcatcataagttaaacctctctttctcaggggaaatgattttaaagcacagaggtaatttgaacccgtgaaattgaagttgaattgcaaataaattacagttttattttattttattttattttattttatttcattttattttattttatgagacagggtcttactctgtccccaggctggagtgcagtagtccaatcacagctcactgcagccccaacctcctgggctcagatgatcctctcacctcagcctcccaggtagctgggactacaggcacacacc

SEQ ID NO: 534163 - DNA, 384 bp, Homo sapiens
tctgatggtttaaaagtggcacttctgcctttgctcgttttctcctgccgccataaaagacttgctttgcttccccttctgccatgatttaagtttcctgaagtccctgcagccragtagaactgtgagtcaattaaacctccttcctttgtgaattacctagtctcaggtagttctttttggcagtgtgaaaacgaactaattcagcagttaagataatcaagaaaaaaataacttgtgagcccacaattttctatctaaaaaaatcaccttccagtataaaaggcgtagacaaactgttatctataaggaagaactcagggaatattgagtaatctaataaagaaacagcctaaaacaaccaaaatgcctagagagaagaga

SEQ ID NO: 534164 - DNA, 264 bp, Homo sapiens
cacacagctgaggcaatcactaagtaacaggccaaatgtctctccatgacttctctttctaattctacttgggattcctccattccccaaagtttgttgtctaaaaaacaagaccactttctttgtctgaaaaaaatgtcagtcctctcctactaacaacattgcatcactgaattccagtgggctgtgtaaagaatcccccacacaaagctgacaaatyatgcctgaggagaagatgtttcatagacagagagaacattttta

SEQ ID NO: 534165 - DNA, 666 bp, Homo sapiens
tgtgaatgcactcactgttaatkttggccttttgtaaaggtctcagctttaaatgtttataataaataagtagggaggcttgagagatggtaacagcttaaagcacaacacgaacacccaaaacgcctcagtattaaacacttcctggagagatgacctgctgaatgttctattttgcccttcccttcttccacttaggtagaattatccctaattgtacaaaaaggctgtgtgatgctggttttttctttgacattatgtgaagatttcattttctccaagtatggtgcaatgcacattagaggaatttgccaggtatattttccccctaaaacacaggcaagacagaagcagcagctaccaaagcaagtcatagcagtgagtcagccagccagctatcatttgcaagggctatttcaccttctttaaattatctttccacagaataggtataaaaagctaaggagagacactcatgcaacgtttctgacttcactattaatactttcacataaaatatatatacaggccgtgtttcaattaatttacctaaaattaacttactaaaatgttggttgtaaatattagttgtggatggataatagcattttgatgttcttgatgaataatttgatatagatatggaaggaaatgtacagaacattt

SEQ ID NO: 534166 - DNA, 627 bp, Homo sapiens
ttgaggttcccagccatctgtgagtgtgtgtgatttataaaagagacrctaagctactcatttgtctgatcttcctatcctgttctctttctcgtttgcccaatagcagagatataatggttccagagaatgttatacaaatgccaaataaatagccccatctcatgaaggacatcatgccttatcgctattcgcaataatggcagctagaatgagagcaatgatttcaattcccctccttatgatttctttttcattctcctctgaagaaggatagagaaaaaggcagcttggcggctccagatcaatcttgccctgagcaccgtgaggctgctctaaggagcagtggcattgacaagcagagatgtatgaggtatgccagcaattgtcccccaaacacagcagtttttcagcattaccaatgagctggattggattaagcatatttgcaccaaaagcaaaataaatattgctttatttaatgccactaaaaggttgggattcaattgcccttggcctgaggcaccttccagttctattgattgggccatgtcagaatgccagataatctgtcatcaacagcccctgaaaaatgcttagcatgtgggttgggctctgctgttgtgt

SEQ ID NO: 534167 - DNA, 441 bp, Homo sapiens
ctctaagaaggaaaggaggaaactgatgttcatccaggacttggactgggccaaccttggtgttaatgttgctgtgttttatctgattttatcagcaatgtgaggatatcactgtgttgatgagacagacaataaagagggaatggatgttgtgaattatagtaagaacatggccatagtatagacatttattgagtataattttatgagaatatataggtttaggagatatcaatagagctttcctggaggcagcggagaagyactaaatgcatttgggtagatatgtgacttgatgaaattccagacattcagggttagctctgcctcagtgtttgatgggtggatccaacaagaggaaagggctaggtgagggacactgaggaggaccgtgttccctgtgtttcttctgtaccctgagggggtcaaatgaaaagtcag

SEQ ID NO: 534168 - DNA, 570 bp, Homo sapiens
gctggccacagccaggggacctgccctcacccatcccgccgcccccgcccttctgccccacctttgctctctccagttgccttgtggatgtcactcakcttcccctcagctcttgatttgagagaagggccagggatcatgcttaggaccaaactggctccacagcacccctctctttacttaagggactgagggggagaacaacacctgtcagaaaaatcccagtcccttccactcacacacatcttgagaatttccccggaacccatgccctctctttgctcaaggtcagagccctgaccacagcccacagtggactgagctgacccgggccagattgggatcttagctgtctccctccacacatgccctcttttggcacatagtaggtaccccatatgtgaatgttgaagtggatggagaagcccagcctgctcactttaaagccatgccttcaaatagcacccagtgactagctcttgcgttttaatggtgcaaatgtggcaataacaaaggtggtaaatgtctatttgtcttcccatcttctagcaaggccattctccagttcct

SEQ ID NO: 534169 - DNA, 570 bp, Homo sapiens
gctggccacagccaggggacctgccctcacccatcccgccgcccccgcccttctgccccacctttgctctctccagttgccttgtggatgtcactcagcttcccctcagctcttgatttgagagaagggccagggatcatgcttaggaccaaactggctccacagcacccctctctttacttaagggactgagggggagaacaacacctgtcagaaaaatcccagtcccttccactcacacacatcttgagaatttccccggaacccatgccctctctttgctcaaggtcagagccctgaccacagcccacagtggactgagctgacccgggccagattgggatcttagctgtctccctccacacatgccctcttttggcacatagtaggtaccccatatgtgaatgttgaagtggatggagaagcccagcctgctcactttaaagccatgccttcaaatagcacccagtgactagctcttgckttttaatggtgcaaatgtggcaataacaaaggtggtaaatgtctatttgtcttcccatcttctagcaaggccattctccagttcct

SEQ ID NO: 534170 - DNA, 562 bp, Homo sapiens
actcagaagtggcctgggcatgcacgccgcatgtgccatcacttaatgctggtttggtttgactttccagaaaccagccattcttctgcttgcccagatgctgaacttctcattcttcaagagctggttcagataatgcttctgtgaaaatgtccctaccccacgtacacagtctgaggccatttgctctgtgctccccaaaaccacatacagaatggctgagtcactcaatgctatgatacaagtctttgtcacctgcctgtcccactacccttgagtcactgacagcacagttccagtctcttgcgtctctgtgtcagcactggtgaggtgcctgccacrttccatgtgttccataaatgttctttttcagaaggaatttgagatgaacaagggcttggggatcattcagcaggatacagacgctgacagccggcacgcagcggccacaccggcacagttaatctcttgactctgacaccacaggaagcagaccccatacataatgctggctttattttctccacgttcaggctaatcagtcctaaacactcttcttctt

SEQ ID NO: 534171 - DNA, 562 bp, Homo sapiens
actcagaagtggcctgggcatgcacgccgcatgtgccatcacttaatgctggtttggtttgactttccagaaaccagccattcttctgcttgcccagatgctgaacttctcattcttcaagagctggttcagataatgcttctgtgaaaatgtccctaccccacgtacacagtctgaggccatttgctctgtgctccccaaaaccacatacagaatggctgagtcactcaatgctatgatacaagtctttgtcacctgcctgtcccactacccttgagtcactgacagcacagttccagtctcttgcgtctctgtgtcagcactggtgaggtgcctgccacattccatgtgttccataaatgttctttttcagaaggaatttgagatgaacaagggctyggggatcattcagcaggatacagacgctgacagccggcacgcagcggccacaccggcacagttaatctcttgactctgacaccacaggaagcagaccccatacataatgctggctttattttctccacgttcaggctaatcagtcctaaacactcttcttctt

SEQ ID NO: 534172 - DNA, 498 bp, Homo sapiens
gggcgcaaagcagaagagggagaacgtccacccagagaggacatccaagtggccgcaccatgagcagctggtgcctgagcccgtggggaccttctgagaggccgtatccattctgccacaggaactggctggtcacatggaaaaggcggatgtctgtgtccatcactctcaccctccaccgcctgagagctgcccacggtgggtgaacccctcccactttcatgcagcataaggactcrggagcactgagaaggcttttctttacatcttcagtgtcaaaaatcccagggaaagagcaagagatgagtggtaaactttcaagccgaggtgctgtcggcatgaggggagttgcagcctcacagaatcttccacactgctgcgctggagtcagaggggaggggaagggatgtgggacatgcacaataccacgcggctgctatgagggaccaggatggggacacacatccagaggagggggacacacggccaggccagggg

SEQ ID NO: 534173 - DNA, 451 bp, Homo sapiens
tcaattccacatgagatttgggtagggaacagagccaaaccatatcaggtggtgagtgagaatctgttccaagcaccaaggtgacttctggtgattttctggcaatctttggygtcctttggcttataaaagcatcatcccaatctctgccttcatcttcacttggcattctttctgtgtttgtgtctttgtccaaatattcccttttataagaacattagtcacaagggattagggatccaccctgcttcactataacttcgtcttaatgagttatatctgcagtgtcctcattttcaaacaacaaataaattttgaggggacaaaattcaacccataacagttctggttactgcaaaacttaatggcctcaatcacacagttgatggtgctcacaaattcagacaaggcccagtgggaatggcttgtctcataaggtctggagcctcag

SEQ ID NO: 534174 - DNA, 451 bp, Homo sapiens
tcaattccacatgagatttgggtagggaacagagccaaaccatatcaggtggtgagtgagaatctgttccaagcaccaaggtgacttctggtgattttctggcaatctttggtgtcctttggcttataaaagcatcatcccaatctctgccttcatcttcacttggcattctttctgtgtttgtgtctttgtccaaatattcccttttataagaacattagtcacaagggattagggatccaccctgcttcactataacttcrtcttaatgagttatatctgcagtgtcctcattttcaaacaacaaataaattttgaggggacaaaattcaacccataacagttctggttactgcaaaacttaatggcctcaatcacacagttgatggtgctcacaaattcagacaaggcccagtgggaatggcttgtctcataaggtctggagcctcag

SEQ ID NO: 534175 - DNA, 602 bp, Homo sapiens
ctgcaaattcccataacataactataattcctttccattttcctttggaaaaaaaattaggctgaagtcactatacatatgtttatttgacttgctagattttggaaattttttgaattttttgctgcaagaacttgatgtttaatttggaaacactgtttattaacctttatacaactgtatttttacagagtagaaaagrtcataaatcttagttggattagtaacagaaatacgttgggaaataacggaagaaggattttaaattctgattattataggaaaagataaaaaacttattcagtatttgaaatacagttgtgtgtgcttttgttcaggctcctataacaaaataccataaactgggtagcatattaacaacagaagtttatttatcaagttctggaggctgggaaggccaagatcaaggtgccatcagatttggtgagggccacttcctagttcagacacattattttcttgctgtgttcgcacatggtagaagggcaaggggtcctttttgcatcccttctataaggttaccaataccattcatgagggctcaaccccgagacctactcaccttccaaaggccctacctc

SEQ ID NO: 534176 - DNA, 645 bp, Homo sapiens
agctgttctgcacacctgccaccattccaaattaccatttcccttcttttcagtttctgcttcccttccttccttcctccttctttccctccctctttccttcttttctttcttttattctttctttctttgagacagagtcttgctctgtcacccaggctggagtgcagtggcgtgatctcagctcactgcaacctccacctcctgggttcaagcaattcttctgcctcagccttctgggtagctgggactacaggcatgcaacaccacacctgactaagttttgtatttttagtagagatggcgtttcaccatgttggctaggctggttttgaactcctgaactcaagtgatccacctgcctcaacctcccaaaatgctgggattacaggcgtgagccaccacacatggcctatctttcttttattckttccatctctggctgtctgttctgtcttcctctcttctttcttctctactttttataattgtacccactctggtgaatgtgtaatgctatcttctttaattttatttgcatttccctgctgagtttgcgtaccttctcatatactttctggttacttgaatagactcttctgtgaaatagcttttcagttcttggcttttttggggttcttttaa

SEQ ID NO: 534177 - DNA, 639 bp, Homo sapiens
ggggcattggatgccagtttttctcagaaagaagatcaaaggtactggtgaattggcaagttcagaatataaagctgagggaagagtgttacaagctgttgaaagcctatgggaagaagttgggatgccgaaaaggaaagcaacaacagtctggcagagatcaacccccaaagaacttgaagacacgtggaaagggtaggtggggctgcttctctgctcccctcacccctatgacagtctgatgaccaccaaactgttggagagcccctrtgcccttgtgaccatggacaacactgtcagtggcaatttggaaacttcctgcagacagagaactgggtggacagctcatgcaagcacgcccatacttccctcagacctgtactgagatggaaggtatcatactggctgtgcactcatggtgggccactgctctgccccgggattctctgcccttgaatcaccacaccaccagatcgcctacaaatatgccccacaagccagtctgactctggcaagcacaggggaccaacagttccctgaggagttgcaggtccccctggagatctagttttaggtaggggccacccataagggagagtagcacagcccaccaaagtcccccttgggacaaaggaaaca

SEQ ID NO: 534178 - DNA, 638 bp, Homo sapiens
tggagccaacaagtctccataccccaccccactagtatgtaagctacttgaggacaaggaaacttcttctctgttttactgctgtacctgcagtgctyagaagagagcttggcacagggaagaagcttagtaaatatttataaaataaatggatgaattagtttttgtgaagatggatttaattttaatgttgttttcttgaatttgtgatatccaatatcatttaagaatccagatatttacccattaaatagagaaatgaatacttagatcttatccacgagtttacagacttctggaattttgtcttatatttgtttttacttcttcattatcagctctgaatcccaatccagtaatatgtttttctcagtttctcaatatgctcataaaagaagcaaataatagtgtttttatcctatttattactataataaacattcacttacttgtaggtagttgttctcggcaaaaataaatgaagtactaatgcatgacttgctcaaaggaaaaatgtttttagaagcagctccttaggtgtgcaaattacaaataaacaagcattgttattgtaggggccaagggaaaacttccccttcaccctctgaagtttcggtgaaaattcaactcataaaagt

SEQ ID NO: 534179 - DNA, 638 bp, Homo sapiens
tggagccaacaagtctccataccccaccccactagtatgtaagctacttgaggacaaggaaacttcttctctgttttactgctgtacctgcagtgctcagaagagagcttggcacagggaagaagcttagtaaatatttataaaataaatggatgaattagtttttgtgaagatggatttaattttaatgttgttttcttgaatttgtgatatccaatatcatttaagaatccagatatttacccattaaatagagaaatgaatacttagatcttatccacgagtttacagacttctggaattttgtcttatatttgtttttacttcttcattatcagctctgaatcccaatccagtaatatgtttttctcagtttctcaatatgctcataaaagaagcaaataatagtgtttttatcctatttattactataataaacattcacttacttgtaggtagttgttctcggcaaaaataaatgaagtactaatgcatgacttgctcaaaggaaaaatgtttttagaagcagctccttaggtgtgcaaattacaaataaacaagcattgttattgtaggggccaagggaaaayttccccttcaccctctgaagtttcggtgaaaattcaactcataaaagt

SEQ ID NO: 534180 - DNA, 594 bp, Homo sapiens
ctgctggaacaaacaaaaaacaacaacaacaagaaagaaacgacacctgggattatagctctagagtcacaccatccgatagaactgtctgtcaagatgcatgagagctgcccttcctggtagccattagacacaattggctagtgtgaatagaaaactgcattttacattttatttaattccgttgactaaatattcaacttacatattcatcaatggctagtggctgcctgattggacagagccgctctaaataacctaaaggtatagggagaagagaggacatggagggggacttcatgagttgaggacagacttctgctggttctgggaagggatctgccctccccagaatcactaccgtataaaacccagttataaagtggctgctcaggggttacgagaggcaattgccaacagcaatacaaagayatatgagcaccaagaaaagtaagcagggagagagacagaaggagaaaaatataaaatatactctcatcaaatgagactggaatcaaatgtttcaaacacaggaagaaaatgtatcttataaaagtcaataaaactctagtattgacaaacattttggaagat

SEQ ID NO: 534181 - DNA, 466 bp, Homo sapiens
gtgtttcttgcttgatcatagggctctatccgtacattcctgaactgatattgatgttcttgacctcttaattccttgtgacttacaaatatgtcaccagactcttgggatctcaaaaggactcaagaacaaccatgtaattctgatcaagcgagaggcaggagtacttgactgacagatttatgctgggaaaagtttaaagtaaagggaaaataaaatgttattttatagtcattaacctcactagcttgagaaagacgaggtatgcatgcatgtatgtacacattcagcaaacatgtacaagaaaccgacaagggaagaagatttgaagtaacaaatggtagaaaattgtggtttaatgactcatactagcttgctttctagtggttaataaatgtttattataatgattaaaatatatacaattgttataactgwtatttgttttgtatttaagactttataa

SEQ ID NO: 534182 - DNA, 655 bp, Homo sapiens
tgccctataagcagagaccagagacactgctaggattttctctctggggagtcatgctatgagcagagtggaggtctcaaaacagcaaatttctgcttaggaaatgaacacagagcaccacctcagggcatgtctcagcaaggtggcttgcagcaaagccttccctactccgactgcaactgaagttgcaactgtcaagacaaaactaaataaaaccctcctctctccaagccctcaagttttacacaggaacccatattrcaatttgttagaagacaccacaaatcctaatacagcagaacagtatgaaaagttgcatcaaaaataatgatgctcaaaggaagagaagcaatgtgaggaatcataattataactctatgggaaagcgattctctcaatgtttgtaactgcttcttcatgttctatttttttagactgtatacccaatgggtttaaaatttcagtgcttccattgactaagtgtgtatccttgggcaaattattttatttattttattatttatttatgtatttatttatttactttatttttctcagtttccacacattaaagtgggaattgatttaatctaccttacaacactgtgtgaggattatttgttaaaacttagaacagtccctggcagtaatcatc

SEQ ID NO: 534183 - DNA, 594 bp, Homo sapiens
acttggctctgagcctgatggtctaggcactgggaatgacaatccctgggaacatgaggaaggagaccaagcttgggcatgatttggttgtctctgcaggccatttggaagtggggctgtgtttataaatttattttcctacctgatgccctctctggtgctagaacacactctaccgaagattgtttttttcttttctttagggacttgtgaagtggttcttcctggaaagctgaggcacacaaacccagtgggctgatgggaagtctaaatccatatcatatttttcaccagtcttcctctgaatcacatccagaccaggctcctagcatctttccaggtgctttgagaacagagcctgtttctaagatgcaaagaaacaragtgcgaatcgaagtcagcacgtatgaatacatgatggaagtgatgctcctaccttccacggaggggctagacgactccaagtgtttaagctgtatacactgcttgccagagcttgagcctgcagactcaagcctgccatcacagccaggaatatgctaagtactggattctgacagggagagaaaggcacagggtggggtagaaacggct

SEQ ID NO: 534184 - DNA, 594 bp, Homo sapiens
ctgctggaacaaacaaaaaacaacaacaacaagaaagaaacgacacctgggattatagctctagagtcacaccatccgatagaactgtctgtcaagatgcakgagagctgcccttcctggtagccattagacacaattggctagtgtgaatagaaaactgcattttacattttatttaattccgttgactaaatattcaacttacatattcatcaatggctagtggctgcctgattggacagagccgctctaaataacctaaaggtatagggagaagagaggacatggagggggacttcatgagttgaggacagacttctgctggttctgggaagggatctgccctccccagaatcactaccgtataaaacccagttataaagtggctgctcaggggttacgagaggcaattgccaacagcaatacaaagatatatgagcaccaagaaaagtaagcagggagagagacagaaggagaaaaatataaaatatactctcatcaaatgagactggaatcaaatgtttcaaacacaggaagaaaatgtatcttataaaagtcaataaaactctagtattgacaaacattttggaagat

SEQ ID NO: 534185 - DNA, 594 bp, Homo sapiens
ctgctggaacaaacaaaaaacaacaacaacaagaaagaaacgacacctgggattatagctctagagtcacaccatccgatagaactgtctgtcaagatgcatgagagctgcccttcctggtagccattagacacaattggctagtgtgaatagaaaactgcattttacattttatttaattccgttgactaaatattcaacttacatattcatcaatggctagtggctgcctgattggacagagccgctctaaataacctaaaggtatagggagaagagmggacatggagggggacttcatgagttgaggacagacttctgctggttctgggaagggatctgccctccccagaatcactaccgtataaaacccagttataaagtggctgctcaggggttacgagaggcaattgccaacagcaatacaaagatatatgagcaccaagaaaagtaagcagggagagagacagaaggagaaaaatataaaatatactctcatcaaatgagactggaatcaaatgtttcaaacacaggaagaaaatgtatcttataaaagtcaataaaactctagtattgacaaacattttggaagat

SEQ ID NO: 534186 - DNA, 518 bp, Homo sapiens
tcagcccccaaccattcaagtcttcccatctgagactccagacattgctgagcagaagcaagacatcctgaggcatgcagagatgttggtcagtgggtacaaagttacagttagacagaaggaataagttctgktgttgtattgcacagtagggagactatggttgataatattgtcttgtatatttcaaaatagttagaagagaggattttgaaatgttctcatcacaaagaaaagataaatgtatgtggtgatgactatgttaaataccccgatttgatcattgcacaatgcatgcctttattgaaacatcacactttaccacataaatatgtatagttactacgtgtcagttaaaacttaaataaataaataacagcgaaagagaagaaaagaagcatgctgttgcactgtgttccacctgagtttttcatccacagaattatgattataataacaataataaattattatattaaagccaccacactttggggtaacttgttatgcagcaatag

SEQ ID NO: 534187 - DNA, 648 bp, Homo sapiens
tgtttcagcccccaaccattcaagtcttcccatctgagactccagacattgctgagcagaagcaagacatcctgaggcatgcagagatgttggtcagtgggtacaaagttacagttagacagaaggaataagttctggtgttgtattgcacagtagggagactatggttgataatattgtsttgtatatttcaaaatagttagaagagaggattttgaaatgttctcatcacaaagaaaagataaatgtatgtggtgatgactatgttaaataccccgatttgatcattgcacaatgcatgcctttattgaaacatcacactttaccacataaatatgtatagttactacgtgtcagttaaaacttaaataaataaataacagcgaaagagaagaaaagaagcatgctgttgcactgtgttccacctgagtttttcatccacagaattatgattataataacaataataaattattatattaaagccaccacactttggggtaacttgttatgcagcaatagataatcaggatatcagtgtcttaagtttaattcccaatactgtttttggttagcttcaggattaggtggtccctaaatttaactttaatacctattttaatttttttaaactcacctaaagtaatc

SEQ ID NO: 534188 - DNA, 648 bp, Homo sapiens
tgtttcagcccccaaccattcaagtcttcccatctgagactccagacattgctgagcagaagcaagacatcctgaggcatgcagagatgttggtcagtgggtacaaagttacagttagacagaaggaataagttctggtgttgtattgcacagtagggagactatggttgataatattgtcttgtatatttcaaaatagytagaagagaggattttgaaatgttctcatcacaaagaaaagataaatgtatgtggtgatgactatgttaaataccccgatttgatcattgcacaatgcatgcctttattgaaacatcacactttaccacataaatatgtatagttactacgtgtcagttaaaacttaaataaataaataacagcgaaagagaagaaaagaagcatgctgttgcactgtgttccacctgagtttttcatccacagaattatgattataataacaataataaattattatattaaagccaccacactttggggtaacttgttatgcagcaatagataatcaggatatcagtgtcttaagtttaattcccaatactgtttttggttagcttcaggattaggtggtccctaaatttaactttaatacctattttaatttttttaaactcacctaaagtaatc

SEQ ID NO: 534189 - DNA, 518 bp, Homo sapiens
tcagcccccaaccattcaagtcttcccatctgagactccagacattgctgagcagaagcaagacatcctgaggcatgcagagatgttggtcagtgggtacaaagttacagttagacagaaggaataagttctggtgttgtattgcacagtagggagactatggttgataatattgtcttgtatatttcaaaatagttagaagagaggattttgaaatgttctcatcacaaagaaaagataaatgtatgtggtgatgactaygttaaataccccgatttgatcattgcacaatgcatgcctttattgaaacatcacactttaccacataaatatgtatagttactacgtgtcagttaaaacttaaataaataaataacagcgaaagagaagaaaagaagcatgctgttgcactgtgttccacctgagtttttcatccacagaattatgattataataacaataataaattattatattaaagccaccacactttggggtaacttgttatgcagcaatag

SEQ ID NO: 534190 - DNA, 648 bp, Homo sapiens
tgtttcagcccccaaccattcaagtcttcccatctgagactccagacattgctgagcagaagcaagacatcctgaggcatgcagagatgttggtcagtgggtacaaagttacagttagacagaaggaataagttctggtgttgtattgcacagtagggagactatggttgataatattgtcttgtatatttcaaaatagttagaagagaggattttgaaatgttctcatcacaaagaaaagataaatgtatgtggtgatgactatgttaaataccccgatttgatcattgcacaatgcatgcctttattgaaacatcacactttaccacataaatatgtatagttactacgtgtcagttaaaacttaaataaataaataacagcgaaagagaagaaaagaagcatgctgttgcactgtgttccacctgagtttttcatccacagaattatgattataataacaataataaattattatattaaagccaccacactttggggtaacttgttatgcagcaatagataatcaggatatcagtgtcttaagtttaattcccaataytgtttttggttagcttcaggattaggtggtccctaaatttaactttaatacctattttaatttttttaaactcacctaaagtaatc

SEQ ID NO: 534191 - DNA, 572 bp, Homo sapiens
acagggcttctgtccctttggctggttttgaataaccctgagaactccactatacatgaacaccttctttattatgaaacaaacatcagctacactgggtctcaaggtaacataaggatttccaaaatcaattaaatgcttaattaacaacaaatggtacttggtataacatattccacaataataaaaataatgtatccaggcacggaggcacatatctgaagtcccagctacttaagcatctgargctggaggatggcttgaactcacgagtttaagaccagcctgggtaacacagtgagacccccacctctaaaaataatactactttaagaagaagaagaatttagacaacactgcagtttgtcataatgaaatctgatctctgacactatttgagccagtccttccacagtgacaaagaaagaaagggacagataaattcagggaactgaagctgaagaaactttatttgtttatgaataactagattaatcacagttcacctaggaaaggctccctcagagtctgtctgtatttagataggggttcatgctagagtatgactcatg

SEQ ID NO: 534192 - DNA, 593 bp, Homo sapiens
acatagaaatcaccattcttttcaaactcttgggcatccacccacaccaccattctttttttttttttttttttttgagacggagtcttgctctgtcacccatgttggagtgcagtggcacaatctcggctcactgcaacctccacctcccaggttcaagcgattctcctgcctcagcctccctagtagctgagatcacaagtgtgtgccacmatgcctggctaatttttgtatttttggtagagacagggttttaccttgttggccaggatggtcttgaactcctgatctcatgatccgctcgcttccgcctcccaaagtgctgggattacaggcgtgagccactgtgcctggccgcaccaccattcttgatccctcacggctgtaatctgtggttttcctggtcgttttctcctattcatcactcttcagcacatctcatacattgtctcctcctgtaccccaagtgcctcagtaatttcagaaacttctgaattcatcaacttagcagagttgaacaccttgttaggaaactgaactggagtccactagcccagcgcagtgaggccacacatccacactgaggtttgcag

SEQ ID NO: 534193 - DNA, 673 bp, Homo sapiens
tcttttcattaccgtggttgcaaacttggatgatggcaggagcatttgtgcttggctacaggattccaattcctgcctgagatttcagaatacccttcctgcccttctttgaagatggccaggatccttgaggatgccttgcagttgttgggccaccctcgatttcccataaaggtggcatagccaccccctccgccaacacataccttattaaaatctttctcagtctcccttgaattctttcgtgtacatccggcactcgggcctgcaattatcttgcttttaaatcacctgcagaggaagaaggcatgcaggcagaagctggctggggcatgtcctggtcatcattgtgtgcccaggtagrcagtgggccctttgagaaaaggacggcattctcttcttgtcactcccccatccctaccacccctcactgagcatagtagaaatttaataaaaatttgtcaatagattaattgcatcattacctggttctgttgtgaaagcagaagctaatccccctgagactttactcccctgctttatttatttatttatttatttagagacagggtctcattctgtcacccaggctggagtgcagtggtgtgattatagctcactgcgcctcaaactcctgggctcaagcggtcctcctgcctcagcttcccaagca

SEQ ID NO: 534194 - DNA, 394 bp, Homo sapiens
tctcctaggctggatacagtggcacaattatggctctctgcagcctcaacctcccgggttcaggtgatcctcccacctcacagcctcccgagtagctgggaccacaggcaagcactgccatgcctggctaatttttgtatttttttgtagaggtgggktcttcgctatgttacccaggctggtcttgaactcctgggctcaagccatcctccggccttggcctcccacagtgtgtgagccattgccccctgtcccccaggtctcaagtgatttgatgtcccttcaactttcactccatgcagagaataaacctgcagtgttccgcaggataggaaaaagacggttacttagctgtatgtgatgaaagagggaatctgcttttgtgtcttaacca

SEQ ID NO: 534195 - DNA, 394 bp, Homo sapiens
tctcctaggctggatacagtggcacaattatggctctctgcagcctcaacctcccgggttcaggtgatcctcccacctcacagcctcccgagtagctgggaccacaggcaagcactgccatgcctggctaatttttgtatttttttgtagaggtggggtcttcgctrtgttacccaggctggtcttgaactcctgggctcaagccatcctccggccttggcctcccacagtgtgtgagccattgccccctgtcccccaggtctcaagtgatttgatgtcccttcaactttcactccatgcagagaataaacctgcagtgttccgcaggataggaaaaagacggttacttagctgtatgtgatgaaagagggaatctgcttttgtgtcttaacca

SEQ ID NO: 534196 - DNA, 645 bp, Homo sapiens
tgcctcaaacatcttcgtgagggcattggtacaatcctatcatccttactggacagataaaaacataaatgccaaggtctctggccacgttgtttgggaagtccaggccacagaccaatagcctaccttccagttcccagccctctctccttcyctatctctcctcccttgtacccatgaatcaccaggaacttggtctaagtaacatcaaatatgccaactttttgaagcacccagaagataggcaagatttttcattttttactcccatcttactcgctaggaagccatagccagaaaagaataagtattctaagactttctcttctgaaactgaaatttaagtgtgtgtgtatatatataatatatatatatatgaaatttatgtttttatttattttatttaagatagggtcgctctctgttgcctaggccagagtgcagtggtgccatcacagctcactgcagccttgacctcctgggctcaagcaattctcccgtcttagactcccgagtagttggtactactggcacacaccaccaccatgcccagctaatttttaaattttgtttgcagagaagaggtctcattatgttgcccaggctggtctcaaactcctggcttcaagccattttcctgcctcg

SEQ ID NO: 534197 - DNA, 645 bp, Homo sapiens
tgcctcaaacatcttcgtgagggcattggtacaatcctatcatccttactggacagataaaaacataaatgccaaggtctctggccacgttgtttgggaagtccaggccacagaccaatagcctaccttccagttcccagccctctctccttctctatctctcctcccttgtacccatgaatcaccaggaacttggtctaagtaacatcaaatatgccaacttttygaagcacccagaagataggcaagatttttcattttttactcccatcttactcgctaggaagccatagccagaaaagaataagtattctaagactttctcttctgaaactgaaatttaagtgtgtgtgtatatatataatatatatatatatgaaatttatgtttttatttattttatttaagatagggtcgctctctgttgcctaggccagagtgcagtggtgccatcacagctcactgcagccttgacctcctgggctcaagcaattctcccgtcttagactcccgagtagttggtactactggcacacaccaccaccatgcccagctaatttttaaattttgtttgcagagaagaggtctcattatgttgcccaggctggtctcaaactcctggcttcaagccattttcctgcctcg

SEQ ID NO: 534198 - DNA, 565 bp, Homo sapiens
ttgacataggatgggtccaggaatgtacagtcttctaaaagccaggtgaagacaatgtttaaaggaggaaggagtgatcaacaatgtcagttcgtgtcaattggtgttacttagtcatgtgtctgtgaagaatcatcttgcatagttaagtctcaggttctagtgtcagattaaatttaaatccttgcaccaccccttgctctttgagtgtctttgtgcaaattgcttaaattctctaagtctcaatctccccatctgtgaaatgggaatgacagtagtacctaygtggtaaattgtagtgatgagtaagtgaaagatgtttaaagatggttaaatggttagcacaacacctattacctgacaaacacttagtaaaagttagctattaatattcttattaatatagcctactatcattagaataatccatttatatatagtcatcagttgtcacttttctagctcttccataaggaataggttatatagcatttccaaactaggaagttcattgatagatatatggttccagatgcactgagcagaaaaactagttaatttgatt

SEQ ID NO: 534199 - DNA, 565 bp, Homo sapiens
ttgacataggatgggtccaggaatgtacagtcttctaaaagccaggtgaagacaatgtttaaaggaggaaggagtgatcaacaatgtcagttcgtgtcaattggtgttacttagtcatgtgtctgtgaagaatcatcttgcatagttaagtctcaggttctagtgtcagattaaatttaaatccttgcaccaccccttgctctttgagtgtctttgtgcaaattgcttaaattctctaagtctcaatctccccatctgtgaaatgggaatgacagtagtacctatgtggtaaattgtrgtgatgagtaagtgaaagatgtttaaagatggttaaatggttagcacaacacctattacctgacaaacacttagtaaaagttagctattaatattcttattaatatagcctactatcattagaataatccatttatatatagtcatcagttgtcacttttctagctcttccataaggaataggttatatagcatttccaaactaggaagttcattgatagatatatggttccagatgcactgagcagaaaaactagttaatttgatt

SEQ ID NO: 534200 - DNA, 653 bp, Homo sapiens
ttgtgttaagtacttatgtgtggaatttcccacttgtgatattatgtcagtgctcaaaagttttggattttggagcatttcagatttcagattttcagattagggatgtttaattgtattagtttactttggtccrtcttgtgtatataagtaactgtattagctttctattgctgctataacaaattaccacaagcttagtggcttgaagaccacacagtttttttattttacagttctataggacagaatttcaaagtgggttttgggtgggtacagtggctcatgcctataatcgtagagctttgggaggctgaggtgggaggatagcttgaggacaatagtttgagatcagcctgagtagcatagagagtagagtagagtaacatctctactaaatacatacatacatacattacatacaaacataatgagcctcactgggatgtaatcaaatggtcaacagtgctgcattccttttgaagcggctatgttgtctggggtatatacctggggttcgtagtcttgcaccaggaaaacttaggacacagacacacatgaagagtttaggggtggaggcttaataggcagaagaaaagagaaagaaaaacagctctctctatagagaggggtcttctgagcagaaaagacca

SEQ ID NO: 534201 - DNA, 678 bp, Homo sapiens
tgggacaacatgcatacaccaccatgtcctgctaatttttagtatttttttttgtagagatgcaggtcttgctattttgcccaggctggtctctaactcctggcctcaagcgatcctcctgccttggcttcccaaagccctggaattacaggtatgagccactgtgactggccatttcaaatattttgagtgaacaaagtttccttttaacagaaatctggatatcagccctggtaagattctagtgtttctgtttttttgttttgttttgtttgcttttcagctaagctgccagttattgaaagaacagatttttctttgcactaatcacaatagygtattttagaatttctggggcattttacttgtaatctgttgatgtccgtggctttctgtgcctcaggtgaactctcagtcatattatcattccctttggaggacacagttcttaaaccataatgcctcagaatgacttttcctttgtttcaggtctgttatttttcttagcttcccaataaatgaacacaccctttctaaaatcagcacactggttgtttaaaaccaagaaatattttcaacactagacttacaagggtactaataagccactatttactgaactttcattttccagcaagtctttactggacaatgaaagataaaagttatcttcctctt

SEQ ID NO: 534202 - DNA, 542 bp, Homo sapiens
ccccagaggagagtagaagggagcataggagagatgctatttgccagaggaatgaaccactggagggagaagagagattgaacagagggaaatggagatggatggcaggaagtgggaggaaaccctcatttgctggttgtccaaatgtcatttccttgaaactatttgacagccartttccccttgagatcttttctagggaatggccttctatcataaagagcttgctttcttcctttctctttcttttcttttttctttctttctccccttattcatgcattcctcccttccccctccctttcttcttttttctttcctactttccttttctttcttttgttctccctttcattcttcatttctttctctttccttttctttctttttgctattccttctctcttcctttctcccttccttttctccttccttcccacctttctctctttcttccacctaagtggctctgtggctctttagaaagtagactgggggtggacagcagctgccttggaagctggggctgcagagaaaatgct

SEQ ID NO: 534203 - DNA, 542 bp, Homo sapiens
ccccagaggagagtagaagggagcataggagagatgctatttgccagaggaatgaaccactggagggagaagagagattgaacagagggaaatggagatggatggcaggaagtgggaggaaaccctcatttgctggttgtccaaatgtcatttccttgaaactatttgacagccaatttccccttgagatcttttctagggaatggccttctatcataaagagcttgctttcttcctttctctttcttttcttttttctttctttctccccttattcatgcattcctcccttccccctccctttcttcttttttctttcmtactttccttttctttcttttgttctccctttcattcttcatttctttctctttccttttctttctttttgctattccttctctcttcctttctcccttccttttctccttccttcccacctttctctctttcttccacctaagtggctctgtggctctttagaaagtagactgggggtggacagcagctgccttggaagctggggctgcagagaaaatgct

SEQ ID NO: 534204 - DNA, 542 bp, Homo sapiens
ccccagaggagagtagaagggagcataggagagatgctatttgccagaggaatgaaccactggagggagaagagagattgaacagagggaaatggagatggatggcaggaagtgggaggaaaccctcatttgctggttgtccaaatgtcatttccttgaaactatttgacagccaatttccccttgagatcttttctagggaatggccttctatcataaagagcttgctttcttcctttctctttcttttcttttttctttctttctccccttattcatgcattcctcccttccccctccctttcttcttttttctttcctactttccttttctttcttttgttctccctttcattcttcatttctttctctttccttttctttctttttkctattccttctctcttcctttctcccttccttttctccttccttcccacctttctctctttcttccacctaagtggctctgtggctctttagaaagtagactgggggtggacagcagctgccttggaagctggggctgcagagaaaatgct

SEQ ID NO: 534205 - DNA, 616 bp, Homo sapiens
ttgcttgaacctgggaggcgaaggttacagtgagccaagatcatgccactgcactccagcctgggcaacagagcgagactccatcttaaaaaaaaaaaaaaaaaaaccgaaaaaaacaattagggtaaaaaatactactccarttgacgtgatcatttatctgaatgttccaagaatagtatcccctaaattactataaataatacatgaatttagcaaagatgtgagccaaaagaaacccacatagaacaattgcgtttctgtcagtgaaatatagctgcatattaataaaaacataaaataaaagagagaaagattccattcataaccacgaaccaaaaataaatttgcttgaggattttctttaagccacaagatttattccaagaaagttactaaactatagcagtaaaagtaaaggaggatatgaataagtggagagatacaccagattattattggaaaaatacatatataataaatgtgacagtgtttcaaagttaatagatttcatgtagtaccagtttaaggccttacaaaataattacagaagcagaataatagataacaatcttagaaaataagaaaagatacaaaaaaagtagggctttcacag

SEQ ID NO: 534206 - DNA, 616 bp, Homo sapiens
ttgcttgaacctgggaggcgaaggttacagtgagccaagatcatgccactgcactccagcctgggcaacagagcgagactccatcttaaaaaaaaaaaaaaaaaaaccgaaaaaaacaattagggtaaaaaatactactccagttgacgtgatyatttatctgaatgttccaagaatagtatcccctaaattactataaataatacatgaatttagcaaagatgtgagccaaaagaaacccacatagaacaattgcgtttctgtcagtgaaatatagctgcatattaataaaaacataaaataaaagagagaaagattccattcataaccacgaaccaaaaataaatttgcttgaggattttctttaagccacaagatttattccaagaaagttactaaactatagcagtaaaagtaaaggaggatatgaataagtggagagatacaccagattattattggaaaaatacatatataataaatgtgacagtgtttcaaagttaatagatttcatgtagtaccagtttaaggccttacaaaataattacagaagcagaataatagataacaatcttagaaaataagaaaagatacaaaaaaagtagggctttcacag

SEQ ID NO: 534207 - DNA, 540 bp, Homo sapiens
cataattgttcttgcaacactaatacccagaacatagattttcaaagaaatctaagtgctttttcttscttccataggcaaaagaggtcttccagaggttcctggagtcacagatggtgatagaggaatccatcttgcagtcagataaagccctcactgatagagagaaggcagtagcaggtatggggcagggctcagcttacacaggaggggtacgtttatacaatgccctctaacagatctaacaggaaaaccttcccaaaatgaggaatttcctcttctgtggaacacacactctgctaaatcttaaaataacaaggggagctatgattgtacatcagccagacaggcagagcctttcccatcacattctcaaatgcgctcttaatggtgtggacctgggtgaattctgtgatttctcaccctgcctttcagatttggtttagtctcagctcagaaaagtggagatgaatcttcacctattattttcttctctttctaataccttcatggagcagtggatcgggccaagaaggaggc

SEQ ID NO: 534208 - DNA, 540 bp, Homo sapiens
cataattgttcttgcaacactaatacccagaacatagattttcaaagaaatctaagtgctttttcttccttccataggcaaaagaggtcttccagaggttcctggagtcacagatggtgatagaggaatccatcttgcagtcagataaagccctcactgatagagagaaggcagtagcaggtatggggcagggctcagcttacacaggaggggtacrtttatacaatgccctctaacagatctaacaggaaaaccttcccaaaatgaggaatttcctcttctgtggaacacacactctgctaaatcttaaaataacaaggggagctatgattgtacatcagccagacaggcagagcctttcccatcacattctcaaatgcgctcttaatggtgtggacctgggtgaattctgtgatttctcaccctgcctttcagatttggtttagtctcagctcagaaaagtggagatgaatcttcacctattattttcttctctttctaataccttcatggagcagtggatcgggccaagaaggaggc

SEQ ID NO: 534209 - DNA, 540 bp, Homo sapiens
cataattgttcttgcaacactaatacccagaacatagattttcaaagaaatctaagtgctttttcttccttccataggcaaaagaggtcttccagaggttcctggagtcacagatggtgatagaggaatccatcttgcagtcagataaagccctcactgatagagagaaggcagtagcaggtatggggcagggctcagcttacacaggaggggtacgtttatacaatgccctctaacagatctaacaggaaaaccttcccaaaatgaggaatttcctcttctgtggaacacacactctgctaaatctkaaaataacaaggggagctatgattgtacatcagccagacaggcagagcctttcccatcacattctcaaatgcgctcttaatggtgtggacctgggtgaattctgtgatttctcaccctgcctttcagatttggtttagtctcagctcagaaaagtggagatgaatcttcacctattattttcttctctttctaataccttcatggagcagtggatcgggccaagaaggaggc

SEQ ID NO: 534210 - DNA, 540 bp, Homo sapiens
cataattgttcttgcaacactaatacccagaacatagattttcaaagaaatctaagtgctttttcttccttccataggcaaaagaggtcttccagaggttcctggagtcacagatggtgatagaggaatccatcttgcagtcagataaagccctcactgatagagagaaggcagtagcaggtatggggcagggctcagcttacacaggaggggtacgtttatacaatgccctctaacagatctaacaggaaaaccttcccaaaatgaggaatttcctcttctgtggaacacacactctgctaaatcttaaaataacaaggggagctatgattgtacatcagccagacaggcagagcctttcccatcacattctcaaatgcgctcttaatggtgtggacctgggtgaattctgtgatttctcaccctgcctttcagatttgrtttagtctcagctcagaaaagtggagatgaatcttcacctattattttcttctctttctaataccttcatggagcagtggatcgggccaagaaggaggc

SEQ ID NO: 534211 - DNA, 431 bp, Homo sapiens
ggttgctcaggaaaagattctcctgtttagcagttaagcacacacaaaaaagtcatgcaacggccttccctatagtggtgagatcacattaaawagctacttcaagtgtcactaaagcattataactgctcttaagtgtatgtagaatgagattactttagaaaaacatttcgaaaaatcatatgcttttcccatatgttcagtatttaatgttgttggacaatgactgcctaaaacttgatatgcagccgaaaaaaaaaaaaaaaaaaaaaaaaaaattgtaacaacgaacattgaagtttagttcccataagtctcagaatttcatgccctcgatttttccctatcaaacacatttttaaaagactaatctagtggataaggatatgctatcaaaacctgaaactcatgaatcggaaatcatcttgcac

SEQ ID NO: 534212 - DNA, 655 bp, Homo sapiens
  misc_feature (1)...(655): n = A,T,C or G
agctggttcatttcatctagagtcagaaaacatcagcatatgtatgtcaagctctggaacaattgagtaaatcacatgggttggcattgctccattaatgacatctgaataagataaattccaagttsaagtcattcccccaaggaacacatcatatttcttacatacctggtgaatgaagcttggtggttgaagctgctactctcttaggagatgaaacagcaggtttattcgtatcttgatctttctgagcatctttctttgttcctgtgtatagttggaaaagagaaataggtagaaagtagctacttaaattgaatggcaacataagttgtggaaagggtggctcaaaganagtcaaacatatcaacaaaagaaatatttgggtgatttgttgctatggtcaccacccccntgtgcttgatgaatgacacacttctttataggaaagggaatttagttttgagtggtcaggggagaagtaaggacactgctgtctctgatttgatgaaaaacgcccccttctctgaaggtcactgccaccccaatgaccctgaccaaactatctgggaattaaaattttacatcctcagccaccaatttagtctgcctgcctctctctgccataacaaattttcagaagacagggaaggac

SEQ ID NO: 534213 - DNA, 655 bp, Homo sapiens
  misc_feature (1)...(655): n = A,T,C or G
agctggttcatttcatctagagtcagaaaacatcagcatatgtatgtcaagctctggaacaattgagtaaatcacatgggttggcattgctccattaatgacatctgaataagataaattccaagttcaagtcatycccccaaggaacacatcatatttcttacatacctggtgaatgaagcttggtggttgaagctgctactctcttaggagatgaaacagcaggtttattcgtatcttgatctttctgagcatctttctttgttcctgtgtatagttggaaaagagaaataggtagaaagtagctacttaaattgaatggcaacataagttgtggaaagggtggctcaaaganagtcaaacatatcaacaaaagaaatatttgggtgatttgttgctatggtcaccacccccntgtgcttgatgaatgacacacttctttataggaaagggaatttagttttgagtggtcaggggagaagtaaggacactgctgtctctgatttgatgaaaaacgcccccttctctgaaggtcactgccaccccaatgaccctgaccaaactatctgggaattaaaattttacatcctcagccaccaatttagtctgcctgcctctctctgccataacaaattttcagaagacagggaaggac

SEQ ID NO: 534214 - DNA, 655 bp, Homo sapiens
  misc_feature (1)...(655): n = A,T,C or G
agctggttcatttcatctagagtcagaaaacatcagcatatgtatgtcaagctctggaacaattgagtaaatcacatgggttggcattgctccattaatgacatctgaataagataaattccaagttcaagtcattcccccaaggaacacatcatatttcttacatacctggtgaatgaagcttggtggttgaagctgctactctcttaggagatgaaacagcaggtttattcgtatcttgatctttckgagcatctttctttgttcctgtgtatagttggaaaagagaaataggtagaaagtagctacttaaattgaatggcaacataagttgtggaaagggtggctcaaaganagtcaaacatatcaacaaaagaaatatttgggtgatttgttgctatggtcaccacccccntgtgcttgatgaatgacacacttctttataggaaagggaatttagttttgagtggtcaggggagaagtaaggacactgctgtctctgatttgatgaaaaacgcccccttctctgaaggtcactgccaccccaatgaccctgaccaaactatctgggaattaaaattttacatcctcagccaccaatttagtctgcctgcctctctctgccataacaaattttcagaagacagggaaggac

SEQ ID NO: 534215 - DNA, 470 bp, Homo sapiens
aaactgatttcctttcctctagtccttgcatctaactctcctgagttcgcttgtgcgcgcgctctctctctctctttagtttataactcatccaggtttcctcttttatttgatatattctkatcgagataatgtttcctttcttcattctatccaatccctataaatcctaccttgaactgttcccattcaattcatcttacaaatggcatcagaatctgtcttttctgattacatcattcatgttttctgttcacctccttccagttacactggagtgattatcatcacttgcgttgtggccacctttgcttttccctcttcttgctttgctccgtctgcgtctgcaatcctcgtgttccctgtgtgggagctgatctgtggggccagggcagggtcagccccgtggcatgtgctttcacaggcaagtggagggaaaacttcagatacttaggggataaagtctgttg

SEQ ID NO: 534216 - DNA, 647 bp, Homo sapiens
ggcccccaaaacttgagaacctcttggattcatctctccactctggtttctacccccagaatctatcaagtggcctcactcctggattacctccagcacaagagaaagtgcatattctgtctgctctactgggccaggggagtagggaaagaacaggagacagtaaggataaaatgaaagcaacataaatgggcagcataaaatagaaaaagcagctattgcatctccctcatttcagattatttgtcagatatgcccttccccacacatgtgtgtatgcatgttccattacatcacagttctgtccatctgcccgtcccactagaccatgaatccttggcaatcaagaccataactctcatagtacccaacacaataactgccctgtaatacattcccaataagtatttgctgaatttaattgaagcaaattaatagaagamgacatattgtgcatagttcctataattatatacaaactgaggcccagaactgaaccattagccatggtattggtatcactgtcaactcagactcccaggcaacagtgtaaatggaattggaacacagggaccctctcctcacctccgcccctttgtttctcaaatgtacaaattctaaataaaatagaacaaaataaattttgt

SEQ ID NO: 534217 - DNA, 647 bp, Homo sapiens
ggcccccaaaacttgagaacctcttggattcatctctccactctggtttctacccccagaatctatcaagtggcctcactcctggattacctccagcacaagagaaagtgcatattctgtctgctctactgggccaggggagtagggaaagaacaggagacagtaaggataaaatgaaagcaacataaatgggcagcataaaatagaaaaagcagctattgcatctccctcatttcagattatttgtcagatatgcccttccccacacatgtgtgtatgcatgttccattacatcacagttctgtccatctgcccgtcccactagaccatgaatccttggcaatcaagaccataactctcatagtacccaacacaataactgccctgtaatacattcccaataagtatttgctgaatttaattgaagcaaattaatagaagaagacatattgtgcatagttcctataattatatacaaactgaggcccagaactgaaccattagccatggtattggtatcactgtcaactcagactcccaggcaacagtgyaaatggaattggaacacagggaccctctcctcacctccgcccctttgtttctcaaatgtacaaattctaaataaaatagaacaaaataaattttgt

SEQ ID NO: 534218 - DNA, 307 bp, Homo sapiens
cgtgtatacttcatgtatacaaaagaggtactcatgtacaatgagtaaatttccatgatatgttttataactaaaagaaaaagaagcagaaacaaaatataagctacatatcaagataaatttgatgttaaagaatgacacaaacaggtcttctttaaasaatttgaatgcagcagaggatactacaaaaggaagaaaaaatgaccacagacagcaaaaaatatcttcagaaataaaaattcaaactaaataatgaagagtgcactggacattatatgtccgaggcttggttattgttttcaaaatc

SEQ ID NO: 534219 - DNA, 307 bp, Homo sapiens
cgtgtatacttcatgtatacaaaagaggtactcatgtacaatgagtaaatttccatgatatgttttataactaaaagaaaaagaagcagaaacaaaatataagctacatatcaagataaatttgatgttaaagaatgacacaaacaggtcttctttaaagaatttgaatgcagcagaggatactacaaaaggaagaaaaaatgaccacagacagcaaaaaatatcttcagaaataaaaattcaaacyaaataatgaagagtgcactggacattatatgtccgaggcttggttattgttttcaaaatc

SEQ ID NO: 534220 - DNA, 307 bp, Homo sapiens
cgtgtatacttcatgtatacaaaagaggtactcatgtacaatgagtaaatttccatgatatgttttataactaaaagaaaaagaagcagaaacaaaatataagctacatatcaagataaatttgatgttaaagaatgacacaaacaggtcttctttaaagaatttgaatgcagcagaggatactacaaaaggaagaaaaaatgaccacagacagcaaaaaatatcttcagaaataaaaattcaaactarataatgaagagtgcactggacattatatgtccgaggcttggttattgttttcaaaatc

SEQ ID NO: 534221 - DNA, 307 bp, Homo sapiens
cgtgtatacttcatgtatacaaaagaggtactcatgtacaatgagtaaatttccatgatatgttttataactaaaagaaaaagaagcagaaacaaaatataagctacatatcaagataaatttgatgttaaagaatgacacaaacaggtcttctttaaagaatttgaatgcagcagaggatactacaaaaggaagaaaaaatgaccacagacagcaaaaaatatcttcagaaataaaaattcaaactaaataatgaagagtgcactggacattatatgtccraggcttggttattgttttcaaaatc

SEQ ID NO: 534222 - DNA, 614 bp, Homo sapiens
aaattactgagaaaatattcagctatwttttttactctttttttcttttatgtagtgaacctcaggtgtaaacttctggcagcattttgatcagatttagaaaatagttgaaagaggaagaacaaagggagatgatataaatggcagaaaacttaaggcatctttggatgaaaaaataacctgaatcaagaaaatgtaatttttgatggtgattacacttcgaagaaaataaagtggattgaggagccagatatgactgggcaggaaattagataggatagacaagatgacctctctaaagggggctattgagctgatacttgaatgataaaaaggagcaggctatcagaagttacgaatcaagtgtctttcagaaagaggaaaacaaaaaataatggaaatagggataacccattagagaaaatgtgagaaggcttacatggttggaacaaaatgagtaagggtaagtttcagaagaagagaataaagacagggaactataaggtgggatgagataaagagtttataccttattttgagtaatgggaaataattattgggttttatgctggataatatttgtaatctgaattagaatgtgaagattactgcag

SEQ ID NO: 534223 - DNA, 603 bp, Homo sapiens
ccattccatttgtcggcctccctacataggaaagcttctaggtgttgatgacatataccctttccattttctcccctctcattcaggatccttaaagatagtttcctattttcctcctttcctttactactgttattattttgaatctgcctgtgtccctgatacgcaggagaagcccagtttgacacgtaaatttggcaatgctgggttcagtcatactttcacccagtcctatctggtttctatctgtaccacttcaaagaaattccttttrtcaaggtcactaataacaaaatgataccttatgcaataaatatttttctttcattttaatctacctctcactagcattcaatacactttaatatacctatctctcttgaaacactacctttcttttggttgtcatgacatcaaacttcctggtttcctcccatctcactgatcattcttttttagtctccttgcttatttcacctcttccaaatttataaatgatatcaggacatgatcccagaccaccctctcttctctctctacttgctcccttggtaatttcactcattctcatagcttttatcaatcagattccaaatttgtatc

SEQ ID NO: 534224 - DNA, 641 bp, Homo sapiens
gaacctactactttcagcactggcaatggcttccttctttatgggagattttggtcatcaaaagtagacttcttcagcctgtgcctcacgacctcacaatacatcttcacaggccctcccttcccttccccttgacttccttcctctctgtggtgctctgagcctttctcacatctttgataactttacctcccacctcaaaaaggactttgtcacttcagctatcttttttctctaacaatttccactaacttatcctctacgtmtaaatgagcccaagtatcattagcctgaaaaaagaattataagtttatccctcttttctcactactgtcctctttcttcttgataaggtggttttctggtcaccacaccccattctcccaccctctccctgtttaaccctctggggttgggcttcttcaccactgctttgctgaaagtgctctccagaaggtctccagtagccaactactcatccctcaaaggcttttctatgtcctgggccgtggattcttgcagagatttatgactacaaacaatctctgccttcttgaaactctttcctctcttcatatccgtgactactcagtgcttccctggatctgggccccatgttcactcaatcccctgacttctct

SEQ ID NO: 534225 - DNA, 615 bp, Homo sapiens
tgtttcatggatataacattagtgtttgtgtatagcctggaacaatacaaggctgtatctgtatcactagcttcttgccttataagcaggatactgcaaggtctggttgatttctctaatgccctagctaatctgcctaattgacatcagtgtcatgttaatgtatgatgcacaagcatttacagatggacaaatgctcyacactaaaaaccacctgctgaattttttttccagtaggatgtgaaattttgcacttctaatctgttgaacatttaaagtcaaaactacatgtttcctttaaatggcctctttaaatgatattttatgtttataaattttgttatgaaaaatttaaaaattagttattcctcttaaatttttactttttccttcaaaggacttgggtgccctctgcaggttataaagagataattagtgactatatctattttaaaaccctgtgatttttctctttcatacacatagcctgcttacacccaatttcaaagaaagtgtgagctaatttatttatattaactcttattaatttgccagtggttgaagttggagtttcttttctccactggttttataggtgtgtttagtgtgaagaat

SEQ ID NO: 534226 - DNA, 529 bp, Homo sapiens
tacagcattgcaagatcaattctgatcagaggcagggygcggtggctcacgcctgtaatcccagcactttgggaggccaaggcgggcagatcacgaagtcaggagatcgagaccatcctggctaacacggtgaaaccccgtctctactaaaaaatacaaaaaattagctgggcgtggtggcaggcgcctgtagtcccagcaactcgggaggctgaggcaggagaatggtgtgaacccggaaggtggagcttgcagtgagccgagattgtgccactgcactccagcctgggcgatggagtgaaactccgtcccccccccccaaaaaaaaacaaaaaaattcaattctgattagaagcactgtgaaaaagctggcgggttttgagaaatggagtcaaaactctttgtgaaaaaatagtgtaactcttatggcaaacagcatataggatttttggcccacttttttagtaagtcggaatctcccatttttgcatcctgctaagcctaatatttccagagatgaatatcaatc

SEQ ID NO: 534227 - DNA, 529 bp, Homo sapiens
tacagcattgcaagatcaattctgatcagaggcagggtgcggtggctcacgcctgtaatcccagcactttgggaggccaaggcgggcagatcacgaagtcaggagatcgagaccatcctggctaacacrgtgaaaccccgtctctactaaaaaatacaaaaaattagctgggcgtggtggcaggcgcctgtagtcccagcaactcgggaggctgaggcaggagaatggtgtgaacccggaaggtggagcttgcagtgagccgagattgtgccactgcactccagcctgggcgatggagtgaaactccgtcccccccccccaaaaaaaaacaaaaaaattcaattctgattagaagcactgtgaaaaagctggcgggttttgagaaatggagtcaaaactctttgtgaaaaaatagtgtaactcttatggcaaacagcatataggatttttggcccacttttttagtaagtcggaatctcccatttttgcatcctgctaagcctaatatttccagagatgaatatcaatc

SEQ ID NO: 534228 - DNA, 529 bp, Homo sapiens
tacagcattgcaagatcaattctgatcagaggcagggtgcggtggctcacgcctgtaatcccagcactttgggaggccaaggcgggcagatcacgaagtcaggagatcgagaccatcctggctaacacggtgaaaccccgtctctactaaaaaatacaaaaaattagctgggcgtggtggcaggcgcctgtagtcccagcaactcgggaggctgaggcaggagaatggtgtgaacccggaaggtggagcttgcagtgagccgagattgtgccactgcactccagcctgggcgatggagtgaaactccgtcccccccccccaaaaaaaaacaaaaaaattcaattctgattagaagcactgtgaaaaagctggcgggttttgagaaatggagtcwaaactctttgtgaaaaaatagtgtaactcttatggcaaacagcatataggatttttggcccacttttttagtaagtcggaatctcccatttttgcatcctgctaagcctaatatttccagagatgaatatcaatc

SEQ ID NO: 534229 - DNA, 529 bp, Homo sapiens
tacagcattgcaagatcaattctgatcagaggcagggtgcggtggctcacgcctgtaatcccagcactttgggaggccaaggcgggcagatcacgaagtcaggagatcgagaccatcctggctaacacggtgaaaccccgtctctactaaaaaatacaaaaaattagctgggcgtggtggcaggcgcctgtagtcccagcaactcgggaggctgaggcaggagaatggtgtgaacccggaaggtggagcttgcagtgagccgagattgtgccactgcactccagcctgggcgatggagtgaaactccgtcccccccccccaaaaaaaaacaaaaaaattcaattctgattagaagcactgtgaaaaagctggcgggttttgagaaatggagtcawaactctttgtgaaaaaatagtgtaactcttatggcaaacagcatataggatttttggcccacttttttagtaagtcggaatctcccatttttgcatcctgctaagcctaatatttccagagatgaatatcaatc

SEQ ID NO: 534230 - DNA, 567 bp, Homo sapiens
gttcctagcacagtccagtccatggtaggccctctataaagacatattggatcactatctaaagatgacaggttgaacatgtgcatgtcttctgtcagccttaacaaaacacacaaaaataacaggaaagggtgtttttctttaaaaaaaaaaaaaaaaaaaaaaaacacaagaggcaccctcacgcagtggctcatgccagtaatcccagcactttgcgaggccgaggcaggygagtcacccaaggtcaggagaccctcaggtcaggacaaatagaaaacataagagtatttatttaaaaaccagaggagaaatacaggagattcaacatctgaataatgggataacagggaaaatggaaaggggaaaggtagaaatcaccaacagaaaacggtcatgagaattttccaaagttgattaagaacatgactttctgcactcaacgggcctggtatgtgtccagtccaataaataaaaacagacttatacgtggctcataattttgaatttcagaactcagagaacaatgagaagatccacaaagtttctaaagggagaaaacgttag

SEQ ID NO: 534231 - DNA, 506 bp, Homo sapiens
ttacccattgataaggtaaaacattgtggttacaaaaccaaactgctatggccctttggaggtctctgacccagagacctctgtcagattgctgagtgacatcacttatataggaagcaccgtttccgatcttgctctcacccagggattcccttgccctcctcatctcctggaggatggctccccatctgaagcctctggatgatcgtgtgctgtgacggatttcccctcttacgcaattcggtagaagtgctgctcaataaagtgtgttgggtgttactgcctttcatggtcacatatgttacattgatcagcctcagaatcccttgaataccatctcccaacccccaggtctttgtaataacayataataataacaaagtggtgttattaaaccagttttcttttttttaagaatttaaatgggtccctaccctgtgccaaagaaaacctgggcagaatcaagcttccaagaaaagatgccttgcaaagcctggacccaggga

SEQ ID NO: 534232 - DNA, 223 bp, Homo sapiens
gatttcagctgcttatgactgcagagtataagttaatcgaatcaatgctcacaatacaagttagtcatcagaaaggaccagaaactgattatgtatgaataagagtacagaaaacaatgtatctggacatacactataactctgggatatttctattctaagaaycaattattgcaaagtcaatgagtcccctactattttaatgagttcagttgatattcat

SEQ ID NO: 534233 - DNA, 428 bp, Homo sapiens
aagcaaaatgtagtagatctctacaatggaatattattcagccattaaaaaggaaggatgtttgacgtgtgctgcagtggggatgatggcggggcagatcatcctgcctttaggaccacatggtccagtggasgaggcagagcaaaaacacctggggccattggaggtggaggggagctcaggggagcttggaggaggtgaggtggagccatgttctgcgggcctcatctcaacagtcaatgacagaagaggcagaatttacctcagaaaagacacgtgtgtgcccgagctgatgggaacattccctaggcagactgaggacgccaggcctggcgagcttggcctacaacctgcctgtggccaactgcagtgctgatggggaggctccatgggcctgcctaggtggacatcatgcctgcaacacacga

SEQ ID NO: 534234 - DNA, 428 bp, Homo sapiens
aagcaaaatgtagtagatctctacaatggaatattattcagccattaaaaaggaaggatgtttgacgtgtgctgcagtggggatgatggcggggcagatcatcctgcctttaggaccacatggtccagtggaggaggcagagcaaaaacacctggggccattggaggtggaggggagctcaggggagcttggaggaggtgaggtggagccatgttctgcgggcctcatctcaacagtcaatgacagamgaggcagaatttacctcagaaaagacacgtgtgtgcccgagctgatgggaacattccctaggcagactgaggacgccaggcctggcgagcttggcctacaacctgcctgtggccaactgcagtgctgatggggaggctccatgggcctgcctaggtggacatcatgcctgcaacacacga

SEQ ID NO: 534235 - DNA, 548 bp, Homo sapiens
ctggatttttttgagggacttgacaaactcattctaaaatatatataagccataatgtccacaaattgctaagtctattttgacaaagaagagcacatgttttgggggtgaggagtggacttaccctgcatgatctggagacgtcttgcaaagccagtgcctagctcggctggctctctgcggtcaggcagggccagggatgcctcatacggcaggtgttggccacctccatcctaggtggttcaggaccccagggatttattgtaccctatgtgatggccccagggaagaacacgtttcccagcccattcatatgctggctggattgagctccttgtggctgtagggatgaggccctcattccttgctgaccctcagctcctggaggtcgcctgcattcctgccaggtggccccttcatcttcaaaacccaaaagccaaacatggggatgcttcctctcatctgagccctctcacacctcaaatgtctttcagggagggcccagggctcacytgatgcaggctccagggattgtctcctttttttat

SEQ ID NO: 534236 - DNA, 517 bp, Homo sapiens
ggaggcagataagcagcgtttatgccgycgcctttggtgaaaagtcattttctgtaggggggccaagtggaacgtatctctcctccaccatactgcaggagcatggacgccagggcacaccctgcgtaacactgtaagtgttccccggctgcttccaagtgccaagggatgttctctccacttcttcttcatccaagaagtttaggcaaaccagcacattactgtctggggtcattctcagtcctcagcaccaggggactggcacccagggagcttgattccatgagtaactggccttcccaagaggccagttctctcaacacacttgggaagagaccgaggccagaggggacaagactggcccactgtcactcagtgagttggtgacactgtggggatctggacagaccccagggcactgacctcccagcacaaggctttttctaccatgcaccttgccacgacctggccccagcagaccccccacattctcctcccaagaagcgaggccaacttt

SEQ ID NO: 534237 - DNA, 517 bp, Homo sapiens
ggaggcagataagcagcgtttatgccgccgcctttggtgaaaagtcattttctgtaggggggccaagtggaacgtatctctcctccaccatactgcaggagcatggacgccagggcacaccctgcgtaacactgtaagtgttccccggctgcttccaagtgccaagggatgttctctccacttcttcttcatccaagaagtttaggcaaaccagcacattactgtctggggtcattctcagtcctcagcaccaggggactggcacccagggrgcttgattccatgagtaactggccttcccaagaggccagttctctcaacacacttgggaagagaccgaggccagaggggacaagactggcccactgtcactcagtgagttggtgacactgtggggatctggacagaccccagggcactgacctcccagcacaaggctttttctaccatgcaccttgccacgacctggccccagcagaccccccacattctcctcccaagaagcgaggccaacttt

SEQ ID NO: 534238 - DNA, 517 bp, Homo sapiens
ggaggcagataagcagcgtttatgccgccgcctttggtgaaaagtcattttctgtaggggggccaagtggaacgtatctctcctccaccatactgcaggagcatggacgccagggcacaccctgcgtaacactgtaagtgttccccggctgcttccaagtgccaagggatgttctctccacttcttcttcatccaagaagtttaggcaaaccagcacattactgtctggggtcattctcagtcctcagcaccaggggactggcacccagggagcttgattccatgagtaactggccttcccaagaggccagttctctcaacacacttgggaagagaccgaggccagaggggacaaractggcccactgtcactcagtgagttggtgacactgtggggatctggacagaccccagggcactgacctcccagcacaaggctttttctaccatgcaccttgccacgacctggccccagcagaccccccacattctcctcccaagaagcgaggccaacttt

SEQ ID NO: 534239 - DNA, 528 bp, Homo sapiens
aagcctattgtccagtcaggatcccttttctcatgagaacttcccactcactgggggagagccagcctgcagtagctcaagcctttttcagggtgtggcaccagagctggggtgggagaacacagggagaaaccacccatggctcaggatacctcctgtggctcttctcgggcccccaccactgccttcctaagagaggctcaacctaagccctcctcggaagatcagcaactgacaggtgsgacaggcctcggacctgtccatcttgttttaggcctgggcccctcacttcctccccctcacaggagagggaaaatgccagccagaggcctcagagccaacaagcactttcttttactgcaccctgcctcaaacataaaaactcctgtcacctggagttttcatgtttgaggcacagcgttcaataaaagaaagtgcttttagtggcacctaagcctctaaagtccttagtcattcagtcaaaagtactgtttctctcccagcctagaaaccctgaactgaaagcac

SEQ ID NO: 534240 - DNA, 645 bp, Homo sapiens
tcacctgtcatggcctctttggctctttggaccctagtctctcgcaagccacttttgactgaccagtctgagatgcccagtcagaagacaatgcctcggacagcctcacacacactgcatgttggtagataactatgtctaaatgccacattgatgtacagaaaatacctttaatctcttgtcctccagacagcaggtttaataactaataactttcactcaaaagagagtaaaaaaacacgggcatggtgkcttaggcctgtaatcccagcactttgggagaccaagacaggcggatcacttgaggccaggagatcgagatcagcctggccaacatggtaaaaccttgtatccaccaaaaatacaaaaattagccaggcaacgtggcacacacctgtaattccagctactcgggagggcttgtcatgagaattgcttgaagccaggaggtggaggcttcagtaagtggacatcatgccactgcactccagcctggtgagagcgagactccatctcaaaaaattaaacaaatttttaaaagtatttacaagtgttgattcttattctctccaggtttcactttcctaacaaattccttcattaatttaacaaatttctattaagcactatgtgttaggctgctgc

SEQ ID NO: 534241 - DNA, 582 bp, Homo sapiens
gggcatagtgggtcatgactgtaatcccagcacgttgggaggaagaggcaggtagatcacctgaggtcaggagcycaagaccagcctgggcaacatggtaaagccctgtctctactaaaaatacaaaataattagccaggtgtggtgatgcacacctgtaatcccagctactcaggaggctgaggcacaagaatcgtttgaacccaggagacagaggttgcattgagccaatatcgcgctcaatattgcactccagcctgagagacagagagactctgcctcaaaaaaaaaaaaaaaaaaaaaaaaaaaaggcaaccacagtcattaccctcatggagctacagtctacagagtgaggaatagagcagtcaaacattctcacaaacatcacacccccacagtgacaagactgtgacagaggggtacatggtactggtagaatctatgatgcaggagcctgggggattcgggtgagggactatctgatagtaatggctaaatacacatatgcatgttatcaacaaacatattggtggtaattatgatagcaattaaccacttattgcttcctgtgtgtttggt

SEQ ID NO: 534242 - DNA, 582 bp, Homo sapiens
gggcatagtgggtcatgactgtaatcccagcacgttgggaggaagaggcaggtagatcacctgaggtcaggagcccaagaccagcctgggcaacatggtaaagccctgtctctactaaaaatacaaaataattagccaggtgtggtgatgcacacctgtaatcccagctactcaggaggctgaggcacaagaatcgtttgaacccaggagacagaggttgcattgagccaatatcgygctcaatattgcactccagcctgagagacagagagactctgcctcaaaaaaaaaaaaaaaaaaaaaaaaaaaaggcaaccacagtcattaccctcatggagctacagtctacagagtgaggaatagagcagtcaaacattctcacaaacatcacacccccacagtgacaagactgtgacagaggggtacatggtactggtagaatctatgatgcaggagcctgggggattcgggtgagggactatctgatagtaatggctaaatacacatatgcatgttatcaacaaacatattggtggtaattatgatagcaattaaccacttattgcttcctgtgtgtttggt

SEQ ID NO: 534243 - DNA, 601 bp, Homo sapiens
ccctttaagtaaaggggaggggggaaagggtttcacactgtgctgaaattaacaggcacaacagaactgcctcttcagagttcagccacagcacaatagatacacacagtatgggagcaatctggctattaaacagctccacttcatccttagcgatcaaaacagtgtgttctgatttcttctttctttgtcttcctcctccctaccctcaccgccgccccaaaacttacatttcagagattatgtgcactatttaacagaaaatagatttattttccttcttccactttccgtttatatctctaggttttattttttctcactacttttaaatatatagcaaactttagatactgtcttccttgaggactgcttaacttcrtatctctgattaagtcacaatggaaataatgtctaagacaagacaagatggcaaaaataccacatttaaccaatgaaattttccttatgaaaatgcaagcactgttctcatatatggatatgatttcactggcctgttgcttgtttttctcttgataagaatagataatcttcttccatgaagtctgcctatgggctcttgtgactaactggaagactt

SEQ ID NO: 534244 - DNA, 601 bp, Homo sapiens
ccctttaagtaaaggggaggggggaaagggtttcacactgtgctgaaattaacaggcacaacagaactgcctcttcagagttcagccacagcacaatagatacacacagtatgggagcaatctggctattaaacagctccacttcatccttagcgatcaaaacagtgtgttctgatttcttctttctttgtcttcctcctccctaccctcaccgccgccccaaaacttacatttcagagattatgtgcactatttaacagaaaatagatttattttccttcttccactttccgtttatatctctaggttttattttttctcactacttttaaatatatagcaaactttagatactgtcttccttgaggactgcttaacttcgtatctctgattaagtcacaatggaaataatgtctaagacaagacaagatggcaaaaataccacatttaamcaatgaaattttccttatgaaaatgcaagcactgttctcatatatggatatgatttcactggcctgttgcttgtttttctcttgataagaatagataatcttcttccatgaagtctgcctatgggctcttgtgactaactggaagactt

SEQ ID NO: 534245 - DNA, 635 bp, Homo sapiens
ctggtttcagactgcaggttagaataggcatgctttctgtatctcactctagatcccagaatgaaagggtagtggctacctgggacctgttattttcatgatgacagtaggacaagagagccaagctaaaccataaaaatacatgtcaagtctcctcttacgtcagatctactagcattccatcagccaaagtaaagtcatatggccaagtccaaagtcacagagaaggaaagyacactcaatctgtcattgggccatgtcaagagagtggctccagaattctctaacaggtgaagaattggggccaatatctctatctactccaatgttttacagagtgaaaaagcagagtgtttaatccagggaatctgttaagtggaagtcaagagacatttgattagacttagggtcaaatgaagtaatgaatacaatgaactctacttttatttcttggttattccattcactaatccatataatcaacaaaagtatatcctgtgcattttatgcacctaatattctggagatatgaaaaaattaagtaaaaagtttcctttgctcttgactgcctaatggattatctatgctgagagataaagaagaatgattcagactaaacagtaaaacagaaaaaa

SEQ ID NO: 534246 - DNA, 592 bp, Homo sapiens
gtttattagcacttagtactgattagccacagctttttatcaaacaaaagcttagggtatcagcaaagcagaaagaaaagaatttgaaaaacaattgaaagcatttactacctaacatttaaaaaaatactgaagtagaattaggaaagaaataagaatttattggattaaatgttagctgtttagtattgtttttattttgtatttaatagggagagaatagagggctatactattatattttctgtacttgggacctccaaaggtcttaatttggtcttatcaccactaacaccaccactgccatctccatgtcatgcttrtgttaaagaaagactttgaaatacgtcacctaatgtttagggtcgtagaaatgcaatttactgttttgggactagagtacatgaattcatattacttgacatcattagttcttcccagtaaaatgagaatatttgaggtcccagagtattttataaggttttaaaaacttcataatttcttaatgtttttttgttattacccatagtgattacaataaaatccttaaaacagcaaggaaggagaaccaaggagattagatgtgctttat

SEQ ID NO: 534247 - DNA, 519 bp, Homo sapiens
tatggggttgggggacagggctcctgcctgtttccagtccccaagagcacatggaggcctgggtctaccacccaggcttgggtggcttgggctgctgcctgctcctggctcccactggcactgtggagcatgcagccctggctccgccccctttcagcctgagacaggggctccagatccttgctggacctgggctgggatccggggcaggggtgacatcgccgggagctaccccagttgccctggcgcttcagtggcccaggcagagcagataactgtccggcctggctgttgggagtggcaggctcagcagtcgcctgatgtggggtggaccctggggatgtagccccgggcagccctgcacagagcctcctcctgaggcccaggaacctggcamcctcagtggggtgggcgcagtggctgtgtcactggctggtccctgaagtgggcaccgctcccacttcctgcctcaggcccctgaagctcagcctcagctctgcatcggtctgctctctgctt

SEQ ID NO: 534248 - DNA, 533 bp, Homo sapiens
tacttaggaggctgaggcagaggatcgcttgagctcaggtatttgaggctgcagtgaggctgcagtgaggctgagctctaccatatagagctcaggctctatatggtagagccactgcaatccagcctccgcaacagagtgagaccttgtcttggggggcaaaaagtgtaaggatgggatttctaggcatatttggggctgaggaaatcagtcttgggcccaacctccttgtagggggtgaggtggcaacctctggaatttgaggcctgctactgggattgtaggtataggaagttgagagggaaagggtctttctcaccctgctgtggtagtaagagcttggtgcttaatgggtgccttttasttgtttgatcacctaggatttctgcttagaacccagcaatacttgtaggcctgcacagtcccaagagagaaatcagagacttggtgataagtcaagggtaagagatgagataagagagcacctacactataggatattagaactacaactccaattactccttcactct

SEQ ID NO: 534249 - DNA, 558 bp, Homo sapiens
caacatttctatagttaaatcccattttagaacaataacatattctttctcttgcctacactctgtactgcttaatatgaacatattggtcacttaatcagtaaagtaattcccttccagacttaagtggggagaggggtgccctggcttcacccacttaaaccaattggaaaagcagcatagccctctctgggacaagaatcattgtagctgctgtaggtatacctagcatggaagatgagtaactaactcactgatgcttggagtagtctgcctccttggtgctggccttggagatgcctgtgtcccccaagatgcccatgtccccagagaaacccctggcctcagaaatacccaagtttccagagatgccagtggcctcagagatgtccatggccccacagattcctaagtctttggagaagccygtagcctcaaaggtgcacatgtctccagagatgcccatggcctcagagatgcccacatccccagagatatttatggccctaaggctgcccacaatctcacaacagttatggtggaggtctgcaccctggc

SEQ ID NO: 534250 - DNA, 468 bp, Homo sapiens
agcatgactgggcttcccctacccctcacccctgcccacagagctgaccgcctcctcctctcacattgctagctcctctactttcaatgtttcctaaaattaaaaaaaaaattaaaaaaacacatatttgtgcctagtgtgtcattgtttacaaaatacttcctgtctcargtctggtcttctagaagcagagctgagacaaggattcccgggcaaatgatttattgcaggcatgctcatattagagcgggaaaagatttgcttacagctaggatcccacggagagctctagattatgaacagccagtctcccagggttaccttcctccagacaaggggccaggcctttgtagccccttagctggtggtcattgtctgcaagctgctcccggggaagggcctagcctccccctgcatctccagatgaggcagctcctgtaagccaagggcagctctcaggggaagggg

SEQ ID NO: 534251 - DNA, 525 bp, Homo sapiens
gctgcattgggagccccagcagagatgggtcagtccctgtgtggccccaagccaggcgctgtgagcctgtcggtctatctctgggtaaggcgaggagtgggttggggggcactgctgggaatatttgtaggacctgagaccctgggggataggcaggcagctctggtttccccatgtccctgtccctgagctgagcctgttccgtggggagaaggccttaggccaggagggctggagtgacacccacagacagccaggagcaggggcaggggaaggacccacccctgggtctgagtctggctctgcctccttcctgctgtgtgaccttggacaagttatctaacttctctgagtctcaggtactcatctctagaacagggaaggcaacagccatctcagtgggctgtgaggtttggagataaagcatgtgaggaggcgctcacaatggcacacagtaggcgctcaaaaatggttgtgtygttgatgccgcctgcgtgctgcagtacccctgaggacggaggaagc

SEQ ID NO: 534252 - DNA, 601 bp, Homo sapiens
gctatggcttatgcacaacgccctaaatcttccgaagacaccccacccccacccctcrgctttgggctcacagacatataatccctcggcaaaccccaaacctgccaatgaagtgcactatttctctgccacaaaggccggcccgcgcctcgtgcacgccggcctccgcacacatgtgcctggctgacaactgcggagcggcccttccaggatcaaagccgttggcctggaccgaaagccgcactcttcccagcccactgccttctcccgcggccgctctccccggtaacaggcggcggaaccgaagcgctccggccacaagccggctaccccctccgcccggcgcgccctgtgcagccgcactcaaacccgcttcccctcagccccaacgtcctttctccttcccccttttttcgcctcaggaaattccatcggaacttcattccgcccgagcggggcggccctggcacaccctcctccggcggccgcgcccctcgcgcctccacccgaaggggccggagacccggcgaccccggcccgcccagcctgccgcctcacctcctcctcgctctcgctgcggaaacacaggcatgcggcccgc

SEQ ID NO: 534253 - DNA, 600 bp, Homo sapiens
ccccggcagcagctcccttggtcctctgcagcccttggctccattctctggggggtttgctttctccgttctcytcttagccacatgtgaagtaggcatggggacagctcttcctggggatagagcagtcttcccagcccactcctggctgtagacaattgggccaggcccaggctcattttgcctaacgtgtttctgtgctctgctgtgcatgctgggcggggggccttgtggccttgaaatgctctgaaaatgtggtgagggcttcatctcttcagctccatgttccaattgccacgccacccttccttgggaggtgtaatcctcatttctaaatttctttgttgtctcatccttatgtttccctctgttttcctcgtcatgtgactgccttgtcatgtgacttgctttggctggtgaaacagaagaagaagttgggtgtggtcatgtgacctgtcagacgtactctcaaggccctcgagatgtccagcttcagcgagagcgtcacacaggaaggctcttttccctgggctgctctgtccggcctctatctgggctactctggataccacacctttgtctgagctgctatcctgagac

SEQ ID NO: 534254 - DNA, 600 bp, Homo sapiens
ccccggcagcagctcccttggtcctctgcagcccttggctccattctctggggggtttgctttctccgttctcctcttagccacatgtgaagtaggcatggggacagctcttcctggggatagagcagtcttcccagcccactcctggctgtagacaattgggccaggcccaggctcattttgcctaaygtgtttctgtgctctgctgtgcatgctgggcggggggccttgtggccttgaaatgctctgaaaatgtggtgagggcttcatctcttcagctccatgttccaattgccacgccacccttccttgggaggtgtaatcctcatttctaaatttctttgttgtctcatccttatgtttccctctgttttcctcgtcatgtgactgccttgtcatgtgacttgctttggctggtgaaacagaagaagaagttgggtgtggtcatgtgacctgtcagacgtactctcaaggccctcgagatgtccagcttcagcgagagcgtcacacaggaaggctcttttccctgggctgctctgtccggcctctatctgggctactctggataccacacctttgtctgagctgctatcctgagac

SEQ ID NO: 534255 - DNA, 600 bp, Homo sapiens
ccccggcagcagctcccttggtcctctgcagcccttggctccattctctggggggtttgctttctccgttctcctcttagccacatgtgaagtaggcatggggacagctcttcctggggatagagcagtcttcccagcccactcctggctgtagacaattgggccaggcccaggctcattttgcctaacgtgtttctgtgctctgctgtgcatgctgggcggggggccttgtggccttgaaatgctctgaaaatgtggtgagggcttcatctcttcagctccatgttccaattgccacgccacccttccttgggaggtgtaatcctcatttctaaatttctttgttgtctcatccttatgtttccctctgttttcctmgtcatgtgactgccttgtcatgtgacttgctttggctggtgaaacagaagaagaagttgggtgtggtcatgtgacctgtcagacgtactctcaaggccctcgagatgtccagcttcagcgagagcgtcacacaggaaggctcttttccctgggctgctctgtccggcctctatctgggctactctggataccacacctttgtctgagctgctatcctgagac

SEQ ID NO: 534256 - DNA, 600 bp, Homo sapiens
ccccggcagcagctcccttggtcctctgcagcccttggctccattctctggggggtttgctttctccgttctcctcttagccacatgtgaagtaggcatggggacagctcttcctggggatagagcagtcttcccagcccactcctggctgtagacaattgggccaggcccaggctcattttgcctaacgtgtttctgtgctctgctgtgcatgctgggcggggggccttgtggccttgaaatgctctgaaaatgtggtgagggcttcatctcttcagctccatgttccaattgccacgccacccttccttgggaggtgtaatcctcatttctaaatttctttgttgtctcatccttatgtttccctctgttttcctcgtcatgtgactgccttgtcatgtgayttgctttggctggtgaaacagaagaagaagttgggtgtggtcatgtgacctgtcagacgtactctcaaggccctcgagatgtccagcttcagcgagagcgtcacacaggaaggctcttttccctgggctgctctgtccggcctctatctgggctactctggataccacacctttgtctgagctgctatcctgagac

SEQ ID NO: 534257 - DNA, 613 bp, Homo sapiens
tgtccctgccttatcgaacctaagcataaaatcagatagcttcctctgtatctttcgagcttgaatctgaaggcgcctatgttatgttgaactataatcaaatacatttttaatatttttctcttgttaacctttttttttataggggtgtcagctttgacctttatactgagaaggaaaggaatcgaattatttctacctttatacttccaactgtttttcatgctgccacttcatttgaaatatttgaattatataagtccactggttatgaacttttaatattttaaaagctcaaattgcttatcttggtgctggaactctaaacaatgcaatatcaacctgctttatcttctgctactacttgtatataaacaggaaaagtattctaatagtcgcataactttaatatctttaacaaaaacatctatattttttcagattataccattaatataatcatgtctgaaacaaattagaattcccaggaaaaaaatacaaggaaataaaaaaaatcatctaagattttaccaagtagagataaccactgtaaacctttgatatakcttacatggtttttaggagtatataacattgaattatctaaatcatc

SEQ ID NO: 534258 - DNA, 524 bp, Homo sapiens
ccttgcagaggcgctaaaccccataactaygtttatattctgatgatgtaagacattgcttccaaagagatagcagtttccatagagctgaatctatgggagcacatattaatctcttttttattttaggaggaagagaatcacatcacagaaaagtcgtgaaatgattgaaatgttcttttctgttcccccaaagcatcattaaatgtatgtttcaatctcctaatataatctgattaacatatatgcttgacatgattgattagaataatgacaatgggaatttccaaggaacacttattctgtgccagggacagtgctagccactcgacatgaattatttcacttaatcttctcagtaatttagttgagaaaattgagactctgattttaagtgatccttctaaggccgtgtacataatgcataggtttgaattccatgtgtctttgactgcagaatccatgctaggccacacctcctagctctaaaacagcaataatatatcataagaaagggaccagga

SEQ ID NO: 534259 - DNA, 641 bp, Homo sapiens
cgtggtgaagaggctgctgagaattcttgagcatkaggtaaagaatgaacctttgccatgttaacatccattattaaagccaatgggaggatttatgttttccagaaatggctttttggaaagatttgatgttcagcagtcctgagctctaatgcacatttgtcttacattaaaaaataccatctcagagaaacatcagtccattacttaaaggagaaacagtatttgagtatttaaaaggctgcgtgtgtgtgtgtgcacgtgtgtgtgtgtgtaaaaagttaaaataatagcaaatcctttctggatttcagaagccaattgttcaggatatgcattaggctcagtcttgaaaggagaattttcctaaatgtcctttaggtctcggcttaagtgtctcttctccagacatgcactttcttctcatagagtcttaactagacacctgcattaatcctctctcagctctatattattttcttcataccagatcagagcctataattatcttatttgtccttttaattgtttcctgctctaccatgcaagaaagttctatgaaaataggaactgcaggcagccttgttcataattttatccccagtgcctagcagaatgtacttgctgtatacagtagtagg

SEQ ID NO: 534260 - DNA, 641 bp, Homo sapiens
cgtggtgaagaggctgctgagaattcttgagcattaggtaaagaatgaacctttgccatgttaacatccattattaaagccaatgggaggatttatgttttccagaaatggytttttggaaagatttgatgttcagcagtcctgagctctaatgcacatttgtcttacattaaaaaataccatctcagagaaacatcagtccattacttaaaggagaaacagtatttgagtatttaaaaggctgcgtgtgtgtgtgtgcacgtgtgtgtgtgtgtaaaaagttaaaataatagcaaatcctttctggatttcagaagccaattgttcaggatatgcattaggctcagtcttgaaaggagaattttcctaaatgtcctttaggtctcggcttaagtgtctcttctccagacatgcactttcttctcatagagtcttaactagacacctgcattaatcctctctcagctctatattattttcttcataccagatcagagcctataattatcttatttgtccttttaattgtttcctgctctaccatgcaagaaagttctatgaaaataggaactgcaggcagccttgttcataattttatccccagtgcctagcagaatgtacttgctgtatacagtagtagg

SEQ ID NO: 534261 - DNA, 547 bp, Homo sapiens
ggacgagcagtggtcctggccccaggggtggagaactgagccgacaaaggtagaggagagacaggatggagccagttcctgtccsccagggaagcccaaaagttgtgtctaagcctacacacagccaaacagccaataaccaaacaaccgatagcttctggaaggcattcttgcagaaattcctcttttgccagagggtgaaagggttgctaattgattttgtctgcctttcagatggactcagagagacacaaaagttttaattctaacagagaggtaacatttttagatacttcactgtagaaaaatattctgtgtctctcatgtgatctggagttgcataatggtattttttgtttcaccagcttgttatcctgttaagagaatagcagcagtaaatttaattacgtagatccttttctaaacaacatatatttcataaacatattatttattcataacaaaggaataaaagaaagctaactcttcccaaatgcattgagaatcgctggtctcgactctcactgaagagatgggtgaagattgc

SEQ ID NO: 534262 - DNA, 633 bp, Homo sapiens
tcgtggctcacacctgtaattctagcactttcagagactgaggcagtcaaattgcttgagcccaggagttcgagactagcctgggcaacatggtgaaatcccacctctgcaaaaaatacaaaaattagctgggtgtggtggtgtgtgcctgtagtcccagctacttgggaggctgaggtgggaggatggattgagcctaggaggtcaaggctgcagtgagccgtgactgtgtstcaagcccctgtctcaaaaagaaaaaacaaaacaaaaacaaaaaaaagactgctgggccccaacctcagagtttctgattcagcaggtgtggggtgaggcctgataatttgcatttctaacaagttctccggtgagtctgctgctgctggtctgggggccacttttgagaacccatgtcctatactttcctgcttctcaactcggtggcctcatctgtgaaatgggcagaacagcctgggtgtcagagttgtcattagggttagactagagggaaaagagctttgcaggcatgaagaaccatcccaaaaggtcctgacacctctgcttccccgagctgagccttactctccctccaggtcttgacgactccctgcaggactatccctttgaggactggca

SEQ ID NO: 534263 - DNA, 633 bp, Homo sapiens
tcgtggctcacacctgtaattctagcactttcagagactgaggcagtcaaattgcttgagcccaggagttcgagactagcctgggcaacatggtgaaatcccacctctgcaaaaaatacaaaaattagctgggtgtggtggtgtgtgcctgtagtcccagctacttgggaggctgaggtgggaggatggattgagcctaggaggtcaaggctgcagtgagccgtgactgtgtgtcaagcccctgtctcaaaaagaaaaaacaaaacaaaaacaaaaaaaagactgctgggccccaacctcagagtttctgattcagcaggtgtggggtgaggcctgataatttgcatttctaacaagttctccggtgagtctgctgctgctggtctgggggccacttttragaacccatgtcctatactttcctgcttctcaactcggtggcctcatctgtgaaatgggcagaacagcctgggtgtcagagttgtcattagggttagactagagggaaaagagctttgcaggcatgaagaaccatcccaaaaggtcctgacacctctgcttccccgagctgagccttactctccctccaggtcttgacgactccctgcaggactatccctttgaggactggca

SEQ ID NO: 534264 - DNA, 633 bp, Homo sapiens
tcgtggctcacacctgtaattctagcactttcagagactgaggcagtcaaattgcttgagcccaggagttcgagactagcctgggcaacatggtgaaatcccacctctgcaaaaaatacaaaaattagctgggtgtggtggtgtgtgcctgtagtcccagctacttgggaggctgaggtgggaggatggattgagcctaggaggtcaaggctgcagtgagccgtgactgtgtgtcaagcccctgtctcaaaaagaaaaaacaaaacaaaaacaaaaaaaagactgctgggccccaacctcagagtttctgattcagcaggtgtggggtgaggcctgataatttgcatttctaacaagttctccggtgagtctgctgctgctggtctgggggccacttttgagaacccatgtcctatactttcctgcttctcaactcrgtggcctcatctgtgaaatgggcagaacagcctgggtgtcagagttgtcattagggttagactagagggaaaagagctttgcaggcatgaagaaccatcccaaaaggtcctgacacctctgcttccccgagctgagccttactctccctccaggtcttgacgactccctgcaggactatccctttgaggactggca

SEQ ID NO: 534265 - DNA, 478 bp, Homo sapiens
gctgagttcacaagattgctctcggggatgccaagtgtcaggactcggctgccacacctgagagggcagaggcttggagagcccgggagcaggctggagtcccaaagggaggaccccactgctattagaatgtggtccattccgctcaaacastgccccgctgcccggtgccttcttggcctcaggcaacactctgtacaactccttacttgtgctggttcttgggttgtggaagcggactcggtggtgaggatctgaataaagtgtctccatcattgccgactgattgagggtagattccatgctaggaatatcaaacttcctcgcctcttcttgtctttcatggcccactgctggaaaccaggactgctcaattccattttctccagtagcaccagagaaatacatgagatctctagataggcctggagaatgtttcattgcaccgaggtctccatttcttgtcattcccacactt

SEQ ID NO: 534266 - DNA, 444 bp, Homo sapiens
catattatgttgttttatttatatgaaatttgtagaaatagcagaactagagaggcagaaagcagatttgtggttggctggggagttggagtgggagcagagattgactgcagatggcacaagggaacatcttggggcagtgaatgtgttctraaactggattgtggtaatcattgcacaactataaatttagtagacatcatcaaatcatacacttagaatggctgaattatgaatgtaaattttatctaaaatttataatctcattaaaataaatgtataatattctgagaaagaaaaatgttttagaagccagctccttaacagattctgcctttttttagtagatttcatcttttgtttattgtcttttttttttctcctcctcacttaactataatcttaggattaaaacagaagaaataaaatccaggtccccagctg

SEQ ID NO: 534267 - DNA, 566 bp, Homo sapiens
aatagtgggcttctcacagttccatgaattttgcctgcccctctcttcccctttgctttcaagccttttcctttaacattctctttgtgttattctcttccctctatattcaacttctaggctttgcttaaatataaattttctagggagatctttcagtaatattcactataatttattatattactttagtctgtactggctgataaaattgtaatcctttatgagagtagggatcatatagaatttgtttatcctaaaagtctgggatatattagatgttcaataaatatttgttcagtgaatgaatgtagccctatatgtttctaaagtgggtatgtaaaactttgttgaatgaatgaatgactttgagatatggtgttggcactgaattaagacaggagaagactactggtgatctaaaaggaaatagtgttatagtagtaaagaaggaatccaggttttagtggataaagcagcaaaggrcagtgaggaaataaagacactaagattttaaatcatttatgagaagttcaactaggaaagaaagaagagaagtagaatag

SEQ ID NO: 534268 - DNA, 495 bp, Homo sapiens
ctgctccttcctcctaaggcttatattggtgatcaaaaatcaatcatggttatcttttgttggaatgaacaaaagggggactctactagtcctaccaggggaagtcagttgccacagcctgagactagctggacactttgcagatcttaacaggccattgggaggctcttgcatgaaattccttctgggcctctgggtcagagattctagggtatttcatttctttggcagagatcagcagaccagaaggcctacatgtacactggaaagcccccaacccaggaatccctgtacgayttgaggtaaactatttaaccacaggcaactgcctcagcttcctgtttggtcaagaagtgataagcagtgaaacttcatctccaatggccaaaagccctgggaattgtgctgctgtgcgcggcctctctgcctggtgtgaagcaaacagtaatgctttgttgagcttgcctgaaatgcccatgtgaagaatgactgttg

SEQ ID NO: 534269 - DNA, 546 bp, Homo sapiens
aaaacctgtggcacagcggcacccagggtcatgagacatgcagatttttccactcagcagcgcatttttctttagggagaacaacattttaagtttaaagaaaaatccccaccaagccttttgcagggaatgcttgatgccagggaagctgagtacaccaggaagaaaaggctgcttccccttaagaacatctgcttagggaacatcacacaccggggcctgtcgtggggtggggaagggggagggctagcattaggagatatacctaatgtaaatgacgagttaacggatgcagcacaccaacatggcacatgtatacatatgtaacaaacctgcaggttgtgcacatgtaccctagaacttraagtgtattaaacacacacacacacacacacacacacacatctgcttaaatgaagagtctgtgacacactgcagggggagccaagagcccagcacgctactccaggctcagtcactatatggtcaagggcaccttcaacccattccttctctgcacttccttcttgcagaaaatgaggcctt

SEQ ID NO: 534270 - DNA, 625 bp, Homo sapiens
cataaatgtgcagcttggccaggtgatcctggagtctcttctcacccttcaaatcttgagaatttgcrggtgcattttccactgataattcaactgtgggtacttcagaataaaatttgatgttaatttgaagagcaggcattacacattaaaacaaaaattaccccaagggaagaatgagagccaagaggggttacatttgtagtagaaataaacaggaaaaaaacccgccactgctaattgaactgattctcgcaatccaagaaaggcaaatgcatgattctaatgttttctttagtagattacagaaaggaagattaaatcaaaagtcaaaaataaacagtttgattatcctacactgtattatcttaataaactgtcttcctggaaagtttaaaaatacacagtacttcatctggccaaagaaaacagtaagtaaatattgttgagaaaatgtaagaattttccatctagatgtgaggggtggaaatattgccatgtggacttcaagacatcccacaaggagtgagagagtgataggtattacctaccttttaaggcttgttgtcggggacactgttgtcacatacgggggaagaggttgggaggggaatgggccctatca

SEQ ID NO: 534271 - DNA, 597 bp, Homo sapiens
tgaaaaattctatgctacccttgggtttccacacccagcccaagtctacatgaacatttgattgccagaaaccctgccaccaagggatcccaaaggtgcaggtgcaggtgctgaagtccactgctacgggatgttgagaacctgacccaaccttctgggaaaagagtcatgagtacacaaagagcacttctttcaaactgtcaaatagcttgagattggagaacaaaggagacacatcttgatttctagcttcatatttcctgaggattagattaatcttctagcctgtgaccctttgaaggtacagatgacattgtattcatctctatattcctattacttagcaaatggccgaagattaatctacatttcttgaatgaatgcatgcagcaatcaatgaaaggttataaatttaaatatcaagagctaccagagaaaagttatggaccataagattttctccctctttcaaatgacattctatatccttctcatcacatgggaaacattataccccaatccttcagtcctactaacagggtctcaggcaccrtggtctccacagtctgcataggctgtagatatacttgacctgtt

SEQ ID NO: 534272 - DNA, 638 bp, Homo sapiens
gtgaggactgacttggaagactgtggtaggtgatgttaaactttgtgtgtacacacaagctctcaaaagtcacattgtagtggcaacacaaacatgccctgcagggtggcacaccagcgaagagccagctgggagcccaatctttcttggcatcctcaaggttgagttgatcctagtaccaagtgctgtctttttggtattggccagaagcccttgcagagatagaaaacacctggcttaattttccrggctggggcaggatgggttagcacgttagaaagagataaaggcgatggcaggactcatcgcttgtttttgtgaatacagcaagactgatccagcagtcaaatgatgaacatggtaggtggtgaataaggcagctccttacagcacccctggagttgatgcttttcttttggcttccattaaccttcaataacgatgggattcccaagggcttcagcacaggtacaaagaagtggaggaattaagtaatagcttagaggaagcaatagagttttccctattgactccccccttccccttgtcagcaatacagtgagttgacagatgattgtagcttactgcagcatttggttccagctgtgcacacggcatgagtagtagcgggaacattg

SEQ ID NO: 534273 - DNA, 459 bp, Homo sapiens
cacgtcaatctcagatgtcagcagcaatgttggcttaccaccatgactccaaggtcaggccccggaaatctgatcagctctctgtgtttcacaaagacacagctcaccgtccagaaaattaattaaggtctccataggaaacagaaaatcctagtctttaaaaagtaaaatcgactcctctcccctcctcctcctgtccccaggagacttgcataaggtcaatcttctcatcttagcacaatttctatatctctttctaattgccttcacagaaaaagttccctctggaccgycctagttgtttcttcaatctggagaaaaaaaccatttgatgattaataattatgtaattccatttccaattcggtgaccattatcattggatgaggtgactgcagagttgcaaaaatgaagtctatcaataattctgacatctaagtcttcagtaaaaggggtgcc

SEQ ID NO: 534274 - DNA, 640 bp, Homo sapiens
acctcctagaagccttccctggctgctctagccctctctcatctttgtctctgcatttctaactcaaaatatggtttacacataactatgtgcagcctttcattgaaccccaatgctttgcacctgtattccaagaattcccaagtagattgagcatcccttataagcaagaatgatgctttctattctcccctctcccagtgcagtgctggagtcattgctcaatgagcctcaaaacacaggatctcccccaaacaagttcctcattctgtgatactcagaatgctccattctggtgataggaagtactctttcagcaaacccaagagccatcctcatcccattggctttcctaaattatctctaaccagattattctcctcccacagaacacagaatcctccaaggaggcctggatggatgctggcctgagttccttagctaattgctctcatcctcttcygacagaagtaaggaattatccttcccaaagcagtatactcctggaaagatgttagaggtgactcacacagggatggtgacggggacaggacaggaatggggaaagaaaaaagagggcatagaggctagttatggagccacagaatgaggcacattagccaatttagccaattatgca

SEQ ID NO: 534275 - DNA, 603 bp, Homo sapiens
atgatttcttgtagccaaatgacttctaattttttctagatgaggttctacttcatgggaagtatttatttatgtatatgcaacaagaggttgtaaacaccacacatccacctccctgctcagctaaatctatcatctaaagcgggctgcggaggctgctgttgctggggctctccccttggtgttctgggctgcgttgtactaagtggagaaggtggttgtgggcaagcgttgtgcakagatcacaaccaggtgggcagggggctgctctctccacactatcagttgacaatgtacaattccttttatgaactcttgtaagtgctgctgtatctacccattgtttttgttttgtttttatttttttgagacagagtctctctctgtctcccaggctggagtgcagtggcacgatctcggctcactgcagcctctgcctcctgggttcaagcgattctcctgccacagcctctcaagttgctaggactacaggaagatgccactgtgcccagctaatttttgtatttttagtagggacggggtttcaccctgttggacaggctgatctcaaactcctgacctcaggtgatccacccacctcag

SEQ ID NO: 534276 - DNA, 577 bp, Homo sapiens
tgctttgtgcaaggcacagcatgagacactgaacatctgttttttttgttttggtttgttttgagacagggtctggctctgctacccyggctggagtgcagcggcacgatcatggctcactgcagactcaacctcctgggttcaagtgatcctttccacctcagcttcccaacgaactggaaccacaggagcatgccaccacacctggctaattcttgtattttttagagatggggttttgccatgttgcctaggctggtctcgaactcttgggctccagggatcctcccaccttggcctcccaaagtgctgggattacaggcgtatgccactgagcttggcctgacatctggatttttaaagtgaaatttcttgatttttaaaattaaaaatttaaaaatcactgcgtgggtcaaataaaactcatttatgttttggatttgccctgctggccaccatttgaaacttctgaattacaagctaagcctgtgaggtgagaagtagcagtttttatttgtttagccgtcaggctcctcaagtatctggagacaaaaatgttttcaatttcaatctcaaa

SEQ ID NO: 534277 - DNA, 211 bp, Homo sapiens
tttaattattcagactcacaaggacagacaaagaaacatggtgtttctgcagacacatggacttctctacagaataaggtggatttgaacattttaaggttgggactattaaaataaaatgatcagattgagatcatggctcaggtaatttggggcaagggcaaagtaactttcayctgaaatatttgtaaaattaaggtacactgaaaag

SEQ ID NO: 534278 - DNA, 367 bp, Homo sapiens
gtaaggcatgatggaacacatactagaaatttcacaatcatcactgtccaatttgaggaattatcaaagtkaacacatttatgtaactacaacattgtcaaccccttcttcatgtgccccaattgcaacacctctcccttcctcaaagtaaccactattctgacttttgtgataattcctaagttttctttttcattttactaattatatatgcatcacagggaaataaatttaactctgcttgtttttgacttttatatcaaagaaatcatatttgtatcattattttgagacttcttttacacagatttatatttctgaaaatcatgcaagctgctattgtattctaaatctgcaggaactacac

SEQ ID NO: 534279 - DNA, 494 bp, Homo sapiens
ttcaggcatggagtaggctgaaagctacctttatagtcaggttttgccagggacttacaactaagtgaaaggggacaatggaattgagaaygtttatacaggagtgatttcactgagagactgtggaatctaagtcaggtaaggagagagatgcaaacctgagggagctgagcaatactttggatgggttaggatcagtggtttgcaggtcccagtaaggtaaaagaattattggagttgcaatgtcagaggaatcaagatgatcagagaaattgagattacaaagggtagcaattattaatactggaaaggtcaagggtttgcccttggggacgtgggtagaagtggtcacagaactaagataccaacatcccaagtgggctttagtctcagcagaagtaagatttcaaaagtctttgagggagatgaggaagcaaaaaaataaagcagatttacaaactaatcctagggactagctttgggtatagttaccg

SEQ ID NO: 534280 - DNA, 543 bp, Homo sapiens
caaccaccaccatctactttgcacctaaaaaatctgaggtctggccgggtgcgctggcacatgcctgtaatcccagcactttgggaggccgatgcaggcagatcacctgaggtcaggagtttgagaccagcctggccaacatgccgaaaccacgtctccactaaaaggacaaaaattagctgggcrtggtggtaggtgcctgtaatcccatctactcagaaggccgaggcaggagaattgcttgaaccctggaggcagaggtcgcagtgagcagagattgcgccactgcactccagcctgggcgacaagagtgagaaaccgtctaaaaaaaaaaaaagttgtggtcccctgaaatttgagaatatcagtgactgtgatagaatgactatagatttgtgctgaaatactaatgatgattctaagacttacttgaaaaaactttgagataaatattttcaaaaacattatggaattggtctcattcattccaaaacatctgataagtgtctagagtgggccaagtatgaggttaagttctggcaa

SEQ ID NO: 534281 - DNA, 342 bp, Homo sapiens
tcttcaagttgttgtctctatgctagaacaaatcaaaacagcctctgtcactttggatgcagcactagatcaaacaaatgctttctcctttttccgataagtggataaccttcaggggcatttgcttttacctggtaaggacagtactgcatcttcactttcttccctcaaggttatatgaccttatagctctttgccacaatttargctacagggttttgataatatccttattccacaggatgccacacagatttccttatattcatagcatcatgctgataagatctggggaatagtggatagcatataatcttgatgccttataaagacacacgtgtg

SEQ ID NO: 534282 - DNA, 676 bp, Homo sapiens
tgtaatccttgctacttgggacgctgtggcaggagaattgcttgagcctcggagctatagtgattcatgatcatgccactgcattttagcctgggcaacagagcgagactctgtctctactaagtaaatacataaatgaatgaataataaaaataaataaataaaacctaacttctcattgtacattaattccatagccatttattaaatccatactatgtgaacagccatgtgctaggtattagggatgggatcattgacaaagggggaaaaagtacccattataaattaactaatacaagctaacaatgtccaggcctatgggaccaagcactttacatgtattatgtcactttatctaatttaatccctatagcaaaaccaagcaagtattttatccatgttacatttttgaaataggagtgtcacagatattgaataacttgcccaagttacacggctagtataaagtttataaacaatttgacactgtagccacyattctatttgtgcgccctaccccccaataaagacaagaaaccaaactaagaaacaaaccaaacctcaagagttgtctccatttgtagatcttttgttcgtcaataaattcaatatagtctttctgtctcactccaaagctgctctttctgaaggctctaatgactatctctgatca

SEQ ID NO: 534283 - DNA, 467 bp, Homo sapiens
tctgcagatatctggagttctctctgtgcatctctcttctctctgaaattctttccattaaactgtatctgctttggtctcccgggactctaaggcctcaactcagggattcttcaagactccatctagttcccccttcctgtgccgtggcctagaaactctctttggacakaccccacccccaagccataaatagagcaccgagaaaataacttatagagacttgggtgttcacaatacagggagactagaatctcattccccaggtggacaacttcctaggcagtagtcttattgacctgtcccacaactacatttcaaggaaaaggaaattggagatgggtagagagaagcagtcgttggaaataagcatagcaagactgcatgttttcatgtatcaaataccaagagagtaggaggactttagccatgtttctcatgccccagcaagtaggcattctgctggt

SEQ ID NO: 534284 - DNA, 548 bp, Homo sapiens
actgagcacagccaagctggtggtaagaaagggtgtctctaaaatgggatcagaatggggaaaagagcctggggttagaggtttgaggttagccctcctgtggattatgggaacagtgcaaggaaatttccatccactacacacaagaatgttctcattctcagaacccgacaatgagaaggtaaaagcttgtaaggtagtgagccccccattgttggagataggcaagctgagggtgggcgagtccactgccaggtgtgagatttgcagcagatgaccttaagacctcttataattctaatgttctaagatcctaacattccatcattataagtcattgaatgtacctttttctaaatatgactctagatacttaagcacacacggccacgcctttccgacaggaagtccccaaacgatgggtgactaggacttcaagccgccaggaagctggggaacaggagcactgaccagcccatcctctgccccagaggggctgggtccacagctagmgctccatctcttccgggcagtgggcagggctgggg

SEQ ID NO: 534285 - DNA, 636 bp, Homo sapiens
tatggggtttgggatacacaagggatacctagtctcaggggagggaacccctgttcctgccctctggctcctgatgacggtggattctgcaaactcttcttccccaggccgactgcacctggcatctgctcagagcctggggtgcttgggaagggagacccgctgccagggactgagtgagaagcctggctgagaaggggttaaccaagaccaccacttccaggaggtccccaggcagcaccccagcagccaaggcacaggtgacctgggaggaagagtgagaaccaggtcgctcatgcatagcagggctggcatccagggggaactgtcccagcctaggcccagcacccataggctcattcctcctctcagcctaggcagcggggctatactgcccgtttcacagatgaggacttgcccaagctgagcaggaagttgtggcagggccagaggctctgtggggatgacaaactgatcccagtcatgggaggaccctgcttcctccacaggggctgcaggaagcactgcagcagggagggattatgtggccttgtctgggctcgattatcaatgcytgccatggacacaagaagacagagtgccctgtatgtggcgtgtggcgtgtggttgtgcttg

SEQ ID NO: 534286 - DNA, 537 bp, Homo sapiens
tagagaagaagatatttgaagtatagagcaagtaagataygttgattatacagcagcattactctatttatggttgtggactggtgaaagtccacatgttgtttgtgggctgcaaggaaataagagcttgcactagaatccaaatcaactttgtcactaagcacactttttgcttcagtagactgtgtgtgtgtgtgcaccaagattttctccgtgatggaagcaatgcattgatttatattctggtgcaagccccttattttggcccaaacagtaatgaacagttcacagcctggctagtttgtagaacaccgttagagagtaagatgggtgcctcctatatcaacaggcacaccagtgggattttaatgacccttgtgacacctctttcttcactctgtgaagcaccaacccccaaaaccacaagaagccagcacttctactgccacatcccaaagccgatgcatgatctcacctagactattgcgaggccttccagcaggccctcctggctttcaaatgattctgacacatgcc

SEQ ID NO: 534287 - DNA, 452 bp, Homo sapiens
gaaggacaatattgttccatgaatcaggtacagtatgcctcaaaagtcatcacaaatttaaatttctgccttaagtagccaagtggaaagggcactgcagcaagagtcaggaagcctggattctcacccaactctcaagaaccggcttctccacagtgggcctccatcatctttctgaattccagattcatcctctgtagagacaatgtctagactcccatctagcatccctgggaaggtgaatccgggataggacctgcagcaaagcaatcgatgccccacccgttttccctcagccttcattgtaacagtgcccatgggcctgaccaactgccagcccctgcacctccttaccagaggttctctggccagcagaacctcccctcttaggtgtgatcactcagaggcacctgtgctacactctttcccagaygttcccagtggaactgagc

SEQ ID NO: 534288 - DNA, 566 bp, Homo sapiens
tgtgttatgtgaaatgcatgtcctcaaaacatgggtggttgtataaaygaggaagctggcctcatggagccaaagcagcatggaaaggcccaaataacttgctgtggggaagactgactgcctctggggtttttaatcagcatgaaaagccacccagggccccaaatcattagtagcattttaattggcagcagagtaatactgtgtctactttggcttacagatataaatttcctgctctctcataacagatggtgatgaggtgcatggtaggaagcatggcaagaactgtgttactcaaaatgtagacttaattgcaaatttgaaatggaaataaagtgaaggttctgtctttatttacaataaatttcatgtgttaaatggacttgtctaattcttctattttaccatgcgattgaataataaacatttattatgtgcttctggcatgcactgtgttaaatattttacatggattatgtcatggatctcttgccatgatcctgaggaaagtattattgctgcttttagtagcatcgaatgttggaataaagtctgcaggggca

SEQ ID NO: 534289 - DNA, 558 bp, Homo sapiens
tatatatggtgagaggaaggaaataatcagtttattttgtaacactattgagctagatttttaacgttttatctagaatatagtaatattggggtaaacactgtaaatcagtggctgaagatcaatgcagaatttctgctctaatgagatattatatttacatttctggtaatttccgttaccagaagcatgtctgttcacatgcttgtatactataaaagtatgtttaaaaaaaaagactgcttcaagccatgaataaacagtgtgtgttttcctggagaaataattgtataaaaaatttgaggcaataatcaccaacccacttaaccccctcctccaacttaaaagtatttttatattaaaacaaacagaaatgtattatggaagagaatacaagattcacatggatttttagataacactctcaaattccaagagattttgtatttggcaaactgctttagggtctaccttccttgcctcaatctcctacccttcagtycaagtttattttgctaagtaaattatctaaatagcctgtccacatctatattgcta

SEQ ID NO: 534290 - DNA, 594 bp, Homo sapiens
cccaatgtctgtacttcaaactaccattccatattgccttagtttcagactttaagaagtttttcgtgtatttggtgaaaaatacatatgtttgtaatcagatattaaaatgagagtatttctctcatgaactttgaagaaacgtcaagaaggacacaacaaacaaggcaaggagasggattagttgtacagaatatgctgagacactataaacatagttcagccaacatcaacacttcacctaccttgaagttttaaaataattgaaattgaaacaactggtgtcattcagagagtgttgccaacaggctacatgttatctcataaagaatgggagggacatgtcttccacaacgcaagttaagttttgggggcctcccacagaaaacacttagataacttggcatgagtctgaagtttgagggtcacaaaggtaatgcctaacttcactgagaaaattctaagggtaaaagcccaggctagatggatttgggatggcataggtatagacggctttgttgagagggctgactatgttagaaccaaatggcctgatatctttcaaagagtaatcccacataggaccacctggaa

SEQ ID NO: 534291 - DNA, 429 bp, Homo sapiens
aaaagagtatatatttgtagtatttgtttagtaatttgataaggtgtaaaaagcttttgaaatgcatttatttagtgacaaagataaatttaaaatagtgtatagtgagtgatttaataatttggtcaaacaacatttcatgtaatgttcaaatgtgtctgcatccttggaacattaaaaatattatatctttattaattayaaaatatcctatgatggtgttttacaggaataaaccattttctcactttacaaaaatgatagtttatattgttttcacaactttattattagcttagccttactgagtagttagcagagaaaataagatagattacctaaaaaggatattcctttcacaaatcaaactagattttgtaaaaatcaccaatcaaaaaagcataaaatcaaaatttatttagaggaata

SEQ ID NO: 534292 - DNA, 429 bp, Homo sapiens
aaaagagtatatatttgtagtatttgtttagtaatttgataaggtgtaaaaagcttttgaaatgcatttatttagtgacaaagataaatttaaaatagtgtatagtgagtgatttaataatttggtcaaacaacatttcatgtaatgttcaaatgtgtctgcatccttggaacattaaaaatattatatctttattaattacaaaatatcctatgatggtgttttacaggaataaaccattttctcactktacaaaaatgatagtttatattgttttcacaactttattattagcttagccttactgagtagttagcagagaaaataagatagattacctaaaaaggatattcctttcacaaatcaaactagattttgtaaaaatcaccaatcaaaaaagcataaaatcaaaatttatttagaggaata

SEQ ID NO: 534293 - DNA, 619 bp, Homo sapiens
tataccaaaattatattaccttttcttttctagaacgtaacttttttttttaaatgatacctggcaataataaaagtgtgaagaagaaattttaaaatttcccaatcttaccactcagaaataactattgtttactttgtaatagatagctctatagatatatccccaaaatagcatcatattaaatatatttttattttactgtgaaacataatatagacataaaaagtacataaacacatattttacaagtaattataaggcaaataattgcataaccactatctggataaataaaatgaacattgacagtcacataagggtgtctctctgtgtccctcaytgatcacaaaaccatccttctccctggaaggtatcttctctgacatttttcctaattattctcttacttttctttttggtttaaacatctgtgtataaacccttaaacattagagcttagggattttttgaactttgtgtgtatgtgtgtgtattgtttctttggttcaacattatatttgtgaaattcacccaagatattgtatggagttcattttcacgcctgtacaatgctccatcatacaactctaccaagaagtacaaattatttttgcag

SEQ ID NO: 534294 - DNA, 619 bp, Homo sapiens
tataccaaaattatattaccttttcttttctagaacgtaacttttttttttaaatgatacctggcaataataaaagtgtgaagaagaaattttaaaatttcccaatcttaccactcagaaataactattgtttactttgtaatagatagctctatagatatatccccaaaatagcatcatattaaatatatttttattttactgtgaaacataatatagacataaaaagtacataaacacatattttacaagtaattataaggcaaataattgcataaccactatctggataaataaaatgaacattgacagtcacataagggtgtctctctgtgtccctcactgatcacaaaaccatccttctccctggaaggtatcttctctgacatttttcctaattattctcttacttttctttttggtttaaacatctgtgtataaacccttaaacattagagcttagggattttttgaactttgtgtgtatgtgtgtgtattgtttctttggttcaacattatatttgtgaaattcacmcaagatattgtatggagttcattttcacgcctgtacaatgctccatcatacaactctaccaagaagtacaaattatttttgcag

SEQ ID NO: 534295 - DNA, 619 bp, Homo sapiens
tataccaaaattatattaccttttcttttctagaacgtaacttttttttttaaatgatacctggcaataataaaagtgtgaagaagaaattttaaaatttcccaatcttaccactcagaaataactattgtttactttgtaatagatagctctatagatatatccccaaaatagcatcatattaaatatatttttattttactgtgaaacataatatagacataaaaagtacataaacacatattttacaagtaattataaggcaaataattgcataaccactatctggataaataaaatgaacattgacagtcacataagggtgtctctctgtgtccctcactgatcacaaaaccatccttctccctggaaggtatcttctctgacatttttcctaattattctcttacttttctttttggtttaaacatctgtgtataaacccttaaacattagagcttagggattttttgaactttgtgtgtatgtgtgtgtattgtttctttggttcaacattatatttgtgaaattcacccaagatattgtatggagttcattttcacgcctgtacratgctccatcatacaactctaccaagaagtacaaattatttttgcag

SEQ ID NO: 534296 - DNA, 528 bp, Homo sapiens
ctgctcaggaccacctcgattttctgcggccagcagtgtaggctcaccgacaccctggacagttctgtaggaggacaagagccagggcaggagcctcctgaggctcctgggatgatgccacgggaggagattcgagttctaatgttgggggaggagacattgttgggatattagcccaattcgcaaacacttccttaaacaaggactctccgccgggtgtgggagctcacgtctgtaatcccagcactctgggaagctgaggcaggcagatcacctgaggtcaggagtttgagaccagcctggccaacatggtgaaacctggtgtytactacaaacacaaaacttagccggacgcagtggcacatgactgtagtcccagctactctggaggctgagggtggagaatctcttgaacccagaggcggaggttgcagtgagctgagcttgtgccactgcactccagcctgggcgacaaagcaagactctgtctaaaaaaaaacaaggactctccctcacagccatagttgt

SEQ ID NO: 534297 - DNA, 528 bp, Homo sapiens
ctgctcaggaccacctcgattttctgcggccagcagtgtaggctcaccgacaccctggacagttctgtaggaggacaagagccagggcaggagcctcctgaggctcctgggatgatgccacgggaggagattcgagttctaatgttgggggaggagacattgttgggatattagcccaattcgcaaacacttccttaaacaaggactctccgccgggtgtgggagctcacgtctgtaatcccagcactctgggaagctgaggcaggcagatcacctgaggtcaggagtttgagaccagcctggccaacatggtgaaacctggtgtttactacaaayacaaaacttagccggacgcagtggcacatgactgtagtcccagctactctggaggctgagggtggagaatctcttgaacccagaggcggaggttgcagtgagctgagcttgtgccactgcactccagcctgggcgacaaagcaagactctgtctaaaaaaaaacaaggactctccctcacagccatagttgt

SEQ ID NO: 534298 - DNA, 593 bp, Homo sapiens
taatttataccttatatgctctttgttttcttactcayccaacattactggccctttaacagaacacccatatgtgttcaatactaattaaattcagtcacctttgacatcttgccaactctctctgtttcaaaaaatttaaaaatagttggtgtttttttctttgagttagggtcttgctctgtcacccaggctagagcgcagtggcacaatcatagctcgttgaaggcttgatctaccgggctcaggtgatcctcccatttcagcttcccaagtagctgggactacaggtgtgcacaccaccatgcctggctaatatcttttattatgatttgtagagatgggtctccctgtgttgccaggctggtctcaaacttctgggctcaagggatcctccctcctccacctcccaaacggctgtgattacaagtgtgagccaccacacctggccatattttttaacattgccattatgaagatatatattgtcaatgtaggaggatgatagatttcttgccaactcattccatgagaaactctgtttcttttccatgtgttcccctattttacttagtctagatgagatgtttttt

SEQ ID NO: 534299 - DNA, 628 bp, Homo sapiens
gccactggtgcattgtgtggtcgcccgctcggagaaatctggtctcctccaggaaccccttgcgggaggccccctgtcgaacctctcagaaaacacgtgtgacaacttttgcttggtgcttgaggcaatacaggagaacctgaggcagtacaaggagatccgagatgaactcaacatgtaggggagggtactggggctgcccccaagtcatgtgagtcaaggctgggcggagcgtcagagtcttctggcctcacgccctcaccatttataaggcagagcctgggccccacagaggtcccccaccctattggtggaggaactggaatccagactccaggttccttccatctcacacaagggcacagctcggcctgggtctctgtcagggctgcgtgggagagcgaagcgggggtgacgccagggaagaggtgggagggctgcttccctcccctgmggccttctgaaaggcactcactgctccacccccaggattgtggaggaggtgcgcgcaatccgcttcaaccaggagcaggagtcagaggtgttgaacaggcgctcgtcgacgagcgggtcgttggagactacgtcatccaaggacatccgccagatgtctcaacagcaagacttg

SEQ ID NO: 534300 - DNA, 628 bp, Homo sapiens
gccactggtgcattgtgtggtcgcccgctcggagaaatctggtctcctccaggaaccccttgcgggaggccccctgtcgaacctctcagaaaacacgtgtgacaacttttgcttggtgcttgaggcaatacaggagaacctgaggcagtacaaggagatccgagatgaactcaacatgtaggggagggtactggggctgcccccaagtcatgtgagtcaaggctgggcggagcgtcagagtcttctggcctcacgccctcaccatttataaggcagagcctgggccccacagaggtcccccaccctattggtggaggaactggaatccagactccaggttccttccatctcacacaagggcacagctcggcctgggtctctgtcagggctgcgtgggagagcgaagcgggggtgacgccagggaagaggtgggagggctgcttccctcccctgargccttctgaaaggcactcactgctccacccccaggattgtggaggaggtgcgcgcaatccgcttcaaccaggagcaggagtcagaggtgttgaacaggcgctcgtcgacgagcgggtcgttggagactacgtcatccaaggacatccgccagatgtctcaacagcaagacttg

SEQ ID NO: 534301 - DNA, 527 bp, Homo sapiens
acactatcccctctttgctaggtcagaacatactggaaaatatatgtctttagcagaaaaagcagtttcatttttaccattgtacacaaaagcacaaacatctacaatacagtgaacctactgttcataataaaataaataaaatgtaactataaaccaaaagctgcagaaggaattaaaacagcaccatgaaaataaaatgcatatttctagactctcaaatagttgattttgaagtcccacagaggcccattaatggctgtgtttatgtttatgtaaatagagtcgatggttaggaacatgcagtgactgttaaatttaaaaagcattttggaaatagtggacamctaaggtttctcttaacgattacatgtcatgttttcaccttttccagaatccgttgactcactaccattattgactgtgtatgttctcaactattttatttctgtctgcttcttatattattacatggtaactttactttatttgtataatgtgttcttagtgccttagggaacaatgga

SEQ ID NO: 534302 - DNA, 527 bp, Homo sapiens
acactatcccctctttgctaggtcagaacatactggaaaatatatgtctttagcagaaaaagcagtttcatttttaccattgtacacaaaagcacaaacatctacaatacagtgaacctactgttcataataaaataaataaaatgtaactataaaccaaaagctgcagaaggaattaaaacagcaccatgaaaataaaatgcatatttctagactctcaaatagttgattttgaagtcccacagaggcccattaatggctgtgtttatgtttatgtaaatagagtcgatggttaggaacatgcagtgactgttaaatttaaaaagcattttggaaatagtggacacctaaggtttctcttaacgattacatgtcatgttttcaccttttccagaatccgttgactcactaccattattgactgtgtatgttctcaactattttatttctgtctgcttcttatattattacatggtaactttacttyatttgtataatgtgttcttagtgccttagggaacaatgga

SEQ ID NO: 534303 - DNA, 600 bp, Homo sapiens
ctgggtaaagcatatagtacaatttgtcatattccttacacatttttggctctcttactaaactgtcctatcttagaaatttttacatcagtcatatttgatatagggtaatgcagaatggttaaaatatatggagatgacttggaaaaggataaaaacccctrtacgattggtataattacaacactgttcctctaacggatatttttcagagaggtaatactttggaatttattgtatttgcaaaaacatcattgaataatttcataaagtgtttttaaaaaggagctttgtaggactaaatgtctggaatgactaaaagctagttagaaatagcagtagagattatattataacatttaatagcagtgacttcatgatggatgactaattcctttcttctatctaattattatccaccttctcacaaaggtttctcctttacagaaaagtagagggtggatttctgcaagcaatgtgcaaagaaacttgaaacaacaacaagataacccaggacagcccttacctcacagtggggaggagtgagcaacaaagacaacaacaacaaaaaacagctcatcatcttgttattaattgcaa

SEQ ID NO: 534304 - DNA, 570 bp, Homo sapiens
atattttgtttacccaaactcatrtaaaagatgtaatttttcaagtattctgtttatttgtgccaatctgaaaaattttcattaagaaaacatttcaaacaattctttgaaatacaaaatttgaagggaatatgcattaagagactataaaccaaaatcttagtttaactgatctccaatgacaggataaaatgtaggcaaaaattctatgctttaggtgatcaatatctactagtcaatttatttagttttacacacaagctatgggatctactcataatcatataaaaaattaaatatcaatgaatacattaatttgtttgcactgtttttcaagtaattagattctttaaaggctgtgatgttcaattttgactatatttaaagggatttgggtaaagtagaaagggtacagtgagaatgaggcaggagccggaactcaactccagagtcggggctcagacactggatcaaattgaggactaactaatacagttccagggaaagcacctctccataaaacatactcaccagtgtgccatgtcagtttaccattgccatggcaacagc

SEQ ID NO: 534305 - DNA, 546 bp, Homo sapiens
gtcttcgataccaggggtctaggaaagtattgtacattacaaggatcaaaatgttagtttacytaatatcccactgttttacactcatattctttcttctaaacttcttcagactaatgaatactttttaagggctcttcttgaatttagattttttttagacatctaagactaccttcataagcccctatttacaagactctgagcacaaataataacatcctctcctctacttgaaacactgcaatagataccacaaccaatctaggtttcacttattcagtcctaagtgatttagaaataaatattacatctacttgtttaggttccatacacaaatatccaactatttctatgtatttcacattgaataaaacaccaacaaaaacaaaaagtgagtatcatgggatgtggctgatgagaataagaattttaagtgttattaagaacggtagatattatataaaaaagataaattatttaacggggtttcatgctgtaactgcaatgtgggaaagtattgttggaaatcaaaatttgaggcaa

SEQ ID NO: 534306 - DNA, 262 bp, Homo sapiens
tttatgggccatttcacagcattttcatttgaaagggcacatagactcaggaattacaggctgagcaggcacagaatcgatgcagggcagctccttttgacaagtcccagttgctgttagagctcaggatgtgcacgtgtgtgaatgcaagtgccgtgcgctattcctgctttacagtgtgcctgtgttcttgcagccrtggtccttgcactaaccttattacctgctttcaatcttccactgtcacacaggaatgccagct

SEQ ID NO: 534307 - DNA, 330 bp, Homo sapiens
ttgccttggaagtgggtcggcttccttccctatcgtttttcctttatttattttttttgtgactgagggaagtggtaacactaatcaaatgcttactctgtgcaaagcactgtactatttttttttttttggagacagaatcttgctcttgtcccccaggttggagtgcaatggcacgagggctcactgcmacctccgcctctcgagttcaagtgattctcctgcctcagcctcccgagtagctgggattacaggtacctgccaccacacccagctaattattgtatttttagtagagacagggtttcaccatattggccaggctggtct

SEQ ID NO: 534308 - DNA, 541 bp, Homo sapiens
atcctcatttctctccacatggcatccccctctactcccactccctgcgtcctatcctggtggctccattgtaggcagaatgcgagggccagggctgggctgtcatagggaacaggagttaggcaargagctgggagggcagaacatgagctttggcctcggggagacctggtcttgaaagcacctggaagcatggctagccatgtgtctttgggcaactgctgtaacccatccgagtcttcttttccccacctagagactgaggatgataatactcacccccaccttgctttaacaaatgaatgagaggagcgtgtaccacctgaagcacagggacttgcagagtggctctcagcatgccttcctgccccaagcggggaatcacagagcaggtatgggcctgggagtgcagagggcgggggctgccaacctgggagcccacaggctctcgagttcctcctcccaggaaggcctggcccttccccaggcacagtggtcagtggccaacaggacaacacagggctgtgtcatgaggaaggca

SEQ ID NO: 534309 - DNA, 504 bp, Homo sapiens
gctgctgtggatgaagcccctttctaccagagttactgtgccacttcagccacctcctgaagcaggggggccaccagctcagggggccctgcctcagcatcagctcagaccagttagaggaggctcagctccagcaaggctagcccagcctcgcccctgaggacctaggagctcaccaggaaaaaggggctgccttccctctgcccagctcacacaaatcctcattcaacaaggcccaggtcygctgttaccatcttggagaaatattccccagcttctccccatttccttggcctcataagtgcatccccctctgggttcccaccaaagcacttcattcgtgcccatgagaacttttattaccatgttttttggttacagggtagtgtctattgttcccagccccattcaggtccacagctcccccaagacagagagcaagtataattcttgactgtatttccaacgtccatttgtgatggcattggataaatacatagtgat

SEQ ID NO: 534310 - DNA, 461 bp, Homo sapiens
gcgggtttgctcttcacttatctgttcagggccttaaatcattcccaggaaaaagcttagcacagggaaacctggcatcctggctattggctgctcctgtcagcacctgccctgctagggccgaggggaagccctgcttccacagaacagcgtggcagtgtgaataaaactcctgggatacccaagcatctggaaggctraggactggggctgggggatgttggagccatcaccactgaaggaagttctggaggcaaggtggaaagggcaggggagtaggggagaactagaaagcaagtgaggttctggagcgagaaggcaagtttaatgagcacttactatgtgttgcgcattgggctaggcgctagggacaaaacactgaacaaaactatcattgtctctgccctcacggagttgccttctaacaggaaaggaacacattacacaaacaattgcctaaa

SEQ ID NO: 534311 - DNA, 571 bp, Homo sapiens
agtggattggcaacgcaaccaaaataacatggagtatcaaggagcaaacaggaaagaaatgaagggctctttgcagaatggagagaggagggaatgttactgagcacttggcaggcattcaaatgccttggtgatctggccccaggctacctatccagtcccttccagcyacacccctactgcactcagcctgactcatctgaatatttgcagggtcctcagtgctgcgcactcactccaccgcaggtcttgcccaggggttccctctggcttggatgacttctaccacctgcacagcaaagccagtcttgggtgtcaccttctctggtaaaccttccatcctgcccactggcatactgtgcttggtctccgtcggttcacagcccccctgcccagctaccccgactccctgcccttgagaacagagatttaatcttattctcttctgtttcactagtgtcttgcacattttctggcaccctgtcagctcaatgaatgtctttagaatgaatccattaatgaattaattccagttattggcagaactgatcttttgtgtatctggcaacag

SEQ ID NO: 534312 - DNA, 571 bp, Homo sapiens
agtggattggcaacgcaaccaaaataacatggagtatcaaggagcaaacaggaaagaaatgaagggctctttgcagaatggagagaggagggaatgttactgagcacttggcaggcattcaaatgccttggtgatctggccccaggctacctatccagtcccttccagctacacccctactgcactcagcctgactcatctgaatatttgcagggtcctcagtgctgcgcactcactccaccgcaggtcttgcccaggggttccctctgscttggatgacttctaccacctgcacagcaaagccagtcttgggtgtcaccttctctggtaaaccttccatcctgcccactggcatactgtgcttggtctccgtcggttcacagcccccctgcccagctaccccgactccctgcccttgagaacagagatttaatcttattctcttctgtttcactagtgtcttgcacattttctggcaccctgtcagctcaatgaatgtctttagaatgaatccattaatgaattaattccagttattggcagaactgatcttttgtgtatctggcaacag

SEQ ID NO: 534313 - DNA, 145 bp, Homo sapiens
cagattctgcttgtgtaggccagggtgttctggttgcaagtgacagaaaccttaactcatcctcactaaacttaaaaggaaatgcattractcatctaagtgggaagtccaaggggagaaggggctgctctcagagggaaaatgt

SEQ ID NO: 534314 - DNA, 307 bp, Homo sapiens
ctgcaggaaggaggagctgatgtggatgaggggagggggcactcttacagcctctgagctcccccattaactccccaaggtgaccttggcagcctggagtggggtcagagttcctgggttgctgggatcagagttcccagactgctcccttctagtggggcctgtggtctcaggaattacaaaacctgagtgggagattttctaaaaaggggacagtaatgccaatttcatgaggctggtcattcctccctgaatgtgagyctttggacagaagccaaactcagtgaatgttggtggaaggaagggg

SEQ ID NO: 534315 - DNA, 307 bp, Homo sapiens
ctgcaggaaggaggagctgatgtggatgaggggagggggcactcttacagcctctgagctcccccattaactccccaaggtgaccttggcagcctggagtggggtcagagttcctgggttgctgggatcagagttcccagactgctcccttctagtggggcctgtggtctcaggaattacaaaacctgagtgggagattttctaaaaaggggacagtaatgccaatttcatgaggctggtcattcctccctgaatgtgagtcttyggacagaagccaaactcagtgaatgttggtggaaggaagggg

SEQ ID NO: 534316 - DNA, 593 bp, Homo sapiens
ttgagaaaagttttcttgaagaagtcggtaagagatcaactacagatttttattgtggacgttttgattataagatcactagaataaaaaggttttcagttaagtcgaaaataaaacaaaacaacacttttagtcatgagtgctttaggagtattatttatttttaaggaaatatttattaaaaacctgggaaatactggccggactgtcattgctgcacacaacaaagatataccttttaaacaacattttattttatttagataaattaaataaatttagataattaaataatagtrttttatgtagaagataaagaactatcagaattagtactgtaaatggtccatgataatgtgcttcagcagttactttagattatcatgtttagatcatcacgggagacatttggggtgtaaattggagttatggggatttgggggacctactagagacaaagtggggagccacttacctgccattaatagggaccaagggagatgccacaagagcaccgtgtcagggattttgtggatattgttcattacttgactaggagttggggtgctggtaacacaggataattatttcag

SEQ ID NO: 534317 - DNA, 593 bp, Homo sapiens
ttgagaaaagttttcttgaagaagtcggtaagagatcaactacagatttttattgtggacgttttgattataagatcactagaataaaaaggttttcagttaagtcgaaaataaaacaaaacaacacttttagtcatgagtgctttaggagtattatttatttttaaggaaatatttattaaaaacctgggaaatactggccggactgtcattgctgcacacaacaaagatataccttttaaacaacattttattttatttagataaattaaataaatttagataattaaataatagtattttatgtagaagataaagaactatcagaattagtactgtaaatggtccatgataatgtgcttcagcagttactttagattatcatgtttagatyatcacgggagacatttggggtgtaaattggagttatggggatttgggggacctactagagacaaagtggggagccacttacctgccattaatagggaccaagggagatgccacaagagcaccgtgtcagggattttgtggatattgttcattacttgactaggagttggggtgctggtaacacaggataattatttcag

SEQ ID NO: 534318 - DNA, 593 bp, Homo sapiens
ttgagaaaagttttcttgaagaagtcggtaagagatcaactacagatttttattgtggacgttttgattataagatcactagaataaaaaggttttcagttaagtcgaaaataaaacaaaacaacacttttagtcatgagtgctttaggagtattatttatttttaaggaaatatttattaaaaacctgggaaatactggccggactgtcattgctgcacacaacaaagatataccttttaaacaacattttattttatttagataaattaaataaatttagataattaaataatagtattttatgtagaagataaagaactatcagaattagtactgtaaatggtccatgataatgtgcttcagcagttactttagattatcatgtttagatcatcacgggagacrtttggggtgtaaattggagttatggggatttgggggacctactagagacaaagtggggagccacttacctgccattaatagggaccaagggagatgccacaagagcaccgtgtcagggattttgtggatattgttcattacttgactaggagttggggtgctggtaacacaggataattatttcag

SEQ ID NO: 534319 - DNA, 532 bp, Homo sapiens
ctgtgggaggtatatatggggccagcttggaagtaactctacccacattctactgaccagaactcagtcttgtgtccccacctccatgcaagagcctgggaaaggtaatgtaggtgggtgcctctgaggaaaaaggcatgggctttgggggacacatcatctcttgccttcacttttttgctagtatcttatgaatctagagcacgtccttctttttcacctgaaatttaggtgatttgagtctccaattttcctatggagcttacgtgccctgccrtcacctcacactcaccactctctcctttcctagcttcattattcattattttttatcaacagtctcttcattcttgtattaccttagcacgtaccttgcagttatggttagcagtgttccttcaggatgcctcttcagcctgttctttcttttcttcttccatctgcacacactcttgatagtgaccttatctcctaatgatggcattggtatagtaagtccctacctagaactccaccccgaatattgctgcta

SEQ ID NO: 534320 - DNA, 467 bp, Homo sapiens
ccttatctcctaatgatggcattggtatagtaagtccctacctagaactccaccccgaatattgctgctacataaataatcattttcttcttgctccattctcatttagtaatctcttttcctcccttttgtgtgagaatgaattccagattcctcagcctgtacctaaagaatcactgttccctagcctcacctccttcctaccctcatttctgacagctaatcacaggaaggctctactccaggcagactggtcacagcagtctctgaattcaraggatgctaattctgaccctggagaatgtattattttgtacatttctggagcaagtctcagctcatgtcatgtataactcatgaaacctcacacacaaacacattgtctcccagtaatacttcacttgtgtgtttcattcacttctctgggtgcttagacttatctagcctcgttctgctataaaaatgtt

SEQ ID NO: 534321 - DNA, 592 bp, Homo sapiens
ttcaccagtatgctaggcctataaagtcactaaaagtattttttgtagattcctccaaattctttgtcratccatcactcaaggcctctctgggtagataggtgggatacagggtggaattaatccagatttattctaagtattactcaaagtatttttattccttccctgtcaatagggatcaccaaatcaaatttaaatgagtgcagtggactagaatagggtctctatagagagtgatgggcctatagcaatttgaagcacacctgtttcatcttaagcagacaacagcaaattgctgccacacaggaatatgagctcagtgttgccaagtcttaataaaagagggtgaaaataaaagttttaatgtaagcttgttggcacataaatcaactgctttaaaaacactgcagaggccaaaattatgagggccaaataaaacatgtcaataggccagatccagactgcaggctgccagattgcaacctctgttctgcatgatgtgcagggattactagccaattcatgtgtttctatgggccaaatatgaataggggtttctaatcattcgacccagaaaccattggaatca

SEQ ID NO: 534322 - DNA, 603 bp, Homo sapiens
aatagccacagcttagagaaaatgattttgtttcttaattgttagtgggctgtgatcaggaaaagcccaggaatgaaacagaagccagcttcaaaaaaatgatgattcttttcatttttaattctatttcttttaatttttctgaatctactcttcttttaatttttcagaatcaactatgatgaattttaacagtattatctttaattactgaagcaacttcacctgaacttaggctattcttaggctatcattgagatcactctgaagttgaatagattcttccaacaattagcactgtttttartaaagaaggtagtcaaaaaggataacttgaaaaaatatgttctttataagagttattaatgggacaaggatgtaactttgaaatacatagagaggtgatgggaatttaagaaagaaatgacgtaatttttgaatttggtaagcctatatagtacagtgagttggctaacaattgaatttctctatctaccccacctacctggaatgcccttctacttatcacttaggacaagaatattatgaagaaaaataaattattttaaaaaccaattccatcagtcaaagacaatattatta

SEQ ID NO: 534323 - DNA, 603 bp, Homo sapiens
ctgggcttctacaatgtatatgggcatttctatcctttaacagtcaagtttaattcattagtattttgtgatatctgatatcttatttggtgtctcctatttctgatttttaaattttttctctttttaattagtttttaataaagatgccatgcaaagtcaataagatgaaaaaataggcatttcaaatggtactggaatgattgaatattcacatgcaaaagctggaccccatctcacactatatacaaaaattaacccaatatggaatggtgacctaaaagaggactaaaactataaaaatcttaaaagaaaacaaatgtgtaaatctttgtacttttgaattaaacaatggtttcttagatatgacactgaaagcacatacaacaaaaaagataaactgggcttcatcaaaattgaatacatttgtgctgcaaaggtcagcatcaagaaagagaaaagacaaaccatagaatggggaataaatgttgacaaatcatatgtctgataaaagatttgtattgagaatacataaagaactcatacaaatcaataacacmaagacaaatacccaattgtaaatgggcaaaggatctgaataga

SEQ ID NO: 534324 - DNA, 558 bp, Homo sapiens
tacccagcatggaacactcaggggcaatactcactccagagtttaccactgggttggtcgaggccttggagggcctacatgtctgttcacattctgtctctgagcaatcttttttcctttcctttttttcataatgttgattctcaacaaacatctcatacctcatgttttgtcttggcatctgctgccaaagaatctgaaatctttctagtgattgccaaactgtttaattatgcagtaatttgctgcccagatttacagggataaattatgtccattaaatacaagaagtattgttggaccataataacwttcatatttaggtgtaaaaatccttagagtaaaatttattatgatgctcatcaatacagttaatttgtgttcttataacattattggtaaatgctgatacctaatttgctttatctatgctagtggttgaggttggaaaattaagacacacaatgaatttatcatagcaacatagtcatcaggagatgaatatctgttacttatgtatttgaaaacagtgttctataaaaaaaaaaattggtgtca

SEQ ID NO: 534325 - DNA, 605 bp, Homo sapiens
taccacacattatctggttacagccactactgagtgccaagcctgccaacagctgagattaaaacttatcacccagtgtgcccccattcctgagaagaatatgtcattatatatgtttgttacttcttttatatatgtttcattatatatgttttcattatatatgtwtgctttcattatatatgtatgctttcattatatatgtatgctttcattatatatgtatgctttcattatatatgtatgctttcattatatatgtttgttacttttctttttttttctcatgaaaaggacctctggaggaagtcatgttgtctcatatggctatcctaattaatgaatgacaacagaaaacattacctggctgtctgacctaatctgaaaaacattttttcacaaaatatgtgcaaataactctaaaaggtgccagagcagctatccaagttttcaatttgctgcctaatatgcattataattttactttagcttattattggcagtaccatggagtactagagtttatgacaccacccttagcagcccaacaacgctttctcagcttctttatacttgatcataaagaagcaaaacatattataact

SEQ ID NO: 534326 - DNA, 621 bp, Homo sapiens
ttgccagctgctagtacagttgttttaatcaaatcagcaatcatgggcattttgtgagctgtggtttttttaaatcaaggaaatacagtagcttttatcatgtcaattgccatgtcaattgccatgttaaaggctgggggaccaaagggaagaggatttttaaaaataactgctttattaaggaataactgacatacaaaaagctgtagatacttaatgtatgcaacttgatgtgtttggagaggtgtatacctgtaaaatcatcactactgtcagtgcaataaacctgtacataatcttcaaaggtttcctcctgcctcctttgtgtttttttcttggtgataagagcacttaagatgtactctcttagcaaaattttaagtatacagtacagcattgttaatcataggtcttatgttgtacagtaggatttccagagcttrtttatcctgcataactgaaattttgtaccctttgatcaacatcttcccatttctctgtcccccaaccacccttggcaaccaccattctactccctgcttctatgattttgactattttagattccatatatgagtgagatcatgcagtatctgtctttctgggtctgccttatttcat

SEQ ID NO: 534327 - DNA, 575 bp, Homo sapiens
aggaattccagtaagagttactggccgcaaatgacagacactgactctggttaacttcagcagagaaattcactagaaggatatctgggagcccaaataatcaatgtcaagcccagagaatcaggcttgacaaacagaaaccagggtggcttggttacaaactaacagccaaaatcacagtamaggaagggtctggttaaacatcgctgctgctgaacaccatacagcactcctggcaccatcgccagtcccaggagaaaggattccaagatatccttgcaccttcgagtcacctactccagattcaaaattccaggtggaattctgtcaataggagccctctctgagagaatgaatcacttgaacctgggagacggaggctgcagtgagccaagatcataccacgacaccccagcctgggcaacagagtgagactctgtctcaaaacaaaaacagaaacaaaacaaagagatctattaaacatcggatccgttaaacatcatgtggcctggtgggccacatttaggtcacctgcaggtgctctagctgttcctgcttcccaagtagtaggcaca

SEQ ID NO: 534328 - DNA, 592 bp, Homo sapiens
cagattccacatccaaatggtaggccatctgcatgaatcccccagagttttgccctgagacttttattgatacagtcaagatcatgtaatggccctctaccacaatcctaaatatgggtatgcactatattttgagaagtgtgtgtggtagaaaaattgttcaaggaaattgctggatctcaagagctttgattatggctgaacatccagagcttttgtcctgtagtgacatgacctggatattttacacacctttcctgtaataatgagagaatggactcggaggatttcaatatcacaaagcagatcggctttcaaagcacaaggttcttacggttcctcagctagcaggtctcacgctctgtctcactctacgtgctgacttgggatagtcacactcttcctccraagtgagaaggggagggacagacacatgtaatacgggccagtttagagcctcactctgtgaccaggtggctggactgcagaaggaagagagcaggaggtggagtgagggatagctccatcactctctgattcccagctggggggtgaggggtggcgagctgagtgaccctcagccttccaggtc

SEQ ID NO: 534329 - DNA, 461 bp, Homo sapiens
ctcattagttcttccacagactttctctcaaaaacaagcaacatgtttatattacccacttttcacatataagcatgtttttcmcttttaaataaattctctcaaaaattacatttaaaaccacattttacataaacatagttatgaaatttcttaataacaacatatttgtaatttgaccaagtggagtgaaaaccctctatcaaaacaaatgcactttagtggggaacgaggcatcctttataaatacataaacgaatcatacacagcacaatatctgtgcaatattggttagcttccttctaattcatctccacatgtcttagaactataaggaatctcccatcataactcaatcttccccacaactgaggcccacagcctgagctggccagattcctttgagggaactgagtttccatctctcactccctgtcatcagcctactagaaaccgaggtg

SEQ ID NO: 534330 - DNA, 481 bp, Homo sapiens
tgggtcttacctctgtgtgtaaaacaagatctatcactcccaaaccacatgtgcacacacacacacacacacacacacacactatgaactgagtgcccacaggaaagatacttattggtcagtcatccttacccagcacactggacacctggatttaagtaagttcatgatgatggagaaaatggagaaagtgaattgaattatttgtaagtccatgcttatggaaaaatgaggaaagaaatagaattatttagtctgaagctcagaaagtgaagactttaaatcatacttaccatgcttacaagggtgattgtaggatataatataatgaacaagaataaatctttaagacagggacagatcrtgcttgaacatgttatttaggtcaagagatctccatcttcactatagactaaaggagaagagatgaatgtaaactagggaggcttagacaaacctaggaagtttccagggaatctgc

SEQ ID NO: 534331 - DNA, 481 bp, Homo sapiens
tgggtcttacctctgtgtgtaaaacaagatctatcactcccaaaccacatgtgcacacacacacacacacacacacacacactatgaactgagtgcccacaggaaagatacttattggtcagtcatccttacccagcacactggacacctggatttaagtaagttcatgatgatggagaaaatggagaaagtgaattgaattatttgtaagtccatgcttatggaaaaatgaggaaagaaatagaattatttagtctgaagctcagaaagtgaagactttaaatcatacttaccatgcttacaagggtgattgtaggatataatataatgaacaagaataaatctttaagacagggacagatcatgcttgaacatgttatttaggtcaagagatctccatcttyactatagactaaaggagaagagatgaatgtaaactagggaggcttagacaaacctaggaagtttccagggaatctgc

SEQ ID NO: 534332 - DNA, 629 bp, Homo sapiens
gatggtaagtgagatagccgatgttagggtatgcagatacacatttaaagtgttcgttgttatatatttattttaatgtaaatgaataatcagtacatcaaatctgtggttaaatgaagaattgtttgagcccgggaggttgaggctgcagtgagctatgatcccactactgcactccagcctgggtgacagagcaygacctcgtttcaaaaaaaaaaaaaaaaaaaacatatcagagtctgactcacagctctgctattcaccaaccttgtgatctcagactcagcccttgttttctcttttcttttttttttcttttctttcttttttttttgagatggagtctcgctctgtcacccaggctggagtgcaatggggcgatctctgctcactgcaacctctgcctcctgggttcaaatgattctcctgcctcagcctcccgagtagctgggattacaggcacccaccaccacacacccagctaatttttgtatttttagtagagacggggtttcaccaggttggccaggctggtctcaaactcctgacctcaggtgatccacccgcctcgttctcccaaagtactgggattacaggcgtgagccaccacgcctggcgttttctctttt

SEQ ID NO: 534333 - DNA, 467 bp, Homo sapiens
cattctccttcctgctttattttttccatagagcttatcaccttaayagtctgtgtaatttacatatatgtttattgtctgtgagtatacattatgtgtctaggtcactagaatgtgacctccgtgaaagcagagattttttttgtacgtatgtcctgcgttctctgatgactcccatacctctaaccgtacctggcacataggtactcaagaaatgtttgctgaataaggctcctcaaatcaagagccccagtaggccgtatgaatgctgcaaaataattgtactacagggacccatttgtgggaatactcacagcactaaaaccccttagttaagagggatctgaacagcctaagaggtttctgcctaactcccggcagcaacttcgcaaagcactatagccaccacacactgtccctgagatgtcagagtcactgacggatttgggccccaggacagcctttac

SEQ ID NO: 534334 - DNA, 439 bp, Homo sapiens
aaatcaaaacacagaggttgggtggaccaatgcggcggtcctgctagtgccccaacatttaagagtgctaagcaaatctgctttattcatcttagtttggaagaatttggaaagcagaaaggcaaagatggcaacaagaaacctgaccttcaattacctggagcaatggtctaccaatttaatcaagaaaaagattcaggaaagagcctgggttccttggctcaattctgagctggggacccaacaccttaagcacgtgagtaggcaaaatggacasggggtggagaggagaagactctagacaccttgacgcagaagtgccatgtactttggtccaaaaccccctggtgaagccctaaaggagactacaattaaattgagagggtacagaagtgcaagggttggtagaattaaggtgaaagtttgaatgaaaactgga

SEQ ID NO: 534335 - DNA, 228 bp, Homo sapiens
aaataatcacagaagaaaactaagaaataaaaaaatggagaaagtgagacatcaaactaaaattactagaaaccccaaggaagaaggaaaaagaaacgaagaaaacagaaaaacaattaaaccagttaattaaaccttggcatgaccagaagatcagagtttcctaaaggagtggaaatttattgatttgaagaggwtttattgattactgatttgaagaggaagaaa

SEQ ID NO: 534336 - DNA, 500 bp, Homo sapiens
ttctttactcagctgagtccagtctactaataagccatcagaggtattcttcagttatttaccacattttttaccactacattatgttgaagtttcttacgatgtctgtytttctgattacattacccatctacacttgaatactgtctacttcattcattaggtccttagcatattctccagaggtttaaaaaaaattccaaaatcatatctttgtctgcttctgaagcttgctctgttgacacaaattgtatttttttctttttttggattttagtatgccttgcaattttttccctttattctcatgcatgaagcacccactaaaggtgactgctgttagtatagctttagtaatgcggtgatgaggtgacagggcaggtgatgaggtgacagggcaggtgatgctctcttagtctctttaggctactataacaaaatactttagactgagtaattcataaacaacagagattattgttcacagatctggaggctgg

SEQ ID NO: 534337 - DNA, 579 bp, Homo sapiens
gggctagggattggattcctctcatcaactgctaaagtaggcagtcacaatgtgagaggcccacctggcaagaaaccgtggatgatctcttgtagtgggggtctatagctagaagaaactctattctgccaatagccagtgagcttggaggaggcctggagcctcagacaaggctgcaaccccaggtgacattgtgattccagccttgtgagactctgagtagagaacccacttgagcgttgcccagattcttaacctacagaagccatgagataataaatgggtgctgttttaattcactaaacttgtggcaatttgttacacagcagtagctaactaacacagaccatcgagtttgaagatccatatatcatgagaagttaaaaatagctaactcttcaatcctacaaaaaattkcaaaactgatgcaaattagatgataattattcttctaagagtttatattaggagagaagcagtgcaaaggaatttggagacccaaaaggtagtccctcgtttttcattacagatttaaggctgctataaaaatgcatgcagtgcaaaattaacatataattt

SEQ ID NO: 534338 - DNA, 521 bp, Homo sapiens
ggactgatctgttatatcttgtttatcattaataattcaacattgatattattattaatttcctttagttttgttaaatctagaataaaagccttcttccgaaggcttttgcaagaaataaatgaagtaagtaaataccaagcatagtatgcttacaaagtaaatacacaataaacagaagccattattaaaaagaggttattctgactcctttctctctttgatattccctaggaaagaacaaaaaaattgcccatttatattatcagtactgattccacctttctagaatattttgtggtctatggattctatattttttcctaccatgcagcttaagcaactagaagctgtttatacttcaaaattagctaaatcaagaactttgcaagatgctgtcatttataattcaatgtgtttattttctgtgtacccacttgtattttgaatatttgcatgcatctgcaaactataacaatcaaaagatatttaayaatgacctattttgagtcagtcgccat

SEQ ID NO: 534339 - DNA, 536 bp, Homo sapiens
tagatgtggccattttctgctcttcattagaaaaccctgaaaagataattattctcaaaatccatattatccatactataaaaaactctcttttgctaaagtaaagacttttgtaaagcaaagacaaagatggatagatgggccaaaaaagagttttgaaagaagaaatgagagtggaagatatttacaacagatttaaggttttytggagtattcaagatgtaacaaagtaaagtatatcaaccaaacataatcacagaagcagatctaccgcaacaaaaaagtcattaattaaatacaactaacaccacaactgaaaatgatatgcacgtttgaaaatgtcaagatgtaaaagagaagcaaagtttgttgttacaaagtttattaccctggtcatacagtgtgaacacaaaaagtagaggagaacccctacctcacactatttacaaaaacaaatttcattaagactgcagacctcagagttaaaagtgaaatgatgaagtttatggaaaataaagtaatagaacatatttctc

SEQ ID NO: 534340 - DNA, 536 bp, Homo sapiens
tagatgtggccattttctgctcttcattagaaaaccctgaaaagataattattctcaaaatccatattatccatactataaaaaactctcttttgctaaagtaaagacttttgtaaagcaaagacaaagatggatagatgggccaaaaaagagttttgaaagaagaaatgagagtggaagatatttacaacagatttaaggttttttggagtattcaagatgtaacaaagtaaagtatatcaaccaaacataatcacagaagcagatctaccgcaacaaaaaagtcattaattaaatacaactaacaccacaactgaaaatgatatgcacgtttgaaaatgtcaagatgtaaaakagaagcaaagtttgttgttacaaagtttattaccctggtcatacagtgtgaacacaaaaagtagaggagaacccctacctcacactatttacaaaaacaaatttcattaagactgcagacctcagagttaaaagtgaaatgatgaagtttatggaaaataaagtaatagaacatatttctc

SEQ ID NO: 534341 - DNA, 543 bp, Homo sapiens
gggggacccaatctccccccaccatgcctcccctccaataytgaagattacattttgacatgacatttggttggaggcaacatccaaactgtatcacatggccttctttctgaatgcacacagacagagacacgttccagtatctcttcctcttctgaaaagtgcaacagctctatcagattagggctccacccttatgacctcatttaaactctaccatctgcttatgaccctatctccaaatacattcacattggttgttagggtttcacatatgattctgggggtgggagaaggtacaaacatttagtccttaatacatgggttatcaaaaggactccttttcaaatgttatcttttttatcattaacagaaatcacatgccacttcagattaaaattattatattttgggctggtttaaaatgttagcttttggggaatgaaagacactggggtctacttgagggtggagggtgggaggaagaagagaagcacaaataataattattgggtactgggctttttgcatgggtgatgaaat

SEQ ID NO: 534342 - DNA, 633 bp, Homo sapiens
tctttgcctgaaggtgagagaccacaggtgtaatggacgagcaggatgtggagtcaggaagcccgcgttgggcccccggcagtggcagttactaagctatgtgaatttaggccaatcctctgacttagctcatctataaatgttatttcaatccgaacttcctgagaggaagcytaaagtacataatgtttctgagagagaagaaaaagcttgtaaaataatcgacttagcttaccccatgctagtacattgctagaaagacactgtctcatttaacctttatgtcaactctgtcggatatttttccctgttttacagatgaggaaatgaatattaaaagattgtcaaagagttataacatttatatttggttattatatttgtggtttgtgggacttaattttcaagtttcttgactaagtagttaaatggggaagatgggtggggtctagttggatgcctccaatttatacagttttgtttataaatacaaagttttataaatgtcacaattttcatgattcctagaggaatgaccaaaaatatagtttccgtaacatcagtgtttcaaactgagccagcaaggataaagttccataacttaggaaaattttacttagtgaagtcatttaa

SEQ ID NO: 534343 - DNA, 557 bp, Homo sapiens
ggtttagcttctgggtatgctcctaacaatgtaaatgctagcctagaggaaatacattcacccctttattaattccagtgtccacagatttatttggaatctctttgcagggcttacagaatatgtgtctgttaaaattccagaaggaatgcagactcaaactgggtgattaaagaaaaattgaaggattcattataaaggtatagggatgttgtatggaaacctcaaggatagtgcaatgcccttgggccaacaacagctccctatttttaaccttgtgtgtgagacacaatgggagggaacagttaacagaatctagagacagaacatgttatggagaagaccatctggcaggagatgcgcccttatgccaaggatgcagcagcctgagatgaatgcaaaggagcaagattgacctcactttccttctctctggtctcctrcagtgccctccattgcttgactcaactggaaatcagagagggagccctttggtaaagtccaaacaggtcaggctccaagggcacagagctggtgatgaggggttgggaatggat

SEQ ID NO: 534344 - DNA, 438 bp, Homo sapiens
acaagagatcaagcctaatatgaggacttttcccttcttataactgagaatgccttgcagtgaattgtttgatgaagtctaaacttccttactctgagaaaacagcaaggagaagtgtcttaatcttttgtgtttgttggggaaaaaagctatctatcctaagaatattaactaaaaattagcaatgattgaaatgtgtaggcaaaattgacaccacctgagttgctaaaaacaaaacaaacaaacaaacaacaacctctcaatttgataactaagttaaaagtgtcctagatttatagtatccaaaaatgcttgacagaaacaaatgtcacaactctttgcagaagtccttgaactaggcttawtaaatatctagtttcaaggaatataaattctcagttaaaaattaaaaaacactgaagcaaatgaacaccatga

SEQ ID NO: 534345 - DNA, 599 bp, Homo sapiens
agcagccagttcttttgtctcagaatatagtacagtgcctgacatttaagagacactcaatatttgttaaacattcatacattgttaaacaaatgtatgaataacacggggaaggcaatgcatgggtgcatcagagacaatcatgtcaaaaaagagaggaaaggaaagggacatttcccagaactttaaagactgaaggatctcattaatgactcatctctgtcctaaaagcaatcaggatgactgttcagtgcccctcctggcaccatgtgacccacataaggagtgtcttcagactgaagctttgctagaactcagagttttacaggctctgcccaggagcctctctggcattttctcacayagtctaacaggcagaaaatctcttctttctttttgtgatctttgacgaatattgttggatcttctgattctgacagcctttagcagtgctccattcaggtgcagggcagtggatgcctaggctgctgccttcatagcttctcccgctctctctatcctttttatctttaatgtcctgcatctcgaggataaagtgtccgcctcctgcttctgctgtccaccttctctttgggacc

SEQ ID NO: 534346 - DNA, 599 bp, Homo sapiens
agcagccagttcttttgtctcagaatatagtacagtgcctgacatttaagagacactcaatatttgttaaacattcatacattgttaaacaaatgtatgaataacacggggaaggcaatgcatgggtgcatcagagacaatcatgtcaaaaaagagaggaaaggaaagggacatttcccagaactttaaagactgaaggatctcattaatgactcatctctgtcctaaaagcaatcaggatgactgttcagtgcccctcctggcaccatgtgacccacataaggagtgtcttcagactgaagctttgctagaactcagagttttacaggctctgcccaggagcctctctggcattttctcacacagtctaacaggcagaaaatcycttctttctttttgtgatctttgacgaatattgttggatcttctgattctgacagcctttagcagtgctccattcaggtgcagggcagtggatgcctaggctgctgccttcatagcttctcccgctctctctatcctttttatctttaatgtcctgcatctcgaggataaagtgtccgcctcctgcttctgctgtccaccttctctttgggacc

SEQ ID NO: 534347 - DNA, 599 bp, Homo sapiens
agcagccagttcttttgtctcagaatatagtacagtgcctgacatttaagagacactcaatatttgttaaacattcatacattgttaaacaaatgtatgaataacacggggaaggcaatgcatgggtgcatcagagacaatcatgtcaaaaaagagaggaaaggaaagggacatttcccagaactttaaagactgaaggatctcattaatgactcatctctgtcctaaaagcaatcaggatgactgttcagtgcccctcctggcaccatgtgacccacataaggagtgtcttcagactgaagctttgctagaactcagagttttacaggctctgcccaggagcctctctggcattttctcacacagtctaacaggcagaaaatctcttctttctttttgtgatctttgacgaatattgttggatcttctgattctgacagcctttagcagtgctccattcaggtgcagggcagtggatgcctaggctgctgcctycatagcttctcccgctctctctatcctttttatctttaatgtcctgcatctcgaggataaagtgtccgcctcctgcttctgctgtccaccttctctttgggacc

SEQ ID NO: 534348 - DNA, 580 bp, Homo sapiens
aagacgtgggatttgtatactaagtcacagaatctctgttcggtggtgtttcgtagagttttatttatttatttatttatttatttatttattttgaggaatgtaaggaagacagggactatgcctgctggagtccaagcactgccaaggtgatcaatataaaattactaggtgacgttggagcctgggctagagagggcctgacaacgaagctgttgtgtcagggaaatgaacaagcagaattgttttttcattgggcrggtaatgcatttatgttcctgagggaatggatacatctttccgtttattttttaagcaagtaaaacaaacaaaacaactggcccagtacatttctgttaccgaagttgttaactcatttttattctcttaatgaaaattcagccatttgggaggaatttggcgaagcagatgatacatttgattgaaaatgcatattttaaaatgatttaatccttaagcttacaatgtatgcagccgtttgctggcgttgcttcttaaaacacaccagaagagagaataaagcaggatggggaggagcaggtggaggaataatgggaga

SEQ ID NO: 534349 - DNA, 611 bp, Homo sapiens
aatcattcaaaacaataaaaatggcacaatttctactcagatagggtccctaagtaatcattcctgcacaatagcattttcctcaaggtggcaagagtactataattgatgatttgggtatggaattattatgtactaataacagtacacagcctattactgtgtgatatctcctgctgctttataattagctctgtgcrtggtttggatgagtagctgtgtacttcacggactgttcgccaggtagaacataacggctccttgggagccaattagctgggcctgtcaaggccaatttcagcaaatttagtttgtggattataacccaaaacgccataattgtgacaagcatacacaggacttgacgagctaaaaagaatatctgcactgacaatacaaattatttcccattcatgtttgttcattattataataaagaatcattgcttagaattgtctatgattctgaaatcacaacagtgtttagcctgtgatgagtaattatttacaatttttattttcagggtagattcttaattttgaatgaaaatgaggaagcaaaaagaagtgagacttaatatatcctttctcaaagacgatgataattacac

SEQ ID NO: 534350 - DNA, 613 bp, Homo sapiens
agctgccctcctccagaatcttttaaaagaaaaaaaaaagtctctttaaggttgccataagctccattatttcttttcttggactttatttgctatttgcatatttaatgactcatgcagctatagagcacatgaggtgattacaatgtgatcaagtcagaagaatacaacaatattatgtattcaaataccaatctttttatacaattttaaaattcaccatcgttattttgcttataatttgtaaaacatcttgagtttttttctcattcataaatgagccatgatgtatgtttacattgagaaattaaatacagtggtaggtttagtaataaaatagaggccaaaatctttgaacttgaggaactgtagtttttcctgactggctgaagatccaccagcacagttgcctttcttagcatacatttttattatacttcttcagtttactttcttcagtaaaacatttgaagttgactttggggctattttgactattaagaaatatcaaattttaggagtattttgaagtagtaagagaaaattcttttgaatcctttagwattatgtcaaaagaaggactgttttatgttcaagtgaacataaattctca

SEQ ID NO: 534351 - DNA, 483 bp, Homo sapiens
tattatgagggtggaaacagatttctagaactgtagttactaactgctgagggcaataccagaaatataaagaagagaaaaatatgcaatgagtttatttctatttgtggtgcatagtaaattagacattaggtaaaagaggctgaatactaaggaaaacacagtgaagcccattctccaattgaaatagtgtaagccctctgataatttttcttcttaaaaccagctttattgaggcgtaattgccatataatgaattgcacatggttaaagtatacaattggagaagctttgacatatgtatacacttgtaaaaagtccatcaccataatgacgtgtccacgtagggttatcagttgtaagcaacgcaccgctctggtgggggragattaatagtccggcaggatatgcatgtgtgtgtgctggtggtgtgggaaatctctctaccttcctctcaattgtgctgtgaacacaaaattgttc

SEQ ID NO: 534352 - DNA, 507 bp, Homo sapiens
aaaggtactaactaaagaaatagtgggatataggccaggcgcrgtggctcacgcctgtaatcccagcactttgggaggccgaggggagtggaacacctgaggtcagtagtttgagaccagcctgttcaacatggtgaaaccccattctctactaaaaatacaaaaactagctgggtgtgttggcaggtgcctggaatcccagctgcttgcgaggctgaggcaggagaatcgcttgaacctgcaggagaattgcttgaacctgggaggttgcagtgagctgagatcctgccattgcactccagcctgggcaacaagagcaaaactttgtctcaaaacaaagagggggggagggggaggggcggatatagttagggaaaaaaaagttctaaaataacatctcaaagcagctgaaatcattattaagaaccttgattaaggaaataatgaaaaaaagcatccagcagccataagcaagttcaagtgcacagaatttgcaagattataaaa

SEQ ID NO: 534353 - DNA, 507 bp, Homo sapiens
aaaggtactaactaaagaaatagtgggatataggccaggcgcagtggctcacgcctgtaatcccagcactttgggaggccgaggggagtggaacacctgaggtcagtagtttgagaccagcctgttcaacatggtgaaaccccattctctactaaaaatacaaaaactagcygggtgtgttggcaggtgcctggaatcccagctgcttgcgaggctgaggcaggagaatcgcttgaacctgcaggagaattgcttgaacctgggaggttgcagtgagctgagatcctgccattgcactccagcctgggcaacaagagcaaaactttgtctcaaaacaaagagggggggagggggaggggcggatatagttagggaaaaaaaagttctaaaataacatctcaaagcagctgaaatcattattaagaaccttgattaaggaaataatgaaaaaaagcatccagcagccataagcaagttcaagtgcacagaatttgcaagattataaaa

SEQ ID NO: 534354 - DNA, 643 bp, Homo sapiens
gctatcaccactacatcaaaaccaaagtctgagagcacctgcctgccscagaagattcagaatcgtgccccaaatctgcctctctcaagaaaaagataaaatgctcaaagatcacttagaatactttacccatcgtatatagtagagcaggatgaaaaatctgggttgatttatggagtggtaaatagtcccttgttgacaggataaatttgtttagaattttgatttaccaggaatgtgccatgaagcaaagctaagaggcaactgggaagttcttcaagcaggtattagatttggaagtgagaatttaacttggatgcttgtcgttgtggctagagttgggcaagacccagagaggggagccaagtgatcaactcctaatacctcttttagccactttttatgttaggagattttacagtccttttctaagactttcagcagcctaaatcactaggaaggtggttagcctggcagccatcataactgagattgtatgtgtatataccctggatttacctgtaatctgtgagctcttcgaaggcagaaatactgtgtttttcttttgtttagtaggtgcacaaagtgtaataactgtggctgaactgaactcaatggactgcttggtgtcctactgctgtag

SEQ ID NO: 534355 - DNA, 553 bp, Homo sapiens
tgtgtgcggtgcctcagggccactattgatttgccaatgagattccgttgctggaagctgaacttattttgggttccaaagcaggtaagaagaggagagaatgggagttatcagactaaaggagacagcagaggagttgtgttttgtttgaagcaccctcaatcttttgctttttaaaaactgaaatacaactgttgaaggcaagaacgaggtgctagttctttttgtctgtttttgagatggaatcttgctctgtcgcccaggctagagtgcagtggtgtgacctcagctcactgcaacctccgcctcccagattcaagtgattctcctgcctcagccacccgagtagctgggattacaggtgcccagctaatttttgtatttttagtagagacggggtttcgccaccttggccaggctggtctcgaactcctgacctcatgatccacctgcctcggcctcccaaaatgctgggattacaggtgtgagccactgcatccaaccaatgaggtgccagttctaacaccragcaacagaaggcagggctcatccc

SEQ ID NO: 534356 - DNA, 642 bp, Homo sapiens
cgcctgtaatcccagcactttgggaggccaagacaggcggatcacgaggtcagaagatcgagaccattcctggctgacacagtgaaaccccgtctctactaaaaatacaaaaaaattagccgggcgtgatggcrggcgcctgtagtcccagctactctggggactgaggcaggaaaatggcgtgaaaccgggaggcggagcttgccgtgagccgagatcgctccactgcactccagcctgggcgacagagcgaggctccgtctcaaaaaaaaaaaaaaaaaaaaaaaaagcccttagacgggactttgaaaaacaccactgtgggaagagagatactaaaggctcccaagcaagtgtgtggtgttgtggcatgatcagacatgtattttaaaatggatttgctgcagatgaactggaagaaggaccaggtttggaggctatttcagtagcccaagaaagcaatgatggagatggggcaggatattagtaaggactgaaaggagaagataaatatgaaagtatattgggagttctaaattaaaatgcctataggagctagtcaggtaacataaacaagtgcagagactcaagaaaagactgtaagtagtgacagatgtacagggcatgcccccatctaaagaa

SEQ ID NO: 534357 - DNA, 461 bp, Homo sapiens
cttggggaacgcgtccttctttggttaccttttcccagacaggattccaatttccaaacgtggaagaggtgtgcgtgtatgtgcctgtgtgtgtgagtgcgtgtgtctctgtcactgtgtgtgtgtgtgtgtgtttgtgtgtgtgtgtgtggagaggggggtgtattaatgggtgatgttataaatgaaaacaggaggactgaacttaaaagaaactggtcaattgcaaaacaracacggataaacaaccctttagatgtaatttgtggtttatctggaggtggaggtggcgctgaagaggaacccccgccccccaatattttatccttagctgcgcctccacccccagcatttggagcggcggagaagcggctccggagtgattaatccggggataattcaccccctcccgccccccggcgcgaaccccgcgaagcgggattggagcgagtcatttccga

SEQ ID NO: 534358 - DNA, 565 bp, Homo sapiens
ctgccagcttcttaaaaaaaggagctatggagcaagctgtacttctgagactctgccgacagtgacagcatctcaggaaagagctccgcagttctcaggtctgaggaggatcctgagaggacattctatgcatcctcctgcctccacaaggcttgctcccatttccsccttgcaaaacccttcccgggaggcaggatgcacagagagtgaatggtgccagagtgagtggtgccatccgtcagtggctctcagcgtgtggatcctgcactagcgacagtagcaccaccagggaacttgtcaggaatgcaatttgctagcaggctccaccccacaactactgaacgctgattcagaaactcgaggtgggttccagcatgctgggttttaacaagccctccagggaattctgcaacacgctcaggtttcagtaccaccggtttagtcaacagctctcaaactttgctgaatattagaatcacctggggagcttttaaaaatcccaatggccaggctacactccagcccaattaaagcagaatcctcagggtgggattcagacttcagt

SEQ ID NO: 534359 - DNA, 435 bp, Homo sapiens
gtttatattcttgagtgtggaaaaaaattcattatcatacttaaaccttttttgttttcagttactgaacatctgaaatgaaagaaaaaagaagggtaagcaaaaatagggtaagagagcctgattgttgaatcactgaggcatgggactatgactaygaatgaaggacagaagatggtctgaatgatacattctcagggagcactggggaaggggagctatgaagcccagaaagaggctagagctggtgagagccacagttattttccacggtattttacggtatgtaatctcaaatgtctaccttggcacaaccagatccatgtcgtggtgatagaatacgacagcttcattataggttattaaataattgaccccagggcatgtggttggaactagaacccagaccctgtggacccttcccaagcccagggc

SEQ ID NO: 534360 - DNA, 538 bp, Homo sapiens
tccagtcagttactgctaaaaagttttattatacaaaaaagttttctcccatacttaccatgtgcatagttgggcagtgtgaaattaccaggaaagagaaaactgttcaggagataacccactacaaatttaattttgtccacccacatttttccatttgaatacacaaacaagctctcatttaatcaagaatctcaactctctcatttgggatggctgtaaatttcaacttcccaactccttcaggacaaacaggacacataaattagaaaaatgaaggttgccagaccagaaaatgtaaatcttctaagggttttaattcatatatgagctacagagtrcattccacatcatgtgggaaatgttataaagcatcttattttaattaaaagagcattgaaactattgctgaattttttaagcatgaaatccaagcacacagcacagaatttcctttgagtcaaattagcatatggccacaggacccaatttcaaaatggtcatgataaatcacagccatttagaatgcactggattt

SEQ ID NO: 534361 - DNA, 220 bp, Homo sapiens
ggctcagatcttcctttccttgcctcatttcctrcctctcttaagctgagagctggctgggtgaaggcagcaggattgtgtggccatctatctccgtatccagaaacacctatccacaccctattgtggcatgacttacacccactatcatttctctggatgccttggtatctcatatgtaatcaagcttgatttgtctgcttgggggactgaaggacaa

SEQ ID NO: 534362 - DNA, 528 bp, Homo sapiens
ggctcagatcttcctttccttgcctcatttcctgcctctcttaagctgagagctggctgggtgaaggcagcaggattgtgtggccatctatctccrtatccagaaacacctatccacaccctattgtggcatgacttacacccactatcatttctctggatgccttggtatctcatatgtaatcaagcttgatttgtctgcttgggggactgaaggacaatggcatatggtgtgaagcaagttcaactggatttgatcacctttacttgtggagactaagataccttatatgagaatccttaacaatagtttgtctccaaacctaatgatcatgtacactcttgcctcaggagatcgtttcaggtttgatatttggctgtttaactcatttctataatagtcctaattaacaagtctcttgcaaaaaaaaatcctcaagcattttgctatctccctgggaaatagaataaaataaaattgattttcttctttatcagcaaaacttgtaaattgaaggcacaaatccca

SEQ ID NO: 534363 - DNA, 329 bp, Homo sapiens
tctgtattctttcagaacatgcattcatcttttattttcgtgagcgaggttttgtttatagcatataagatagggaaacagaattgagaaggtagggagaatataaatcttctcacagaagcaagatgctcccaccacatttgaaagcrtttaagagttctttgatgccctcacctgacaagaaaattttggacaatgtaaatgttgacagtcacaagtacattcaaaaagacttgctgaatttttttaggtctgccatgtaacctggtgatttctatttcttcaattacatgatgcattctgtatgtagtatgtggaatctgaacact

SEQ ID NO: 534364 - DNA, 567 bp, Homo sapiens
cagggtcatctgaaaacttaccaagatccccttaatttgacataagccctgaagagaaaggggacctcgaccttaatggggccatattcaccaggcatccattgtaggggctgttgagactgggacctgcctaaaaccaggattcctaggctggggtaagcttgagagagaayctggataggaaggagcagagggggttgattcccctcctggaggtaactttggggtttccttccctatttccctgagattgccccttgcagcctctcctgagatggccactaagagggctgaatcaatcctcaatgttggcaaaggtctgggctaccctgaaaggcaaagaaggcctgtacatatgggacctgggacctttctgtgcctcaaggtgcttggcactaaattggaaatgacaagaacatttttgccacaaatttacctacagataccaaagtacactttgccccatctgtgctacacttgatcttctaatttatacttttgatgactaagccaaatgcttattttacccaataatacctctggtttgcaacaacatccttaacattt

SEQ ID NO: 534365 - DNA, 510 bp, Homo sapiens
aaagtgctgggattacagacgtgagccaccacgcccagccaggggttgatttttaatcarccaggcttagtccaggttgcaaggagcagcaaaatggtcccatttcagtgtgcctaagaattacccggtggggttgcttaaaatgtccatcccagcacccaccttcagaaggtcgaattcagtcagcccgggatgggctccagaatctgcattttgataagtccctcaggtcatcctcatctcatgctggtcttcagaaacgctcccagacacatgccatttcgagcggcccgtagaaatagctgtgcctctctgaaacagttccactctggacctgcggctgtgaaatgtgggctgcattcagtcattggtgtgtaatcactatagacagacccttttcagccctatggactgaaaacatgagtttgtttttcagcaacctgttccacgcggggatggggttggaggggtcaggcagtccccgccctgggagggccaccgtgtcaccag

SEQ ID NO: 534366 - DNA, 590 bp, Homo sapiens
gctgcaggtatagccattctacttgtggaattatcaaattgcttccatactagttggaaataatatgatagagactacaacaagaaagaagtaaactgaattaataatgtatggtgaatgctatcataaactcacagatccagctaattgtcctaagatatcatacagcccattgacaaatgggcctcgagggagagcccgagacacctgagacgcccccrcaggtgtccctgccagctcagcccccatctcacaggacagcgtggctgctacatgcaatgtcgggcagccccgcacactgtagagaatcaccaggctaatgttatcctcaaattatgtcattgttacttttgactaatgattaataagttgtcattcttctgtgagtagtaagggagcagtattttatagttataaattcagaaacctagaataaaatattaaaaataaaacctcagaaataggaaacagactttggataatttttaatattccttttgaatatcaaaaacagcaatcttcagaatctgtaggagaaaaaaaaagtgaattatagcctagagtatctcttgatagtctaaacaaaagca

SEQ ID NO: 534367 - DNA, 630 bp, Homo sapiens
ctgcatctcctgccctgctgtcattacagggatgggcaggctggcatgggggcagccgctgcccctgcctgggtgttgctgtgtattcctgccggccaggggccactgccaggaccacgcctcccttttcatatcccgattcttaagttctgctattgtggtattctggtggagaaaaaagaaccgcgtggctgtttttgaactgcctggaacctaagaccctgaattcttttcccccccaaggggaaaatctatatggaaaacatttattttaaaatacaggatgaagtgaattaaaagatttaaatgcacatttctttaaggataatatttctgtgttggcaaaatttgagagtaaattggtcttgaatggaatggattgtcttgactcacacattgcggagcagagcccgccctgaagaaaggtgttgctgtggtgggatcttcccacgagggtccttgcctgttctcctaggggatggttgctgggtgccctgggctactggggagagcgtacggggctggagaagatggccattcctgggctgtttcctagggaatgagttgtacatctcatggctgkattttgtaaaatcagtttttaaaataccgcatatatctgttttctta

SEQ ID NO: 534368 - DNA, 523 bp, Homo sapiens
ttaactcaggacaaagagttccagcactaaccacagagtcttgtcctgttcagtaaagaatgcaccacagccacytcatgagaaagaggaaggccttctgactccggccgctgcctctcagtcccactcctgcagtcgcctctgtatctcttcccctcttgtcctccacactctacggttctcaaaaccaggctctgcttgctattagtactgacaacactgtcatccacactttatatacgtcccttctaatatttattgtatcccttgtggcgactattagtatctcaaatttagattggagaagcaaatttagaatgattaaataatgtgtacaaggtcacacaaccatttatctttataatgataataatctgcatttattattcatgaatatttcaaaatcacctagaacaaggtttctcaagcccagcattattccagccagtggagacagtgtgctgtccccatttgttgacagagcactgaatttacaaacattaactctacttatacctcatta

SEQ ID NO: 534369 - DNA, 558 bp, Homo sapiens
tgtcagctccttctcattcagggacctaggaaaccaggtgagcagtaaaggattatctgaccacaccaggaaggtgaggagcccaacgtggacacaacccaaattaactccccatcacactgtgaggcaggtcaagggcctcatatatgcagcttgccctagctccccatcaggggctgcccggtgaggagctcaaggcctacagactcagtttctccagaggcttgacccgagcattatttgaaaagtaaacctaaaggggcaaaataggcaaagccatactccgaacccaagtagagcrttatccgtgaagacatttccctcttccatactgcagagcttagagtgctcaagcccctttggaggcccatacagccttccccttccaggtgttctgcttagccaaaaccacatggcggaagccacggaagccagcgccttccttccttagggccttttcattcaaaatgcagggattgcaccaggaactggttagaaaggggcatcttaggctcgcaccagacctcctgaatcaatctctgcctttttacaggatcc

SEQ ID NO: 534370 - DNA, 560 bp, Homo sapiens
ctgacattataaaacagggaggaacactcagttatcaagaggaatcacagtcacaatactcagactaagatctgctttggccctggacacagaatccaacacattttgaattaaaatgttcaagagattctgtggaacattcatctatcatactacactcagaagtggataaaaaacttgtaaaatgtgtacagttactaaattctcatcaaagagagtacagattttcttctctctgcagctctccctgtagcttttctgcttggtcaactgtagaaacccacctctcttcttccactattaatgtattaatactaaactgcttctgttatctgtcactacatctcctttccctcattcaccaagtatataatgaatgccttacaaatccaggtagatatccattctcaaagaatttgagtggaaaatgttaacatgtaaacaaataacaaaacctaagtgtgactttattgaaaacatgatgcttttctacataaakaacacagggtagaatatgttaactctcagaggtaaaatataacaaaggattgctacaacag

SEQ ID NO: 534371 - DNA, 649 bp, Homo sapiens
ctgagagatattattcaaatgaaggtagtctttcattttctctaaaattcttcaatttaagaatattgagtttaaaaaaatgacttcttctgatatcaaagttagacatggttacagaacatacgtagcagacaatggattaaatatgctttctatagagactctacatcactaatataaaatttttgataattctcaaagaagaattagaaaacaagtatagcacagcatggactttggaagcagactgtgtgattcgagtcttggctcttttattttttagcttgtgaccttggcaaatgactaaaccattattgcctcagtttcttcatctgtaaaatgggaatcgtaattataattcctacatgtctcacagagttgttatgaagattaagtgagataacacaggcaaactgcttagaacagtccctgactcatagtaagtactctctctaagtgttagtgggctgaaattactattgttaattaaataaaaaggaggaaggaaactttctcaacaaataagcaatataaacaagatttcaaagaagaatyggttacttgcttaaaagaacaaactttttcaagcatattaaatgtactggttttctttaatattgtttcatatgactagatattataggagcaa

SEQ ID NO: 534372 - DNA, 333 bp, Homo sapiens
gctaacaaatacagcaaatcagcttgaagtccccctttcctggtcctttctcttcagctatactgccaacccaaagcgctcatttatggaaactctggagctcacaattttaacaagctgccgagaccacctcggtaggagagaacttaacccagcggtactagaggaattaaagacacacacacagaaatatagacgtgtggagtgggaaatcagaggtctcacagccttccgasctgagagccccgaacagagatttacccacatatttattaacagcaaatcagtcattagcattgtttctatagatattaaattaactaaagtatccct

SEQ ID NO: 534373 - DNA, 287 bp, Homo sapiens
aggggaggaccaggccacagagtgaggtgcagacccccaagaaraggcaggagtacgaccctgggtccatatcccaggtttaccactgcctagctgagtgaccttgggcaagccactcagcctctctgagcctcagtttccccatctgccaagtgggctagtgattggctcttcctcacaggctcattgaagactaaagacattaaagactaaagggccactgagaactacatgacacaggtgtgaagcaccaaacaccgtaacaccatagtaggtgctgcttctgg

SEQ ID NO: 534374 - DNA, 475 bp, Homo sapiens
ctgcagagtcccatggatggctccgactctccctgccaatctcggagyaccctcctttctccccgacagctcaggtcacagaggcaggaaaaccccaggaccagaaggcctctgcaaagccaaagtgaggtgctggctactgcccctaccatcccctatgccctgcctgcctggcccttccaggttcatactccagtccacgcccagagacccctcacctgtcagtcctcctgctgcggctgaactggccctcctctcacagagcctcctttgctcccagctccagtgcacctggacaggtatatgctctaccaatcatcactctctccctgccaccccccttccccgccggccggggtttaccatggagattaaaaacgtccttgacaaaccaaccagaactgtggaggccagagctgtgcagggcagaactgccaagagagaaggggagcaggagcctccccacccatcacag

SEQ ID NO: 534375 - DNA, 519 bp, Homo sapiens
tgcacagagggtggtgcccagctgtactcaggctcctgggtgctgctggacgagggctgggaagggggagctcatgcacacagcaggacagagaggggtcatctgccaaggctgagactcagggtccaggggtctcagagctggacatggaaggtttgaaaaagcacagagggagaggggaggaggctgggaagggaaggagaaggcaggggggcaatggtgagtggggccagcatgaccacagcctccctgtgtgtcaggtagagagtcagccttctcccagattaattaccctgagtgcccacggaaatcccacgaggcaggcagcgtgatcccgttgtagagaaatggtgtctcagggagctggggctgcctgtctaagatcacggaggccgaggcagagccaggattcccagcccaggtttgcctggctccaaagcccgcaggctgtgccacacggtcccatcctgatgacccatcttgyccagggctggcgaggaggccgacacctggggcaag

SEQ ID NO: 534376 - DNA, 551 bp, Homo sapiens
agatgaagaaactcgggctgagaaaaggaaggggcttggccgaggtcacactgcatttggtgatggacaggcatctagcgtcacctccactctgccccctccccccggaccccctgggctgtaccttggagctggacgatgccctgggggctgttctcggggtgcagctcctcttcgtccagcgaggaccaagcgctcagwgtggcctctgtgatggcaaactgctcggcgacccctgggggaacagcgagatccagctcaggggggcatgggtggggacggcctcagtgcctgatggagctgctccaggacaggcgggagggtggccacctctctgggctgccaatccacaccccagtggtcaagagtgctcacttaatacccacccaccctatgccattattttttcctgcccagacaatgcccatgcagtgacctgggccccccaaggacccagcttcacccccacagagccctggccagtccccctcctcgctgacctgcagcaaagcgggcctcactgagcttatccggaggcagcagtaatgctc

SEQ ID NO: 534377 - DNA, 551 bp, Homo sapiens
agatgaagaaactcgggctgagaaaaggaaggggcttggccgaggtcacactgcatttggtgatggacaggcatctagcgtcacctccactctgccccctccccccggaccccctgggctgtaccttggagctggacgatgccctgggggctgttctcggggtgcagctcctcttcgtccagcgaggaccaagcgctcagtgtggcctctgtgatggcaaactgctcggcgacccctgggggaacagcgagatccagctcaggggggcatgggtggggacggcctcagtgcctgatggagctgctccaggacaggcgggagggtggccacctctctgggctgccaatccacaccccagtggtcaagagtgctcacttaatacccacccaccctatgccattattttttcctgcccagacaatgcccatgcagtgacctgggycccccaaggacccagcttcacccccacagagccctggccagtccccctcctcgctgacctgcagcaaagcgggcctcactgagcttatccggaggcagcagtaatgctc

SEQ ID NO: 534378 - DNA, 551 bp, Homo sapiens
agatgaagaaactcgggctgagaaaaggaaggggcttggccgaggtcacactgcatttggtgatggacaggcatctagcgtcacctccactctgccccctccccccggaccccctgggctgtaccttggagctggacgatgccctgggggctgttctcggggtgcagctcctcttcgtccagcgaggaccaagcgctcagtgtggcctctgtgatggcaaactgctcggcgacccctgggggaacagcgagatccagctcaggggggcatgggtggggacggcctcagtgcctgatggagctgctccaggacaggcgggagggtggccacctctctgggctgccaatccacaccccagtggtcaagagtgctcacttaatacccacccaccctatgccattattttttcctgcccagacaatgcccatgcagtgacctgggccccccaaggacccagcttcacccccacagagccctggccagtccccctcctcgctgacctgcagcaaagcgggcctcactgagyttatccggaggcagcagtaatgctc

SEQ ID NO: 534379 - DNA, 623 bp, Homo sapiens
agtaacttaccattgtattaaggtgtacagtttttttaactaagtaaatgatgattgagaacatgacttttttgagaaataaataccctatatggacttgrttcattctaatttattttcttgggcatattgctaagttgtattcattggttttttcaggatattgacattaagaaagtaaatggagttcctcagtatgcgtttctgcaatactgtgatattgctagcgtttgtaaagctattaagaagatggatggggaatatcttggaaataatcgcctcaaggtaaatgaatttgcataaattattgtgctgttatgatttgctttgttttttaagacttgaagggttttttttttgcatatgccttattatttaagatcctactaagacagataaccataaaagtgatatacttctttgcattcctatcctattatatactgtaatctgattaatattcgattagccaggcaggattttttttgtatattcctatttaattttaaccagatgtttcccacttgagatgttgatttgataagattactatagaaaaccagttttctgagaattctgttgtagttgaatagtaattgtgaactttactaatagaaattttg

SEQ ID NO: 534380 - DNA, 653 bp, Homo sapiens
cccagaccagacactggggatcsggatgttgacagggcagccagttctggtgctgtgcagagtcaacaggtcagggtggccaagatgaaggtgggctcgggttcatgcagagcggcaacccccatcccacctcccacaacacacaccttcaattttgatttgacttgcctggcatctaggggcaaagggtggcccagggtcccagattttaacaatcatccaagggccatcatgttattcagagagtggctttgtctgggtaggactggaggcaattgcccccaacatcttgccccaaagtggcatcagacacaactcttctgttctgtgcccaaaccattgccctggttcagcctcaggagctggaggagctttgggcaggggaagagctgcacagtgtggggctgggttcagcctctgctgtgtgaccttggatgagtgactcacctctctgaccatctacaaaatggcgaggctctccccattcacagggtgtggggaggaggacttgagctgcggatgtgacgcttctgacacgttgcaggcacacggcacgtgcttgttcctcgccatgtcccctcacacctgtgctgccatcctctgttggggtgggacaaactctgtggaattacccagaagtccccaccagagcc

SEQ ID NO: 534381 - DNA, 653 bp, Homo sapiens
cccagaccagacactggggatccggatgttgacagggcagccagttctggtgctgtgcagagtcaacaggtcagggtggccaagatgaaggtgggctcgggttcatgcagagcggcaacccccatcccacctcccacaacacacaccttcaattttgatttgacttgcctggcatctaggggcaaagggtggcccagggtcccagattttaacaatcatccaagggccatcatgttattcagagagtggctttgtctgggtaggactggaggcaattgcccccaacatcttgccccaaagtggcatcagacacaactcttctgttctgtgcccaaaccattgccctggttcagcctcaggagctggaggagctttgggcaggggaagagctgcacagtgtggggctgggttcagcctctgctgtgtgaccttggatgagtgactcacctctctgaccatctacaaaatggcgaggctctccccattcacagggtgtggggaggaggacttgagctgcrgatgtgacgcttctgacacgttgcaggcacacggcacgtgcttgttcctcgccatgtcccctcacacctgtgctgccatcctctgttggggtgggacaaactctgtggaattacccagaagtccccaccagagcc

SEQ ID NO: 534382 - DNA, 428 bp, Homo sapiens
tgaggacggccgtgggggcttgggagatggaggagggggtgttggggggaagccgtgctgactctgggtgagaccgtctctgctgccctcacctgggccctgggcccacccttctctctgcagggccctttcgtgcacctgtctgtgatgatggctgcctacctgggccgtgtgcgcaccacgaccatcggggagcctgaggttagggactcgggggcttccttggagaaatgggagtggggagggagggggctgactctgagccctggactcggatccyccagaacaagagcaagcaaaacgaaatgctggtggcagcggcggcagtgggcgtggccacagtctttgcagctcccttcagcggtgagaccccttcatgccccgccccctgggtccctcaagctcctcccctcacaccctgggctcct

SEQ ID NO: 534383 - DNA, 428 bp, Homo sapiens
tgaggacggccgtgggggcttgggagatggaggagggggtgttggggggaagccgtgctgactctgggtgagaccgtctctgctgccctcacctgggccctgggcccacccttctctctgcagggccctttcgtgcacctgtctgtgatgatggctgcctacctgggccgtgtgcgcaccacgaccatcggggagcctgaggttagggactcgggggcttccttggagaaatgggagtggggagggagggggctgactctgagccctggactcggatcccccagaacaagagcaagcaaaacgaaatgctggtggcagcggcggcagtgggcgtggccacagtctttgsagctcccttcagcggtgagaccccttcatgccccgccccctgggtccctcaagctcctcccctcacaccctgggctcct

SEQ ID NO: 534384 - DNA, 428 bp, Homo sapiens
tgaggacggccgtgggggcttgggagatggaggagggggtgttggggggaagccgtgctgactctgggtgagaccgtctctgctgccctcacctgggccctgggcccacccttctctctgcagggccctttcgtgcacctgtctgtgatgatggctgcctacctgggccgtgtgcgcaccacgaccatcggggagcctgaggttagggactcgggggcttccttggagaaatgggagtggggagggagggggctgactctgagccctggactcggatcccccagaacaagagcaagcaaaacgaaatgctggtggcagcggcggcagtgggcgtggccacagtctttgcmgctcccttcagcggtgagaccccttcatgccccgccccctgggtccctcaagctcctcccctcacaccctgggctcct

SEQ ID NO: 534385 - DNA, 584 bp, Homo sapiens
tgcttcaggtgctgctgctgtcagctcacacccttatctggagaaccgccctgagctcctgggcacctagagaggccgggaggctacctagtcctccccaggggcagccagtgagtcagcaatgggggaatataaagtccagcccccttgccttggggtgtcatcaattctggggtgctatttgtgctcccaagctcccagtgggaccaggtgggcagggctagactcctgcagagccccttccgaaggcccctctgcctcccccgctgcctgctggcttctcttgagggccattccccagggaatcacctgcacagtcatgcccatgtcaggctctgcttccagggaacctgaactaaggtgatgggactggcagagaggcagggagaccatgccagacagacatctgaaaaactctgccccaccccctcagagcttcttgagaacccagcagtttaacctgtggaagcagaaccctgagccactggtccccccgtgacccgcataacccagcatggactctggcatttagaacatrgagaatccaatagggctgccatcctcccacctgcaactcagccatg

SEQ ID NO: 534386 - DNA, 528 bp, Homo sapiens
gcagctctgttcaaaatcataacggggggcaacgagggccccccacatccaggttcatagggatggagccgtggcatggagttccactggaggaacctccaggaaacctgaggttccccctgagccagggccaggctgggcacaccctcagtccccggtgcccccagagaatggcctgctgccctaggttccatggaagccccctcgtgccactgggccttggcctcacagatagtcccatcaggacagggtatgaaaggacgaggcacccatggaggggaagctgaccaaacgggccacccatggcggggaagctggccaaatgggccactggaaccgagttgttgggccaggaggggcctgcctgtcccsctgccagagggtcttcctgccaggtgaagccagcccaggcctgggtgccaaggacccttgctcaggtttggctgaaagaaacagacgtggtcagcatctccagtgagcccacgcagtcctttcttggccgggctccacctgcctgggtctctggag

SEQ ID NO: 534387 - DNA, 347 bp, Homo sapiens
tcctaaaggctccaaacaagctggcaacacaaggaaggtgccttcacggaaagttgagatcacctgcccagggtggccgtccccgggtctggctgcrtgaggccctgggggcagctgtccacccaccctgcagggagtgcctctcaccagccagcatctgggccagtgcccagaatatgtcctcctcaggcagataaaggaggaacaaggcggcgacgtggctcaggtccctgcagtagtctacctcctgagagagccagagttatggtggaaagacatcacctgggagggctgaggtcacctgggacgattcatgtcatcggagagggcagaggtgactggggaaa

SEQ ID NO: 534388 - DNA, 641 bp, Homo sapiens
agaaaagcaatatttatgaattagtacgctgccgtgttatataatttgtgatttttaagatttgtgcaatcaagttggtaaattaaattgtataaacagccattcgtctatcaacagctcttcaagtttaagtctacaaggtttatctacacttcttcaagtttatgtctacagggtggccaactgcttaaaaagttatccttatagggaaaatgcagggttgcccacatgtgaatagtaactgagctttgagggggcgttagagtagaaagtggatgaggtttaggctggagactctggagatggtgaggggtgctgtgtgtcactttggcgactgactgagggtggggtrgggcaagaatattggaggggagaagcttggggttgagggacctggttagtcatataattgaatcagtggcacctaatgagaaaccaggcaagttgtaatcattcactcactcaatcaacacatgtatacttaactcctgtcctgtctcagccatcaagtgcaaattcttggattcctcttctgtaatattctaagcagtttctggcatctccactcaacttcgttttataaaggccactgttgatccagagtttaatcaaccagttgacttgttagaaccatttccagc

SEQ ID NO: 534389 - DNA, 442 bp, Homo sapiens
tctgggagagtgaccagaggtagctttagcatgtggtgcccaaaagagagtccattataactgctcacactgagtgaagggacatagaggggaagaggaagcacagggctgggcaggcagaaattttgtgtcattctccaaagcgacggaaagtccttsatcatgaggttttaagaaaaaggaacctactacccccatgcaatagtacattgttttcccctgggagttttactttatatcacctttattgggatttaggtttacttgaatcagttccttcaaaacacacacacacacacacacacacacacacaaaatctcaaaacagacatgagatcatagccatccgttttaacattgctgccctctattagcgtgtacttgaacactgagtataacaaaggaaacaagagtacctagtcagttccacctatatcagccc

SEQ ID NO: 534390 - DNA, 630 bp, Homo sapiens
ttaaatataaaccctaagtttcaggtacaacagacaacttgccaagaacacttgaaaccctttacctctgcatttgtgcctccttctagaacgctccttctcaagttccataaaaatcaagcccatcggacccatttatttggggctaagtttttaatattcatttttattaactttatcccaaatgtgcacatgagatatactggattagagttaaatttcttattaaatgactcacagtaaatagtaaatgctttggccccccacttccccctaggatgatgtgataagagcaaggtcaattgctctatgtgagtaaacagacactccataggtaagaaacaaggacaaattattttccctacctataaaagagggaggaggcagctatcccccctccccgtcttaaaggtctgctccttattccaacactttggtaggtagataaatctctccaggagccagatagtccgttacatgtcttggcttttatggcaagtcctgggacttgactccaagttctggggctcattccttcttgcatgytgcataatgatggcacaagcttatgctggcctgcttaggaagatagtgactccaggcttcatggcaccctgggcgctctaccta

SEQ ID NO: 534391 - DNA, 630 bp, Homo sapiens
ttaaatataaaccctaagtttcaggtacaacagacaacttgccaagaacacttgaaaccctttacctctgcatttgtgcctccttctagaacgctccttctcaagttccataaaaatcaagcccatcggacccatttatttggggctaagtttttaatattcatttttattaactttatcccaaatgtgcacatgagatatactggattagagttaaatttcttattaaatgactcacagtaaatagtaaatgctttggccccccacttccccctaggatgatgtgataagagcaaggtcaattgctctatgtgagtaaacagacactccataggtaagaaacaaggacaaattattttccctacctataaaagagggaggaggcagctatcccccctccccgtcttaaaggtctgctccttattccaacactttggtaggtagataaatctctccaggagccagatagtccgttacatgtcttggcttttatggcaagtcctgggacttgactccaagttctggggctcattccttcttgcatgctgcataatgatggcacaagcttatgctggcctgcttaggaagatagtgactccaggcttcayggcaccctgggcgctctaccta

SEQ ID NO: 534392 - DNA, 405 bp, Homo sapiens
accagcttccccaggaaccccacaccctccctgggctgggtcccccagttttggagagatggagggcattgcaagttcatgctgaacctccgcccaggtggtctgaccctggtcactgcccacaactgccccccagccctgctctgagcctggaaggggaggagaagcagccaattgtcactcctcacaaccccacaaaaggggtttttctggcctgtgccccaccccctctgctggtggctacagccaggcagaacaaaaacccccaaaggtcrcggccacctccctcctcccaagccacaagtcgcaaagttcaagcagccccaggtggcacagaagcaggctgagtcctattccttgggctgggaccccagtagagccgagtactgaggagcctcattcaaa

SEQ ID NO: 534393 - DNA, 535 bp, Homo sapiens
ctgcctgtttccccaacttccctccaaaataggttaaaacaacctttgccgcccctggtttggcctttctcactgattgctgaaataataccaggatgtttattgttctactaggaagaaaacagaaagaaacatagaccagtacttttatgataaaatctaggtgcctaatcacaatggcccaccaggccctcctccccaggccttcccccctcacctccttttttccctcgcccaccgtgcctcttccaccactgtgttcttcctgaaactcgaggcaggagtgtgcccacttcagctccctgccttccagacctcrctggcttgtgacatcactcaggccaagttcaaagggcaccttctcaaagaggcttgccctgaccacctagctagtggtggccctcccctcccactctgccacagtacctggctcagactccttgtggttcacagcgtgatctgactctggaatgaccttgtgtaatgatttgatgacgccaccgtctgtcccgtccaccagacacaggacccacga

SEQ ID NO: 534394 - DNA, 535 bp, Homo sapiens
ctgcctgtttccccaacttccctccaaaataggttaaaacaacctttgccgcccctggtttggcctttctcactgattgctgaaataataccaggatgtttattgttctactaggaagaaaacagaaagaaacatagaccagtacttttatgataaaatctaggtgcctaatcacaatggcccaccaggccctcctccccaggccttcccccctcacctccttttttccctcgcccaccgtgcctcttccaccactgtgttcttcctgaaactcgaggcaggagtgtgcccacttcagctccctgccttccagacctcgctggcttgtgacatcactcaggccaagttcaaagggcaccttctcaaagaggcttgccctgaccacctagctagtggtggccctcccctcccactctgccacagtacctggctcagactccttgtggttcacagcgtgatctgactctggaatgaccttgtgtamtgatttgatgacgccaccgtctgtcccgtccaccagacacaggacccacga

SEQ ID NO: 534395 - DNA, 597 bp, Homo sapiens
gagagcaagtctgtgccccactagtcctcagcagctagaccctttaattgaggaaagcccttgaacagtaatgtggtgcaatctggaatgtgctagaaccacgagtgagatgtccctccggagggacccgcagcacttcgccgacatgcccagagttacagacgycgaataatgagccagtcctatgactgtgatctgaagggttcttggggtagcccacagaacaagaagaggcctgcccactgcggggcttcccacagcaagttggccccaagggtggctaggttcccaggctggcctgaaagctctgattaaccttgatgggctgaattctgcagacataggaagggctcgctcttgacaagcggccaccaggctggaataaggacagaacctgccactcagcacaagccacacaccgagtggcatgtcagggaagccccacaaccccgtcaggtagagactgacacccccatttcacagacaagaaaactgagtctgaaagagatcatggaacatagccaagctcatgcaactgataaatggcagagctgggattcgagcctgtgtgtgaccccgcagcaccatcaccatccg

SEQ ID NO: 534396 - DNA, 682 bp, Homo sapiens
agctgagcatggccgcactatgctgccccctcctgggatcccaaaggatcttctgaacccaagcttatgcacaggacttttcccttctcaagagatgtccctctcctagttagcactcacgctcagaagataaaccctaaaggacaagggtttttgtctcagggccagcaatcagttcaacttctattcgtggcctgttcccttctctgaagacctctggactctgatgaaaaaataaaccctaccttttccatcagccccattgacacacccatacaagccagaatttccagaagtgactctcatacccrgttacgcattcttcacagtgaatggaacagactcttgtccacctgtggacagaccttttactggaacacaatgggtaacaacacttcaagatccaacttaggtctccttccttcataagtgttccgcaatttagcagtgtttcagttgttgaaaacccattttctcttttcaggttagtatagccttaccagaagataaggggaaactttctgggggaccacccctcacccacagtcagttcaggagcctgtgatgggggcatcacctccagctccaaggatagaacatatgactgttctgaccaagttcattgcaccatatctcccaagctctttcccctgcaccagtgggtttcaaatttgaattgtag

SEQ ID NO: 534397 - DNA, 617 bp, Homo sapiens
tggccgcactatgctgccccctcctgggatcccaaaggatcttctgaacccaagcttatgcacaggacttttcccttctcaagagatgtccctctcctagttagcactcacgctcagaagataaaccctaaaggacaagggtttttgtctcagggccagcaatcagttcaacttctattcgtggcctgttcccttctctgaagacctctggactctgatgaaaaaataaaccctaccttttccatcagccccattgacacacccatacaagccagaatttccagaagtgactctcatacccggttacgcrttcttcacagtgaatggaacagactcttgtccacctgtggacagaccttttactggaacacaatgggtaacaacacttcaagatccaacttaggtctccttccttcataagtgttccgcaatttagcagtgtttcagttgttgaaaacccattttctcttttcaggttagtatagccttaccagaagataaggggaaactttctgggggaccacccctcacccacagtcagttcaggagcctgtgatgggggcatcacctccagctccaaggatagaacatatgactgttctgaccaagttcattgc

SEQ ID NO: 534398 - DNA, 500 bp, Homo sapiens
cctctgcagacaccttctgggccctgacatggaagttctctggacctgaaaaaacaccgctatagatkatgggaatcccactgtctgaggatcactgatttttgacagtctagagatattcaaggacctgaacaagttcacaaagcttgtaagtaattaaatccaggactgcaatcccaacagtcatagtgagaggtgaagccagctgagcttctgggtcaggtgggtacttggagaacttttgtgtctagctaaaggattgcaaatgcaccaatcagcactctgtaaaactgcaccagtcagcaatctgtgtctagctaaagcattgtaaacgcaccaatcagcactctgtaaaatggaccaatcagcactctgtaaaatggaccaatcaacactctgtaaaatggaccaatcagaaggatgtgggcagggcccagtaaggaaataaaagctggccacccaagccagcaagggcaacctgctcagcagtggcaactggg

SEQ ID NO: 534399 - DNA, 604 bp, Homo sapiens
gacttgcccaccgagcccctggactgcctgaccaccactcgggcccactatgtgccccacctgcctatcaataccaaaagctgtaagcctcattggtctggccctcgaggaaatgtccctgtggaaagccagaccacctacaccatcagctttactcccaaggaaatgggcaggtgcctagcttcatatcctgagcctcctggctacacctttgaggaagtggatgctttgggtcacaggatatacaaaccagtttcccaggcaggctctcagcagagcagccatctttctgtagatgattcagaaaaccccaaccagagggagttggaagtgttagcctgattttgaaaaatagtaatttagaaattacacagtacttttaaaagcagacaactgagaattatttgttggacaaaaaagaattccctaaaatgacaaaaaacaaaaaacaaaaaaccttcaccacttccagagcacttgaataaaatgagaatcacttgactcagggaaaatgacatttaatcaccggctaattaactccccttaccttctcctttactgcatccccaccccrtttcaggtcctttactttgtgcttatggaa

SEQ ID NO: 534400 - DNA, 574 bp, Homo sapiens
caggtatgattgttcccaacttcctcgtttttgggttgaagtaacagaggctgagagatgtgagaatacttgcccaaggtgccctggagagtgagtgcaaggaccaggatgggccttgtgtcagggcctcctgcagtacacaggaacatgaaagctggtgccagacactcctgagcaaccagattctgatccaaattatcaaagctcaataggttttcaaaaagagcatgaggttcaaccactgcctgggatgttgggctcccattagctccttctctttccccttggtggttcctgaggggtctggragtcgcaggtctgggactccattgggttgataccctgctctccaccctgcactgacctaatagcaatgttagctttgctaatagtgtgtaggatcccagccacactgtgctcacgaaaggaagcgacatccatggtgctttttgacttccattgatcattgctgacacttaggattctgggcagaatgtggagatcgaggcccaatcatgcctgcgtggcagcccctgcgctggatccttgtttcttcctctagcctcagattcag

SEQ ID NO: 534401 - DNA, 632 bp, Homo sapiens
gcattgtctttattgtaactagcctaataaattgggggaaatgaaatatgtgattatctggcctatggtaggcaaattaccacatcttttttgaatgtctcttggtcaaaacggacaaatagagattggctaaatgatcatacccaatatatgggtactgctgctgctactactattgccactctttttgctgctgctgctgctataattttatttgttttcattttattgtttaaataaattttattgtacatatttaaagtgtacaacatgatgtttggaataaataatatagatggcaaaaaagttactatagtgaagcagactaatatatctaccatctcacatagttacccatttttttgttattgtggctagagcaactaaaatctactcatttakcatgaatcccatatatggtacaattttatttcttataatcctcaagttgtacattagatctctggatttgttcatcctacatattttctactttgtatcatgtaacatatttttttgctctctatttctatattcgaatttttaaatattccacatataaatgagatcatgcagtatttttttctttctgtatttggcttacttcacttagcataacatccttcagactc

SEQ ID NO: 534402 - DNA, 595 bp, Homo sapiens
ctgcagcagccgcctctgatttctgcttgactttccaccaactgcaaaatgactcatcatttctggcagcttcagttggttcttaagccaaaagctakctccctatggcttctctggtcctgttgtgccccataggacaccttaaaaaaaaatgtgtggcccgggcgtgttggcttatacctgtaatcccagcactttgggaggccgaggcgggcggatcacaaggtcaggagatcgagaccatcctggccaacatggtaaaactactaaaatacaaaaaattagctgggcatggtggtgcgcacctgtaattccagctactcaggaggctgaggcaggggaatcgcttgaacccgggaggtggagattgcagtgagctgagatggcaccactgcactccagcctggtgacagagcaagacaacgtctcaaaaaaaaaaaaaaaagtgtgctccttcttacatgtaatagcctttcaaattcttgaagatgccctcttctccaaagccttactcaagctaaatactcacatggtggcttccaaaacctcttccctggttacccttgtcattgccttcttaaagtgaagttcttga

SEQ ID NO: 534403 - DNA, 595 bp, Homo sapiens
ctgcagcagccgcctctgatttctgcttgactttccaccaactgcaaaatgactcatcatttctggcagcttcagttggttcttaagccaaaagctatctccctatggcttctctggtcctgttgtgccccataggacaccttaaaaaaaaatgtgtggcccgggcgtgttggcttatacctgtaatcccagcactttgggaggccgaggcgggcggatcacaaggtcaggagatcgagaccatcctggccaacatggtaaaactactaaaatacaaaaaattagctgggcatggtggtgcgcacctgtaattccagctactcaggaggctgaggcaggggaatcgcttgaacccgggaggtggagattgcagtgagctgagatggcaccactgcactccagcctggtgacagagcaagacaacgtctcaaaaaaaaaaaaaaaagtgtgctccttcttacatgtaatagcctttcaaattcttgaagatgcyctcttctccaaagccttactcaagctaaatactcacatggtggcttccaaaacctcttccctggttacccttgtcattgccttcttaaagtgaagttcttga

SEQ ID NO: 534404 - DNA, 565 bp, Homo sapiens
catatgatattctttctccaaggcactgaggatgtttttacaaaacacaaaccaaattaatatttgataaattaatgtaaacagagagtgaaaagaaaataacaacttatgggcgaatagcagtttatacggccygaactcatgttcttttatgtatttaccttccctgaaagaacctagtgttcttcctattgagttgcaaggaaggaggactcctggttctgagtcccaaatcctcacccacacctcggcctcaggtccagcggtgtgctatactggctcacaccggctcacaaaagccaattctgtgcaacacttcattgtgttcagtgacatcgtgttagtaagttgaaattggacatgggaggagtatttacatcacaaaatactaccaatttggtaccaaaaacaaacgctaccaatttggatttccccctacccccgccccagagagctaacttaccaggataccgttgcccagatcccaaattctgccttatcataatgctgtggaaacttttgatgcccaacatcagaccctcatgtgacatagacgctgacccag

SEQ ID NO: 534405 - DNA, 565 bp, Homo sapiens
catatgatattctttctccaaggcactgaggatgtttttacaaaacacaaaccaaattaatatttgataaattaatgtaaacagagagtgaaaagaaaataacaacttatgggcgaatagcagtttatacggcctgaactcatgttcttttatgtatttaccttccctgaaagaacctagtgttcttcctattgagttgcaaggaaggaggactcctggttctgagtcccaaatcctcacccacacctcggcctcaggtccagcggtgtgctatactggctcacaccggctcacaaaagccaattctgtgcaacacttcattgtgttcagtgacatcgtgttagtaagttgaaaytggacatgggaggagtatttacatcacaaaatactaccaatttggtaccaaaaacaaacgctaccaatttggatttccccctacccccgccccagagagctaacttaccaggataccgttgcccagatcccaaattctgccttatcataatgctgtggaaacttttgatgcccaacatcagaccctcatgtgacatagacgctgacccag

SEQ ID NO: 534406 - DNA, 565 bp, Homo sapiens
catatgatattctttctccaaggcactgaggatgtttttacaaaacacaaaccaaattaatatttgataaattaatgtaaacagagagtgaaaagaaaataacaacttatgggcgaatagcagtttatacggcctgaactcatgttcttttatgtatttaccttccctgaaagaacctagtgttcttcctattgagttgcaaggaaggaggactcctggttctgagtcccaaatcctcacccacacctcggcctcaggtccagcggtgtgctatactggctcacaccggctcacaaaagccaattctgtgcaacacttcattgtgttcagtgacatcgtgttagtaagttgaaattggacatgggaggagtatttacatcacaaaatactaccaatttggtaccaaaaacaaacgctaccaatttggatttcccccyacccccgccccagagagctaacttaccaggataccgttgcccagatcccaaattctgccttatcataatgctgtggaaacttttgatgcccaacatcagaccctcatgtgacatagacgctgacccag

SEQ ID NO: 534407 - DNA, 565 bp, Homo sapiens
catatgatattctttctccaaggcactgaggatgtttttacaaaacacaaaccaaattaatatttgataaattaatgtaaacagagagtgaaaagaaaataacaacttatgggcgaatagcagtttatacggcctgaactcatgttcttttatgtatttaccttccctgaaagaacctagtgttcttcctattgagttgcaaggaaggaggactcctggttctgagtcccaaatcctcacccacacctcggcctcaggtccagcggtgtgctatactggctcacaccggctcacaaaagccaattctgtgcaacacttcattgtgttcagtgacatcgtgttagtaagttgaaattggacatgggaggagtatttacatcacaaaatactaccaatttggtaccaaaaacaaacgctaccaatttggatttccccctacccccgccccagagagctaacttaccaggataccgttgcccagatcccaaattctgccttatcataatgctrtggaaacttttgatgcccaacatcagaccctcatgtgacatagacgctgacccag

SEQ ID NO: 534408 - DNA, 467 bp, Homo sapiens
ttctaactttaatagattttctttccaattataagtatttattacatctctatgttatttctaccattaccgtattttatttgtataatttccattttatttcaaaataggttattattttctggtgaaaatttttaccgtctcttccattcttctgaacatctaaatcatatcatttgaatgktactgtcttataacctcgatgtctccatcatctgtgaaaaacctactgtttcctgttttgagtttgttttctcttgcctctgcttctttatatgcctagaatactatgactgaatggtgggtctctgtgaaaaattatgaaaggactgagtcgtgttctctgtctctgaagatgaattcccctctgcccctggcaggcaccagaggcacagatcacctcaatcccatctctgtctcggctgacctgcagcttgtttttcctcttgggaaactcagcagcagga

SEQ ID NO: 534409 - DNA, 467 bp, Homo sapiens
ttctaactttaatagattttctttccaattataagtatttattacatctctatgttatttctaccattaccgtattttatttgtataatttccattttatttcaaaataggttattattttctggtgaaaatttttaccgtctcttccattcttctgaacatctaaatcatatcatttgaatgttactgtcttataacctcgatgtctccatcatctgtgaaaaacctactgtttcctgttttgagtttgttttctcttgcctctgcttctttatatgcctagaatactatgactgaatggtgggtctctgtgaaaaattatgaaaggactgagtcgtgttctctgtctctgaagatgaattcccctctgcccctggcaggcaccagaggcacagatcacctcaaycccatctctgtctcggctgacctgcagcttgtttttcctcttgggaaactcagcagcagga

SEQ ID NO: 534410 - DNA, 306 bp, Homo sapiens
gcctccaggctcaggggaagctgaacgcycggtgggctcctgggatgcatcttcgcgttctttgcgccgccttcacccactgagggagcctgtgcccaccctgcccagtcgctttcggggccgctgcggagcttccgctgccatcttcggatcctgtgtcccgcacgggggctccaccagggcagggatgatggtgagggtcgctcgtgggtcccctcgcgggaaacagggtatggcactcaccagagcgcacgactaggacttgaattaatccatcgtcgcattcagtttttagtcttttgaaga

SEQ ID NO: 534411 - DNA, 654 bp, Homo sapiens
atctacataggtattatagaaatttgtgtttacttaaatttgctggttttggatttggttttctattctgccatcgtgttaaataacagcgatcaggatagattattgaayagatggtatgtgagcacttggaaagtggtgagcattagaaaccagaatttctctaagagcaaggtaggacagattaaataagtggaatgaagggttttgcaaagacagagatgtaccattctccaggctgcgggggatgttgagccagcatgctcttcccaccaacatagggccttccttccctgctccttagctctgtttgtcagggcgcatgtgcttggggtcatcttcctgctgagctctggccccatgaaaataaatcaatcctcctgtgttcctctcaccagagcactcccaggagatggaaagcctgagggaggctctgctgtcctctcgatcccaccttcaagagctggaagaggagctggagcaccagaaggtggaaaggcagcagcttttggaagacttgagggagaagcagcaagaggtcttgcatttcagggaggaacgcctttccctccaggaaaacgactccaggtaagaggggacccattgacagagaaggtagcattcttcattcttacattcattcttacattataa

SEQ ID NO: 534412 - DNA, 647 bp, Homo sapiens
tgcctccatgtcattctagacttgtcatctttgttctgcagggtcctgctctgctcctccatttctggagtgagagaggatgcacttctccctctggttattcctctcaggcgccatcctgggagacccagccacacacaggtaccaggagagatagttctttatgcattaaagagcaaaagaatataatccaatgtccctctcttctcccacmtgcagaagccagatgcccctctaatacccaaataagaaatatttaagcccacagtccctgctggtccctgctggtcacctatggctgtcttaaacctggcattgtcccatctttccctaatcactttactgaaagtctgggcactgctcatgggttgactttcacagagagctgaggcttggcagtcacatttggcaaggtctcccaaaggctggtgtagcagaaggagcatgcaggcaaaggccttggagcaaagggttccacagggtctgcaggagactctgtctgctgagcaacaaccccgacccagcctgcaccctgtcacagcagccagccccttcccccctgctggcatgttcttcacatgtactcgccccactgggaagccagatccagagagcagggaaggatccaggcacccccagagaggttc

SEQ ID NO: 534413 - DNA, 647 bp, Homo sapiens
tgcctccatgtcattctagacttgtcatctttgttctgcagggtcctgctctgctcctccatttctggagtgagagaggatgcacttctccctctggttattcctctcaggcgccatcctgggagacccagccacacacaggtaccaggagagatagttctttatgcattaaagagcaaaagaatataatccaatgtccctctcttctcccacctgcagaagccagatgcccctctaatacccaaataagaaatatttaagcccacagtccctgctsgtccctgctggtcacctatggctgtcttaaacctggcattgtcccatctttccctaatcactttactgaaagtctgggcactgctcatgggttgactttcacagagagctgaggcttggcagtcacatttggcaaggtctcccaaaggctggtgtagcagaaggagcatgcaggcaaaggccttggagcaaagggttccacagggtctgcaggagactctgtctgctgagcaacaaccccgacccagcctgcaccctgtcacagcagccagccccttcccccctgctggcatgttcttcacatgtactcgccccactgggaagccagatccagagagcagggaaggatccaggcacccccagagaggttc

SEQ ID NO: 534414 - DNA, 696 bp, Homo sapiens
tgctgacatcacctagcaccctctgtgccctgtcaccagagtacaggcctgaggaactgggtccctctctccatgccaagcagccaaagcaaacatcgatgtaggaggaggaagatcacaggctagccagagggtgtgagcgtcagcatgaggctgctggggcgggcatcctgtcctcttctgcttccctatgccccggagggtgctgggccagggtggggtagaaagcagaggagacccaagcgggcctcctgcccagccctgccactccctgatggctggcagagggagccatcaacaaatgaagtcccgggaagaacattttctccagcagcattgtaacctatgtgctagggagtcctgtggatccaaataagtaactccagcaactgcagggagtaagaaggggcccagggtggggggtgtgtggcagggggtgcgggtctccgggtccctaccccttcaaccagaaagagactgcttgctgctaacagtggagctctttttgttggaaaaaagtctggaagatttaaaaaaaagaaaagttttcaaaaccactgtgccgaccctggtttaccctgctccaccactcctctgccaggagaccttgggtaaattccttaactcaaggagccaccttgcctrtatgtaaaacagggaagaaaacaccaacctgagagtggggggttcctgcaa

SEQ ID NO: 534415 - DNA, 532 bp, Homo sapiens
ctgcaggatagcattatttagatcaagaaggcctgctaatttggactggtcttcgtccattatataatcgtctgcatagacaagttcatcctcaaaygaaagagaccggtatacgacaccaaggatcaaaatttccatccaagcactctgcagaaggctcatctggtccgccagggacagcgtggagaagcctgcatggaaagatgggcagatcaagttactttaaagccataatttcataatgcaacattagtttcatatggtagctggcttctgcatcagtgctcaaaattatgctgagctttgattagaagctcttaaaattttccctggatcactttgcgaacagcaaagtgaaagtcacaaaccagcttcttcaatttgtgggtatttgctataagttttatagacacagcttaggggaatataatagagatgtcgctttctttcattcgagaagaaaataccatgtaatctttaaatatacttgatttctggttgaagtctttaggaaaatcttacaggaagtcag

SEQ ID NO: 534416 - DNA, 653 bp, Homo sapiens
gagttctcaacttagcctgaccatctatttataatctttggttgtagagaatgtgtgaggatagtcctttatttgcatatttgtttttggcatgatgtattttttaaaattctaaacttgaatgaaaaacttcaccaattacagattaatctaacatttattaattaaaaattataaagaacattrcactcttgaagtgatgcacatttcaaaatgattgaaatatgcatttgagtaagtgaaagccttaaaaaaaaagtgcacctgtatcattggcttggactttcctcttcaacttcaagttaacttagtggatacaagctaagccccaaggtaaatattttatggtagtgaactacttcaaaaatattcagtcctgattaacattttccagaaattgtgaacaatatagatacccagtgtgttcctgtgcagttgatacaatgtaacatataatgattcatgacatgggctctggagtctcctgccacttaatagtattgtcacctttggctacttatgtgacttctctaaccctgagtgttcttatccataaagtgcagataatagtatgcaataaggacttaaagagataatgcaaatataaagtacctagcacagtgcctggcatttactaaagagaataaatcaaa

SEQ ID NO: 534417 - DNA, 504 bp, Homo sapiens
ttgtgaaactactttttgtgtattctaagcttgaataaatatattgatgataatgggaaccaggtttctcatttttggagaaggtagtaacaagtgtgtgagggataagaccaaattgtttcctagaaaggaattataggtatcaacatgaattcatagtttgtgatagctagatatgaatctaatcacaaagaaacatcagcctaattcaaaatgagagatattctacaatataactcacctgtgccttttaaaactgtcaaggttaagaagtacaaagagagaaaaaatgacacagcggggaactccaaaaccacatcccgccattaaamcaaaaattaagctgccaaaaattgtcagtcaacttgttcagatctctagaatctaacgaaagacttaaaacaaccaggagaacgctttaaaagaaagaagctgctaaaatttgttcacagaacattgtattttaacttacctggtgaccaccccaagtccccagtgcaatgg

SEQ ID NO: 534418 - DNA, 504 bp, Homo sapiens
ttgtgaaactactttttgtgtattctaagcttgaataaatatattgatgataatgggaaccaggtttctcatttttggagaaggtagtaacaagtgtgtgagggataagaccaaattgtttcctagaaaggaattataggtatcaacatgaattcatagtttgtgatagctagatatgaatctaatcacaaagaaacatcagcctaattcaaaatgagagatattctacaatataactcacctgtgccttttaaaactgtcaaggttaagaagtacaaagagagaaaaaatgacacagcggggaactccaaaaccacatcccgccattaaacmaaaaattaagctgccaaaaattgtcagtcaacttgttcagatctctagaatctaacgaaagacttaaaacaaccaggagaacgctttaaaagaaagaagctgctaaaatttgttcacagaacattgtattttaacttacctggtgaccaccccaagtccccagtgcaatgg

SEQ ID NO: 534419 - DNA, 507 bp, Homo sapiens
tgaaaattaaagaaaaaccagtawaacaaatatcatgtaagatcaaatcggaaaaaggcacgattaaaatatagatttaaaaaaaattattgcgaaaaaagatcatattttcagaaaagtacatacacctgtaagtacaatttcacaagtctttataaagtgatcacctgctccgcttattatgagaacatacaaactatagcaaaacatttatttattatgcttatgaaatctgtgagcaaggaatttggacagggcaggaagatatggcttctctgctccactgtgtctggccgcagatggaagcttggaagctcattcactcattagtcttgtgattaatactagctatttcctggaggcctcagtttctctccactgtggtttcttcatgcagtctcttgtcatgggctaattggtcatccttccaccatggtaactggattccaatgacaaatgtcctgacatagagagcaaggtgtaattttaaccccattcataacccaa

SEQ ID NO: 534420 - DNA, 507 bp, Homo sapiens
tgaaaattaaagaaaaaccagtaaaacaaatatcatgtaagatcaaatcggaaaaaggcacgattaaaatatagatttaaaaaaaattattgygaaaaaagatcatattttcagaaaagtacatacacctgtaagtacaatttcacaagtctttataaagtgatcacctgctccgcttattatgagaacatacaaactatagcaaaacatttatttattatgcttatgaaatctgtgagcaaggaatttggacagggcaggaagatatggcttctctgctccactgtgtctggccgcagatggaagcttggaagctcattcactcattagtcttgtgattaatactagctatttcctggaggcctcagtttctctccactgtggtttcttcatgcagtctcttgtcatgggctaattggtcatccttccaccatggtaactggattccaatgacaaatgtcctgacatagagagcaaggtgtaattttaaccccattcataacccaa

SEQ ID NO: 534421 - DNA, 584 bp, Homo sapiens
aggcaaattgtgtttttgaatctttgtgggcacacgataatctgccaaaaagatctgtattcataagatgtcttcttctctccaaggaagtgaggaattaatgtaatgcttataataattataaaaatactaataaatcaaagcaatatatttaccaccctttatttttaaattatttgtatgccgtaaaagtgcaagagaaaagatgacagtagtaactcagtatgccaattgcagtttacacataaacattttggctgagattaggtttttctacattaatgcctataattagtctgaaattcattacatttaagctattttaaattttaaaataaaggcacatttttctttcaaatcctaaaagctggtgttagaataactgtttttagactttgtyctagttatgataaatatcattaggttgtctatccttgaaatttagattcaatttcatacacggtttaaatctgattttacaaatcaaacccaagtaaggaaacaaatggaaatgcattttcagcagcatcttctgacagtatatgataaacagcatcatttacaggacactgcatcatactatt

SEQ ID NO: 534422 - DNA, 538 bp, Homo sapiens
agggcaaaaatgtaccttcagctcacttgattattaaggatatgtgtttacaattaaaatgcaatatgaaatatcagcattccaagtactcctctgggaacataatgtcaaatttatgggaatttgatgctatttcttttgttttttatttttatctaagcaatagttgcagattgtttaaaggatcaaatggtactataagacttatgacaaaaatcaacaatttcttaattcccacttaagtttatcactccccagargcaaactctttcgacttttaaaatgaattattttgataatatgtctaaataaatacttatattactactttttggtctttgacttctaaggatttcctattggcatacttacatggaagatagggctctagatctcctttatatccctccccaaaaccccacacactcacatacacttcctaaacctatatcctcccaatatagttgtattgtgattgtcatttaggttacattgatgttccctatataagattcataaatatgtaaatgacattgac

SEQ ID NO: 534423 - DNA, 513 bp, Homo sapiens
acctccctacccccactccaacactggagaaaaattaggcagccaatgcagtaagcaggaaggaaggagataggaataagctgaagaaatatcttaggaaatatctcttttctacccycacagcaggtttctgagcctttttctgaaccatctgttggggaagaatttttaattgcatgaaagactgatgcttgtgttattagattgaactggcctttttaatacctgacagtgaccagaaaagcaatgtaatctttctgagaattaaacaaagggcagagaagaatgattcaatagagcaggttttaaaagtcaactttaagttgaataaatacatatggttttttgatgttcagctaataagatgaatgtgtatgggtatgagaaattcattaaaaatagtagataaataaaataaatgaggaatattcaaaccactatgatgaaaccacagctcacatttatgtcaatttctccttcattcatattctataagcttgtaattttactgta

SEQ ID NO: 534424 - DNA, 608 bp, Homo sapiens
atcaatatgtaaatgttaatrttaatttatttagaattttatcagttcttcaagtattaaataatgtatttttaatctaagaatttacatattatatatttatggattattttatcattaaaccatttgtagtcccctttgttaaatctcctttggttaaaacataatttggttgcataagcattgtatttatatttttaaaatatttgttatgaattttcatcatttaattaatgaaatggaactatgattttcctttcatgcagtatctttgactatttttgttatacagattatgttgatcttatcaaatgagttggaaaattgtatttttcaaagttcaatgagaaaaacagatatttaactattttaagcagagagatatttaacttagaaacttggtctcaaaagattggtaaaactggagtaacaaaaactgaagggtgacactgggaaatatttaaaagtaagaatttgaaattaattagccatcatcacaaagcttctgtcatctgtgagcttaggccttcaaacacaaacacatttaatgttcataatactggagtagttaagattgctattgacagccgttatcttcatttcccaag

SEQ ID NO: 534425 - DNA, 608 bp, Homo sapiens
atcaatatgtaaatgttaatattaatttatttagaattttatcagttcttcaagtattaaataatgtatttttaatctaagaatttacatattatatatttatggattattttatcattaaaccatttgtagtcccctttgttaaatctcctttggttaaaacataatttggttgcataagcattgtatttatatttttaaaatatttgttatgaattttcatcatttaattaatgaaatggaactatgattttcctttcatgcagtatctttgactatttttgttatacagattatgttgatcttatcaaatgagttggaaaattgtatttttcaaagttcaatgagaaaaacagatatttaactattttaagcagagagatatttaacttagaaacttggtctcaaaagattggtaaaactggagtaacaaaaactgaagggtgacactgggaaatatttaaaagtaagaatttgaaattaattagccatcatcacaaagcttctgtcatctgtgagcttaggccttcaaacacaaacacatttaatgttcataatactggagtagttaagattgctatygacagccgttatcttcatttcccaag

SEQ ID NO: 534426 - DNA, 600 bp, Homo sapiens
ctgggtttagcctgctaaaatgtaagctgacgtgtgctcaaaattctccagtggatcccagttcactctgggtaaaggccaaagcccttaayacatcctacaaggccctacctggcctctctcctctcactcaccatgcattcaccaaaccaggctctttgctgttccgtaaaaaccccagccatgatcctgcctcagtgcctttgcactggctgctccctttgcttagaaaactctttccccaggcattcaaaggatctgtccctgcggctcttttaggtctttagtcaaatgtctcttgctcaaagaggtctttcctggctgctgtatgaacctggtggcacctcgctgtccacccccaatctaccttccttccctgcgttttcttatagcactgacgacatactgtgcatcttaccattattttgtttctgtctgcctcttctcactagacggtcagctctgggaggataaaaaccttgttttggtttcctattatattcgcagcaaccagaacagtgctgatgccaagtaggtgtgtaataaatatttgttgcaccaccttttatttgctctccctctgtccccatcttactcctg

SEQ ID NO: 534427 - DNA, 618 bp, Homo sapiens
tcccctctatgcttctagtgccatggccttgggcaagtcacctacctctctgagcctcaaactccacacagtgaacttgctggggcttttgtggggaaagtcgagcctggccccagaagaacggccaagtcatagggtcaacctaatatacaacgttgggagcccaagaaagccactcactaatgacagctactattatcagtaatagaaataaaagcaccattgtaaaagtgaggggcagagagctttcactctattttgtagaatggaggctacctcaactttttaaaagtaaaagtgaaggacaaaagaggagagaatcttgccaggcactaatttcctgtagaatctatcctgagactccaccaatctctcaaccgtggtcaataaacgctcttaaaaaaaaaaaaaaaaamcaaaaacaaccaagtacctttttatttggaaatcatttaagacccaaaagaagttgaaacacagtacagagagtctctactctttccccagcttcctccagtgacagcatcttatgctaccagggtgcgttatccaaaccagaacaccaatactggtccaagacaattattaatcaagctatagactgcatttgaatttcac

SEQ ID NO: 534428 - DNA, 550 bp, Homo sapiens
attaaggccttcagtgaactggatgaggcccaccyacattatggagggcaatctgctttgcatagagtacactgatttaattattaatctcatctacaataatattctcacagaaacatccagactaacatttgaccaaatatctgggcaccatggcttagccacactgatgcataaaattaatcatcatagaatcttacctttcatctatctgtatttgtgtttttgtttccttcagtatattatggtggggaggttgggaaaagaaaatcttcactaaaaaaacttattatggaaacgttcaaacatacaagaaagtggagagaaaatcatataatgaaccccatatatctatcacacagcttcaacaattattaacaaagacaattcatttccaaatgatactctctcgtctccattttcttgtttccctggctcagagaacattcctttaaaatctccatcctgtactgtttgttttcttgcaacttagacacgggttattgtcccctgcttgagaatttgacccagcaaatgaacatgttacaca

SEQ ID NO: 534429 - DNA, 550 bp, Homo sapiens
attaaggccttcagtgaactggatgaggcccacctacattatggagggcaatctgctttgcatagagtacactgatttaattattaatctcatctacaataatattctcacagaaacatccagactaacatttgaccaaatatctgggcaccatggcttagccacactgatgcataaaattaatcatcatagaatcttacctttcatctatctgtatttgtgtttttgtttccttcagtatattatggtggggaggttgggaaaagaaaatcttcactaaaaaaacttattatggaaacgttcaaacatacaagaaagtggagagaaaatcatataatgaaccccatatatctatcacacagcttcaacaattattaacaaagacaattcatttccaaatgatactctctcgtctccattttcttgtttccctggctcagagaacattcctttaaaatctccatcctgtactgtttgttttcttgcaacttagacacgggttattrtcccctgcttgagaatttgacccagcaaatgaacatgttacaca

SEQ ID NO: 534430 - DNA, 649 bp, Homo sapiens
gaaatattcacagccattaagagacctccaaattaatttctcaacatgcttattctatagttcacattcaatccagagcactgaaggaactgaacaactggacactgtagacatcagatagctggccatggtgttggccatggcgtctcaggatgttcagaacttcttccagcctttctcttcctggatatctcgggtttatgaagctctccagcaagcaggagatatgttatctgcttcgctggttaacataagcaaacaagactctaaattgagtgacaaactagatcaggacttagataatattcagattcaggaaacgtactttgaagatgaagaacaagacaatgattggagtcaagaggatgcaaattccttgtttcttgaagtggatcatttctcatgttgtaatagtgatttgcaggactctgcccaaaattcaagcccaagccttagccaacatgcaaaggactcatgttccacaatgtcccagtggcccaattgggccagtgatgaccgcaagttaccacatgtgctttcttctattgcggaggaagagcatcaccttgaaaagcaaagaagtggccttcaacatggctttgayagccagctccctggtactttagaaactgttaatggaaaaaagcaa

SEQ ID NO: 534431 - DNA, 303 bp, Homo sapiens
tgtctcagaagttggccttcatgggacactgaatctgctgacaccttgatcttgaatttctcagcctccaaaactgtgagaaataaatttctgttgtccatgagccactcagtttatggtatgttgttatagcagcctgaacgaactaaaataagtgaaaataaatcgtgactattattgtgtcagccttcactcttagtccttaattgtttctttgagatataaggcaagacatatgagtccttcccccaggatagtcctgggagctctggttgcacaggtrtggctaacatggtatcaccg

SEQ ID NO: 534432 - DNA, 458 bp, Homo sapiens
tggctgattttaccattttctcttcatctctagttccccatggtggaattttgaacagtgctcccaaggaaatagttgaagtgaatgtgtagattaccttcagtgcttttcttctctcaaggatcatagattcttaagtcctacctgtgccagttgttcttgaatagcttcaaaattttgttcaaacaattgtgtatattttttcattcagcttttagaggtggcttttgtgggatggttattctgataaaaggtactccatccttagttttttaatcgtgtagtcttgctaccttgcaracatgtcctgtttatcttatctttaaccaaacattggtagtgtattctttttcaaacatgtgctagtcttggctgtttgattctaaagtttatatgggaaaatgttttatcaatttcccataaaaaccttattgtgtttatctaatataaaaagtaga

SEQ ID NO: 534433 - DNA, 559 bp, Homo sapiens
gtatgaccttattcatcttcaaacccttgtayggctatatccaatactagagaaggtgtcccataaacacttatgactttaggaagtaaagttttcctctttgcttgcctgtgctacagcaacaggcaaataaataaaaggaaggatatagttctccctcccaatagttcaaccatctggcagggcaaacagaaaatgaccacaccagaaaaggagtacaaagagaagcaaaactggagaaaatgaaaaggatagggggcttatcccctcactgggattccatatatcctgggaagcattgctttttccgtatccacactggccaactatgtactctcccattcagtgggaccatgctctaaaatcccatcaccctggatctatttctatatttatctgctgagattctggtgtaacctcctctacagccatcctgccctgagcaaagataaacaggaccatgaagctttttctgtttgtttgtttgtttatcctatcaatataaatatgtaaatgcatgaaaaaaatgtgagaatctaatcttataaatctaaagtaa

SEQ ID NO: 534434 - DNA, 559 bp, Homo sapiens
gtatgaccttattcatcttcaaacccttgtatggctatatccaatactagagaaggtgtcccataaacacttatgactttaggaagtaaagttytcctctttgcttgcctgtgctacagcaacaggcaaataaataaaaggaaggatatagttctccctcccaatagttcaaccatctggcagggcaaacagaaaatgaccacaccagaaaaggagtacaaagagaagcaaaactggagaaaatgaaaaggatagggggcttatcccctcactgggattccatatatcctgggaagcattgctttttccgtatccacactggccaactatgtactctcccattcagtgggaccatgctctaaaatcccatcaccctggatctatttctatatttatctgctgagattctggtgtaacctcctctacagccatcctgccctgagcaaagataaacaggaccatgaagctttttctgtttgtttgtttgtttatcctatcaatataaatatgtaaatgcatgaaaaaaatgtgagaatctaatcttataaatctaaagtaa

SEQ ID NO: 534435 - DNA, 540 bp, Homo sapiens
acgaagcaccattgacaggttttgcaaggagactttgttcctgcactgcaaataggaagggcacatactcaatcttcctgattctacctcccctttccagatctattctgaactcagtcttctaaatctaattttttacctttytaagttttttgttttgttttgtttgaggtggagtcttgctctgtcacccaggctgaagtgcaatggcgtgatctcggctcactgcaacctttgcctcccgagttaagtctttctcctgcctcagcttcccaagtagctgggactacaggtatgcaccaccatgcccggctaatttttatatttttagtagagactgagtttcaccatgttggccaggctggtcttgaactcctgacctcaagtgatctgcctgcctcagcctcccaaagcgcgggattacaggtgtgagccaccacgcctggccgtatttttctttttgtgacagggtctcactctgatggagtgcagaggcacgatctcagctcacagcaacctccacctcctgggttcaagtga

SEQ ID NO: 534436 - DNA, 542 bp, Homo sapiens
ctgctgggtacttggtttcttgtggttcctgattcctatcagtgtcatttctcaaatgacctgtggatctaggattattgaccacttcctatgtgacccaggtcctctgttagccctcacctgtrccagagcccctctactagagttgactagctccaccttaagttctctacttctatttattccctttctcttcatcgtggggtgctatgctctggtcctgagagctgtgttgagggttccttcagcatctggaagaagaaaggctttctctacctgtggctcccacctggctgtagtttcactgtttatggctcaatgatgatcacgtatgtgagcccaacatctgggcatgaattcggaatgcagaagactgtgactctgttctattctgtggtcactccccttattaatcctgtcatatacagtctgaggaacaaggaaatgaaacatgcaatgaggaactacactgtaatgttttattttctagaattcatagggctacaagagatgtcaaagatgtattctatctctttaatttt

SEQ ID NO: 534437 - DNA, 569 bp, Homo sapiens
taccaccttccatctatgctagataagcagcattaacaacccagtatattctttcatactattctccatgcttctaattctatataaatatttattatcatatatcaggttttttcattatcttacaaaaatcaaattataycacatagtcttctctatatcttgcttttgcatttaaccttacaatatgcaaatccctccaaaataagattaggtataccaagtatttttacttcatatagtaggccagaaataaataattaagaaaaccagggtcctttgacagggcaggaagaactgttcctgagctttggctaatactcattccataaaaaaaaaactgaagataggttttaagttcatattgagtaaggtgtaattgacaaagtttaaaactagagtctttatggaggatatcattatgatattgtgatttgtcatcttcatttatactaaatggtcagatatgagattcacacacatcatcatatggtttcacagaacagagacaccactattaagtgagacccacggatagaaaaggcattttgatggctagctgctgaaag

SEQ ID NO: 534438 - DNA, 345 bp, Homo sapiens
ttaggtataccaagtatttttacttcatatagyaggccagaaataaataattaagaaaaccagggtcctttgacagggcaggaagaactgttcctgagctttggctaatactcattccataaaaaaaaaactgaagataggttttaagttcatattgagtaaggtgtaattgacaaagtttaaaactagagtctttatggaggatatcattatgatattgtgatttgtcatcttcatttatactaaatggtcagatatgagattcacacacatcatcatatggtttcacagaacagagacaccactattaagtgagacccacggatagaaaaggcattttgatgg

SEQ ID NO: 534439 - DNA, 547 bp, Homo sapiens
gttttattcattagccatgaatggctcgtgtgaagctaaggtaacttttaaaacaccctacaaaggcaaaggtgtgacatagaaatgactaaatgcttaatgtccttratcatgagtgaaactggtgcagagtgactttattttagaaaataattagacccgtccactgtctgctttgagttccctttataaaagataaatatgcagtctcagaagttttctgggcccctaaacaaatgactttaaaagtggagaagcagaaaagaaaaaacttatagaaaatagaagtttatggtacagttaccagaacctattccaccctattcccaccaaaagccaagtacatttaatccttattttgcttatatatgttaaaatagagtctgacagaaactgtggagactcttttgtctccaggcatcctccatgtcacgggaattagggaatcctgagttacaaatgacctatagggtgttttaaaaaattatgtggctgggcgcagtggctcatgcctgtaatcccagcactttgggaggtcgaagggagc

SEQ ID NO: 534440 - DNA, 639 bp, Homo sapiens
acaagcacgcaccaccgcgaccagttaattttgtatttttagtagagatggggtttcaccatgttgggcaggctggtctcgaactcctgaccttgtgatccacccgccttggcctcccaaagtgctgggattacaggcgtgagccaccgtacccggcctagaatcatattttattcaagctgaaactttaaatgagttgctgacttatgatgtaaggataaacatacttttttaagcagcagttgcaaaaacagtaaatcaattctgctgttcagtcttttaaatgctcagcaaattactgacagttacattagtggaaataaatccttattggaacaaagcttctcttttctttcctttttaacttatatatgacaatacacataygcaaggtgctgcctctaagtcttgctcagcaccatattatgattatcaattactttttattgaaggctcatatgagtctgtgaacaaatatgtactttcaacttacctgtggaggtaggaaaaaatcctagagcgcagaagtcattaaatacatctacaatgggtgcataatgtgggcctcacagcagccaatagctatggcccaactcacttttctataatgaaagggcaggaagatggccaaatctgtct

SEQ ID NO: 534441 - DNA, 639 bp, Homo sapiens
acaagcacgcaccaccgcgaccagttaattttgtatttttagtagagatggggtttcaccatgttgggcaggctggtctcgaactcctgaccttgtgatccacccgccttggcctcccaaagtgctgggattacaggcgtgagccaccgtacccggcctagaatcatattttattcaagctgaaactttaaatgagttgctgacttatgatgtaaggataaacatacttttttaagcagcagttgcaaaaacagtaaatcaattctgctgttcagtcttttaaatgctcagcaaattactgacagttacattagtggaaataaatccttattggaacaaagcttctcttttctttcctttttaacttatatatgacaatacacatacgcaaggtgctgcctctaagtcttgctcagcaccatattatgattatcaattactttttattgaaggctcatatgagtctgtgaacaaatatgtactttcaacttacctgtggaggtaggaaaaaatcctagagcrcagaagtcattaaatacatctacaatgggtgcataatgtgggcctcacagcagccaatagctatggcccaactcacttttctataatgaaagggcaggaagatggccaaatctgtct

SEQ ID NO: 534442 - DNA, 368 bp, Homo sapiens
gccgactgctccatctctgctatgacagggaagggagaaccatagcaggagagatggggtgagtcagttaccactgagaccctcattctgctagcagagatgtttgccagggaggtcccctgatgagctcttggcatctcattaccattttcaaatgagcatggaggaatctgggctttaccagacatgttggttgtgggttttcccatatccaggagtgttgagtcagctcmttagtgcctggaattctacagactctgaatgtcaactagggaaaaggcgaatgctctaccataagcagagcgcagcttgtcactggtaattaagagataaggtaatttgagagagaaggtaattcacggtaccaa

SEQ ID NO: 534443 - DNA, 599 bp, Homo sapiens
ctggaaatacatagagggaattccgggaacaagacaagctggaagaagcacttttgttaaattatactttttttaaagatcaatagatgcttcaaagaagtccactgaggaggtcgttgtgtggctttgacaaaaacagttgtgtgtcttgctttggggagagccartctgaaccacccaagagatgccttcccaactttttctttgtgcataatgtgatttgagggaaaacaagtttactgtgcctttcattgtagacacctgggttatgcggttagctaggggaccaagtttatcagatccaggctggcctcctgagctccagacttattcatttattcatgcatgcactcagtaatgtttattgtatcccatcgatgcctcagatgctgtgactcggtatcaaattaataagacttgaccatgcccatgtggcatttataagctgacactgctgggtacccatattgcaggggaccaggaaatgctttctcagggggagacacttgcaccatgctttgaaggaccaataccagttagcaagacagatgggggtgaaggaaaagagctcaggttggctgatgccaaagcccatgctc

SEQ ID NO: 534444 - DNA, 473 bp, Homo sapiens
atcattgagcacaaagatgttttatattagaataacatgtaccttattttttaaaactgagatctgcaaaggcttaaggaagctgaggcaacaatataaaagatctgaaataaacatgtatttgaatactgtaccaataactgatttttttcttcttaaattactttttctgataacagtcaataagtttcagtaggaaaatgcagaaaacacagaaaaatatacagaataaaaatcacctgtaattcctacaggtgattttgagaattaattttagaattaattccaaaaatattaaagttctaaaaacttcaaattcttccaaaaatttttaaatctagggtgaagaaatctttccaggcctttttttattgttcctttttttcttccaaattttattttaacttcaggagtacacgggcaggatgtgcagtttggtacttargttaatgtgtaccatggtggtttgctgc

SEQ ID NO: 534445 - DNA, 473 bp, Homo sapiens
atcattgagcacaaagatgttttatattagaataacatgtaccttattttttaaaactgagatctgcaaaggcttaaggaagctgaggcaacaatataaaagatctgaaataaacatgtatttgaatactgtaccaataactgatttttttcttcttaaattactttttctgataacagtcaataagtttcagtaggaaaatgcagaaaacacagaaaaatatacagaataaaaatcacctgtaattcctacaggtgattttgagaattaattttagaattaattccaaaaatattaaagttctaaaaacttcaaattcttccaaaaatttttaaatctagggtgaagaaatctttccaggcctttttttattgttcctttttttcttccaaattttattttaacttcaggagtacacgggcaggatgtgcagtttggtacttaggktaatgtgtaccatggtggtttgctgc

SEQ ID NO: 534446 - DNA, 446 bp, Homo sapiens
tccttccaactttgggggaacgtcaaatatattcaataaaattatgatgataagcacatggtagtttggcttaatgtcattacttggcgaaaaaaggaaaaaaaagggaagaaaaaggactctaacataaatgtctatctttaaaatatatatatgtacttgtccaagaaggtcagagatacaaaaaccttttagcactggtatttcatgtagaaataaatttgggaagtacaatagaaggcctgacattargatgcaatattaagagcttccttgataaatttgagcctcacagatccccaaagggcaaccgaccagctcccctgctctcaaaaaatatgccatccacacaatagaaaagacttctcgcccacacctggctagttctatcgcctagatgagctactccagctgattccaaacctaacttccctgccagactacag

SEQ ID NO: 534447 - DNA, 446 bp, Homo sapiens
tccttccaactttgggggaacgtcaaatatattcaataaaattatgatgataagcacatggtagtttggcttaatgtcattacttggcgaaaaaaggaaaaaaaagggaagaaaaaggactctaacataaatgtctatctttaaaatatatatatgtacttgtccaagaaggtcagagatacaaaaaccttttagcactggtatttcatgtagaaataaatttgggaagtacaatagaaggcctgacattaagatgcaatattaagagcttccttgataaatttgagcctcacagatccccaaagggcaaccgaccagctcccctgctctcaaaaaatatgccatccacacaatagaaaagacttctcgcccacacctggctrgttctatcgcctagatgagctactccagctgattccaaacctaacttccctgccagactacag

SEQ ID NO: 534448 - DNA, 583 bp, Homo sapiens
agttatctgctgggcggggtggctcacgcctgtaatgccaacactgtgggagtccgaggcggactgatcacttgaggtcaggagttcaagaccagcctggccaacatggtgaaatcccatctctactaaaaatacaaaaaaattagctgggcgtggtggtaggcatctgtaatcccagctacttgggaggttgagtcaggagaagcacttgaacccagaggcggaggtttcagtgagccaagatcacaccactgatttccagcctgggcaacaagagcgaaactccatctcaaaaaaaaaaacaaaaaaccgttatcacaaacattgaacatatattaaattagccccccacttaaagtgaagaattgtgtttgtgtacatgctcagtttgtgtacatgtttgtatacatgttcgtgtacatgttcagtattrtcagcctctgttatttctatgtgggggtgtttagaagtacagcgaagtggggggaattttgctgaagaaagtaaaatgaatacatctgagacgaaggaaaggcgatggaccagccagcctagaccaaactgtcctgtggtaggtcccagc

SEQ ID NO: 534449 - DNA, 515 bp, Homo sapiens
ttattacgggtgggagaattgttataccagaggcaatttagaaaatcaggtacaattgactcaagtcaayttacatactgcagtcccaacagcaaaaagtcatggtgtttcaggcctgagatagtgtaatcattaaatgagaccacctgggcaagtaactaaacccaagagagaataaaagaacagagatagagagagacagagaaagagaaggggaggggagagcagtagagaggttggtttaaacacaggcacattcagaattgcagccaatcaaaaaagggaaaaataattttcgaagtatctatctctagtattttccaaaagatattcaccatcagaatcatctaatgatgaatccttttatagaatctcatgtggctagccttgcattttacatttgtatgtactgcggttggatgttcttctgataaagctggaagaattcccctttctgagatgtgggaatgattggaaagctctgagtggagcagcggaaatagggattctagtct

SEQ ID NO: 534450 - DNA, 515 bp, Homo sapiens
ttattacgggtgggagaattgttataccagaggcaatttagaaaatcaggtacaattgactcaagtcaatttacatactgcagtcccaacagcaaaaagtcatggtgtttcakgcctgagatagtgtaatcattaaatgagaccacctgggcaagtaactaaacccaagagagaataaaagaacagagatagagagagacagagaaagagaaggggaggggagagcagtagagaggttggtttaaacacaggcacattcagaattgcagccaatcaaaaaagggaaaaataattttcgaagtatctatctctagtattttccaaaagatattcaccatcagaatcatctaatgatgaatccttttatagaatctcatgtggctagccttgcattttacatttgtatgtactgcggttggatgttcttctgataaagctggaagaattcccctttctgagatgtgggaatgattggaaagctctgagtggagcagcggaaatagggattctagtct

SEQ ID NO: 534451 - DNA, 515 bp, Homo sapiens
ttattacgggtgggagaattgttataccagaggcaatttagaaaatcaggtacaattgactcaagtcaatttacatactgcagtcccaacagcaaaaagtcatggtgtttcaggcctgagatagtgtaatcattaaatgagaccacctgggcaagtaactaaacccaagagagaataaaagaacagagatagagagagacagagaaagagaaggggaggggagagcagtagagaggttggtttaaacacaggcacattcagaattgcagccaatcaaaaaagggaaaaataattttcgaagtatctatctctagtattttccaaaagatattcaccatcagaatcatctaatgatgaatccttttatagaatctcatgtggctagccttgcatttwacatttgtatgtactgcggttggatgttcttctgataaagctggaagaattcccctttctgagatgtgggaatgattggaaagctctgagtggagcagcggaaatagggattctagtct

SEQ ID NO: 534452 - DNA, 515 bp, Homo sapiens
ttattacgggtgggagaattgttataccagaggcaatttagaaaatcaggtacaattgactcaagtcaatttacatactgcagtcccaacagcaaaaagtcatggtgtttcaggcctgagatagtgtaatcattaaatgagaccacctgggcaagtaactaaacccaagagagaataaaagaacagagatagagagagacagagaaagagaaggggaggggagagcagtagagaggttggtttaaacacaggcacattcagaattgcagccaatcaaaaaagggaaaaataattttcgaagtatctatctctagtattttccaaaagatattcaccatcagaatcatctaatgatgaatccttttatagaatctcatgtggctagccttgcattttayatttgtatgtactgcggttggatgttcttctgataaagctggaagaattcccctttctgagatgtgggaatgattggaaagctctgagtggagcagcggaaatagggattctagtct

SEQ ID NO: 534453 - DNA, 633 bp, Homo sapiens
ctcttttctcatctcctacaacccacagaccctcacgcaaaacaggaggtaaaaatgccgttgtccttaaaataaaactcggctgtgtggctacatattttaagaaattttttatggaaaaaaagctttttataatgaaaaaaaagattacaggagttcaaataaaacctaaccagacatgaaaaayatgtgattatccttaataaatataaaagaatcaaaatctgtagataagaccaataggtagtcttccatttagtaaaatgccccattttttgactgtccaattctaccatccttctgcccttgctcaaatgccagcacgtccaggaagccgtgtcccatttatcctatgaggcattttttgttctttcacctaactcctaatatgtttttatctgagtacttttgtcaggtgtctctttcctatttgtactctgattatttgtgcatgaattttgtcttcactacagtctccttcaagaagaaattcacactttcattaatttatatatacaacattccagtcactgatggaccacgtatttattggtggtcccttaagattataatagagctgaaaattttctctctcctaatatcatagtcaccattatgtcatagtgcaacaca

SEQ ID NO: 534454 - DNA, 545 bp, Homo sapiens
taataaaagatatagttttatttatcaaattggcaaaaatttttaaatgataatatctactattagcttcagtgtggagaagttggaactctcctatcttgcttgtagsagtgataaatgttattacctttttggagtataatttggcaatagatattataatttttgtaatttaatatgcaagcttgactgcatccagcaattcatcctaaggaattaatcatgattcatgcaaatatatagcctgaaggatgtttatcacaaggctgtttatacaggaaaaaaaaaaaaaacaaacaaaaaaaaacaaagaatcgacaatagccttttcgacaggtctaacaaattatgtttcatccataaaattaaaatttaaaataactatgcactaactaaacaaattgtaggaaaacattcacattatttaaaaatactcatggaagagtaagtaaaaaagagaacatagcactattaatgaacttataaaatatatattaatgcatagaaaagagactgggtagctgtatacccaaaagtcaagagca

SEQ ID NO: 534455 - DNA, 622 bp, Homo sapiens
tgggaaatgaaagaacccttattgttatttcctccttgttcatttctttctctcccccagattgagcatgttccatgcactagggtctgccttcttgagccaaattacttgctgaaaatccattttcttctgttcatgagaatttatcatctattttttctcaatctccagaaaataaaatgggacttcttaataatttgccatttttaatcacagtggagaaaacttagttgacctagacattatgcatggcttagaaaggattasatttttttctatttctcactgatgttaaatagtttttgttgtctcctctaccagatcgacagataactagactgatatttgtactctgaaaagaaaggcacttgtgtggtggtctgagaggcaaaaaaaaaaagaaaaaaaattatctaaaatgtctatgaaaacctgtaagaggtgtctttaactagtaaatccaacgcatgtttgcctgacactagagaaatgctttattaatatatagacattaatgtgagtgaactacaaatttattaaagcaaccataaaatctagcctgaaggtgccattcagcaatcatctaaatgagtaatggaatagagcctgaggattttctact

SEQ ID NO: 534456 - DNA, 643 bp, Homo sapiens
catttaaaagccacttgtttgggagtccaaagtacttatttctgtagaactaatcatacaagtgatgttcctattttctttttagttctatttctgtctgatctagtgctaatagaaatatttcaaatatgcctccattaatgacattgtttcttcaagacagaccaattctattataaggagcaaatttcatagattctagacttacatttgcctggattgtcttctacttattagccatttgatattaagtaaactgtgcaaatttgtgcctgagatttctcatttgttaaataaagataataattatatttctggtggctgtagtgaagattaaatgagttcatatatgaaagctgctttggtgaatactatttgacacagtaggaggtacataaatttgtttgtagatgttattattgttatttttattaaaatttagagcatcaggaacctgtctgctcacacacaggcaggtttgaaaatggaaacaggcagcatattttagcagttcaccttctcaaaacaggatagttgcttgaatcatagmacacagtcagaaaaaaacataactacctacctagagaaaaggctttttttctaactgtattttcaaagtgaataaaaacgaaaacaagatacc

SEQ ID NO: 534457 - DNA, 604 bp, Homo sapiens
caataacaatagctaacacttttcagtgtgtactatgtgccaagttttagggctacaagccttatgtggattatctcatgtcatccttgcagtaaggctacgaggtagataatgttattattctttatctgatagatagacatgaacctgaggtgagcgataattttataccttgctcaaggttatccagrtgatgctaggactctaacctaaacagtcagactgcggaagctgaactcttaactactccaagacaatctttccatgtctcctaactgaaaataaagttcttcattataagtttacaatgctctttggaaaaccaaatccattgtcagatttgcttactgtctccaaaggcagtattagcctactaagaccatacctctcagttacaatctttatttgtaactgcaccattttgttctagcttttgtaaccatatcattttcttgtttttattaccttaggttttattgtactggtaaatagtactaaaattaaatattcattaatatcctgaaataaatatcactgaatgagaatgcaatggtacattgagctattcgttgtcttagagtggaatgttaaaagccattaaagg

SEQ ID NO: 534458 - DNA, 573 bp, Homo sapiens
tcagccgggattggcatggaggcaagtgaggttccccactgcagaaaatgagtgagacagaacccccagggatccatatttctgtcacagacctttgcaatcctggggaaagggaatccccccgaccaccttccccttgggcctctgcactgacactgagagcttcatggagtctgtgcaaaacttctgctcaggcccatatggatccccaagggmcttgcattcctcagcaccccagcactagctgctgtttcgttgccaacaaaagagtccaggctctctcacatacttctaggatagggtctgcatccgttgtgccgaggagcctacaatctgcaagccttacctcggctacaccccagcaggcaaagcccagtgccttgggacccccgcgcatccaccccacccctgccggctctgcacttctctgagataacagacagtcagccattttagcctctgcccctgctgccctcagtctggggagggagtgaagagcctaaggattatcacggggcctccagcacacagtaattggaaaagtggccaggctgttttctatgcaggtccctg

SEQ ID NO: 534459 - DNA, 552 bp, Homo sapiens
gattcccattctttcctatctctaaccctatagcttatctttgtgtgctcacagtttgccttcatatttttaacaaagatgacaaagaataagccaataactgtgtcctaagcagtgatctctcaaaaattctttttctatttctctccaatttctatctcctctcttgttccaaattatagttcatccttgttctctactgttcagataagacaaaacaattcaataaaaaacaayagtcacataacatttgtcttgaccctgtttctttctacctacaagtttcacatgaagtagagttagtgggagagtagagaatgaagatgagaggacttggaagctgaaaggagagaaaagaaatggatagagattgactaaaaaggattgtggagacatgaaattctgctcgaactaatcgctggtagggtgggttttatttgaggcactaagaccagtgctgattttgctttcaggggaaaaaaaaaaaatccctgaagccaagccacactggtttaaaatcagaaacttaatccaatagcaatacccataaaa

SEQ ID NO: 534460 - DNA, 524 bp, Homo sapiens
ttcccttcctctcaagggcactaatctccaagaacccaagcttgaaacttcgattatccccacatagaatgagtgagtgggttttgctgattcattttctccctctcttttcattcctgccaccattcacaagtgttctatgaacatagcctccctcccagtccaatttaatcactattgcttcgtattttacaacaaaattaatcttcctgaaacattacttagaygacatttttctggtcaaacaccttgtagaagggggagacttggctgccccctgcttagaattttaaagtgtaatctcattagcctgtcaatcaaagactctacaggatcatctactctttgcatcatttatccagttgttttcattatttatcatctgctaccatattccctaatgggatgtgttgaagaggtttccagactacatcgatttgcaaaggggaacttcttaaaaagcagaatccaagtcattggagtaaatatcctctgcatatcaactagccagtcaaatgttagca

SEQ ID NO: 534461 - DNA, 509 bp, Homo sapiens
gtgctgtaagagttgtcctcagaacaaagttaggcagagccaaatcttctcaatacacccagtttggccaaagcttgttgatttgatcttttagcccgtcattatgattaattgcgaagcgaacaattggaatgactaagcagtaatcagaagagaaacttaacagcaagaataaccaaatagcctccagcccagtcttttaaaattggatacatttgacttcacatscaggctccaggatgttttaaatctgttaaagaggcaataccataaaatatttcattggcataggtgtaaagataaccaatcgtcaattacactgaaactgatgacatctaaggtaaagttaatttttcaatttttgattgagaggatcaattcaacttattagaaatatttacatgatatttagataataggcataaacttgattgtcttttattcccacatactgtctgttattcagtagtggcggaaagggaatgtgtataaaacaaaaattctaacag

SEQ ID NO: 534462 - DNA, 509 bp, Homo sapiens
gtgctgtaagagttgtcctcagaacaaagttaggcagagccaaatcttctcaatacacccagtttggccaaagcttgttgatttgatcttttagcccgtcattatgattaattgcgaagcgaacaattggaatgactaagcagtaatcagaagagaaacttaacagcaagaataaccaaatagcctccagcccagtcttttaaaattggatacatttgacttcacatgcaggctccaggatgttttaaatctgttaaagaggcaataccataaaatatttcattggcataggtgtaaagataaccaatcgtcaattacactgaaactgatgacatctaaggtaaagttaatttttcaatttttgattgagaggatcaattcaacttattagaaatatttacatgatatttagataataggcataaacttgattgtcttttattcccacatactgtctgttattcagtagtggckgaaagggaatgtgtataaaacaaaaattctaacag

SEQ ID NO: 534463 - DNA, 630 bp, Homo sapiens
ctagggaactgataattcatgggttctttcttggcagtcagcacagcataccccagagaccactggtggcctacattcaatttaaaaccaagaacatctccttattttcagcttactccttgacttcatttggacgaatgagtctaacttgacacacctattccttgacaaactctggtggcctgaaccacagatcttctggcagcaccactgctaattgagaagcagggctgcatctgttaactacgccaactttgtgttctctgctggctccattttctcttccatcctctcccagtagctttttttaaagtgttgttctyaactcccttctccctctacactccctgccaaagagaatcaatccctttttattgtttcaaccaacaactccatgttggtgatccttaaatatttatctttaactccagtagtttttttttaacacctttacctactttcattcactattgacattttccatttccatgttcaattgtaacctcaacgaatgctttcctttaccttcaaaaattgggatcagaaatctagccacttccatcaatggcatttccaccttcctagttccacaatttaagttcattaatcaattttcacttctttagtctc

SEQ ID NO: 534464 - DNA, 463 bp, Homo sapiens
cctagggaactgataattcatgggttctttcttggcagtcagcacagcataccccagagaccactggtggcctacattcaatttaaaaccaagaacatctccttattttcagcttactccttgacttcatttggacgaatgagtctaacttgacacacctattccttgacaaactctggtggcctgaaccacagatcttctggcagcaccactgctaattgagaagcagggctgcatctgttaactacgccaactttgtgttctctgctggctccattttctcttccatcctctcccagtagctttttttaaagtgttgttctcaactcccttctccctctacactccctgccaaagakaatcaatccctttttattgtttcaaccaacaactccatgttggtgatccttaaatatttatctttaactccagtagtttttttttaacacctttacctactttc

SEQ ID NO: 534465 - DNA, 675 bp, Homo sapiens
tgcctagggaactgataattcatgggttctttcttggcagtcagcacagcataccccagagaccactggtggcctacattcaatttaaaaccaagaacatctccttattttcagcttactccttgacttcatttggacgaatgagtctaacttgacacacctattccttgacaaactctggtggcctgaaccacagatcttctggcagcaccactgctaattgagaagcagggctgcatctgttaactacgccaactttgtgttctctgctggctccattttctcttccatcctctcccagtagctttttttaaagtgttgttctcaactcccttctccctctacactccctgccaaagagaatcaatccctttttattgtttcaaccaacaactccatgttggtgatccttaaatatttatctttaactccagtagtttttttttaacacctttacctactttcattcactattgacattttccatttccatgttcaattgtaacctcaacgaatgctttcctttaccttcaaaaawtgggatcagaaatctagccacttccatcaatggcatttccaccttcctagttccacaatttaagttcattaatcaattttcacttctttagtctcaaattaatcatggaattgattcactgctacttataatacatt

SEQ ID NO: 534466 - DNA, 652 bp, Homo sapiens
tgcttagaaaatatcgagggtttggaaaggatttggattgcatttaataatataattctagcgtgtctggagaataaatggtagcaagtccagtggaagcaaggaggacaataagaaggctactgcaaaattccwagcttggtttagaatggtgaagatggatgctatgacaactgctgagtttcaaaacgtattttaaatatgaagctgacaggatttggggcatcagcaaaggagtctggaatgaatccaatatttttgctgagccatttggtgaattgcgatgtcctgaggtggaagactgttggggaagatgcaagtttgtgtctatgaatgcctgtacgtgtgtatgtgtgtgtacatgtgtatgtcccgcatgtgtgagaatgtttgaggaatcaggggttctggtttttgggcatatcttaggcccctattagtttcccagaatgaaatctccatgaaagcaaggactctgtcttgatcattgttatagcacatagaacagtgagtgagaattattagcaggcaaaaaaaaaaagtttgttgtgtgagagaatacataaataaatgtatgaatgaaaattgagatgttgtagcaatttgttctaaaaatttgaaattaaggaggagttatttgcatagagtttct

SEQ ID NO: 534467 - DNA, 498 bp, Homo sapiens
cgagggtttggaaaggatttggattgcatttaataatataattctagcgtgtctggagaataaatggtagcaagtccagtggaagcaaggaggacaataagaaggctactgcaaaattcctagcttggtttagaatggtgaagatggatgctatgacaactgctgagtttcaaaacgtattttaaatatgaagctgacaggatttggggcatcagcaaaggagtctggaatgaatccaatatttttgctgagccatttggtgaattgygatgtcctgaggtggaagactgttggggaagatgcaagtttgtgtctatgaatgcctgtacgtgtgtatgtgtgtgtacatgtgtatgtcccgcatgtgtgagaatgtttgaggaatcaggggttctggtttttgggcatatcttaggcccctattagtttcccagaatgaaatctccatgaaagcaaggactctgtcttgatcattgttatagcacatagaacagtgag

SEQ ID NO: 534468 - DNA, 473 bp, Homo sapiens
gaccttctgaaacacattaatgtacatgtgcctcataatgacacattttggccagtgatgaacygtatataggataatagtcctataagaatttctttttttcttgagacagggtctcactgtgtcacccaagctggagtgcagtggtgccatcctcctgggtcagcctttcaagtaggtgggactacaggcatgtgccactaaaccagctaattttttttttttttttttttgtattttttgtagagatagggtctccctatgttgccatgctcattttaaactcctggccctaaatgatcctcctacctgggcctccgaaagtgctgggattacgggtgtgagccaccacaacagccaagataataattaaactgaaaattttctactacctagtgatgtcatacccattataatgtgtcagtgcaacatattactcacgtgtttgtggtaatgctggtgtaaacaaacct

SEQ ID NO: 534469 - DNA, 398 bp, Homo sapiens
taaaggaattctgtaactctgaaagaccatataaatatacttcacttctttctactcttaattttaactcttaattgatataaaatgcaattgtataaaaaatatttacagaattttattgctgggactttaaaatatagacatgtagtatattccagaatgttagcacacaggcgatggttgagagaaatgatgtattgaagttaaaaaaaaatgacaagagagggggctccaagatgactgtcttaaagatatctggcactcttctcaacacatacaaaaaaacaaatttgggarttgataatcatatttcaaatagatcgtctaatcaggaacactagaattcagcagagaattaacaggaaacacctgaggcatagaaggaaagggaaaggagg

SEQ ID NO: 534470 - DNA, 573 bp, Homo sapiens
ctgctcaaatatgccacaactgcattctatactgagcactgcctcactaccaaagtaaaaagtgatccataagattgagcagaacaagttttcagtaatcaagtaacaatataagagatatagcgactcaaaactggaaacatcggcagatgtattttagcttcctttgttctttcttcaactgatatatcaaagaaggacgggttcatttgaaatgagcaagcaaatgatccttacmcaatcagggaaaaaaatgagaccatctgaggaaatattgggttaaatactagaaattaaaaggtatgtgctggagacacttataatttactaagagttacaatctttctccttcacaatatcctccctttgctttaaatcttttaaaaatgtttttctgcttgaagttcactgagtattttaaataagctatctaaaatcttaaattctatggattttaatacattcagtaatgtctgtcgccatcatcacagtcaagtttaaaaagtactttaaatttatactaaattccagtgaaatatagaaaagtaactcccatatagctgtattccgttc

SEQ ID NO: 534471 - DNA, 455 bp, Homo sapiens
atagcaaacctaaatcattacttactgagaaaacaatcattataattataactcaagttatttaaaaatatttcaaaaagggacaaggagaaaaattttaaaaaaattatagtatttaaaaacaattaaaagtgagttaagcaagagattatattgcatataaattgtttacttaatacattaagtttatttaatacattatttcttaatgtattaaacattaagcttatttaatacattaagattattttaatgtatatgaccaaattaaattttaattgttrtatcacgctccagtacccaaaattattttaagcacttaaaattggccgacatagaaatttggtgttcttgtgatccgacacatgtggccacattaaattcaaacagctgtaattttgtcttttaaagaaataaacattagaatcaattagaacacagaatggttatcatgg

SEQ ID NO: 534472 - DNA, 536 bp, Homo sapiens
tgaatgtttcaatatctatagttatagctgtctatatacatatatacatttatgtaacacctctcatttgtgtataatgttattgcagttactggtgagagtacaatgtacaaagacagaagaaagggtctttgcttccaagttggaaatgttaacaccagtaatctttttaataaatatatttctccattgacataatattcatttataggtgtttaccttttgaatttaaaatgtgtgtttaaagaatctgtataagtcaatgaaaatgaataattttacttttctatatgctgaaagatccactggttctaaggtagagagttttgaacagagtttggaacttattgaatacgaattggaatacattgaatatgaacattactaaatatatacaggtataaattctataatcacttagagaagaaaggaaaaractgtcacatgggtgaatggactcaatgacctcaatccattgttctattccattgttctaactagaacataatagcattgttattgaatacctgtgtact

SEQ ID NO: 534473 - DNA, 501 bp, Homo sapiens
tctgcttctctttttctctgtctctcatttaaaaggatgccccatcctatgaaaggatttaaaaaaataaaatgtcaacataacacagtattgtcaaaagattagcagagagagygaatacctgtctccaacgcagcattctttctctctttctccctctctcctccctctccctaacctttctctttcattgttatgtttgattttgtttttgttttttccttttactgggctgcacaactcagcaaaatgtaaacctgcttaagttagatccagctttcccataacttgttattcacaaagttttcactgctgctctgctatcactgtccccaaatctccaaacctgtacagtttcagtgcttccaaaactttgagtatatttctgtgttcctggttcaaattttcaaaagagaaatctgatgggctcagcttagattaaatgtttacccctggaccagtctactgcagcaacatatggaattaccttagaaaaacgta

SEQ ID NO: 534474 - DNA, 537 bp, Homo sapiens
actcctcgggaagggctaaggaggtcatttccaaagagaaggcatacagtttgcagaagaagtgtttcagacttctctactacatagcatatatatttatgtcacgttctaagaagcatgtaaatgttttatagcaaaattattatcatcaggactgttttaatgagcctgtgacctgtgcaatttgcacagcattctgcacagagaagagcccaacacatgtgctctgttggaatcttgttgaaattcttaatactactggaacaaatggcccctgcattttcatttcatactggactcataatttctatggttgtatctgactacagtccttgctactgaaatgcacaaatkccttaaactggacaaggctaatatgctgaaagagtgccctttttgactccttcagacttagtgccccaaagaacagaagataaaagtagtcactgacattctaaaacagtaatttaagactatgctaatacactcaatatattgaagtatcaccatttatcttaaaatgtattaaaatccaat

SEQ ID NO: 534475 - DNA, 529 bp, Homo sapiens
ctgtgtaacacatctattatttgtaacgtattatttaattgtatgaataaaacattcattgctacagtgaacatctgtgtatatgcatccttgtgcctatagcaaagagggttttgggattgatacctggactggaattgctgggttatatactttccttcagtttgcctatattttgccaaattgctctcaaaggtactgtatgacttacagtattgtattgggtaacatttactactatttgacatattacatgtttacttgtttatttgctgcctggatgcctgcattagtatgtaagcttaacaatggcagggatttttgtctcttgttcttttctttgcctggcatagaataggcagtcagtaaatatttattaartgaatggattgtttcatgaatttgatcttctcaaagctttggagtaggtagaccaaataaataggctgtaatgtctgttttcttatgcccatttctcagataaggaaactgaaacacagagaccgactgacttttttgggttacacac

SEQ ID NO: 534476 - DNA, 428 bp, Homo sapiens
ccatataaaattatgaggattaaacagagtagtataagtaaattttcttattgcctgattgatcggttgatcgtagagatgggggtctctgtgtgttgtacaggctggtctgaaactcctgggctcaagtgatccatccccttggcctcctaaagtgctgggattacaggtgtgagccactgtgcccagcccaaactcagtattttcaaaccaagcttaaatttggcttttctatcctagtccccattttttgacagttgaaytcacattcttccagtctctgagattagaaaccttgcagacatctgttaactcttttctcttcatcaaccccattttcaatctgtcattgagttcttttgttcttcagagtttctcttaaatttgtctttttctccccattctctattccatgactctagtccagt

SEQ ID NO: 534477 - DNA, 338 bp, Homo sapiens
gccaaactgacattccatgatgaaaatggactgtaatttgtacagctatttgccagttgttttttctattttgcactgtggaaatctttgcccaaattactgcaagagtctcgagcatcctgctgtcataagtgcagagtcaaaggaagaaaacgatgattttttaaaccatctttctgctttctagtctcayctgagtgcctcacatttggcagaatcaacctggaatcctgctcataagactatcagggaaatataattcccagacttccatttccagaaaaatgtaataaatacttttaaaggggatggagatggtaccgtgtgctaaccccact

SEQ ID NO: 534478 - DNA, 589 bp, Homo sapiens
tatcataatgtattttctgcactcccagagcaagataagactctagtagttgctgggaactatgcattgtctaaatatgggttcacattctctcacagtgattctggaatcatacacacaaatgagatcactgctgtcagatcactgggattaagactcaacctctctactcactggccatgtaaatatagatacagtactcagatcctctgaggcttagctaattatcagttgatttggtctacacttaccacattaattatttgaaaggattcgttgatataacatgtgctgacaaccataatcattattaaggcaatgtttaccaatatgtgactttaaaacagatactactattagataacaattcayactatacattcaatatttaaacaacagaattataattttgtgaagcaaattttgtactcaaacagaaaatccaattctataattattttctgcaatattgggtcatagaaccaacaaagaatataggactggcttagacgtatgtaattacttatgccattagttataaaattcttcactcattcctagatttgaatccctgatgctctgcgtagca

SEQ ID NO: 534479 - DNA, 581 bp, Homo sapiens
atttgaaaccagtggtgacctgaaggtaaccagagaaacaacaaaacctgaatccaactcaacttatgacaaggctgaccatcctgctcacccctcacctccagtaaaggaccagaagaggcatgcctgtttccaggtacaactactatttacctcagtttgtactgttctacttaatatatgcaacgttcagcattcaacycaaaattactagacacccccaactaaaaaaaaacacgaaaaacaatctactattgaaagataaagcaatcacagaaccagattagctcatcagcttagaggatctgaggctaatgagaacaggaatggagtttgaatacctgacaaatatattatctttgctttattcttagccactgacaactaagacatcatggttgaagatcttgcaaatccattccactgacactggactatcttcatatatattatgtcatacactcattgacttcattcttataaaactagagttaagtaaaatagtttttgcttaccaacaggaaatgtaggttaagaagaaattaggtgcctcccactgttcatgtactaacaggtgtaaa

SEQ ID NO: 534480 - DNA, 581 bp, Homo sapiens
atttgaaaccagtggtgacctgaaggtaaccagagaaacaacaaaacctgaatccaactcaacttatgacaaggctgaccatcctgctcacccctcacctccagtaaaggaccagaagaggcatgcctgtttccaggtacaactactatttacctcagtttgtactgttctacttaatatatgcaacgttcagcattcaacccaaaattactagacacccccaactaaaaaaaaacacraaaaacaatctactattgaaagataaagcaatcacagaaccagattagctcatcagcttagaggatctgaggctaatgagaacaggaatggagtttgaatacctgacaaatatattatctttgctttattcttagccactgacaactaagacatcatggttgaagatcttgcaaatccattccactgacactggactatcttcatatatattatgtcatacactcattgacttcattcttataaaactagagttaagtaaaatagtttttgcttaccaacaggaaatgtaggttaagaagaaattaggtgcctcccactgttcatgtactaacaggtgtaaa

SEQ ID NO: 534481 - DNA, 581 bp, Homo sapiens
atttgaaaccagtggtgacctgaaggtaaccagagaaacaacaaaacctgaatccaactcaacttatgacaaggctgaccatcctgctcacccctcacctccagtaaaggaccagaagaggcatgcctgtttccaggtacaactactatttacctcagtttgtactgttctacttaatatatgcaacgttcagcattcaacccaaaattactagacacccccaactaaaaaaaaacacgaaaaacaatctactattgaaagataaagcaatcacagaaccagattagctcatcagcttagaggatctgaggctaatgagaacaggaatggagtttgaatacctgacaaatatattatctttgctttattcttagccactgacaactaagacatcatggttgaagatcttgcaaatccattccactgacactggactatcttcatatatattatgtcatacactcattgacttcattcttataaaactagagttaagtaaaatagtttttgcttaccaacaggaaatgtaggttaagaagaaattaggtgcctcccrctgttcatgtactaacaggtgtaaa

SEQ ID NO: 534482 - DNA, 618 bp, Homo sapiens
ataaaggggaggaggcaaggccaggaggagccccaccaagagactgctggtgtgctggtttgcgcaayaggtagtagggactcagatgaggcctgagtgattccagaccagcaggcactgactttccattttggtttcacagtaattgaggttcagctaggggaaggtaaacagggatgccacatgccccgcagcatgtgggatatggtacataatgagaaactgtcctgagaaaaatgtcaacaatgcccctgctgggatacactggactaagatgttagcagtggagatggaaaaaagtggatgaatttgtgatatagttctgaatgaaaattcctaggacttgctaatagattagataggggaggtagggaagagaaaatgatgcaacgattgtgcccaggtttccagcctaaataattgggtagatggtgtgccattttccagaaagtataaaaacgaagagaactagatttgagtgtggttttaggaaaaacaagagtctattgtgggtatgtttaaatgtgagatggacatcaagcaaagaatttgatacctgactactggagcctggaggagaaaatcagggtgaagatgttaagtacaaatacgaaaaca

SEQ ID NO: 534483 - DNA, 618 bp, Homo sapiens
ataaaggggaggaggcaaggccaggaggagccccaccaagagactgctggtgtgctggtttgcgcaacaggtagtagggactcagatgaggcctgagtgattccagaccagcaggcactgactttccattttggtttcacagtaattgaggttcagctaggggaaggtaaacagggatgccacatgccccgcagcatgtgggatatggtacataatgagaaactgtcctgagaaaaatgtcaacaatgcccctgctgrgatacactggactaagatgttagcagtggagatggaaaaaagtggatgaatttgtgatatagttctgaatgaaaattcctaggacttgctaatagattagataggggaggtagggaagagaaaatgatgcaacgattgtgcccaggtttccagcctaaataattgggtagatggtgtgccattttccagaaagtataaaaacgaagagaactagatttgagtgtggttttaggaaaaacaagagtctattgtgggtatgtttaaatgtgagatggacatcaagcaaagaatttgatacctgactactggagcctggaggagaaaatcagggtgaagatgttaagtacaaatacgaaaaca

SEQ ID NO: 534484 - DNA, 577 bp, Homo sapiens
gagactgctggtgtgctggtttgcgcaacaggtagtagggactcagatgaggcctgagtgattccagaccagcaggcactgactttccattttggtttcacagtaattgaggttcagctaggggaaggtaaacagggatgccacatgccccgcagcatgtgggatatggtacataatgagaaactgtcctgagaaaaatgtcaacaatgcccctgctgggatacactggactaagatgttagcagtggagatggaaaaaagtggatgaatttgtgatatagttctgaatgaaaattcctaggacttgctaatagattagataggggaggtagggaagagaaaatgatgcaacgattgtgcccaggtttccagcctaaataattgggtagatggtgtgccattttccagaaagtataaaaacgaagagaactagatttgagtgtggttttaggaaaaacaagagtctattgtgggtatgtttaaatgtgagatggayatcaagcaaagaatttgatacctgactactggagcctggaggagaaaatcagggtgaagatgttaagtacaaatacgaaaa

SEQ ID NO: 534485 - DNA, 598 bp, Homo sapiens
tgtctttttagtttctcacttcaggccataaatctaatttactacacctgctcatctccttagtttctttcactaragattttttttttttttttggtggaaaatcatcaaacatctcagtaaatctgtaaagacagaacatcactagctagaactaaagcatatattccaagttactgcttaaaaccaatcactaaaatagctttcttgtcttattacaaaatacctgattagaaaagtaagctaagagaagccaagtaaataaacatatagcagccataatctcaacaccctaaataagcagttaacattttagcggacaaccagttgtttgggattttatttattgggattcccttaataagtcaaatatagttttatatgtatgtattattctacattgcttttaaatattacataatatgccattgtccagatacaccaaaatcttaaaaattattacagcaaacctctattttgagggactctggttgttttttatttttcacaattatacatgataccatgataaacccattttcagctacatctttatacatagttatgataagttcctagagctaaaattattgggcta

SEQ ID NO: 534486 - DNA, 597 bp, Homo sapiens
gtctttttagtttctcacttcaggccataaatctaatttactacacctgctcatctccttagtttctttcactaaagattttttttttttttttggtggaaaatcatcaaacatctcagtaaatctgtaaagacagarcatcactagctagaactaaagcatatattccaagttactgcttaaaaccaatcactaaaatagctttcttgtcttattacaaaatacctgattagaaaagtaagctaagagaagccaagtaaataaacatatagcagccataatctcaacaccctaaataagcagttaacattttagcggacaaccagttgtttgggattttatttattgggattcccttaataagtcaaatatagttttatatgtatgtattattctacattgcttttaaatattacataatatgccattgtccagatacaccaaaatcttaaaaattattacagcaaacctctattttgagggactctggttgttttttatttttcacaattatacatgataccatgataaacccattttcagctacatctttatacatagttatgataagttcctagagctaaaattattgggcta

SEQ ID NO: 534487 - DNA, 597 bp, Homo sapiens
gtctttttagtttctcacttcaggccataaatctaatttactacacctgctcatctccttagtttctttcactaaagattttttttttttttttggtggaaaatcatcaaacatctcagtaaatctgtaaagacagaacatcactagctagaactaaagcatatattccaagttactgcttaaaaccaatcactaaaatagctttcttgtcttattacaaaatacctgattagaaaagtaagctaagagaagccaagtaaataaacatatagcagccataatctcaacaccctaaataagcagttaacattttagcggacaaccagttgtttgggattttatttattgggattcccttaataagtcaaatatagttttatatgtatgtattattctacaktgcttttaaatattacataatatgccattgtccagatacaccaaaatcttaaaaattattacagcaaacctctattttgagggactctggttgttttttatttttcacaattatacatgataccatgataaacccattttcagctacatctttatacatagttatgataagttcctagagctaaaattattgggcta

SEQ ID NO: 534488 - DNA, 611 bp, Homo sapiens
tgtctttttagtttctcacttcaggccataaatctaatttactacacctgctcatctccttagtttctttcactaaagattttttttttttttttggtggaaaatcatcaaacatctcagtaaatctgtaaagacagaacatcactagctagaactaaagcatatattccaagttactgcttaaaaccaatcactaaaatagctttcttgtcttattacaaaatacctgattagaaaagtaagctaagagaagccaagtaaataaacatatagcagccataatctcaacaccctaaataagcagttaacattttagcggacaaccagttgtttgggattttatttattgggattcccttaataagtcaaatatagttttatatgtatgtattattctacattgcttttaaatattacataatatgccattgtccagatacaccaaaatcttaaaaattattacagcaaacctctattttgagggactctggttgttttttatttttcacaattatacatgataccatgataaacccattttcagctacatctttatacatagytatgataagttcctagagctaaaattattgggctaaaagtacccccaa

SEQ ID NO: 534489 - DNA, 623 bp, Homo sapiens
ctgcacatttatggcccaactgaaacaaatttgtgttaaagttctgaccacatatatctggctgatgtttaggctgttcatctctaattttattttcactgagaagctttgatacttttcttcttcggttaaatgcggaactgtgcttttaaatccacatatttgcatattagagctagttatgtcactcagtctagaggagtgaatcttctgggattctatattctgtgtttcagaaacagaaygtacaaagtcatctttcacatgaacatgtctattcatacagtttgctaagaaatgaccacaaagatctggagaaccaatagaatctgggacttcatagttttcaagatttttgtgctgtttttcatccttcagatataaagaatgttgactgtataaaagctgaatttttttccaggggtcagcaacagacattaaagaagctgtgtcttctgatactgtcattttcagtgaagcaactggagcaccccaaaaaatgtggacttgagatcctccactcatgatttctgataaaaatgaaaaatccaaaattaatatattgtcagcatatttttgcatatggatattaacttaataatgtaccaaaagaaaatataact

SEQ ID NO: 534490 - DNA, 623 bp, Homo sapiens
ctgcacatttatggcccaactgaaacaaatttgtgttaaagttctgaccacatatatctggctgatgtttaggctgttcatctctaattttattttcactgagaagctttgatacttttcttcttcggttaaatgcggaactgtgcttttaaatccacatatttgcatattagagctagttatgtcactcagtctagaggagtgaatcttctgggattctatattctgtgtttcagaaacagaatgtacaaagtcatctttcacatgaacatgtctattcatacagtttgctaagaaatgaccacaaagatctggagaaccaatagaatctgggacttcatagttttcaagatttttgtgctgtttttcatccttcagatataaagaatgttgactgtataaaagctgaatttttttccaggggtcagcaacagacattaaagaagctgtgtcttctgatactgtcattttcagtgragcaactggagcaccccaaaaaatgtggacttgagatcctccactcatgatttctgataaaaatgaaaaatccaaaattaatatattgtcagcatatttttgcatatggatattaacttaataatgtaccaaaagaaaatataact

SEQ ID NO: 534491 - DNA, 349 bp, Homo sapiens
agttgacaaaaggaacttgccccaggtcaggaagcctgcaggtagtggagggagtactggcatgtaggaaatcaaacagcaraacataagttcttaactaccacactgactctctggttttttgcctttgcccaatgtggagctagaatccaagttagaacactgccattgagtcatatgacatatgctcctaaagcactgatttatctaaagaggtatgaaaagaataaaacttcagcataaaggagcttccttatcaaagaattcccataagaaagttcattataacttaatgatggggtaaataactggtttttaagaagacttctctccttttaaaaatttattt

SEQ ID NO: 534492 - DNA, 349 bp, Homo sapiens
agttgacaaaaggaacttgccccaggtcaggaagcctgcaggtagtggagggagtactggcatgtaggaaatcaaacagcagaacataagttcttaactaccacactgactctctggttttttgcctttgcccaatgtggagctagaatccaagttagaacactgccattgagtcatatgacatatgctccyaaagcactgatttatctaaagaggtatgaaaagaataaaacttcagcataaaggagcttccttatcaaagaattcccataagaaagttcattataacttaatgatggggtaaataactggtttttaagaagacttctctccttttaaaaatttattt

SEQ ID NO: 534493 - DNA, 349 bp, Homo sapiens
agttgacaaaaggaacttgccccaggtcaggaagcctgcaggtagtggagggagtactggcatgtaggaaatcaaacagcagaacataagttcttaactaccacactgactctctggttttttgcctttgcccaatgtggagctagaatccaagttagaacactgccattgagtcatatgacatatgctcctaaagcactgatttatctaaagaggtatgaaaagaataaaacttcagcrtaaaggagcttccttatcaaagaattcccataagaaagttcattataacttaatgatggggtaaataactggtttttaagaagacttctctccttttaaaaatttattt

SEQ ID NO: 534494 - DNA, 606 bp, Homo sapiens
gatttttgtattttttgtagagacagggtctcaccatgtttcccaggctggtcttaagcccctgggctcaagcaatcacctgcctcagcctcccaaagtgctgggattacaggcatgagccactgtgtatagcctcacatagattaagtgaggtcactgtatgtgaggtcattgtataatatttttcaaaaatgttattttacwtccaagaaattataaatacaattagttatatctactcctgtcactttaaactttattatatcaatttttattcacaaaaacatgcattatttcagacattataattaatgaaacaatttttattcatttgctttaagttcatttcaaatccaagattcatattataaaaccactctccctccctgaactacacatctctagttaaatttagattcaataatgtttccatggaaataacaaaactcaagtcctctgtattagtaaactgtgtaataaaataggaaatttactaaggaagagcaaagcaggagccctgtatgtcacttttagataactatcctcaatctaaactaaacactttcaattccaagcgtatttcaaagttttaggagaagcaggtgg

SEQ ID NO: 534495 - DNA, 606 bp, Homo sapiens
gatttttgtattttttgtagagacagggtctcaccatgtttcccaggctggtcttaagcccctgggctcaagcaatcacctgcctcagcctcccaaagtgctgggattacaggcatgagccactgtgtatagcctcacatagattaagtgaggtcactgtatgtgaggtcattgtataatatttttcaaaaatgttattttacttccaagaaattataaatacaattagttatatctactcctgtcactttaaactttattatatcaatttttattcacaaaaacatgcattatttcagacattataattaatgaaacaatttttattcatttgctttaagttcatttcaaatccaagattcatattataaaaccactctccctccctgaactacacatctctagttaaatttagattcaataatgtttccatggaaataacaaaactcwagtcctctgtattagtaaactgtgtaataaaataggaaatttactaaggaagagcaaagcaggagccctgtatgtcacttttagataactatcctcaatctaaactaaacactttcaattccaagcgtatttcaaagttttaggagaagcaggtgg

SEQ ID NO: 534496 - DNA, 607 bp, Homo sapiens
ggctaattcagaaccccaatggattggcctggctaactacaacctggccttcccagctcagaaggaaggaagggctctgaggggrgtactgggggaaagaggcttccacactgcctgtcacagtgctgtggactgggccagaggaggggcctcccagggagccaggggtgaggaggaaggggcagggctctgcttccaatgggggctcttccccttcctgtgcatgtactcacaggtggacccctaacttctttgagcctcagtttcttcaatctgcaaaacagaaataaatccccaccctgcagggttgttgtgaagaccaaatgtgacagcatgtgcactgtctgcaatagtgtttgttaacaataatcttctctttcccctcccatcaagagcagcttaagttcatggtataacaagtattagtactgggggccagagaggcccttttcagaagccatcaagacaccccaaaggttagcctcctctagcttcccatcctcgctaccttcatcccatcctaggaccaggtcaccatcagtgtccccagtctccctatcaccaaactaggtttcccagagcctattttaaatgttaacctaggagg

SEQ ID NO: 534497 - DNA, 607 bp, Homo sapiens
ggctaattcagaaccccaatggattggcctggctaactacaacctggccttcccagctcagaaggaaggaagggctctgaggggagtactgggggaaagaggcttccacactgcctgtcacagtgctgtggactgggccagaggaggggcctcccagggagccaggggtgaggaggaaggggcagggctctgcttccaatgggggctcttccccttcctgtgcatgtactcacaggtggacccctaacttctttgagcctcagtttcttcaatctgcaaaacagaaataaatccccaccctgcagggttgttgtgaagacyaaatgtgacagcatgtgcactgtctgcaatagtgtttgttaacaataatcttctctttcccctcccatcaagagcagcttaagttcatggtataacaagtattagtactgggggccagagaggcccttttcagaagccatcaagacaccccaaaggttagcctcctctagcttcccatcctcgctaccttcatcccatcctaggaccaggtcaccatcagtgtccccagtctccctatcaccaaactaggtttcccagagcctattttaaatgttaacctaggagg

SEQ ID NO: 534498 - DNA, 607 bp, Homo sapiens
ggctaattcagaaccccaatggattggcctggctaactacaacctggccttcccagctcagaaggaaggaagggctctgaggggagtactgggggaaagaggcttccacactgcctgtcacagtgctgtggactgggccagaggaggggcctcccagggagccaggggtgaggaggaaggggcagggctctgcttccaatgggggctcttccccttcctgtgcatgtactcacaggtggacccctaacttctttgagcctcagtttcttcaatctgcaaaacagaaataaatccccaccctgcagggttgttgtgaagaccaaatgtgacagcatgtgcactgtctgcaayagtgtttgttaacaataatcttctctttcccctcccatcaagagcagcttaagttcatggtataacaagtattagtactgggggccagagaggcccttttcagaagccatcaagacaccccaaaggttagcctcctctagcttcccatcctcgctaccttcatcccatcctaggaccaggtcaccatcagtgtccccagtctccctatcaccaaactaggtttcccagagcctattttaaatgttaacctaggagg

SEQ ID NO: 534499 - DNA, 521 bp, Homo sapiens
ccaagacctctagtattctttgaacgataccttaatgttctctctcctgccccatttgatgccgaagttgctatggttgtggccgatgtcccgtggccaatgccaggctgtcctgctgcctcaggttccacctgtcagcaactggaagatcaaccacctatgtagcaatcaaccaatgtcattttgagtaaaagcccccagttctcagacacttccagactagcccaaacatagagacctttgagtcaacgtacagagtccagctcccgccatgctgccacagcagaggagcccaggcctttgggatatgcccaggggactaccaagaccaccacaagtgggctccatctcagacaacactgtggcatccatctaagtcccctcttggttttgttcgttcgtttgtttgtgagacagagtctcgctctgtctcccaggctcgagtacaatggctcagtctcggctcactgcaacctctgcctccygggttcacgtgattctcttgtcttagtctcccggca

SEQ ID NO: 534500 - DNA, 366 bp, Homo sapiens
cacacttaaattccaatctcaactcccccacatattcrctggctgtgcaaccccacacccaagcaaaactgttcatctctctgggcatcagtttcctcatctgcagagtggtagtaattatacctacctaacagggctgggggaagagggtgtttgtgaacgtgtcccgtggagtgttatcgctgctatcagtcacttgatcaaatatttactgagctcctcctgggtcaggtcctggaggtacaagctgcactgcatgggggaaggaagggatggatatgtgtagattgctttggtagagagcagctcaggcctgaggaccacatgggccaactaccatttgctgagactctgaaccctgacaga

SEQ ID NO: 534501 - DNA, 613 bp, Homo sapiens
agacagttttccccagcagggaggttgaagcctgagtgaccagaaacaagtatccactrcacattgtaacgaactgagcacatttgactgctagggagaagtacccattgagaaggagtggacaggagatacaggagccagaattgctactggcaataaggtcctcaatgggctgagattcaggagttcaataggaggaaagaggtgacttctttatgtaatagcagagcaagaagaaatgatgggggtagtactgaggtaccgtagtctctctcctcttgggaaagaaagttgctggcaaccttaaatctacatcctcacatctctggatctaaacaacccacaaatcaagtcttactgcccctacttgacaatcctggaccagagagagagctcttcaattgaccagcctgtgtcactgctcttcccaaaatggtggggccctgcagtagggctgacagtgggtcacagagactagtgaagagtggttccccaaaggaaagggcaagacactgttgccagactaagggaacctgatactgagctgtcccaaagcacaaattaccgctggggacagcctctgtgcaagctttgaggaaatgctaagttggga

SEQ ID NO: 534502 - DNA, 613 bp, Homo sapiens
agacagttttccccagcagggaggttgaagcctgagtgaccagaaacaagtatccactgcacattgtaacgaactgagcacatttgactgctagggagaagtacccattgagaaggagtggacaggagatacaggagccagaattgctactggcaataaggtcctcaatgggctgagattcaggagttcaataggaggaaagaggtgacttctttatgtaatagcagagcaagaagaaatgatgggggtagtacygaggtaccgtagtctctctcctcttgggaaagaaagttgctggcaaccttaaatctacatcctcacatctctggatctaaacaacccacaaatcaagtcttactgcccctacttgacaatcctggaccagagagagagctcttcaattgaccagcctgtgtcactgctcttcccaaaatggtggggccctgcagtagggctgacagtgggtcacagagactagtgaagagtggttccccaaaggaaagggcaagacactgttgccagactaagggaacctgatactgagctgtcccaaagcacaaattaccgctggggacagcctctgtgcaagctttgaggaaatgctaagttggga

SEQ ID NO: 534503 - DNA, 613 bp, Homo sapiens
agacagttttccccagcagggaggttgaagcctgagtgaccagaaacaagtatccactgcacattgtaacgaactgagcacatttgactgctagggagaagtacccattgagaaggagtggacaggagatacaggagccagaattgctactggcaataaggtcctcaatgggctgagattcaggagttcaataggaggaaagaggtgacttctttatgtaatagcagagcaagaagaaatgatgggggtagtactgaggtaccgtagtctctctcctcttgggaaagaaagttgctggcaaccttaaatctacaycctcacatctctggatctaaacaacccacaaatcaagtcttactgcccctacttgacaatcctggaccagagagagagctcttcaattgaccagcctgtgtcactgctcttcccaaaatggtggggccctgcagtagggctgacagtgggtcacagagactagtgaagagtggttccccaaaggaaagggcaagacactgttgccagactaagggaacctgatactgagctgtcccaaagcacaaattaccgctggggacagcctctgtgcaagctttgaggaaatgctaagttggga

SEQ ID NO: 534504 - DNA, 547 bp, Homo sapiens
tacttgacaatcctggaccagagagagagctcttcaattgaccagcctgtgtcactgctcttcccaaaatggtggggccctgcagtagggctgacagtgggtcacagrgactagtgaagagtggttccccaaaggaaagggcaagacactgttgccagactaagggaacctgatactgagctgtcccaaagcacaaattaccgctggggacagcctctgtgcaagctttgaggaaatgctaagttgggatgtatcaatgcctaaggaagagagagctttgattcagttaaacagcatctgcttttctagcaaaatatctctagggtacaagagacccctctagccaaaagagccataaatgaaaaggctgtctttttgtctgacaaaaagacactgactccctgggacttagcatataatagatgtttgctggctggctggctggctggatgaatgaatgaatgaatggaaggcagttgattcagaaatgcctattactacctcaatttagttccacagacattttcctgagtccctaataataatt

SEQ ID NO: 534505 - DNA, 492 bp, Homo sapiens
caagctgacaatataggctaaatcagaggtgccttggccccaaagcctacatgatgggggattcaggggacctgagacagatgcccaaaggacaattaggtcacaaggattgaagggaatagaaggggctggagtgctcagaggagaggcattgtagtagacatctgttgctttttcagctccccacaatccagcccccatttcatttgggggatcatcccgagacagagactgctaattgtcccccaatacttattgtccccttctatagtaatagaattcctctaactgagtacataactgcccagaataatgaccacatttcccaggcatcgtgcacccaacatgctgtagattargttctcagcagtgagatgttagcagaagtaatttttgcaatttctcggtcatgcacttcagaagaaatgtgcctcgcccctttccctctcccctggtaggaatgaagtcatggtgtgaagccagtttatatca

SEQ ID NO: 534506 - DNA, 660 bp, Homo sapiens
tccatggacaagagtttaaggaacaaggacagtgccaagttaactgtactagccattactgttttgttttgttttgttttgttttgtttttgagactgaggctckctctattgcccaggctggagtgcagtggcgcaatctcggctcactgcaacctctgcctcccaggttcaagtgattctcctgcctcagcctcctgagtagctgggattacaggcccccaccatcacgcctggctgatttttgtatttttagtagagacagggtttcaccatgttggccaggctggtctcaaactcttgacctcaaaagatctgcccacctcggcctcccaaactgctgggattacaggtgtgagcccacctgccattactgttattacggctcccaaaagttgcccacaaattccaggttcaagtcatagtaaactaaggtagggccactgcccagctcctaaccactcactgaggcttgcagcatgtgatgctctgactggccaggtctggatcaaatctagctctggagttaaaagagaaatgggaccactgaattttgtcaccagaagcagcaagaatagatgctgagcaggcaaaaacaacaaatgtcctctgcaatctgcagcattggttgttgaatgttacacatacccctcttgacata

SEQ ID NO: 534507 - DNA, 569 bp, Homo sapiens
agctcatcccaatggcaagagcccttcatctgccattcagcacagcctcagccctggaggtggatagtggcgatgccaagctgaataagacacggccccctgccttcatggaggccctcggctgccaggaagagtgaggcagcagtctcaggcacagagtcccatattcggcatggtagctgcaaggaccatgaggacaaggaggggatgatgaagggtttcacagaaggcaagatgctgggggttcatcttgaaacatgagcagtggagaaggagggtgggaggggcattgagtatttcagacagggagagagcagcatggtgggagagcccagtgcatamgcagagccgtggaagtagctgcatcagtctgggcacaagcactgcatagagatgggtggtgggggggatgagaatgggaggggagcctggaagacaacagctgggaaggggagtgggtgcagcatggaatctgaagagctgagaggaggcccatgcagagctccagatgagaggtgatgaagggctgggcaaggttttttgccatgatagagatgggcagaggagga

SEQ ID NO: 534508 - DNA, 569 bp, Homo sapiens
agctcatcccaatggcaagagcccttcatctgccattcagcacagcctcagccctggaggtggatagtggcgatgccaagctgaataagacacggccccctgccttcatggaggccctcggctgccaggaagagtgaggcagcagtctcaggcacagagtcccatattcggcatggtagctgcaaggaccatgaggacaaggaggggatgatgaagggtttcacagaaggcaagatgctgggggttcatcttgaaacatgagcagtggagaaggagggtgggaggggcattgagtatttcagacagggagagagcagcatggtgggagagcccagtgcatacgcagagccgtggaagtagctgcatcagtctgggcacaagcactgcakagagatgggtggtgggggggatgagaatgggaggggagcctggaagacaacagctgggaaggggagtgggtgcagcatggaatctgaagagctgagaggaggcccatgcagagctccagatgagaggtgatgaagggctgggcaaggttttttgccatgatagagatgggcagaggagga

SEQ ID NO: 534509 - DNA, 569 bp, Homo sapiens
agctcatcccaatggcaagagcccttcatctgccattcagcacagcctcagccctggaggtggatagtggcgatgccaagctgaataagacacggccccctgccttcatggaggccctcggctgccaggaagagtgaggcagcagtctcaggcacagagtcccatattcggcatggtagctgcaaggaccatgaggacaaggaggggatgatgaagggtttcacagaaggcaagatgctgggggttcatcttgaaacatgagcagtggagaaggagggtgggaggggcattgagtatttcagacagggagagagcagcatggtgggagagcccagtgcatacgcagagccgtggaagtagctgcatcagtctgggcacaagcactgcatagagatgggtggtgggggggatgagaatgggaggggagcctggaagacaacagytgggaaggggagtgggtgcagcatggaatctgaagagctgagaggaggcccatgcagagctccagatgagaggtgatgaagggctgggcaaggttttttgccatgatagagatgggcagaggagga

SEQ ID NO: 534510 - DNA, 569 bp, Homo sapiens
agctcatcccaatggcaagagcccttcatctgccattcagcacagcctcagccctggaggtggatagtggcgatgccaagctgaataagacacggccccctgccttcatggaggccctcggctgccaggaagagtgaggcagcagtctcaggcacagagtcccatattcggcatggtagctgcaaggaccatgaggacaaggaggggatgatgaagggtttcacagaaggcaagatgctgggggttcatcttgaaacatgagcagtggagaaggagggtgggaggggcattgagtatttcagacagggagagagcagcatggtgggagagcccagtgcatacgcagagccgtggaagtagctgcatcagtctgggcacaagcactgcatagagatgggtggtgggggggatgagaatgggaggggagcctggaagacaacagctgggaaggggagtgggtgcmgcatggaatctgaagagctgagaggaggcccatgcagagctccagatgagaggtgatgaagggctgggcaaggttttttgccatgatagagatgggcagaggagga

SEQ ID NO: 534511 - DNA, 547 bp, Homo sapiens
cagccatgtcacttggtgctccggttaaacggcagattccaattcatgaatctgggctggggcccaagatcctgcatttctaacagggctccaagtggtggtagacgctacaggtcctcggaccacactctgtgtaccaaggtcctggcacctacccccactttccaggggtacacggctctgctgctgagaagggtcccctgaaaatgcctaggtttgggggatgtgggtccctggttgagacacccgttcccaaaagcacccatgtccagaataacaagtcacaccatcccatcccctacccccacgcctgactctggctggtgtccttgtcccccccaggtgtccagcaagaccatcacccagagggtgctgaagttctccgtctaccacgtggacaggcagaggaagcaccagctcctgggccaggtgctcttccccttgaagaatgagaccctagtgggggactgccggcgtgtcatctggagagacctggaggcygagagcctggaggtatggtcaaggtcaccatgcctatgccactgag

SEQ ID NO: 534512 - DNA, 640 bp, Homo sapiens
agtaaccttaattacatatacctacacagcagaatctaggttagcatttaattgaataactgcgcgatgggaatcttcagaggatgcgtttagaattctccttaccaggttgtcatttaccttatttgactgtatatgcctctttagcaaagacttaaacatttaagtgccaggtctctctttgggggataaacattctcayggttgagtgagtagaccctagaatccaactatttggatcaaatttatttctgcaccacttcttgctgggtgacatagggcaaattatttaacctgtgattcagtttctccaactataagtgggaataataaaatctatttcagaggtgaagatttaatagcacacaataagttttagtcattggcattgttacctttagcacctaacaccatgtttggcatatagaaaacagtcaataagtagtagccataatttttattattggggcatactgtaatttctgcagtggcacccatgacccttcatcgtccttgtttgttgacatagccctctccctctcctagactgtaaatgtcctgaattttggtattatctagttttactttttgctcccataacctagcaaagaatccagcatgctataggtgcaataggaac

SEQ ID NO: 534513 - DNA, 444 bp, Homo sapiens
gggtggagagaggggttggtctaamccctaccctacccggcgggtgggctacttacgtttttgccgtgggggagacttttccacgccttgttctgtgggctcttaaatgcatttgtatgcatttgtccgtgcagcaaagcgctaacggaaaacagaagccaactctgaactgcttagggtgcaggtactgtccatgaaaaagggaaaaaacaatcacatgaaaaccatgcttcaaacccgcaacaagaaaaaaaggaggggagggggtgaagtcgggaggaggtaggaaatagcacccgaaggggaggacaggcttcctagctctctggctcggtaacgaacgagcccagggttgcgctccccggggagggcgggcgaggaggtaaacctcactgggaggcctcggggcgccggcggcagcgggagccgggctgctagtgcagc

SEQ ID NO: 534514 - DNA, 621 bp, Homo sapiens
aaaatgaggataacactacaaactttacaaagttattttaagataatatatgtaaagagactggtagagcatctttctcaaggaactcaataaatgatagctattatgctatcataaaaaaaactcacctactcctctcacctgtcaaaatcttacccattcttagagcctaggtcataactaactttgtccacaagatcttattctgaatagctcagctttaagtgacctttcatagagactccatcaaaaaatactatttttttaacctttgaacatctctagcccatacacttactttgcatctctctgcagcatttatcctactttactacaagatatattaaatagttataaatgaacttcctttatcttcattatgaaatataagmtttttctgagcaaattctgagttatacatacttggtgttcctgctttgcttatagcagagactaagtgaatatctgatgaatattactgcttcacctgccaatactgaatgactattattgaattacagaagagattaatgctcatctgatcagactgactttttctgaagaaagcaaatggcttccataactatttgctgaatattatatgtccagggattcaaattt

SEQ ID NO: 534515 - DNA, 613 bp, Homo sapiens
tcataagcactcggaaaggtgtttgaaggtacaaaatttaatacataccagttagttgtacctcaytgtttatgttatttatatcctctatattcttgtttatttttgtacaattaatctgccatcaactgagagataaagtatcttaccagtagtgtgtctatttggccttttctctcttgtggtctttgctttatgaatattgatgtcatggtttttatgcatagataatcatgcagttcacatatttattgagtactgcacctttcagaattacaaaaagaccttctatgtctagtttattgggttttatatttttggcattaccttaactggtagtaagactaagcttccctcatctgactttctttttgtttacatttgtctgatatacctttgcctttgtttttgttttcatctactgtgaaacactatgttttaggtaaagacaaagggattgtatttgttttttgatccagtctgaattgttttctttgaatgtataaactaaatctatctacatttgctaatattatggtttgtttaatctgttgtattattttatgttttaccactttaattttttgaagtctttcactatgtagtttgtttc

SEQ ID NO: 534516 - DNA, 568 bp, Homo sapiens
ataactaaaccatatattctaatgaggcctatgaaacattcttatatatggcattattcatgtagatggatggttcccaaatgttagactcacctgaggaacttgtaaaaaatgcagattttgggccctgacacagagattatgatttcaaaatttgcgatggatatgcaggatgcatacattttaactaggtgattctagtgcagattgtacgtgtgccaacctctgaaaaaaaactatttagaacattcactgtgtttatatttacaatgttattaaaatacatctaaattgattttacttttgcttaaatcacatatatctaattttataacatgacatgaccctaaaatattrtttggcccttttaaaatcctttcctactgcactaggtcagtggttttcaaactttagtgtgatcagaatcgcatgaagcacttgtgagcaatcactgggcctcacccccagaatttctaactaagtatgtctggggtggggctcaagaatatgcatttataacaagttcctgggtgtactgacgctactgatctgggactacattctgagg

SEQ ID NO: 534517 - DNA, 568 bp, Homo sapiens
ataactaaaccatatattctaatgaggcctatgaaacattcttatatatggcattattcatgtagatggatggttcccaaatgttagactcacctgaggaacttgtaaaaaatgcagattttgggccctgacacagagattatgatttcaaaatttgcgatggatatgcaggatgcatacattttaactaggtgattctagtgcagattgtacgtgtgccaacctctgaaaaaaaactatttagaacattcactgtgtttatatttacaatgttattaaaatacatctaaattgattttacttttgcttaaatcacatatatctaattttataacatgacatgaccctaaaatattatttggcccttttaaaatcctttcctactgcactaggtcagtggttttcaaactttagtgtgatcagaatcgcatgaagcacttgtgagcaatcactgggcctcacccccagaatttctaactaagtatgtctggggtggggctcaagaatatgcatttataacaagttcctgggtgtactgacgctacygatctgggactacattctgagg

SEQ ID NO: 534518 - DNA, 655 bp, Homo sapiens
aatgtgataagatgttaatatttggagaatctgggtaaagaatatatgggaatgctttatactcttcttgcaaattctttaagtttgaaattattttaaaccaaatggttttttaaaaaattatgcatagaataacccaaacyttctgaaagtcaagggttacacacaaaataaatttgtgtgtatctgtatgtgtttttgggagagggagaatagttcagaataattagaacacgttgagaatttagaattctcttccatttagtccagtgaggatcttaaaaaaacctaagaagtactacgtacatatataattttagaccgcattttcagcccaggcaagagtcagagctcatacaactttgtggagggtgaaaagaaccctgccacaaatgtgctacagagcccgcatcatctccacaacaaaacacccgacacccgaggttcaaaaatctacttcatcaaagatcaagaataactctggttagaactgttaaatcagtggaaagttaatgaacatggaggatgaagtccagaaagtgctgtctgcagtgtttggggcaggcattcgcattaggaaaccctctgtggtacaggctctctcagtggccaactatttggtgatctgcacatttttagcatagaaccttgaaat

SEQ ID NO: 534519 - DNA, 570 bp, Homo sapiens
tgtgctggtcattacggaattctctttttgtgtgacagaattgtgacaggctcccaggacctaaacccagaaggaagcaggaccatattgctgcctagagaagrggatggagcagattccaggacaccgatgaaacagaagcttccatcacagtgctttctgctaccttatgagacagttcgcatctcaacagctctaggatacaaaggaagcacatacatttatactttataaggtggccaaggaatcctactgtgaacaaagaatttctaagataataaaatcccactttttttttctataaaaagcaaatcttgtcccagatgcaagcacttgcaacagaagctctgtgggggaagcctacctctcaaggccctagttcttggctcatccccaccccatgacctggacaagacctgtgagggtgccatttttagtatcaccgtgcctcagtttctccacctgtgcatgtggaatgatactggcagcccccgtagacttatggggatgactgctgagctgatgtctataaaatgttcttaatggcaagggcgaaagagctataaatac

SEQ ID NO: 534520 - DNA, 594 bp, Homo sapiens
ctgcaggccatgcatgcccagtcggccgagctgcagagactggccatggagcagcagtggctgcatggacacccccacatgcatggtggccacctaccaagtcaggaagattattacaggtgaggtggggtgctgggagggagtggaggggttatctgagcccaggctcccaacctccccgtgtgcccagggccaggctcctccccctctgcctgctgggccctggaggggacattgtggaaccatggtgatgggagaaacagaggaagggaggtgttgggagggtaggtcagctacacaggaggctkcgggcttggggttggattgcctggctgttgtctttggggttgcctccagcctgcgtgactgcctgcctaggcctgagactaaatacgctttcctgttttgtctttccagtcgactgaagaaagaaggtgacaagcagttataagttatttatttgttaacgctggctgtggaaaccccagttcttggggggagaaacaggactttttacataaaataggagctgcaaaagcaaaaagaatatcttctaaagatttctttatatatttaaaaacccacaactaaaaa

SEQ ID NO: 534521 - DNA, 594 bp, Homo sapiens
ctgcaggccatgcatgcccagtcggccgagctgcagagactggccatggagcagcagtggctgcatggacacccccacatgcatggtggccacctaccaagtcaggaagattattacaggtgaggtggggtgctgggagggagtggaggggttatctgagcccaggctcccaacctccccgtgtgcccagggccaggctcctccccctctgcctgctgggccctggaggggacattgtggaaccatggtgatgggagaaacagaggaagggaggtgttgggagggtaggtcagctacacaggaggctgcgggcttggggttggattgcctggctgttgtctttggggttgcctccagcctgcrtgactgcctgcctaggcctgagactaaatacgctttcctgttttgtctttccagtcgactgaagaaagaaggtgacaagcagttataagttatttatttgttaacgctggctgtggaaaccccagttcttggggggagaaacaggactttttacataaaataggagctgcaaaagcaaaaagaatatcttctaaagatttctttatatatttaaaaacccacaactaaaaa

SEQ ID NO: 534522 - DNA, 556 bp, Homo sapiens
ccacacccagctaatttttgtatttttagtggagatggggtttcaccatgtttgccaggctagcctcaaactcctgacctcaagtgatcctcctgccttggcttcccaaagtgctrggattacaggcatgagccaccacacctgacctcagttgtttctttatcttaaagccggcagcattagagactttttactaaactgttaatgtgacatttctgatgtcagatgtattctgtttcaatagctgttctttaaaatcaggctttacaagcagactattatactacaggtgattgtccaacagaaattttgggtacgatgcttttccttttggaccaaattctaaaagcagttgagctgcaagggtgcattgtataaatggtctagacaatgcaaccagtggctgaagacccacataattactgtataaacactaatttgtatgctcttttgggtttatttcaaaattaattacttagcttttttaaaaagctagctccaatttctaggagatgcaccatagacacaagactacagtcaccagctacagttacca

SEQ ID NO: 534523 - DNA, 566 bp, Homo sapiens
tcaggcattcagacaaaaaagacaagtcacttagaaagaaaatatgattatcatcagacttttgaataacaatgckttatgtcaaaggaaaatgatgtgatatatttaatataaccaagggaagaaaatgtgattttatattttgtatccagccaaatttatatcaaagtataaatagtgagtgtaaactgttaagaacattaaaaactcaaaatatttttttctcatgtgctcttcctgaggaatctattcaataataagcttcgtgtgatcaaaatgtcaggagaggcagcgacataaggactggtgattcaagattcttggcgtgagaacatgaagatacaaacataagatcaaaattttaaagtaaaaatcttgtaatcctgaacttgaggtggaagtatcagcatacactcatgttatgttttatctttaaaattgtcttagctatatccattgaaaaggcgtagaaaccatgaccaatgaatgaacatgccaagtgcccagattgtggtctctaaatactgccttgctaaaagaaaacaggacttgttggagcaatagct

SEQ ID NO: 534524 - DNA, 533 bp, Homo sapiens
gggctggagttttgaaattaaaaagggagaaaaataatttggggtacttcagagagagaggaatagaggctattttagaagtttggctgcgtgtgtgtgtgtgtgtgtgtgtgtgtgtgtgtgtgtgtgtgtgtgcaatttcccctctattgcctttcaagaaagagtgcttcaaggatgtacacattaccaccagggctttcaaaattgattcgtgtttcttttggattctgtgagcaggaaggcccaaatgtattcgggttacaattacaataggagctagcactcactgagcacccactgtatcccaggtaccaggctgggggcctcattaggcaaagtctctcatcctcagagacactgtgcaaagaaggtaagctgattccttttttactggaatttagttccagtgaagttaaacaaagtcaccttgcaccacccagctaaygagagacagagttgggatttgaacccaagtctgtctgattccaatgcctggagtctttccaccacttcactggatctgagcataa

SEQ ID NO: 534525 - DNA, 533 bp, Homo sapiens
gggctggagttttgaaattaaaaagggagaaaaataatttggggtacttcagagagagaggaatagaggctattttagaagtttggctgcgtgtgtgtgtgtgtgtgtgtgtgtgtgtgtgtgtgtgtgtgtgtgcaatttcccctctattgcctttcaagaaagagtgcttcaaggatgtacacattaccaccagggctttcaaaattgattcgtgtttcttttggattctgtgagcaggaaggcccaaatgtattcgggttacaattacaataggagctagcactcactgagcacccactgtatcccaggtaccaggctgggggcctcattaggcaaagtctctcatcctcagagacactgtgcaaagaaggtaagctgattccttttttactggaatttagttccagtgaagttaaacaaagtcaccttgcaccacccagctaatragagacagagttgggatttgaacccaagtctgtctgattccaatgcctggagtctttccaccacttcactggatctgagcataa

SEQ ID NO: 534526 - DNA, 499 bp, Homo sapiens
ctgaaaaacatctctcccaaaaaacgtttgtcccagctcaatacactgaacgtgcggtggtcagaactgatgagggcttctgtcgtcctctgcccaggaaagccagtgggactctcgtgctcattctgccctctggtggcttcttttgtaaaatgcatcgggacggctgtattctaagcagagatgactttcttcttcatatgatttcatgtgattcttatctacaattacaaagcccaactatcttctgacccatagacctcagattcagtttactaatcaaattractaaaatcctgacatgtatttaattaaacacgcaatgagggttaaaaatgtagtcaatggtcagctttaagccagcttgggtgagctgcagatgaattgtattaatgaatgaattcacctggtgagtgaaacccactatacgatgtgctcaaatccttaaacactgaaagatcagtgaatttaattcatcagacaacaaattcgtttttta

SEQ ID NO: 534527 - DNA, 639 bp, Homo sapiens
tgtgtttcatgtgttaaacatgaataagaatattttattgcaagattaatgtgtaaagattcactaaggtaatgtatgtaaaacagaaaatatagactctggcaagaataagtgatcaataaatagaagttgagtgatgagataatgaggatgatgcaaccgcatttctaattgtttcatatgtgtatatttttacctcttcttctagactgtaaattatctgagagcagggatgatgtcamtttttaatgccaacaatctagtatagtattaggcaaataatctgctatatagatatgcatttagttgaatgagaaataacgatatccattgacagaagtgtatttttttcttactaaaagtataagcaatatcttacctaaaacacgactcaaaatgtcttgagcactggaataaatgtcttctgaagaaagcaatatagtagtgatgatgataataataacagcaaattgcattttggtgctttctatgtgccaaatgctgttaaaagcactttacatgtatcaactgatgtaatcctttcaacaaaccatacaaggaaggtacaattattattcctgcttaatgaataagggaactgagggtgagagaggttaagtgatttcccaaggtcacaca

SEQ ID NO: 534528 - DNA, 219 bp, Homo sapiens
gcacgagtttcatggggctttaggatttgtaagcccatgattggrgttgaagccttccaggaaccgctgccctaatagaacagggaaggaaaactgatctatctctgcaggcctacttttcattttaatgagtggctctgaaggacgagcaggctgctaaacaatttatttttcagataatacgaagaacggactggaaatacattcagaaggaaaaca

SEQ ID NO: 534529 - DNA, 631 bp, Homo sapiens
tgaagtataatattgacttcatttctaggtaatataaaataataataaaatgcaattatgtgatttatttatttaaatagtctcatccagtataatttagagtaactttgtaaagtacttagcaagggattactaaatagtgaaaacgattaggtcaggtatagtgttagacgttacagaaatcatgctgctgtcaagtaaggatgttaatggaaacatgaatctagtctcatctttcttgagacttattattggttacataaaatgcattaattctatgatatttgtaaataaaggaatgactctaaattattttgcaggataggaagaaacatgaagcgatgaaacatactgaacaattccatgtttatggtgaatatccatgattatttcaatgtatatttgtgtgacttkaggtgggtaggctttaggaattatgatcctgtagcagaataggtagatagcagggtaaagacagaagacaagctaaacaaaaatcaaatgtattcattaggaatcacaaaatatacagcatgtttttatttagcatataaatacattgtttatcaagaccagcatacggcaaaaatgaattattgcttttcttctaaccgtaaatgacttaaaagtc

SEQ ID NO: 534530 - DNA, 456 bp, Homo sapiens
agagaattgagttaaaatttggagtcccagactgggtgcggttgttcackcctataatcccagcactttgggaggccgagacaggcggatcacttaagcccaggggtttgagcttagcctgggcaacgtagtgaaatcctatctctacaaaaaatacaaaacgtagccaggcatggtagtgtgtgcctgtagtcccagctactctggaggctgaggtgggagaattgcttgaacccgggaagaagaggttgcagtgagccatgattgtgccactgcacttcagcctgggtgacagagtgagaccctgtctaaaaaaaaaaaaaaaaaagaggagtcccttcccatagcctcctctagacctgctcctgcctctcaagggccttctcaggatgtggggccaggatggagcatagcccccaggggcctctctctctctgaatattttacatgaatgcc

SEQ ID NO: 534531 - DNA, 210 bp, Homo sapiens
ggccagtctcacagaaggatacccacagcacacctccactgcactgcacagagaagagtgctatgtgggtccatgtgccagcatgggagctgggtgcccctccctttgcaagactggactgggaagggcatggcctgatagccmaggcttctcccccatggggtgtcatggctgagtatgcctggaacggctcaccaacctggatgcaga

SEQ ID NO: 534532 - DNA, 281 bp, Homo sapiens
atgacatcaatgacgtgccrgatctagaacagagtcttataaaagtatttctctacattcccagaaatacatttattataattgcatcttatggcccttttttcaacagaagtaaacttcctggaacattggaagagcacaaaatttattttctaaatgaaatattctaagacgcttgtcattctctcaggttcaaagcctaaagaggtacaccaataaaacaagattcactatcccatcgaagatcatggggagatgtttgctcaggtggtcacgtgatg

SEQ ID NO: 534533 - DNA, 636 bp, Homo sapiens
tacctcttaaattattattttaagtaaaacgccaacaaacaaaaacctaaaggcaaagctgcaacactgacttatttcaacttctatgtgttgagctactgtaagcttggttttatagacttacagcaattagctatataaaacattggcgatgttctgagaaaatattttaaatatgtatatgtatatatatgagagacagagagatttatgttctcaactcataactgggataactatacccaggaggctttgttgtaaggtatctttatcctgttagtaaatattttcctttaattttacaggaagcaaaaatttattggccgggtatggtggctcatgcctgtaatcccagcactttgggaggccaaggcgggtggatcatctgaggtcaggagtttgagaccagcctgaccaacatggtgaaaccccatctctattaaaaatacaaaattagctggctgaggtggtgaatgcctgtaattccagctactcaggaggctgagccgagatcacgccactgcactctagcccggacgacagtgccagactccgtctcaaaaacaaaaagtatttatgtttggggtggatgcaacagtgacacataatcrtttagaaggcaaagttccttgtttt

SEQ ID NO: 534534 - DNA, 565 bp, Homo sapiens
gtttagagattctagcccatgggttatctggctagttattacctctcctgttcacttagttatactttattattgctcacaggctggggaggcagaatgactctgtcaccactaggagccattagggcttcttccctggaggactgcctgcttgctttctggggacactagccctcatttcccttctgtggtacagtggggcaaattatttgtattaagcaaacatttatgggaaacaacccgctcccgaaaacggagcccccaagtaaagcacaaccctgaaagattatgaactatgaattgtctctrgtagagataaatttctgcaaacatatctcagtcttccctctgtttctctggtgattaagaagttcctttttggtaaggaaaaggatttttaaccatagagttaggcatcatggaaattcaaaccagatttcttaatacctggtcttcctcaaagagaaataataacagtaatagtggtgctgggaacaatatggcagattattgaatgaaattgattaacttgaataaaatgctgtgaattttctctagctgaatg

SEQ ID NO: 534535 - DNA, 591 bp, Homo sapiens
tgaaactactacaagcaagtccccatagaaacttaaatagatttgaaattcatgaaayttttgcaaacaagctcaaacataaatttaaaaaatcattttatttttgcaaataccaacacgaggtattattcttatatccttgtggcatatggatacttttaaattccagcaagactttctttgatcttcattcatagagggatatattatttgagtctcacattagattaaagaaagcttaacaaaatttaataagtaaataataaggtgtgttaatttttttgttagataccacaacttctgatgcagaaaaacaataatcatacttaaaagactttaaggtagaaaaataatatgtaatgtgccttttgagcagaatgtgacatgggctatatatagtttggccattctaatagagtttataccactgtaagtcttttcatattgtctacaaaaccaattacatgctgattcagaaatcacatttcacagcttcccttgtcagatcaccatatgattaaggatggcaatgattgttttctttcttcctaatcaaatggcctggccatttcccaaggtcagaagagtgtg

SEQ ID NO: 534536 - DNA, 631 bp, Homo sapiens
ctcatctttctcctctcttatttgtgcataaagttttcatcaccttccgaagtgccgtcctctctggtgaatgtctgatggagcatggtgagtggtaaattactayggcctggaaggctcagtaattaccaggaagtgacttgggcactggagaaaatctggctcattatattatttaaaaatgagcctcattaagaaattcacaaatgtattgctttaaaatgaagcttgcactagaagaaatacttgaaaattatgcaaataaagaagctcctttcaaaattagtattgtagagggaatcagatgagtgtttattaactaaaaaaatagaaaatgcgctccttgcctggtgaatatataatagaaatatgtgagaacatagctgtataatgctatctaagtcttgctggcattatttatgcagcctgtgtcagccatgaggaagtcatggtgggttctatgtatgactaaaattcatttatcttttgagtcagtgtttgcttacatttctgctacttatctggatcgtaagtttgataactcagcttattgtgctcatgttatccccataaaaatggagtaattatttctatttgcctcatcaaaccattgtgagcagacttttcagct

SEQ ID NO: 534537 - DNA, 613 bp, Homo sapiens
aaaacatctgccagctcagtttggactgtgggtcactgtctacaaactcactgatctgtaatgccccaatccttacatctgcctcaaaagttcagatcaggtctttacctaagcactgctggcccaaggcagaagtgaatttatggaaactttatttctccagtcactagatttattcctgtaaggtcagaagtaatgttttctctctcatttctttttacagtgatttgcatattctccttttttcttgttcaatcaagctaaaagtttgtcaattttgttgatcttttcaaagaaccaaattttgatttcatgtattctttctattgtttttctcctctttattttactcatttatgtgcatctttattttctacctgcttgttcttctttttctagkttttttttttaagatacaaggttaggttattgatttgaaatctttcttttttcataatataggcatttatagctataaatatccctctaagaacagttttaattgtatctacaagttttacgtgctgtgttttcatttccattcatctaggtgtattttctcacttctcttgtgatattttttgacccattagttatttaggagtgtgttatt

SEQ ID NO: 534538 - DNA, 603 bp, Homo sapiens
tttcaatccaattcccaaacatttaaaacagcagagatataataaagcagacatttagctaaacagtgagctcaattatgctttgcacagacaacacgaactaratgttaaataaatgccaatatttatcaatatttatcagtgttttccatttccagactccagaatttcaacttcccataaattccttaggagtaaaagtataaccataatcagagcttctattaatattaatttagttcttgtgtatttgaactttgacatttcttgaaagaatataattcttttaaatctgagaaaaaccttcaggatctattagacaaaggtaagtctggcacattaaaattgtaaacagaggtaaatcatgctacagttctatatcaaattctttagccattcgcagcctcttgtgttagtagctccagattgttggaggaattagactctttgagaaaaggaaatgtaatcaacatagattactgtaatatgttggggggaaaatgatgtgtttttttctctttactctttgcgtgttatttcctctcaaacttaatagtggtgcacccccaggcaggttaaagaaaatgatttctttgtcaattg

SEQ ID NO: 534539 - DNA, 568 bp, Homo sapiens
agcatctgatgacatctgaggcagaggagcagaaacacaattggagcaaaggtgtaggtcttctactgactcctgagtctcaatcctgaattctctcagacacattgtagagagagctagtttgcaggatggcgcctgaacccacagggcctggaagagaagtccaagccttgaaaacaaaacctctcaacttacctaccctatactcacatgtagaagatggaagagtaagagacagcatgcaagggagcatgcatgggagccacttctggcgtatgckgcccaacagatgatcagaagagaagaaactgctcctccctgaaggacagctagcacatgaggtgttgggaagaatattggaaaactagacaagacagggcttctatgtgaccgtagttaattttgctaccccactgatatttcaacaatgaacattttttaaagttttctttaaaccatggtactggtggacatgttcatgtctttctccttcatgaaattataaaaatcatcatggtggaagggactggctgggacattcagcaggggtgcatgccatgcacagaca

SEQ ID NO: 534540 - DNA, 593 bp, Homo sapiens
tatagccttatagggctacttactgtaatccctgccctcttcacttatttaacacctattatgtggctggcatacttttaggcgttgggaatacacccattaacttaaataaatagtctgtaatcttgttcttccattcatttgaaaagagctaggcaataaaggaataaatatgtggtaatttagattaagtgccttgaaaaaaaaagcataaaaagggaatagagggtcaaggtggcaaggtatgtttgtgatgtctctaataaagagacacaaatgatgtaaggaggtgatctctagagatacctgcggagaaaatgtttctagaagaagtagcarcaagtacagaagtcataaagcaggagcttgctcaggcagtaagtaggactagagaaagcaaaggagacagtggtgggagaggggatcagaaagatggggttggtgtggtgtagattttttaagcggcatggccctgaacatttattccaagatggaaagcctttgatagtttggaggtgagaaatgacaggatcttacatttaaaaggaacactggatgctgtgtggagagtagtctgccacaaagcaggaacc

SEQ ID NO: 534541 - DNA, 275 bp, Homo sapiens
gtatgaaaccatatatggttttgtccgatttctacccttgaggaatatgttytggtaacaagtctaacttgagcatataacttcctatgtcaggtaaatgtttgagttcttttggagtatgacttaatgaatttaaagctcttggattttaggaatgtactttcaaagttaaatgttagttctcccatcagtctttctataccaacaccttgtccctcaaaactatactagattgaatgtcatttaatcgccaattttgaaaacattctgaacac

SEQ ID NO: 534542 - DNA, 565 bp, Homo sapiens
tgaagctggggccagcctaggagactcttgcttgcgagaaaatataccaaagcccacattacttttctccttattggaaracagagaagcagccattgtaccaagctatcttctggtggaggtctgctaaggatacacggaggtctcagcaaagggaagaaactatgtgatccaagggccaccctgctcctcggccctgcccatgttaactgaccattgcactcattctcagatctgtagccgtcttcctgtctggaagctggggcaaccaccaccagtcagcacttcagggtgacagcataatttgccctccttgtgccaggtacggtcacctggtttgccgcattcacattttcaggtggatgaccaagcggaggaactagaagagtctagtgaagcatccagagactggatctcctttcacatctggtttgataaactccgaatgaaggagacccccagcctcaggaaagcacctgtccttccaggagggacgggagagagcctgacccagtgtattaccacagcccttgttccacctctgagggagacagtgacagatggg

SEQ ID NO: 534543 - DNA, 565 bp, Homo sapiens
tgaagctggggccagcctaggagactcttgcttgcgagaaaatataccaaagcccacattacttttctccttattggaaaamagagaagcagccattgtaccaagctatcttctggtggaggtctgctaaggatacacggaggtctcagcaaagggaagaaactatgtgatccaagggccaccctgctcctcggccctgcccatgttaactgaccattgcactcattctcagatctgtagccgtcttcctgtctggaagctggggcaaccaccaccagtcagcacttcagggtgacagcataatttgccctccttgtgccaggtacggtcacctggtttgccgcattcacattttcaggtggatgaccaagcggaggaactagaagagtctagtgaagcatccagagactggatctcctttcacatctggtttgataaactccgaatgaaggagacccccagcctcaggaaagcacctgtccttccaggagggacgggagagagcctgacccagtgtattaccacagcccttgttccacctctgagggagacagtgacagatggg

SEQ ID NO: 534544 - DNA, 567 bp, Homo sapiens
tgatggtgggtgtggtcttcataatgagaggtggagctgagatttgggcctgggctgggaagaggagtacacagtccatctgatccacctctcttatggttccattggcaaaatcattcatcagtcgtcctatcttttcctggcgagcgctcacaatggcttcataagtgtttcaatacagtgtcccaggcagtcactacctatagattagagctgatgtgctggcctggggctctagagctgggcttcaggaagaatgtggtcagggccatcagggtggaacaaggtagctcaagaccttggaaagacaccctgagggcacaatcgtccttgcagtttaagatgacactttaaaaataaattctttcctaatgatggcttgagtcctgccactcaatgggagcatcagcggaaccygtagcatcttatttggaattgacattctctattgtaattttgttcctgtttatttttaagttttctttttgtttcactggaaaggaaagatgatgctctgttttaaacattaaaagtatacaagttgctttgttacaataaaactaaata

SEQ ID NO: 534545 - DNA, 478 bp, Homo sapiens
gtgagaacagtaataaatatttgtatgcctgtattttgcaagctgatarcaagacagaagtagatgattttcagttgctgaaggctctcagataatcatcagtgtacaaacacccaggcctgatcagcaggcaacaacaacagagtaccccctgcctcctccgtctacttccttcttccccaaagccctgctctgtctcatgggaaccacctggcccctcactgtctgctagcaattctacataagcctctgctgcacgctacctttgcctgttttctggaggaaattttaaaaaaaagaaagatgtgttcccgctctttttcttaacagagggaagcccatgtaggcatgaaattggaattgccttgctccattcacagcatggtcattgggctccactgacccctgaggggcattaatatctcagcagcaagtggatgaaccacgcaaagtggcaggggacacgcccgaagagagc

SEQ ID NO: 534546 - DNA, 478 bp, Homo sapiens
gtgagaacagtaataaatatttgtatgcctgtattttgcaagctgataacaagacagaagtagatgattttcagttgctgaaggctctcagataatcatcagtgtacaaacacccaggcctgatcagcaggcaacaacaacagagtaccccctgcctcctccgtctacttccttcttccccaaagccctgctctgtctcatgggaaccacctggcccctcactgtctgctagcaattctacataagcctctgctgcacrctacctttgcctgttttctggaggaaattttaaaaaaaagaaagatgtgttcccgctctttttcttaacagagggaagcccatgtaggcatgaaattggaattgccttgctccattcacagcatggtcattgggctccactgacccctgaggggcattaatatctcagcagcaagtggatgaaccacgcaaagtggcaggggacacgcccgaagagagc

SEQ ID NO: 534547 - DNA, 478 bp, Homo sapiens
gtgagaacagtaataaatatttgtatgcctgtattttgcaagctgataacaagacagaagtagatgattttcagttgctgaaggctctcagataatcatcagtgtacaaacacccaggcctgatcagcaggcaacaacaacagagtaccccctgcctcctccgtctacttccttcttccccaaagccctgctctgtctcatgggaaccacctggcccctcactgtctgctagcaattctacataagcctctgctgcacgctacctttgcctgttttctggaggaaattttaaaaaaaagaaagatgtgttcccgctctttttcttaacagagggaagcccatgtaggcatgaaattggaattgccttgctccattcacagcatggtcattgggctccactgacccctgaggggcattaatatctcagcagcaagtggatgaaccrcgcaaagtggcaggggacacgcccgaagagagc

SEQ ID NO: 534548 - DNA, 611 bp, Homo sapiens
tttttcaacttttctttctctcatttcctaaccaccacaaggtcgagctgaaagggaaagttacgagacagcagattgatgacgttgtatattggaaagagagaaatgaagttcatttactctagcatgacgtaaagtttaatgagcttaacagaggtatatgaacttgagcagcagccttacctgtactctttccgtctcattcaccacactcttgaaaaccaataatttataaaattctgttaaataaacagatgaatgttaaaagaaatgaaggtaactgaattatttgaacattcaatacaaaggctagaaagcaggaccacgaaatggaattctarttatgtgaatgctgatgctgtgtgccagcatttgaattggtagatctcttcatattaaatcttttttacaatattccatcagagaacattctacttcagttcaggttagattaagcacaccacctttgctttggctttttttggtattcttatcactttaagaaattattttattatttacctatttcttaaaacattaataattttctactacatttcatattttaatttattccttaaaaagttaagtgtttctaaaaaaaaaaaaaa

SEQ ID NO: 534549 - DNA, 544 bp, Homo sapiens
tttttcaaacttgttttggttatacagagttttttggattactatgttaattttagaatcagtttctcaatttatataagaaaagctttgtgagattttgattgggattatgttgaatgcacaagtcaatttacaagaaaattgacgtcttaatattattgaatattatgactcataatcatggcagatttctaaatttacttaagtcctcttcaatttccatcagctcagttttgaaggtttcagtgtaaagattttgcacatcttttgtcaggtttattccaacaaattttatgtttttaaattggatttagagtattatttcacttgagttttattttttcatggcggctcaacagaaaaaccatttttgtatattgatcttttgattttttgaaatattagtctcatatatctcatttttcactwttcttaaactcacttcttgtaagaattagtttgtttttgtttgtctgatttaccagatttccttaaattttctaatggatgatcatgtcgtataaaaaagacaattctaatttta

SEQ ID NO: 534550 - DNA, 629 bp, Homo sapiens
caaagatgtggaagaagaaaagtttcctacacaactgagcaggcatattaagtttggtcagaaatcacaagtggagtgtgctcgattttctccagatggtcactatttggtcactgrgtctgttgatggactcactgaagtatggaactttactactggaaaaatcagaaaggatcttaagtaccaggcccaggataactttatgatgatggatgatgctgtcctctgcatgtgtttcagcagagatacagaaatgttagcaactggggcccaagatggaaaaatcaaggtatggaagattcagagtagacaatatttaaggagatatgagagggcacacagtaagggtgtcacgtgtctaagcttttctaaggatagcagtcagatccttagtgcttcttttgaccagacaattagaattcatggtttaaaatctgggaaaaccctgaaggaattttgtagccattcctcctttgttaacaaagcaacatttacacaagatggacattatattattagtgcatcctctgatggcactgtaaagatctggaatatgaagaccacagaatgttcagatacctttaaatccctgggcagcactgcagggacagatattaccgtcaacagtg

SEQ ID NO: 534551 - DNA, 547 bp, Homo sapiens
gggtcagcagtgcctgagaggttaggggtggagttgtgactttgggtgaagttgtgactttgggagctgctgatgttctggcataattaagtcctggcaatgaaagagacccctcaaggaggcagggagtataattagagaagaggagagggctcaggatccagccttacaggttgtagaggatggcagggaaacctgagcagccagcagagaggtaggagagaatgggagtgatgcctgcacaggcacctggataggacaacatggaggtcatggtggccttagcagacaccaactgtgtgctgtggcaggggcagatgtgggctcgtgtccggtagagagtgatggctgatataggaaggtgtagggatttagaggaaatcctatctaatggcttttatttctgaagaagctacgaggtgagatcattagtgagcataagaaaggggtgtggaaggggaaaagagctgtgctgtgtgacaggtaactayctgctaaagtgcagagagcccatttccatccaggcatgaagtactacagggcagcg

SEQ ID NO: 534552 - DNA, 470 bp, Homo sapiens
cttcaaggtctgccttaagtcccacatcccaaatgaggccttcttcagctaccactcaagtatgaaatatttgattgtccagaccagaacataaaaaagtgcttaagagggaacctacacacaatggaaccacaagaaatgagaggaagcagtgtcgactacaacagccaatgcctgtgccagtcccatcctcaggaagctcctggagagcaggtaccatcctagccacttatctagcactcctcagggcttcacagttagggacacctggctttgacttctggcacctccacttactagctgtatagacttgggcaagcttgaatacatcctcattgataaaatggagatgacaataccygcctcatgggacgggtgtaatagtggagtgagattatgtatatgaagtgcttagcagaatgtctagcgcaaagtcagatacctgaatacatggcagctattaacatttc

SEQ ID NO: 534553 - DNA, 590 bp, Homo sapiens
aagtattaacagtcactaaaaagacttgtcctcgccataggtgtatatttagcacccttcttatggtttcacactctgtaagatagagtacatctgagtgctgttgaaggaatcaagcccagaaggaaaacgtacaactgaagttgagagagaaggggaggtaactctaggagtggattcctggataaaaatagaagtatcaggtccagagcatgtgggtaaagatctgcctttaatgagagcagggttttccttctcttgcagtgaaagatgcacagaaaatacagattcagatgctgttggtttgcagatgtgatggtgggtaagtgtgggagcttctgtataatcatgtaactgtttmtcatcgaggtataaggtgaggttatcattagagtcatcggtaaatggaacaggaagattgcaaaggtttgagaagggatgatataaacaaatctcagaaatagagaaagctaaatttgcaagggaaatctagtaacattgttgaggaaaaaaactgagttgtcagtgggtttatgaatttaacgtgatactagtcggtgtccttttaaggaccttcctgcatacaaaaa

SEQ ID NO: 534554 - DNA, 575 bp, Homo sapiens
ctaaaaagacttgtcctcgccataggtgtatatttagcacccttcttatggtttcacactctgtaagatagagtacatctgagtgctgttgaaggaatcaagcccagaaggaaaacgtacaactgaagttgagagagaaggggaggtaactctaggagtggattcctggataaaaatagaagtatcaggtccagagcatgtgggtaaagatctgcctttaatgagagcagggttttccttctcttgcagtgaaagatgcacagaaaatacagattcagatgctgttggtttgcagatgtgatggtgggtaagtgtgggagcttctgtataatcatgtaactgtttctcatcgaggtataaggtgaggttatcattagagtcatcggtaaatggaacaggaagattgcaaaggtttgagaagggatgatataaacaaatctcagaaatagagaaagctaaatttgcaagrgaaatctagtaacattgttgaggaaaaaaactgagttgtcagtgggtttatgaatttaacgtgatactagtcggtgtccttttaaggaccttcctgcatacaaaaa

SEQ ID NO: 534555 - DNA, 635 bp, Homo sapiens
tgtgacggcatccacaccagcacattttatcaggttagctcaggtgatatctttagtaaaaatgtcctggtgtgaacaccatcacaccttgcaacaaatggcccgccccctcagaagctaccagctcttctcttggctgcaggacaataggacaacaattaaggagacatccctggaagacccagctagggaagtgctaggcctgaaaaggggtaagagatcatatatggaaggtgatgcaagaattagctaccatgtagtggagcgattcaggaagaggctcttctcttataggtctcttctgagtgatagccaatttaaagaggagtaggtgtgctggggttgccctggcagatggaagaggaaggaatgyggaagctgagagaagtaggcacaccagcatgcattgtgtgagtccagaaaaactgagcaaaggattatccatggaagttcccagaggccccacccagaggccataaagaatgcatcaggaagaggggtatcagcatcactgaacagtgcagttggagctcttctctgtaggaagaggttgcagagctgggctcattaaaatccactgggatgataggatcctaaataatagggtccaagtggtaaagctcaatgaccagaag

SEQ ID NO: 534556 - DNA, 511 bp, Homo sapiens
gctgacactgaatatttcaacaccacagaagtatttaaattttctatatacaccatgctgtagggaaacaaggagcaggtggtttatctgagtctggaagctgggattgtcctgaaagagctagaaccatggtatgaactgtctggtgggacctgagactacaaagaaatgggttttcccttgggaggtaaatcaaaaaaatcacagcaactgctagaaattccacgatacagagtgagagacatgtaaatattctggcttctcttcctggccttcattcttccaccagtgacttcygttgcctaaactagttacaggtcagttggcaagggagctcagagaatgtcattccctaagatacaaagcagagcagcaaggagaggggagtgaatcttacagcaaacgtgcacatgaattccacaacctgtcttagatttggcctactcaaaagtgctctgaaaccaggacttgagttcaagtagtttacatgggaggtgaatccaatgtacct

SEQ ID NO: 534557 - DNA, 476 bp, Homo sapiens
gtgattatgggaaagaatgctatcattcttaggaaatacatattgaaagctttaggattaaaatgagaccaactctcaagagtgtgtgtgtgtgtgtgtgcrtgtgtgcgcgtgtgggtgtcagagagaaagagagggctacacagagaaaaaagaaatgtaatatattaataattggtgaatctaggtgaagagtataagctgtttatcctagtattacaacttttcaagtgatttgaaagttgagaaaataatcttttaacagtaaatgcaagattagaaggcattgaggtattaagcatagctttatgttattgtaaaattaagatacatttttgcgctttttggccaggcgcaaagactcacacctgtaatcactttgggaggctgaggtggctggatcaccgaggtcagcagtttgagaccagcctgccaacatggtgaaactctgtctctgcctaaagatagaaaatcag

SEQ ID NO: 534558 - DNA, 395 bp, Homo sapiens
tttgagatcagtttgggcaatatagcaagatcttgtctccacaaaatattttaaaattagccaggtgtagtggtccacacctgtagtctcaactactcaagaagctgaggtaaaaggatcacttgagctcaggagtttgaggctgcagtgagctatgattgtgccaccgcactccagcctcggtgacagagtgagactatctatttagagagagagagagagatgctacaaatcctttgtgatgatccatgctggatataaggggattgactaagtgttggyttgagatttcagttctttcaaatgtttgagaaagaggcacagacctgggatggatgtatacattgaggaacagcctaacaccaccaactcccaagaaactagagttcaagcaa

SEQ ID NO: 534559 - DNA, 610 bp, Homo sapiens
ttcacttctatgcagacactgcaattccagggaacacaaggyggtctctggtcacattatatggacaatggtgagtcctgagtatctggcatctccactagtgaaagctatccttgagttcctcacaatttacctaggaagcaagctcaccttgctaagggtaacataagctaccccatctcatatgaagaaaggatatccttccggttagtaagactctaagcccacctgcctccttgttttatctgtcatttcttagattttgggtgaaatatttgagttaattttaatcttcccaccccttacccattttgtcttatgaaacaataaaccttgatttattattctgagagcctgcaactctcctgagcctgacctaagttacaaaagtcaacttactggctgtaaatagcactagggttaaattctcccaaaattgataactagcaatttcacttttgactttgccttcagcagaaggaagggagggaagattttcattcatcccactccaattgtaagaatttcataacccacaccattcagttctccagcctcaccttccaccactctgctgcataagccctatgtgtcaaaattacttgcagtt

SEQ ID NO: 534560 - DNA, 592 bp, Homo sapiens
accaaaccacgcaattcaggtttaatcagcattgactaagcaggttccaagcaaaatgagaccaarttgttttgccgacctggatctgactgtgcagtttagtgaaagccaaaaaactgagtgtctattcagggctgaagatggttctcttcccaccttgggtccagaaggtaagagttatacaaataaaaaagctggaacatgaggcttgagtcaaggtgggggtaagaaaatgatcccagcactttggaaggccgaggtgggcggatcacgaggtcaggagatcgagaccatcctggctaacatggtgagaccctgtctccactaaaaatacaaaaaattagccgggcgtggtggcgggcgcctgtagtcccagatactcgggaggctgaggcaggagaatggagtgaacccaggaggcggagcttgcagtaagccgagattgcgccactgcactctagcctaggcgacagagcaagactctgtctcaaaaaaaaaaaaaagaaaaaaagaaaatgatcttatttggcagattggagaaataccaggcattgatttttagttccctaccataagaaaatacctaaaagca

SEQ ID NO: 534561 - DNA, 555 bp, Homo sapiens
accacacctggctaatttttgtatttttagtagagatggggttttatcatgttgggcaggctggactcgaactcctgacttcaagtgatccacccgccttggcctcccagagtacagagattatagatgtgaattaccacgcctggcccattttcacatttctaaaatcaggatgcatcttaacattggtctctttgtttcaacaatttgtattgtcggagctataatggattcaactgcagttgaagaatgtctttacaaagattatgctctgattccatattgaaaaaatgttattttatgcatagaaagtaatggaaatagagaatcaatgtgtagtaacaaaggcatttgccattggaagaatatccataattccatattttcttacaarttaacatcaaagtgctttttggggcataagaaaaaaagtaaacaataagtagatgatcctgtgatatttggttactgagatacatgcaaaggattgcctaacacaggctgtattagtttcctgtggctgccttaataaatttccacaaacttggtgccttc

SEQ ID NO: 534562 - DNA, 597 bp, Homo sapiens
tttaatgttctagaaagattttggaatagggagtcaaaaggttgggggctaaatgctagtcctgaatttttttagtagtgtaaattttagaggtacaatttctctcctatttaaactatggttaataagatctacaaccttgcagtgtggttgtgaagattaggtaacaggtactctgcaaatggtagcaacagcaataataataataagtaataattttttattgttgaaatatacttttctttcacatctttttttawatagttattttcgagataacttttttcacaattatagcttcagctatatctttatttggcaaatgttgcatactagttaggtgccagataccatagaaggtgatgaagataaagtgcaggagatgaatatattctctgtcctcacagactttttattttaaattttcattttatatgtatattttttgagacagagtcttgctctgtttcccaaactggtgtgcagtggcatgatctcggttcactgcaatcctctagtgcttcatgcaggggcaatggtgagcacctgctaacttataacattcccaccagcctccctcactttcagtctatgctg

SEQ ID NO: 534563 - DNA, 668 bp, Homo sapiens
aatttttattgtctgctcatagtcatctacctaaatgaattttggaagttctgctcaagggttgaggatgaagtgatgaagatgagtagatgagtttagtggattatcagatacattatttgggattttagttacaaataataaaatctcggcagctctggtttgagaaaaaaagtgggatttattaggaggataagttcatggaattcatatatgtgcttctttcttcctgtagtccagaaagaggaacttggtcactccatggttcaggatatatatgatttaggtcgagtaaaggagacactgattatttcttttatggtcccaattccaaatttcagttagaaggaatttgatgagctcaacgtgaagaaggtatttacctctgggtcaataagctaggaccagtggaatagggctatcaggtgtaaacatgtggcagggagccagagaaatatgacagggaagctgtcctattagatgttgactatagagatccagacccactgcaagggttgatcatccatgaaatgtcatgtagcaaaaggactcatgggtagcttaaaagcaaggtaggctagatgactgrgtaaatcctgggattacaagaaggatgcttatgttctccttttaattttgccacacatttatagcattattttatgtca

SEQ ID NO: 534564 - DNA, 494 bp, Homo sapiens
gtgaaacaaggtgtcaacttcctacattacagaataaggcaagggagagacaaaaaatagatccatgagcaaaaagccaaatgaccagcacagccatccttttccttaccactacgctcatggaagcacttgtcaaggagtaacaattagcagagcctctgcagacctaaattggacttgtattgtrttaagccatggagattttgaagtcatttggttctgcagcacaacttaggcttaccttcacaggaacaaaaattggtatcagaagtgggattctgctataacaaaaaaaccctcaatatgtgacattgccttagtggtccattggtcaggagcagttaaactgtaattagaggctagagtggccattcattttatgctttgtgggaagcatttgataaagctgtcattatagcaacctggaaggcagatcatatgtctagtgaatttataaccctaggggaagagttcagaaaacaaaatgttattta

SEQ ID NO: 534565 - DNA, 494 bp, Homo sapiens
gtgaaacaaggtgtcaacttcctacattacagaataaggcaagggagagacaaaaaatagatccatgagcaaaaagccaaatgaccagcacagccatccttttccttaccactacgctcatggaagcacttgtcaaggagtaacaattagcagagcctctgcagacctaaattggacttgtattgtgttaagccatggagattttgaagtcatttggttctgcagcacaacttaggcttaccttcacaggaacaaaaattggtatcagaagtgggattctgctataacaaaaaaaccctcaatatgtgacattgccttagtggtccattggtcaggagcagttaaactgtaattagaggctagagtggccattcattttatgctttgtgggaagcatttgataaagctgtcattatagcaacctggaaggcagatcatatgtctaktgaatttataaccctaggggaagagttcagaaaacaaaatgttattta

SEQ ID NO: 534566 - DNA, 667 bp, Homo sapiens
aattcctggcctctagtgatctgcctgcctctgcctctgaaagtgctaagattacagkcatgagctaccatggccagcccatttccttaatattttaattgtcagacatgttatggtttctggcacaatattaagaagacatgatatgaaatcacagggtgaattttagggcatcacaacagaaagattatggtataagaaaaacaatggaattccaactacatttctgtcaaatgttctaaaatatataaaatctgtatcttttgtgttctctcctgatttaaattctaaatttaatgtaatctttctctgcagaaataaagtgtctgaaagaatgaaaaaaatggaagaattttttagtaaggtataaaataccctttctatctttgtagcattctaagccttttgtcacctttccaaactcccaacatgccatattccctgagtaggccacagccatgtacattgatccctttattttcttctctctgcctgagatttctctcattcccccttctctgcctggtatatgattgcccattgtttaaggccccaactcacctttataatcttcctagcccactttctttatcggtattccagaaaaaacaaaagaagcttccacaagacaacattctgtaatacactgcttaacttcttttgaccc

SEQ ID NO: 534567 - DNA, 667 bp, Homo sapiens
aattcctggcctctagtgatctgcctgcctctgcctctgaaagtgctaagattacaggcatgagctaccatggccagcccatttccttaatattttaattgtcagacatgttatggtttctggcacaatattaagaagacatgatatgaaatcacagggtgaattttagggcatcacaacagaaagattatggtataagaaaaacaatggaattccaactacatttctgtcaaatgttctaaaatatataaaatctgtatcttttgtgttctctcctgatttaaattctaaatttaatgtaatctttctctgcagaaataaagtgtctgaaagaatgaaaaaaatggaagaattttttagtaaggtataaaataccctttctatctttgtagcattctaagccttttgtcacctttccaaactcccaacatgccatattccctgastaggccacagccatgtacattgatccctttattttcttctctctgcctgagatttctctcattcccccttctctgcctggtatatgattgcccattgtttaaggccccaactcacctttataatcttcctagcccactttctttatcggtattccagaaaaaacaaaagaagcttccacaagacaacattctgtaatacactgcttaacttcttttgaccc

SEQ ID NO: 534568 - DNA, 615 bp, Homo sapiens
tgagtggtgtagaccatggccagtgtccaaaggggccaacatcctagatcattggcacaacactgagtggttaaggagctggacttaagttgatttaaattaaaaaagaaaaaaccacatttttaccatcccatttgctgcagtaagattgatgtggggaccccctgcagtacagcaaakactggctgggtgacacatagctacagaaggcactgattacaggtgctgggattcaggccacttcatcctgagcccgtggctgagattgtgtggtagaatcggtgtaatcagatgagtgtaaactcatgctgactagggaaaactgggagtctataataagcttaggttcgaagcgtactttagaaagctttaaaatccctggacaaaccagcctctctttctggagtaacaaaatacaaatcacttgtttgttatggttatcttgactttgtggaagtgaatttaaaacaggacattatcaatgaacaccaaacaaaaaatcaaataaaaggattgtttccaacattgtcaaacttgtgtaaattaaaaacaaataaacaaaccaaccaaccctgggcagatacaaagtgatcagagaaggaagtgaggacagtg

SEQ ID NO: 534569 - DNA, 615 bp, Homo sapiens
tgagtggtgtagaccatggccagtgtccaaaggggccaacatcctagatcattggcacaacactgagtggttaaggagctggacttaagttgatttaaattaaaaaagaaaaaaccacatttttaccatcccatttgctgcagtaagattgatgtggggaccccctgcagtacagcaaagactggctgggtgacacatagctacagaaggcactgattacaggtgctgggattcaggccacttcatcctgagcccgtggctgagattgtgtggtagaatcggtgtaatcagatgagtgtaaactcatgytgactagggaaaactgggagtctataataagcttaggttcgaagcgtactttagaaagctttaaaatccctggacaaaccagcctctctttctggagtaacaaaatacaaatcacttgtttgttatggttatcttgactttgtggaagtgaatttaaaacaggacattatcaatgaacaccaaacaaaaaatcaaataaaaggattgtttccaacattgtcaaacttgtgtaaattaaaaacaaataaacaaaccaaccaaccctgggcagatacaaagtgatcagagaaggaagtgaggacagtg

SEQ ID NO: 534570 - DNA, 587 bp, Homo sapiens
tatttaccttttagttgcttcccagtgcctacaggattaagtccaaacatcttaaccaggtacttcattgattcagccccagctgtctcatgtccaagcatgtcccctacacacgctgtgctcattaaactctgcacaggacataccatgatctctttgcttccaagggtctcttctgtgtctggcaaactccaactcactcttcaagcctcagccttccctgacccaaactgcctcttatccttttgttccctctagtgttcccatggtctgtttctctggtctccttgtatgctctgtcccttgagtgagcattcacatcctatatagcaattctgtgccatctctcccactaaggcttgaggrcaggttaatggaactgctcacacctgcagttctattggccggcgtgtggacgctctgtaaaatgtgcttgctgaaggcatggtgaacaagaataggattcagataaaatgctctctggtgcagctagctttgtatggactgcgctaaatagtagaagagaaagctaaatggagatctagccctggaagcttaaattcaccaaaatcatataactcagttta

SEQ ID NO: 534571 - DNA, 546 bp, Homo sapiens
agcagagaagagacttcgccaaagcccatagaaaataaaaagcaaaccctcaagcatgaaaatccctggccctggagtaagtgcaggtgataaggcttgctatctgatgcctcattccatgtctctggcttcccattgcctaaattaagatgtcctgaaagaaaccttgggaaaaaaaaagcacagtccccacatttgaagtagaaatagaatkaaggagaaattgtgattttcctgaaggaacagaaccaacactggttttcaaaagccttagttttacattttagtagaaactgttagcagtaggaggatttgctttgtgtgtgtgtgtgtctgtctgctttgccttattttggttctgaccataccactgctatctcagtcttagaggctgattttgtggcccagagtgtttcgttcagatatctttgtgttgaggtgatattgagccagcagccaaagaaatgcatggccaagatatggaatatctggtcaacagagaataacaacaaagtgggacgcatcataaggtcataggtcagtgaa

SEQ ID NO: 534572 - DNA, 633 bp, Homo sapiens
gcagcagagatctcagttcttcctagtgcttgagaagttaactaactgtctttcccatgaggaaaatgttttgagactgtagaagcagagaagagacttcgccaaagcccatagaaaataaaaagcaaaccctcaagcatgaaaatccctggccctggagtaagtgcaggtgataaggcttgctatctgatgcctcattccatgtctctggcttcccattgcctaaattaagatgtcctgaaagaaaccttgggaaaaaaaaagcacagtccccacatttgaagtagaaatagaattaaggagaaattgtgattttcctgaaggaacagaaccaacactggttttcaaaagscttagttttacattttagtagaaactgttagcagtaggaggatttgctttgtgtgtgtgtgtgtctgtctgctttgccttattttggttctgaccataccactgctatctcagtcttagaggctgattttgtggcccagagtgtttcgttcagatatctttgtgttgaggtgatattgagccagcagccaaagaaatgcatggccaagatatggaatatctggtcaacagagaataacaacaaagtgggacgcatcataaggtcataggtcagtgaaaaca

SEQ ID NO: 534573 - DNA, 600 bp, Homo sapiens
ttttcttctgcttgaaacaaataaatcttcagtactgactttccttttctttctttttttttccatatcagcaaataattggatatctgaaatttttcttgaagtgcttttttggcatttacaagcattttaaattataatgctgtttttcagagatggaataggatgaaggttaaggttggaaatcgaaggtgatcttccccctttagtgaatgagtaactctcagatcctctccagatgtcaaattctgttttgaaattggatgtaactatttacctatctcacaagaccaagatgaaggcatggtggatccattaaaggtttgtttgtacccttctcctctcacataggatcccagaagctacgggacttcccaagaacmgtaggaagctgagccatctagaatcaccctactgagagtaacaccagcttactacctaaggaaagctaaatggttggcatcttttataatttaccaattgctgtcccatgcaacatttttccaattacttctcactttatcaagtagatattctgattattttataaaagtgagaaccgaggttcagaaaggtttcatatggagttgcaccgtgagt

SEQ ID NO: 534574 - DNA, 600 bp, Homo sapiens
ttttcttctgcttgaaacaaataaatcttcagtactgactttccttttctttctttttttttccatatcagcaaataattggatatctgaaatttttcttgaagtgcttttttggcatttacaagcattttaaattataatgctgtttttcagagatggaataggatgaaggttaaggttggaaatcgaaggtgatcttccccctttagtgaatgagtaactctcagatcctctccagatgtcaaattctgttttgaaattggatgtaactatttacctatctcacaagaccaagatgaaggcatggtggatccattaaaggtttgtttgtacccttctcctctcacataggatcccagaagctacgggacttcccaagaacagtaggaagctgagccatctagaatcaccctactgagagtaayaccagcttactacctaaggaaagctaaatggttggcatcttttataatttaccaattgctgtcccatgcaacatttttccaattacttctcactttatcaagtagatattctgattattttataaaagtgagaaccgaggttcagaaaggtttcatatggagttgcaccgtgagt

SEQ ID NO: 534575 - DNA, 525 bp, Homo sapiens
ttcccagttgtgggtcacttcttgcaaatggaatacaggtcttcccaatttgaagagcaccatcgccaccactgacaccaaaactgccaccttcttcttggctctgggaagtcatccactcccctcttcctgcgcaattaggaacttcctcctctccccttctggaggyaagtccagacgtcttttccagatacctttaccttctaaccccaatttagggagagagtcttcagagtggcctctgtagcatggggataccattaacaacccttccctgtgggaagaccttggaacttaaaggcttggaagtttcccaggaggtgatggctagcaatagaagttccataaattttttgttgtttctgacaaccacaaggacaaggtaaattaacaatacctcagaagatgaatctgacacacagataatactctatggagagtatttgcatagtgtggtgcttctttaaacaatgaggaagagcccttttctgcacagaggtgtccttgtcatttgtttgtttgcag

SEQ ID NO: 534576 - DNA, 525 bp, Homo sapiens
ttcccagttgtgggtcacttcttgcaaatggaatacaggtcttcccaatttgaagagcaccatcgccaccactgacaccaaaactgccaccttcttcttggctctgggaagtcatccactcccctcttcctgcgcaattaggaacttcctcctctccccttctggaggtaagtccagacgtcttttccagatacctttaccttctaaccccaatttagggagagagtcttcagagtggcctctgtagcatggggataccattaacaacmcttccctgtgggaagaccttggaacttaaaggcttggaagtttcccaggaggtgatggctagcaatagaagttccataaattttttgttgtttctgacaaccacaaggacaaggtaaattaacaatacctcagaagatgaatctgacacacagataatactctatggagagtatttgcatagtgtggtgcttctttaaacaatgaggaagagcccttttctgcacagaggtgtccttgtcatttgtttgtttgcag

SEQ ID NO: 534577 - DNA, 605 bp, Homo sapiens
gtaaaaggtaatgcctcagtcagcccttatctttgagtgactaggtggagtggatctctccttcccttgctttcacctacccatgatagatgtgcaccatgaaagtgagataatacattcccccatggatttaaaggccagtttgcatactatggctttgcttactgcagaagttgaagtgactcagcttctgtctttcagctatttttaataaaayagtgaaccgctaatctctatttcctaaaacagtacttttctcaagtatctcctaacatttcttccactatctactggattgtgtccacatctaagctttcttggccctttgtgatatattcttgctttgcctactcatattatttcccagaatttctcaacatacaccaattgtttactcacattgtattcttttccattattggaatgttaaattttatttccttctgtctatattgttttaaagtctttttgcttttcttactgtatcctctctctttgcccttttctttctcgtaatccatctatccagggctcatttataagctcaatttcctttgtggaactccagtttacaacaatactcattctctctctctttctccctc

SEQ ID NO: 534578 - DNA, 601 bp, Homo sapiens
cagaatctgaaatctcaaattctgagattaaaatcttcattatctttctgtcccgtgttcccgctccctcctatcttcatagtctccttttattttctgaaaataatccctgttatatatttgctttctgttccatctttccctctttctgtctcttagatttctctgttatattgatttttttccccagaaaacttcatgtgtttctcccagtgggattttatgtcacttttaatttattgtcagatggtttagcaacaaatacatagatgcaaagcaaatgtgtcaatattttaacagttggtaaatataggtgaagggtatattgttgttcattgtagtattcttttgatacttctatttsaagaaatgtttcaagataaagaggttggaaacttaataatattatagtaagtcatttttatttaatatttactatatattatgtattagtccaagcactttaacatatattacctcatttaagtcttatactaacctaaggagacaagtattgttattttgcccattttatagattaggaaatgaagcatagagggatttggtaacttgccctgtgtgttgtgtggctagtaagtgg

SEQ ID NO: 534579 - DNA, 521 bp, Homo sapiens
acacaaatgagaagatagaaataaaagcatcggctgggcgcggtggctcacgcctgtaatcccagcactttgggaggccgaggcgggtggatcacaaggtcaggagatcaagatcatcctggctaacacagtgaagccccgtctctactaaaaatacaaaaattagccgggcgtggtggcgggtgcctgtagtcccagctactcgggaggctgaggcaggagaatggcgctaacccgggaggcggagcttgcagtgagccaagatggcaccactgcactccagcctgggctacagagtgagactccgtctcaaaaaaaaaaaaaraaaagaaaagaaaagaaaagaagtaaaagcatcaatttcaccacaaaaaattaatttggaggataaagtataatatgagaacccactggcatgataataatccaggaattatacagacttccccctgttaaaagcaatgctaagctagatcatgtgtaccaatttacaaaggtaaaatcttgctctctgagggcag

SEQ ID NO: 534580 - DNA, 571 bp, Homo sapiens
ctcctagtctatgaggcactaatatattttagaatttgctatagaaaactccgtttaggatgaaacaagaaagtacgttaactaacaaacaaatgaacaaacaaagacattaaaaataaaggttaaagggtaaaagggaaaaggtagggtctcagaaattacctataaaaagtgggggtcataggccaaccagctcctccatgttactgggtacattrtcatagtattcagtataatttagtttacctaatatcattaattttacaaaatcatctgatattcatcatcatataaagctccatgacttactgtttaagacaaaagagatgacacattttttttggtagaagacatggcatatatacagtatttagaaaacttaaaccaataagatcaattctaggaacattgaagttattcatcatgatgatgggagttagggtggagagaaattacgaggaccagattccatccatgtctttaataaatatgaagaactaataaagaagttaacagatgatggcattgagaacgataatcaatactgatttcataagccccccaaaaggag

SEQ ID NO: 534581 - DNA, 571 bp, Homo sapiens
ctcctagtctatgaggcactaatatattttagaatttgctatagaaaactccgtttaggatgaaacaagaaagtacgttaactaacaaacaaatgaacaaacaaagacattaaaaataaaggttaaagggtaaaagggaaaaggtagggtctcagaaattacctataaaaagtgggggtcataggccaaccagctcctccatgttactgggtacattgtcayagtattcagtataatttagtttacctaatatcattaattttacaaaatcatctgatattcatcatcatataaagctccatgacttactgtttaagacaaaagagatgacacattttttttggtagaagacatggcatatatacagtatttagaaaacttaaaccaataagatcaattctaggaacattgaagttattcatcatgatgatgggagttagggtggagagaaattacgaggaccagattccatccatgtctttaataaatatgaagaactaataaagaagttaacagatgatggcattgagaacgataatcaatactgatttcataagccccccaaaaggag

SEQ ID NO: 534582 - DNA, 571 bp, Homo sapiens
ctcctagtctatgaggcactaatatattttagaatttgctatagaaaactccgtttaggatgaaacaagaaagtacgttaactaacaaacaaatgaacaaacaaagacattaaaaataaaggttaaagggtaaaagggaaaaggtagggtctcagaaattacctataaaaagtgggggtcataggccaaccagctcctccatgttactgggtacattgtcatagtattcagtataatttagtttacctaatatcattaattttacaaaatcatctgatattcatcatcatataaagctccatgacttactgtttaagacaaaagagatgacacattttttttggtagaagacatggcatatatacagtatttagaaaacttaaaccaataagatcaattctaggaacattgaagttattcatcatgatgatgggagttagggtgsagagaaattacgaggaccagattccatccatgtctttaataaatatgaagaactaataaagaagttaacagatgatggcattgagaacgataatcaatactgatttcataagccccccaaaaggag

SEQ ID NO: 534583 - DNA, 571 bp, Homo sapiens
ctcctagtctatgaggcactaatatattttagaatttgctatagaaaactccgtttaggatgaaacaagaaagtacgttaactaacaaacaaatgaacaaacaaagacattaaaaataaaggttaaagggtaaaagggaaaaggtagggtctcagaaattacctataaaaagtgggggtcataggccaaccagctcctccatgttactgggtacattgtcatagtattcagtataatttagtttacctaatatcattaattttacaaaatcatctgatattcatcatcatataaagctccatgacttactgtttaagacaaaagagatgacacattttttttggtagaagacatggcatatatacagtatttagaaaacttaaaccaataagatcaattctaggaacattgaagttattcatcatgatgatgggagttagggtggagagaaattacgaggaccagattccatccatgtctttaataaatatgaagaactaataaagaagttaacagatgatggcattgagaacgataatcaatrctgatttcataagccccccaaaaggag

SEQ ID NO: 534584 - DNA, 405 bp, Homo sapiens
tttgctagaaaccaaaagtggcatgtgttccactgatcttctctagacagagctaatgtaagctttcttgttgtttaaagaaaaaaaaaaataggacatgagttcatactggtgactcccattcaaattcaggaycatggatttccatttaatctccccagttctgtacagctttcttccagggtgagaaatccaagaacccagcaacacatcataattattcattcactttatttcactttgcacacataaccttttcagaataatagtactaacactaccgtctataatataaatactaaaaagagtttaatagtttttattctattattttcattctcagaatgtacagtcaaattaccatgtcttaaaatcatttgaaataacttctttctatgtagtcat

SEQ ID NO: 534585 - DNA, 486 bp, Homo sapiens
ataatttttttttatgattaaggctgttggtggttcattttatacttaatttcttctgaaggtccctaagtcctgcagagactgattttatcctaggatatcttccaccagggtgacctcagattacaataggttatagttaactactggtaatattcttcacttgaggaaagtctatgtaatggatagttcaaacgtctggagacattttggagcccatatatcctcttcatccagcacaggccttaatcagagagtttaacatcttaatgcatcttctgagcctattggagggcccacacttttctccagagtgggtgtccagcagcttgtgccagttcagtaatgraggaagctgtaccttcttatggacaattagagtaaaaagagacaaaagatggtatctttgttgaacgatgaattcagaaatcagagaaattcccaattaaatgtccattataaaagtggctgggcagataaaggaaa

SEQ ID NO: 534586 - DNA, 644 bp, Homo sapiens
tctttgattgcttctcatttcatagaaattatctcatggtatttactaggatcctctaattccacatggttggggtggaagcactggggagggtgacattgtgaaaggctatatcagaccctgttaggagcaaacaagacaaactgcccaggtgtgtaatgggctttcttgcacacaactgaaccccaggttgaggtgcttcctagtgctagtataatagattggtaatgattcatggatttaaccagctttaagaggtctcagacaattattcagtaaatatctgccatgttttgtcctagaagatgtctcagtgaatgaattagacaaacctcttgctctcatggaatttatgttttgtggtagagatacagatgtcaaaccatgccatcaaacatgcccagtggttataatcgttaaaagaggaatgaagcagtcgacagggtgagtggttaacgagtcaagagagcagtgtcatttcagggaggatgaccagggagggcctttcatctgcaaagcggtatttgaatatagaactgaacctttagagcatgagatgcagtgatatgtaggggcagaacacttcagacagaagaaacaataagtaagyagaaaggccatgattcacccatgtgcttcatata

SEQ ID NO: 534587 - DNA, 495 bp, Homo sapiens
cctgttaaacaatctctttttaatacctacatgtaaggcttgaagttagattgaaagtacttattatattctgccaggctttcttgtttatttggatggattttcatagcaccattagcttattttgaaactttagatttgtggtgaattctctttcacctgtgatcaaattgactaagaacaatgaactgatcttggaaaaaagtagacatccacagactgatgcatttataacmtttacatgctagtttgcacattctaatctagaaagtatttttggttaaatcctttgtttatttctattttgtggcatatgggattgtgcctttgtcaatgctgactttgtctaaattgtccataactcaccactctgtgtctattataattacatccccagtagatgcagtatgtcctctgaaagcctaaatacttcatgtttcatgttaagatggtattgtctttaaacatttatttatttatttattcatttgcatg

SEQ ID NO: 534588 - DNA, 593 bp, Homo sapiens
ctgggaaaggtgatgggtaaaaaaaattggaagtgggaagcgagatggaaagtgtagattacatgctgatttcttttcagtgaaaatttttatggcatcggagcgcatattggatttaggtgtatgatttgtgacccattgaagtcatctgcattattctgaatcatgcaaatattttgtgatgtgattttgaatcaggtaagagagtagttctagcttatgtgtgtttttccctttttatctcaggcaccataaccttgatactattttaacttacmtgtttatacatgtaaaagtgtctgaagtaattaatataaccaattttgtgtctttaagattagctgcttgcaaacagcaagcaagcctctgtaagaaactggagcgagtctttccagttggactatattagaattccatctacattttaatttggttcctgctgtgtggatatattagactgaatctattacctggctcaatggtcctttcagacaatttccctttctcattctgattttattgtaagtgatcatcaacatactgttgaagtctgacaatccaattttgatcacttccatgaagtgctgattacg

SEQ ID NO: 534589 - DNA, 499 bp, Homo sapiens
gatactcagaacaatgcattcaggcaaagctttatagctccatgtactagatggagaatttcagatttcttttttctttttttgagatggagtctcgctctgtcgcccaggctggagtgcagtggcgtgatctcagctcactgcaagctccgcctcccaggttcacaccattctcctgcctcagcctcccaagtagctgtgactacaggtgcctgccactatgcctggctaatatttttgtatttttagtagacatggggtttcacagtgttagccaggatggactcgatctcctgaccttgtgatccaccagtctcggcctcccaaagtgctgggattacaggtgtgagccaccrcacccggctcaatttcagctttctaaagaggcagtagtagtcaggctaaacaatgagcaaattgtaaatctgcaagcagttctcacatcatctgactttagtcttgatactcttcccactgtgccatgtccttacaacatttt

SEQ ID NO: 534590 - DNA, 613 bp, Homo sapiens
gattcagtgatgtgttagatatggttaatgagtgtggtcaaaaaattaaggatgggacaactctcccaatgcccaattttaaagtagtcttcagtgaatttcaacatttctaaataccctcaatcattctccatcgatccaccattttttctttctgaggattaattccaatgcagagtatttaactttagcaaactgattttcaacaaaatcaactttctcagtatggactgccctaacaacagccaatatctgacaaactctaaatgcatgcatagtattgctcaaacactttacattataaaatcatttcatttctcttttacagawgtgaaaactgaggtataaagaattaacttggctagatttgcataggcaatgtatatctaagataatatatttaaaagggaaaaagagtgcaattgtatttgtaaacttattgttactatatatatatgtacatatgggtaacacatagggtttctatgaataatgagggatagagagaataaaggggagaatatgtttttcaactttaataagaaaattattttctgttcttctaaagttaatttatacttaaatcataatatataatcatgaaatatccgaa

SEQ ID NO: 534591 - DNA, 604 bp, Homo sapiens
actgggtatttcctattcctcagggcacagtcactctagtaaaatctagatgtgcctttggggaaggcttgaaggaagagttttggtatgtgtggtataaaatggtaaggaggcacaagctaggcttcaaccacagagttctgtgccrttgaattgactttggtctggaaattgggcaagagtcagaactctccactgtggtgactcaagctgcttttggctactggttcttcagattttttttttaattataacattaattttttttcctaaaaaaaatcacattaatacatgtgtgatagggttggctgctgggagaaaatctggctagtctaggaaaattcttctttgtgggaatgtttacaacgagggtgctgcaagacctttgtgtacaagtaggtgacccatctgggatcactggtttgacaaatgaagctatactccagtgggctacctatctatttgttctcatggacactgtgaccaattagcaactgccccaaatccctttaagctaaggcattgtgattactggcatgtctctgcctacacagtgagtccactttgtctttggtggttaataactgtcacttggctttgacta

SEQ ID NO: 534592 - DNA, 604 bp, Homo sapiens
actgggtatttcctattcctcagggcacagtcactctagtaaaatctagatgtgcctttggggaaggcttgaaggaagagttttggtatgtgtggtataaaatggtaaggaggcacaagctaggcttcaaccacagagttctgtgccattgaattgactttggtctggaaattgggcaagagtcagaactctccactgtggtgactcaagctgcttttggctactggttcttcagattttttttttaattataacattaattttttttcctaaaaaaaatcacattaatacatgtgtgatagggttggctgctgggagaaaatctggctagtctaggaaaattcttctttgtgggaatgtttacaacgagggtgctgcragacctttgtgtacaagtaggtgacccatctgggatcactggtttgacaaatgaagctatactccagtgggctacctatctatttgttctcatggacactgtgaccaattagcaactgccccaaatccctttaagctaaggcattgtgattactggcatgtctctgcctacacagtgagtccactttgtctttggtggttaataactgtcacttggctttgacta

SEQ ID NO: 534593 - DNA, 604 bp, Homo sapiens
actgggtatttcctattcctcagggcacagtcactctagtaaaatctagatgtgcctttggggaaggcttgaaggaagagttttggtatgtgtggtataaaatggtaaggaggcacaagctaggcttcaaccacagagttctgtgccattgaattgactttggtctggaaattgggcaagagtcagaactctccactgtggtgactcaagctgcttttggctactggttcttcagattttttttttaattataacattaattttttttcctaaaaaaaatcacattaatacatgtgtgatagggttggctgctgggagaaaatctggctagtctaggaaaattcttctttgtgggaatgtttacaacgagggtgctgcaagacctttgtgtacaagtaggtgacccatctgggatcactggtttgacaaatgaagctatactccagtgggctacctatctatttgttctcatggacactgtgaccaattagsaactgccccaaatccctttaagctaaggcattgtgattactggcatgtctctgcctacacagtgagtccactttgtctttggtggttaataactgtcacttggctttgacta

SEQ ID NO: 534594 - DNA, 609 bp, Homo sapiens
ttttcctattttcttctactatagataggtagccagaaaggcagaatagaatatattaattttcactttacagagatcatgatattatcctaaatgatgtacaagaacaatgctcacattggtcattgaaaacttattatttcattgtcatagacattttaacatgacctcttacattatataaatctgtgctatgtgtaagggtttcaggagatgataatccacagtgatattatccaaaaacaagccaccaagttaatattaaattattctaaatacaaggacattgaaatatactaaccaagtatattatctaaataatagtcattraacatataggaaaaatatatctgaaaacatgatagcatattattttacagcactcttacacacattatagcaataacagcaagacaaatatcattcaattctacttatatgaagtatctaaaataataaaatttatgggattacagtggaatggtggctgctaggggctaggtggaggaggaaatgggaagttactattcaagaggcataaaaattttagtcaagcaagattaagaagcttgagagatctactgtacatcactgtacctacagtcagta

SEQ ID NO: 534595 - DNA, 652 bp, Homo sapiens
  misc_feature (1)...(652): n = A,T,C or G
nnnnnnnnnnnnnnnnnnnnnnnnnnnnnnnnnncgtggtcgatccaattcagtggaagaatgctgattattgcattgatccttactgycagaggtcaccagtagaattccactggattcttgctcttgtcctataggacactttttgttaaaaaaaaaaaaaaaaaaaaaaatatatatatatatatatatatatatatatatatatatatatatacattctttatgctcccttctctctctctctctctttttgagacaaggtctcactctgttgtccaggctggagtgcaacggcaccatctcagctcactgcagcctcaaactcctgggtcaagtgatcctcccacctcagcctcccaagtagctgggactacaggtgttcaccaccacacccggctaattttttagatttttatagagacagggtctccctgtgttgcccaggctgttcttgaactcttgggctcaagcgatctttccacctcggcctcccaaagtgctgggattatacacatgagccaccacacccagcttctttttatttttaataattttggagggaatagtcttagatatacagaataatcatgaacattctacatttgttgtcatgtttccttagtctcccctgctctgtgacttctcatct

SEQ ID NO: 534596 - DNA, 652 bp, Homo sapiens
  misc_feature (1)...(652): n = A,T,C or G
nnnnnnnnnnnnnnnnnnnnnnnnnnnnnnnnnncgtggtcgatccaattcagtggaagaatgctgattattgcattgatccttactgccagaggtcaccagtagaattccactggattcttgctcttgtcctayaggacactttttgttaaaaaaaaaaaaaaaaaaaaaaatatatatatatatatatatatatatatatatatatatatatatacattctttatgctcccttctctctctctctctctttttgagacaaggtctcactctgttgtccaggctggagtgcaacggcaccatctcagctcactgcagcctcaaactcctgggtcaagtgatcctcccacctcagcctcccaagtagctgggactacaggtgttcaccaccacacccggctaattttttagatttttatagagacagggtctccctgtgttgcccaggctgttcttgaactcttgggctcaagcgatctttccacctcggcctcccaaagtgctgggattatacacatgagccaccacacccagcttctttttatttttaataattttggagggaatagtcttagatatacagaataatcatgaacattctacatttgttgtcatgtttccttagtctcccctgctctgtgacttctcatct

SEQ ID NO: 534597 - DNA, 652 bp, Homo sapiens
  misc_feature (1)...(652): n = A,T,C or G
nnnnnnnnnnnnnnnnnnnnnnnnnnnnnnnnnncgtggtcgatccaattcagtggaagaatgctgattattgcattgatccttactgccagaggtcaccagtagaattccactggattcttgctcttgtcctataggacamtttttgttaaaaaaaaaaaaaaaaaaaaaaatatatatatatatatatatatatatatatatatatatatatatacattctttatgctcccttctctctctctctctctttttgagacaaggtctcactctgttgtccaggctggagtgcaacggcaccatctcagctcactgcagcctcaaactcctgggtcaagtgatcctcccacctcagcctcccaagtagctgggactacaggtgttcaccaccacacccggctaattttttagatttttatagagacagggtctccctgtgttgcccaggctgttcttgaactcttgggctcaagcgatctttccacctcggcctcccaaagtgctgggattatacacatgagccaccacacccagcttctttttatttttaataattttggagggaatagtcttagatatacagaataatcatgaacattctacatttgttgtcatgtttccttagtctcccctgctctgtgacttctcatct

SEQ ID NO: 534598 - DNA, 626 bp, Homo sapiens
aaataaaggaaacaataaactaaaaaaawttatgtctaaatgtcctgaagccttgctattacatgacctattataagatgaatttctgtctgagacattactgtcttagacttcctccaggaggattcattaaagtaagtagcaaaagaatgtagttgtaacatgttttaacctataacagactaacgtgttgttgagcatgttatatactccagtgtcctttttgaaaaagaaaatatcagatcagggaacattttaaggttacagtcaaaataactatttataagagtatcatataagatgtatgcgttcatttatttattccttatccaattagtcacgtgatacatttttagttactacacatactttgaaaaacataaaaaattctaataaggattcttaatgaaggcatatttattaacaaaataaaatataaaataaaaaagatccatctttggccaggcgtggtggctcacgcctgtaatcccagcactttgggaggccgaggcaggcagatcacgaggtcaggagatcgagactatcctggctaacactgtgaaaccccgtctctactaaaaatacacaaaagtagcccggcgtggtggcgggtgcctgtagtccca

SEQ ID NO: 534599 - DNA, 605 bp, Homo sapiens
atgagatttcattagactgttttgtcacatagcaatagctaatagtgtgaaacataaccggtaacttacagataatgaaatagaatggaaaaaaatagaacagaaaatgtaagaatggttaattcatagtagggacaataatttaattattaaatttaattgaatttagatatacttaaatatttaagcatacacatgtgtgttctggagtacaatataaaatgtagttttcactctttcattattttttttatttgaaaattgctgacctgaatgaagttcctggagtatggcacagtactctggcattaaccctgcatatttaatctatttatttatttatttatttatttatttaattttgtatttttttttttagttcaatgggtttttggggaacagatggtgtttggttacatgaataagttytatagtggtgatttctgagattttggttcacccatcacctgagcggtgtacactgtatgcaatgtgtagacttttattactttctacacccacccttgctcccaagtccccaaagtccaatgtatcattcttaggcctttgtgtcctcatagcttagcttccacatatgagcgagt

SEQ ID NO: 534600 - DNA, 605 bp, Homo sapiens
atgagatttcattagactgttttgtcacatagcaatagctaatagtgtgaaacataaccggtaacttacagataatgaaatagaatggaaaaaaatagaacagaaaatgtaagaatggttaattcatagtagggacaataatttaattattaaatttaattgaatttagatatacttaaatatttaagcatacacatgtgtgttctggagtacaatataaaatgtagttttcactctttcattattttttttatttgaaaattgctgacctgaatgaagttcctggagtatggcacagtactctggcattaaccctgcatatttaatctatttatttatttatttatttatttatttaattttgtatttttttttttagttcaatgggtttttggggaacagatggtgtttggttacatgaataagttttatagtggtgatttctgagattttggttcacccatcacctgagcggtgtacactgtatgcaatrtgtagacttttattactttctacacccacccttgctcccaagtccccaaagtccaatgtatcattcttaggcctttgtgtcctcatagcttagcttccacatatgagcgagt

SEQ ID NO: 534601 - DNA, 617 bp, Homo sapiens
gcttaaatagtctataaggagtcttttcttttagtctgtaatacaataagaatctcctagaaggataaatcaaattggttccatgaaaccataaaattattgtgtgataatttataggaaacytcctttacaacatgttttaaaagtttttgttactctaaatcgatatgtatatatataaataagcattattcagcttcttggtttgacacttggatttttaaggaaaagatctgcgtatccatgtgcatctccaaaatatttatttaggtacttgtaattactttaaaaatcctctttgtttgtgtttcatctgtaggtattatagctattcactgttgagaatttagaggtacttataccattttttacaaaatgaatgtcccataattctagcattctgttttatatgaccaagtgctcatttcactctgtttagagatcatgaaggaatcatagtcaagaactcctgaattttaaaatagtatttagtaatgacaaatgttgatataaatgtattatgaaatctttatgtctaagaaaaataatattaaacagctaatattaaaaattttgttggctaaataacatttcaagagatggatgtattgcattga

SEQ ID NO: 534602 - DNA, 639 bp, Homo sapiens
tatgaatgaagtcacaaaatactactaccacagcttttggcttctatatgagatgtgataaacattttataacaaaaataattcatttcaagattgaaccatgataataatccctccaactcatacatcaaccctactgcagttcccaggatttagartccatctgagtcaatcatctcaacacatctgcgaagaaagaggtgaagtgagcaggacaaagcccaaatagagtgcaagaatgaaaagtgggaagggagtgctaccaggtaggtattctctatcccatgaagtctccttaaaaattatttatttatttaaatttttcttaaaaaaaaaaaatacataagagatgaggtctccctatgttgcccaggctggtctcgaactcctgagctcaagcatgtttatttatttatttttattttatttacttatgtatttatttatttattttgagacagagtcttgttctgttgcccaggctggagtgcagtggtgcgatctcggctcactgcaacctctgcctcagcctcctgagtagctgtgactacaggcacccaccaccacacccggctaatttttgtacttttagtagaggcggggtttcaccattttggccaggctggtctgaaatcctga

SEQ ID NO: 534603 - DNA, 625 bp, Homo sapiens
aaatagtctgaaaaggaaactgaaactcagaggcataatttaacttgattcgtgtcacaaaatgtgcaaatggtgaaggagggaactcccatcagtcctacctaactggatagcaagcttcttaaagccaggatcatagttctaaacctctgtgtatccaccataactcctagtacaatgctttgcatcaatcatgaactcaagaaattattactgatgaccaataaccaatacatatgtactttcaaactaaataacaagaagaaaatctataaatagcaacctgtaaatatcaaatatttctgtgtgttgttgtaggtctgtgaaaccacaacacactgatatattgaaagacatggactaaatccagttctaaagcaatttggaatttccagaatataacttaaattcattagattttcagatttctgaattcattcaagttgaaaagttatwctgggacagttcaatgtctttaagtttttaatcttctccattctaatttcctgctataaaatcaataaagtgtaggttgtaaagaaaattattttgtttgattactttactcctagttagaggcagatgttagttataactttttctgtagtttagcaggtatttttga

SEQ ID NO: 534604 - DNA, 608 bp, Homo sapiens
agttggagtcatccgcatagagtcattaccatctcacttttggaaacactcccactccactctgttgctgtccctagcactgtcactgcaataagataagagccccaggctgggcacggtggctcacaactgtaatcccagcactttgggaggccgaggcgggcagatcacctgagtcaggagttcgagaccaccctggccaatatggtgaaaccccgtctctaaagaaatacaaaaattagccaggcgtggtggctcacccctgtaatcccagctactcgggaggctgaggcaggagaatcgactgaacccaggaggcggaggttgcagtgagccgagatcgcaccactgcactccagcctgggcaacagagcaagactctgtctcaaaaaacaaacaaaaagagtcccagtgcacctccagcgtcctgggatcctgcagctcctgccctcctgggtgcaggtccctaacatcccccccyaggcccacccaccttcacccccacctgcctgctccagcctcttctgcttcccaaagccacggccagacgcacctccccagacatggcctggccggccctcctctgctcaggaatgcactcgggctgg

SEQ ID NO: 534605 - DNA, 549 bp, Homo sapiens
ctgaagcagggctagatccctaaattaactaatggaatttaatccttgcaataagatacattctttataggtgagaaccctgagcatcagagaaggcaactaactcagccaagsttaaacagccatgaaggggaggagctgggatgtgggggtctgactccagcatctgcacttgcagtgactgggctatagtagtgcccctcacatcttatatgaaagcacgtgggctgggcctgacaatctgtgtcttaaacaacctcccaggtaaaacccatgctgatggttgacgaaccttactaggagccacaaagcccttttccactcttggtacttctctgatctgtcctctagaacatcttctacaactttcctgattacacgaatgaatctaccttttcatttttgtgattcagttttgtatgagtcaggattctccagagaagcagagccaacaggagatatatagatacagagatagagagagagagtgggaggaatcggggctcatgtgattcggggaactggcaagtctggagtccacagggcagg

SEQ ID NO: 534606 - DNA, 549 bp, Homo sapiens
ctgaagcagggctagatccctaaattaactaatggaatttaatccttgcaataagatacattctttataggtgagaaccctgagcatcagagaaggcaactaactcagccaaggttaaacagccatgaaggggaggagctgggatgtgggggtctgactccagcatctgcacttgcagtgactgggctatagtagtgcccctcacatmttatatgaaagcacgtgggctgggcctgacaatctgtgtcttaaacaacctcccaggtaaaacccatgctgatggttgacgaaccttactaggagccacaaagcccttttccactcttggtacttctctgatctgtcctctagaacatcttctacaactttcctgattacacgaatgaatctaccttttcatttttgtgattcagttttgtatgagtcaggattctccagagaagcagagccaacaggagatatatagatacagagatagagagagagagtgggaggaatcggggctcatgtgattcggggaactggcaagtctggagtccacagggcagg

SEQ ID NO: 534607 - DNA, 616 bp, Homo sapiens
tcaagctgtggtatgcagaagggctttatgtatgcctcccattttggcacataattgaacaaagaaacgtactcaattttcaaggaaatcagtcatttttttctgttgtaccaaagacattcttaagtgaaactggctttttaaaaaagtttgcatggtagtaaaaaatacgttttgtatatagtgcattttgatgctactgccttgatttggtgctaaggtgcyatcagctatactcatcattgctttgaccattcatgcaaattccaacaaaatgagaaaggctaatactgtcaaaatattactaagaaaatagttttgatctcacagatgacctgaaagggtctcagagaaccttgggggttcatggactgcagtttatgagctgctgccctagaatgtttagtgatgagttttagggctgatttaaaaaatatgtgtgttctaaggtagatattatgtggttttccaagtaaggctataatataaacgtataatatttaaaatgtaaacatagggctcattattatggaagtatacatttcaacatttattttacgcattatatattttctgtatttataaatgcctccttttaatttttagttatcagtgc

SEQ ID NO: 534608 - DNA, 616 bp, Homo sapiens
tcaagctgtggtatgcagaagggctttatgtatgcctcccattttggcacataattgaacaaagaaacgtactcaattttcaaggaaatcagtcatttttttctgttgtaccaaagacattcttaagtgaaactggctttttaaaaaagtttgcatggtagtaaaaaatacgttttgtatatagtgcattttgatgctactgccttgatttggtgctaaggtgctatcagctatactcatcattgctttgaccattcatgcaaattccaacaaaatgagaaaggctaatactgtcaaaatattactaagaaaatagttttgatctcacagatgacctgaaagggtctcagagaaccttgggrgttcatggactgcagtttatgagctgctgccctagaatgtttagtgatgagttttagggctgatttaaaaaatatgtgtgttctaaggtagatattatgtggttttccaagtaaggctataatataaacgtataatatttaaaatgtaaacatagggctcattattatggaagtatacatttcaacatttattttacgcattatatattttctgtatttataaatgcctccttttaatttttagttatcagtgc

SEQ ID NO: 534609 - DNA, 657 bp, Homo sapiens
ctgttgaccatcaatccaacctttatttgattaagctcagtatatagtacatcactggaaaccagtcatttagttaattggccatataaacgaacagttttgccattcattgttaattacaggataatatatgacatattagtgtgtagtcactgaactctgtgccaaaacagtaatacatttgctaccataatggctcattcggcactctaaggttaaaatgcaatctactctataagcaagtgccacattaaactgattgaccagagatcgcaagtgaccatgagaacttcacccagaaaaaatttttaatgctttatatgcctattctatggcatgatttgtgtcacatactagacaaagatgatttgttttcattgttctgaatgtatgtgagatctgtaataacatcctttcatcacagatgagaaaatattaactaacytgcccaaaatcatgtactacaaataacaggaccaggtattaaatgagatgatatatttgacttaaatacctccatctatgcacagccaatagattattcttacatttttgtgtgaccataaaggtttatattactaaatgttgattatgatgtatgattattaatttggagatatttgcattatcccaacacttttcagattttcagactat

SEQ ID NO: 534610 - DNA, 407 bp, Homo sapiens
ttaaaaagcttttcgttgggggtgctccacctgaatttcaaccttccccactcagaaatattcctccttttgaaggctgcatatggaatcttgttattaactctgtgtaagtggatctcctcattactactactaattttttatttttatttcttgctattaggggtcccaatgcatctacattgtctacagctatgcaggggaggagggaaacaatgaggatcttcaayttagactgagaaaagcacactaatggacttaaaaaggcatgcggggattgggcttaattgtaaggaagcaaaaaaacgaaaataaaaaaatcttatttattacattctattagccccatggactttgcaaggcctgtgtccttcaaaaatgctgacattggtcgctgtgcccatcag

SEQ ID NO: 534611 - DNA, 602 bp, Homo sapiens
ctaaactgcaagctgttaaggacaaagccagacaagccaacgacacagctaaagatgtactggcacagattacagagctccaccagaacctcgatggcctgaagaagaattacaataaactagcagacagcgtcgccaaaacgaatgctgtggttaaagatccttccaagaacagtaagatctcctttttcattgtgatgatgtcatttatttcctctcactgtaaaagtatcccagacctgtaaatgctcgagttggaaagaccctcatggtggtgtagtctgccttccttctttcatagattggcctcagaaattgagtgtcatgcagttccaaagctrgaatccaagtcttctagctctgccccggtgcttttttcctctgaaatttttccagttgagaagagattaggaattctcaaggtgtgcctaacattcagcagagagatgcaaaacactttttaatccgtgtgtgtaattaaaaacacagttgtacttgggtaattatatcctcagaactggcgaagtgtcatggaacatagaggttaaggggcacgttcatgaacagacttgttagaacaggatatgaaaatgatatcaact

SEQ ID NO: 534612 - DNA, 684 bp, Homo sapiens
aggggtgggaaatatgggctgacatggtgtgtaagaatgacgtgtcagcaatcctgagggttccgtcttcagaggagaaatcatctctagtttctttctatctcacaagtgcagttgaaagctacttacacaagaaaatcagtgacgggcagtcaggtagggaagcagcgtgtttccaggtttgaatcagaagaggttcttgagtgcgggctcaggacatcacagtgcagtatggtctacacmcagggctgcaatgcttgcttctgtggacgtggcaatggtgctgcagaatgagtttgttcaggatgttgcaatcatgtaatgatgtggtcagggtgagtacatgctcataatcagttcagtgccactcagtgttagagaaaaaagttttgcaatgagtccaaatggctttgtgacttagctgtgattcaactaggatgaatggcagaaaccccttgttaccactcaagtgctcacagggctgtgtgaagtcgaatgaagtctcaagtcgtacttgaacaaggtatgaacggccagtactgagaattgaggattaaaatgtaacataaaacagacattttggatgagttagaaattgggtataaggtcagaaaccataatttttaaaaggcaacttaattgcatccaatataaaccagtagcaaatagatcctcaggaaacag

SEQ ID NO: 534613 - DNA, 634 bp, Homo sapiens
cagcccctggctgggaaacagtgggcccctttcctgtgccctgtgtctgctgccctgtctgtggtgcacgtttctctaatgctggaagagttttgctagcagtccttgggattagaatcagaaacaatcccaattttcatggcaggagtggatgtactttgttttttccaaaacacaccccatctccaytgggttaggtctgttccaggcgctcagtgtggactagtgtgtgtctaactgttctctaaagcatcagatgtcacactcacttctgtcgaaggcaggacatggcgccaaggggaccctcattctcattcagcattaaatagacatgtgtctgctttgctgccgactgagaagagcttgctctcggtcatactgaagccatcaggttgggtaggtatttagtcgtgctgggtcactattactgaagctttgacccttcccgtttcaacatgaatttgacatctgtttttcagcattctttgttttactcacaaaggactgagactcagcctttgataaattctcatttgcagaagggaagtgaaaaaaaaaagcatttgggtccttataagaaatacaccaattttaccccgactcttcccggtggtgtgatcattttgaagtttga

SEQ ID NO: 534614 - DNA, 501 bp, Homo sapiens
tgggggaacaaaggaaagaagcaggggactgaaggaggtggcctgtactccaggcaaaatacactgatggctcagcctgcagtagtgccttgaatggcagtgaagttctgaagcttctctgaagataaagcaaatggagctgtgtttagcaggggaaggtaacattagtatccatcatagctgtcttgatgaattcctatcacagaagatgagcagaggtggtgggcagagagagttagcaaccaggctacttctgaccatagccataaggcattttgctggcatggwtgctcattctcgaatcctgcagaggtaaatgatctgtaggtctgtgctccatgacattacctatgcatacgggaaaatatattcactaaaagtttaattaacatatttcatatagtttgcaaagtattaacattttctcatagtagagagacctgggaacatacaataagtcaataaggcaaacacctgactgtggctgggcaggctggagag

SEQ ID NO: 534615 - DNA, 662 bp, Homo sapiens
tatcagatctgtcaaaagcagagatcaatgttgagcacttgacggatgatggtaccatccaccaaagagaccaactagccacttggaggcaagttgaaaacatcagaccacttacctactaaaaggagtagtgatttgccccgacttgaattattcttggcatagaactctctgtctttcccacagcaycttgcaaagcaccaccactcaaaggttcataaatcttgaaaaacatctcctaggaccaagggtcacacttttagaaggaggggtgacaatgataaataaccaaggaatgtactgtttctaccatacatcatgtggtctcctgagggcagagctaagcaccaacttggaagtgacatctctgagatggggacattgtccttcaaggcttcaaggtaaagtatattatttaactaatggccattatataagactgtgtacttagcagttagaaaacatgagtctgggactgaaatggtgaaattaggattagcatttctaattataatttgcagttatctgtgggagaattagtgatttcattactacaactttaggcttttctggactaaaggtcccagttcctggagtaggggtggggaaagctattctaccagcatccttgttaaaggttccaccaaatccaaactgagcag

SEQ ID NO: 534616 - DNA, 491 bp, Homo sapiens
ctctctgtctttcccacagcatcttgcaaagcaccaccactcaaaggttcataaatcttgaaaaacatctcctaggaccaagggtcacactttyagaaggaggggtgacaatgataaataaccaaggaatgtactgtttctaccatacatcatgtggtctcctgagggcagagctaagcaccaacttggaagtgacatctctgagatggggacattgtccttcaaggcttcaaggtaaagtatattatttaactaatggccattatataagactgtgtacttagcagttagaaaacatgagtctgggactgaaatggtgaaattaggattagcatttctaattataatttgcagttatctgtgggagaattagtgatttcattactacaactttaggcttttctggactaaaggtcccagttcctggagtaggggtggggaaagctattctaccagcatccttgttaaaggttccaccaaatccaaactga

SEQ ID NO: 534617 - DNA, 662 bp, Homo sapiens
tatcagatctgtcaaaagcagagatcaatgttgagcacttgacggatgatggtaccatccaccaaagagaccaactagccacttggaggcaagttgaaaacatcagaccacttacctactaaaaggagtagtgatttgccccgacttgaattattcttggcatagaactctctgtctttcccacagcatcttgcaaagcaccaccactcaaaggttcataaatcttgaaaaacatctcctaggaccaagggtcacacttttagaaggaggggtgacaatgataaataaccaaggaatgtactgtttctaccatacatcatgtggtctcctgagggcagagctaagyaccaacttggaagtgacatctctgagatggggacattgtccttcaaggcttcaaggtaaagtatattatttaactaatggccattatataagactgtgtacttagcagttagaaaacatgagtctgggactgaaatggtgaaattaggattagcatttctaattataatttgcagttatctgtgggagaattagtgatttcattactacaactttaggcttttctggactaaaggtcccagttcctggagtaggggtggggaaagctattctaccagcatccttgttaaaggttccaccaaatccaaactgagcag

SEQ ID NO: 534618 - DNA, 608 bp, Homo sapiens
tggaatttatgagcaactgtcactgcctggtagcatgagtgggtaagccctggcacactgccatagctagttactctacttgttggaaaccaggcagacagttcttcacatggggaggctaaaccattgtgaaagcacagctcttcacacagggcaccaaatttgtagttgaactcaggtctggctgcttgctgcttgaaatgcaaaatacaaaaagtgaggtgcggtgaaagtaatgcaactttattcaaatgctagcagttggaaaatggccaggctcatgccatttccattgtctttgaaattgtccaaaacaatttcaaaattgtaggcaagtgagtgggtttaagaagagaaacttggcatcagaagtatgtgggagtgggacagggtacagggtttctgtgtcttgttctgatggctaccttgagttattgtccaactagagtgtgggcgggcaccatcttgacaatrgccaggttgtagattaattgccttgaagtaatccttagctggggagaattctgctgcttgttcttctgcatggtttatttcaaggttatccctgaaatttccaagcaagcacatatttagttcagcaagtgcag

SEQ ID NO: 534619 - DNA, 603 bp, Homo sapiens
ggctaattttttattttttgtagagatagggtcccactatgttgcacaggctagtttccaactcttggactcaagcaatcctcctgcctcagtctgggagtcacaggatttacttatttaaaaactcaattgtttaagggaaagagttaaactctagtgtgcttcattgatttcctctgccccttttgctgttttatgacaattcctaatttgttcattaatatttctagaaagatgctatgttgttgccatataataatatcgataatagtttggctggttgactgtaagtacaaataacatattcattttccttaaaagtctgttagtttaaccrtgtatctgactggccagatagtcttgtctatttggcttctgggaacggtgtcttcccagtgtcaacgttcctatctgccttatttatgtgacctgactgaccagaaatcctaatgtagccatcttgctccaaaaggttcttggtcttccctaccttgttacattacactcatcgtcttcttgacttactgtacactgtttgctctcttttctccctctcttcttggtgagcaactcaagagatgcctcaaaggttgagagaagtga

SEQ ID NO: 534620 - DNA, 603 bp, Homo sapiens
ggctaattttttattttttgtagagatagggtcccactatgttgcacaggctagtttccaactcttggactcaagcaatcctcctgcctcagtctgggagtcacaggatttacttatttaaaaactcaattgtttaagggaaagagttaaactctagtgtgcttcattgatttcctctgccccttttgctgttttatgacaattcctaatttgttcattaatatttctagaaagatgctatgttgttgccatataataatatcgataatagtttggctggttgactgtaagtacaaataacatattcattttccttaaaagtctgttagtttaaccgtgtatctgactggccagatagtcttgtctatttggcttctgggaacggtgtcttcccagtgtcaacgttcctatctgccttatttatgtgacctgactgaccagaaatcctaatgtagccatcttgctccaaaaggttcttggtctyccctaccttgttacattacactcatcgtcttcttgacttactgtacactgtttgctctcttttctccctctcttcttggtgagcaactcaagagatgcctcaaaggttgagagaagtga

SEQ ID NO: 534621 - DNA, 446 bp, Homo sapiens
tttttggaaagtgcctttagttggtggtatggacaagggccagatcatgaggaccctacagagcatggtaatgagtttggatttaattccaaatacaaatgagaaggtaatgtaagattaaaaagcagatgaagagcataatcttattttcttatttcttaaaagacacttcccttgctgagtaaatgtagtggaggagttgggggtaggagaaaagggcagaagagaaacttgttaaggaggtagatgacatttgttcagggaagagataagagccttgtactagggtgatcatcggaggggagataaaatcaacaggactccactacacgtggaggaatcaaagrttctggttagcaccagtatccagatgagaaaagattagggtggagataggtcccattttgaaatgccagcgagccacctaagaggagatatcaatagac

SEQ ID NO: 534622 - DNA, 584 bp, Homo sapiens
tgtgtccatgcctgtgggatgyttttccactagcacctccacaaaatttttaattcgaagggtaggatgagggatctgagattttaaaacacctcccaggtgacttctgcaagaaacacctgcagaggagagagagcttggtcactggggtccgatcctggccccggtgtttactaacagtgttgccttgggctgatgactcatcccaatctctttggtttccaaacgttcactaatgcgatctgctctgtgaggctgatcatctggcagagctcatggcacttaacacagactctacaacacgagttctcctgtcttctcggtcttaatctagtgcaagtctccccaccaagacttgggaaacactcctaaggaaacaaagaggaagaaagtgagatcccaggggtgaagattggatcctttgtgtgcttagttctgaagtggaatcaaatcacttcagaagttggttgtgtgttggcctctggtgaatttgtttcacaatgccatgtaggagtacatccgtggcttctcatatttgtttgcctaactataattgagcagcttgaattcaggctacattttta

SEQ ID NO: 534623 - DNA, 651 bp, Homo sapiens
tccatgcctgtgggatgcttttccactagcacctccacaaaatttttaattcgaagggtaggatgagggatctgagattttaaaacacctcccaggtgacttctgcaagaaacacctgcagaggagagagagcttggtcactggggtccgatcctggccccggtgtttactaacagtgttgccttgggctgatgactcatcccaatctctttggtttccaaaygttcactaatgcgatctgctctgtgaggctgatcatctggcagagctcatggcacttaacacagactctacaacacgagttctcctgtcttctcggtcttaatctagtgcaagtctccccaccaagacttgggaaacactcctaaggaaacaaagaggaagaaagtgagatcccaggggtgaagattggatcctttgtgtgcttagttctgaagtggaatcaaatcacttcagaagttggttgtgtgttggcctctggtgaatttgtttcacaatgccatgtaggagtacatccgtggcttctcatatttgtttgcctaactataattgagcagcttgaattcaggctacatttttaaagaaaactagtgatcatattcacatatgatgctctggcagtacacagagtcaagttttcactggaaaata

SEQ ID NO: 534624 - DNA, 639 bp, Homo sapiens
aattttaacctgagcctgacaaatttgcagggtatgtgggcacacattactgtatattgcagctggaatgcaaacaaagtggaccttaatggcaattaaatcccaacccctcattgtacagatgaggacctttaaatgcagataggtgacaagcaaatatttggttgtggtcaatgttaatgttgaattgattacttaatcaaaaatcacgagattgatccatatttagacaaacatctatgggcttacacaccgatggaatttacaccttatgtatctgtatacattatagactttctggacattcaaatccctttcgtagaagattctgaggctttgagatactggactctggtctggtaagacttgtttctctccacatgktaccgccagctgtaacacagggaatcccacttaggagcatatgcagggaaaatgatcatcactttgccaagccctgttttatccttacttcctggcatcaaagctatcttacctgatcttactttccactagaatagagcccaatctaggccatcacccaaaaactggaggagactttttggtagatacttgtaattgagtttattttcatatatttagtttaatgcaaaatataaattaatgaataaaataaaa

SEQ ID NO: 534625 - DNA, 661 bp, Homo sapiens
aagcaatatggcatgcagttcagaacggggtcttccaaatacaggccctgacttggtcattgcaggccatgtgtctttgacaaaacacctttgcccaattacttttatagtgaaaaggggacaataatagtgcctactttctaaagttgctgagagggttgcattagaatgtcttcaaaaagcttatcacattgcctgtcacaaagtgatattaatgattatgttcataataccattaaaaaatttattactttctaagcaggaaaaaaaaaattcaaatttaggacagtcccataataagaattaatttattttaacaaataaagttatggcttttgttttaaattgaaatagataatttaagtactttctcttaattattttataaaatgtatggtgttttaacatatgcaaagttgatatcaattctattttcttaatctctcaaagttgccacattgctatagaaataactgtaaaaacatktgatttttccttccacttgtatctgaacagcatttactcatttaatccaaaagctgaagagatgaaaaattgggagatagtggtttcactgttcacagacaagctttcccactggctctgtgacctcaaacaaattggtttactcctctgtgcctctgggccagtgaggaagctt

SEQ ID NO: 534626 - DNA, 492 bp, Homo sapiens
acagtaccctaaatatagaatgcaaaatgctttaagtctattagtgccacctgaaacacttttgtacataagttgaatagatcactgtcattataatctggcctaaaaccctctttttaaacaaaatgaagctattcaataaagcatacccaattaggttttacttgccagccccaccctgctcctaagctgtgtcttcataagcttgtgccacatgcaaaagttagcctaaagctttggggcagagtcactgaatcatgaatcttcactgttagaacatgttttgtatgtttagaaaacaccaaaatattgaattaagtaaagttactagggtgactgtagcttggttagsgccagataaactgtcatagacagagggataccaagatacggaagaggacatcaaaagctcctgctcaaactgctagtcgtgatgtgtgcagacacctgtgcacacaggcaaaacccatgtgggagaggtggtaacatgcc

SEQ ID NO: 534627 - DNA, 492 bp, Homo sapiens
acagtaccctaaatatagaatgcaaaatgctttaagtctattagtgccacctgaaacacttttgtacataagttgaatagatcactgtcattataatctggcctaaaaccctctttttaaacaaaatgaagctattcaataaagcatacccaattaggttttacttgccagccccaccctgctcctaagctgtgtcttcataagcttgtgccacatgcaaaagttagcctaaagctttggggcagagtcactgaatcatgaatcttcactgttagaacatgttttgtatgtttagaaaacaccaaaatattgaattaagtaaagttactagggtgactgtagcttggttagcgccagataaactgtcatagacagagggataccaagatacggaagaggacatcaaaagctccygctcaaactgctagtcgtgatgtgtgcagacacctgtgcacacaggcaaaacccatgtgggagaggtggtaacatgcc

SEQ ID NO: 534628 - DNA, 492 bp, Homo sapiens
acagtaccctaaatatagaatgcaaaatgctttaagtctattagtgccacctgaaacacttttgtacataagttgaatagatcactgtcattataatctggcctaaaaccctctttttaaacaaaatgaagctattcaataaagcatacccaattaggttttacttgccagccccaccctgctcctaagctgtgtcttcataagcttgtgccacatgcaaaagttagcctaaagctttggggcagagtcactgaatcatgaatcttcactgttagaacatgttttgtatgtttagaaaacaccaaaatattgaattaagtaaagttactagggtgactgtagcttggttagcgccagataaactgtcatagacagagggataccaagatacggaagaggacatcaaaagctcctgctcaaactgctagtcgtgatgygtgcagacacctgtgcacacaggcaaaacccatgtgggagaggtggtaacatgcc

SEQ ID NO: 534629 - DNA, 586 bp, Homo sapiens
tgtagccatgctccagtccaaccaagtgatgtagcctcaaaagattttcctgtgtgtactctgcaccaaggagacagcactgcagtgagatgtatgagagaccattcaagtataggaaacatctctgatttgattgtgtcccacccctagccatgtcctgctgccccttggccacctgcacccctggaaggtgaccagatctgagcacctcatatcaagcccccacatttttttttttttttgagacggtgtcttgctytgtcacccaggctggagcactggagtgcaatggcgcaatctcacctcactgcaacctccacctcctggattcaagtgattctcctgcctcagcctcagcctcctgagtagctgggattaaaggcacctgccaccacgtccagctaatttttgtatttttagtagagatggggtttcaccatgttggtcaggctggtctcaaactcttgattttgtgatccacccacctcagcctctcaaagttctgggattacacatgtgagccactgcgcccagcccaagcccccacctttctaggtaagcttatgatcacagctgatagtgagac

SEQ ID NO: 534630 - DNA, 640 bp, Homo sapiens
tgaacattgctgtataatactgctctacatacaaagcttcttccagcttcattttcgttggtttatacacacataaattcaggacaaaacccatcacccttattcctgtactgaaaatgcagtttctgatgcttgaaacgggagacatttgcccttcccctaacctgggagtaacctcttctccaaacaagcttctttgtaataagtatctgaaaggcagcagcaaatttaaagggttcagcattcagctgaaaattggaaaatccacaaagacaggtttacaaaacatcatttgctttggactcagacgagatcaagagaattgtccatattgctcacctcatctccctgactctctctcccctaaaatttattttcacagttttaggtggaaaggccattccccagctgcaggtggttttgaggccccacacctgggcactgtgacttttgtatgtttatggtcttaacctgccctataagagtatacatattccagtgcaacttgtgaaacctaatacagcgttttcagagaccttcctgacwttttcctgaagggaagttatcgtcaacttatgttaatgagaaaactacacaagtggaggtaaacttctctataatcaatcaagatttcctctgc

SEQ ID NO: 534631 - DNA, 327 bp, Homo sapiens
ggttagagtatattgccttaagctgtgataaataaatctcaacatttcagtagcttctcatgctgctggtggcgggtgggggcgatgtgttgctcctcgtgtgaccccttccacrtggtgacatcacaaccacatgtgaaagaagaagggagaaatggggatggcacccaggagatcttacggctggttgggaactgacatacatcacgtccttctgctcacactctgctttcgtctcacgtggccccacacaaagtgcaggaggcctgggcaggagaatttacctgtgagtacctgagaagaggcgaaggccaggcgggatcagcc

SEQ ID NO: 534632 - DNA, 521 bp, Homo sapiens
tcctcgggtcctgggagcacccacatgttcttttgggagggctgagtggctactgacagcaagaacagaacctagggccagtgtcgcagaattcccagagctgtgccagtttaagggctacccacaggcatctctatgctttgccatttgcccctgtaagragtaaggtcgggagtcctggagaagtcaagctcaagtcgtcctttgtaacgacactaaagctcaccttgagttcacttcacacgggccagtcacaaccacttaattctgtcctcacagcccatcagcaggcactgtggtgtttctatcttacggaggaggacgccagggcttgcccaacgctatcaccttgccagagtcgtgctgctgaattatggcagatctggggtgctgtcgtgggtgtctctgtctccctcccacatcccggtctctacccaccatactccctggaagtggagagcaatcacagatctgctggtttctttctctgcacctggcaacctctggagggcaaggcctgc

SEQ ID NO: 534633 - DNA, 521 bp, Homo sapiens
tcctcgggtcctgggagcacccacatgttcttttgggagggctgagtggctactgacagcaagaacagaacctagggccagtgtcgcagaattcccagagctgtgccagtttaagggctacccacaggcatctctatgctttgccatttgcccctgtaaggagtaaggtcgggagtcctggagaagtcaagctcaagtcgtcctttgtaacgacactaaagctcaccttgagttcacttcacacgggccagtcacaaccacttaattctgtcctcacagcccatcagcaggcactgtggtgtttctatcttacggaggaggacgccagggcttgcccaacgctatcaccttgccagagtcgtgctgctgaatkatggcagatctggggtgctgtcgtgggtgtctctgtctccctcccacatcccggtctctacccaccatactccctggaagtggagagcaatcacagatctgctggtttctttctctgcacctggcaacctctggagggcaaggcctgc

SEQ ID NO: 534634 - DNA, 521 bp, Homo sapiens
tcctcgggtcctgggagcacccacatgttcttttgggagggctgagtggctactgacagcaagaacagaacctagggccagtgtcgcagaattcccagagctgtgccagtttaagggctacccacaggcatctctatgctttgccatttgcccctgtaaggagtaaggtcgggagtcctggagaagtcaagctcaagtcgtcctttgtaacgacactaaagctcaccttgagttcacttcacacgggccagtcacaaccacttaattctgtcctcacagcccatcagcaggcactgtggtgtttctatcttacggaggaggacgccagggcttgcccaacgctatcaccttgccagagtcgtgctgctgaattatggcagatctggggtgctgtcgtgggtgtctctgtctccctcccacatcccrgtctctacccaccatactccctggaagtggagagcaatcacagatctgctggtttctttctctgcacctggcaacctctggagggcaaggcctgc

SEQ ID NO: 534635 - DNA, 600 bp, Homo sapiens
attactggatctggctgttgtccagctcgcagtgggcctgctgggtctgtggcttcagcagtggtctttcccagttcttcagtggactgttagacaagagctacagagcaggtggaactacgcccacattagggttcttggtttgtgggataagagctatcatagtgggaaaggccaattggaaaaggtgaaaacccctgaagctgccccctcaacctcgctgaatcttggcaggagatgggaaagaaaggcagactgaagtccaccattaaggacctaaagggtgcacagtgttggtaccgatcattgctccatcgaattgtcaggctggcccctgcagaaactctatggatcccagagaacgaatgtcgactaccactactaccagacttaacctagcagtagcccagatcacaccattagagcagattagcaaagcaccaagaacggggcatgtgcctcttagtttgccagtgcatgctcgaccattccatttgkaaaagaggaccagaaacagctcacataggactgacgatatgcactgctaatttaaccacagtgctgtatgagctctgtgcctcttggcattgagacgtgaag

SEQ ID NO: 534636 - DNA, 544 bp, Homo sapiens
cagctgttttagcaggttttttgtgtttttttgtttgtttgtttgtttgtttgttttctagatggatgtgaacaagattcccagggtactcagagggcaggtgaatgacgaatttaatatatgccccatctctaacgtaagatagagacaaagtttgtcaagttttataatgacttatttggagyagtgattgatgaaaaattattgtaaagtagaaatacagtatcacagaagattataggaccaatcatgagaccatataattatatatcctcatatatcttatgtatgaaactttgtgttttacaagcttaccatattagaacgggccccctgttccctgttctgaaggcatataaattcaccatgggcttttgaacgtcctttgtcccaacttcacaatcagaatttgtaaaagcaacaaaaggtcagagttcggagggcaatttctatctcaagcatggaactaacaggtaaagcaatgatgatggcccctgggagtcactgggctgtcacaaaccctgccaggggaagttggctttca

SEQ ID NO: 534637 - DNA, 547 bp, Homo sapiens
aaaacctcagcccctccaagcccgttgtttaaaagcacgtaaaatatatcatcatagaacgaataaatgcataaccaagccagaaattagtcaaggaaarcacctggaagccaacttctccaaatagcagcactgagtgaaagcagaagcaggggagctcatgggaatgggagatgggcctgggtggggaggggctccagagtccccaccagaaggcaagggtagggtatagttccccatcatgcccagatattgaatgatgctgtgtgcataaagccaggagaaagaaagagtagccagttccttgtcaactatgtgggactgtaagtgggaaaatgagtcatctccaggaactagaacaggactataccacataccaatgtggtgtcagactccatatactcatttggtacaataattcaaaactgaaaatttaatttaaaaagtgactctagagcaacaaagtctatgggtagctacagaaataaaagctaaaccactgtgtgaggataattttacaaaatagtaatgagacttccaggaaaac

SEQ ID NO: 534638 - DNA, 547 bp, Homo sapiens
aaaacctcagcccctccaagcccgttgtttaaaagcacgtaaaatatatcatcatagaacgaataaatgcataaccaagccagaaattagtcaaggaaaacacctggaagccaacttctccaaatagcagcactgagtgaaagcagaagcaggggagctcatgggaatgggagatgggcctgggtggggaggggctccagagtccccaccagaaggcaagkgtagggtatagttccccatcatgcccagatattgaatgatgctgtgtgcataaagccaggagaaagaaagagtagccagttccttgtcaactatgtgggactgtaagtgggaaaatgagtcatctccaggaactagaacaggactataccacataccaatgtggtgtcagactccatatactcatttggtacaataattcaaaactgaaaatttaatttaaaaagtgactctagagcaacaaagtctatgggtagctacagaaataaaagctaaaccactgtgtgaggataattttacaaaatagtaatgagacttccaggaaaac

SEQ ID NO: 534639 - DNA, 613 bp, Homo sapiens
gtgtttctttgaaatccatgtgaggatcactgtttggcagaggcctctctgctcacaccctctggaagctgcgtcctttggccaggactcggtgaagcaatttaggcaactgctttgttcccaagcagctttcaaaggatgggagttggatcctgaaccttttttgccatatatttatgtctggctagtgaagattctttcatgactctattggaacagacatgatcgcaacaattctgaacttgacttgatgaatcatgcagaatattcaacttgagttttcttatatgctcccctgaacaatactacatccctcatagactcaaagacctcaaaatttcccagtgatgttacaggaagcactttttaaaaatatgttttgctcacaactatattctactgagatgcaccacaggtgtctttgctctgatgacttcgtacctattttgaatgagaaactagataaagaaagcctatgaggaattactagataattctrcgtccagaaaaacatatttgttttctctacctttaagacgttattttctccaatttttttttctttagcagggttgtattatcctttataatttccagggaatgtagagaactc

SEQ ID NO: 534640 - DNA, 550 bp, Homo sapiens
gagaatttattattccattttttaattaaagaagagccttgctatcaawatgctctcccacacatccttttgcgttaggtagcacgaacacagtttgagatggaaacaggctgcccaatgtacttattaaggaactttcctggcgaaccactgaaaaatatcctcaagtgtgaccatcacatctgcatcaagttatgaaaaaagtaaggcttgttaacctgctgtttggaaaccagaacacttttatcagttcatataattgctaaccccttattcactgctcaacgctggagagttctttacctcctaagatcccactaattgctgacagatttgatttctccctgacagcaggagtcctgtttctggcctttacatcaagtaattgctttatttttctccctctgctctaaaaaacggaattcccttctcccctgcttgaacccctttaatggcttctttctctgttattaaatccttgccatttaaatcacatttagcgatgttttgaataactgattccaattactaaggctcttaccaagaagca

SEQ ID NO: 534641 - DNA, 526 bp, Homo sapiens
tcctgcctcttttccatcctgacttgtgaaygttgatgactccagaggaagctgactgcttcacacacatcaggaaaaatgtgctagctgcctttagcccgaattaacattatgcttctgatgtaagcctaagaaaagagaatctattttgactttcttctgtaagcaaaaagtgatcatttgctgatggctccttgtgcaattcaaaaagaaaattattagatgtatgtaggcaagtactgacttgcaatgacagtttttgcgaagatgtagaatgtatcaagaatatattgctaggaattttctgtttgttttcattatctaatgtgcactaggtttgagggaggtgagtgtgtgtatatatgtgtttccatgtatggagaaagtgcaaagttattaacattttcatctgcagaaactgattgaaattgtgttcattgactcacaagtaggatccattacagggtgctggttgacaatgtcttctgaaaagcacataataaatgagaaattgtcatgcccaagg

SEQ ID NO: 534642 - DNA, 519 bp, Homo sapiens
ctgaaataaaatttaaaattattattatacaacttattttttgtatctccttcatatgtttgcctagatttcactgcctaggtttaaattttatttgtttatttatttttgagacggagtcttgctctgtctccaggctggagtgcagtggcgcgatctcggctcattgcaacctctgcctcccgcattcaagcaatttccctgcttcagcctcccaagtagctgggattacaggcacgtgccaacaggtctggctaattttttgtattttagtagagacggggtttcaccatgttggccaacgtgatctcctgacctcgtgatcyaccctccttggcttcccaaagtgctgggattacaaatgtgagccactgtgcccagcctaaaatttttaattgttaaatttgttcaattgttgccagcctttagcatattatgttgaaacaaatattgctatccataactctctgtgtatatttctactatttcctccagataaatgctgagaagtggaatggc

SEQ ID NO: 534643 - DNA, 476 bp, Homo sapiens
taaaggggagagaaggaaaaaaaaaaaaaaacaacaccaacaacaacaaaaaacttcactgagagagaatgctggagccgaccctgaggaagagtagttrgttgaccagtagacagcaggacaagaaggtagcccgttccaataataagagcctggagcaaaagcttcatgaaagctggtgaggactggaactgtgagaattgccagaaaatacagcaagcataatagtgtggaagttgggagtggtttgtgaagagaaaaatcctagtcaggcaagctggcagaagagtccaaaacaaaggaaaaactaagctcttttaagtggtaagaaaatgttttttaaaagggggagagaagaaattcatttcttgtctgtgagctctaactataatcaggtgattaaaaatgagtcatcactgactgaagcataagaagcctccaggaacagaacaaattctggtctcgtgcagattcca

SEQ ID NO: 534644 - DNA, 476 bp, Homo sapiens
taaaggggagagaaggaaaaaaaaaaaaaaacaacaccaacaacaacaaaaaacttcactgagagagaatgctggagccgaccctgaggaagagtagttagttgaccagtagacagcaggacaagaaggtagccmgttccaataataagagcctggagcaaaagcttcatgaaagctggtgaggactggaactgtgagaattgccagaaaatacagcaagcataatagtgtggaagttgggagtggtttgtgaagagaaaaatcctagtcaggcaagctggcagaagagtccaaaacaaaggaaaaactaagctcttttaagtggtaagaaaatgttttttaaaagggggagagaagaaattcatttcttgtctgtgagctctaactataatcaggtgattaaaaatgagtcatcactgactgaagcataagaagcctccaggaacagaacaaattctggtctcgtgcagattcca

SEQ ID NO: 534645 - DNA, 598 bp, Homo sapiens
ctgtagcacatgtgtaggtrtatgtgtgcatgcgcatacctgtgcaagctcacatgtacaagtttcagatcttatgttaatttccttgaggatttcagagattgctgcttttcatataatggtggcttatataaattttctgaattggtcagttgtgctctagttaaaaataaaaactgttgaaggtatttcatttgtagacaatatttttaaaatatcaagtatctgctaatgttaagtttactcaagacattcagcaatagtaaaatattggtctgtatttaaattgttgctttaaagtttacagttggagaagtatgtcattttgtgaactattttcctttgtaaattcaaaaattaagttcttatggtttttgtattttttcttggaagttttcatgagagaaattttaaaactatacatgagaaatagctttgttaagttagattgaggagttgaggtttatagttgctgtaaaatatttgaaggactattaaatggaagcgtgattagatttttttctgtatggccttggagaaaaaaaatagaaccaatagatagcattatcattagacaaaattttttggtctaacacag

SEQ ID NO: 534646 - DNA, 610 bp, Homo sapiens
ctccactcccaggagagcaggtaacrgaaacatggacacagtctcctcaaactctagctcagaggtgaacacaatgtggtctccaatacaatgggaagagagctgataagaatttacccacaccacatcagagcaagccctgggcaaacataccacgctccccccaaaataagagaggatgaaaggaatataacattgaacacccagagaatcgagtctgtaagaaaccatagctcacggaatagagagatttattcaataaaagagcttaataagatcacaaattcaacaaaacaagaactcagaaatgagatgctgggacattagaacaggaagaagaagaagtgatggaaaacctaaagaaagaaactgaagaacaaatcaataccattatagacctgacacttacatctgatgtatcagggaatagaacagacacggcaataaactgaattaccgacagagaaagggcctgaaataatcacaatgcttgcagaggaaaacaagagtgaaacatttaagagaaattagatacatattgaaggcagacaaagataatcaaacatttaagaataattggtggacttagaggacacagcccaacaaatga

SEQ ID NO: 534647 - DNA, 531 bp, Homo sapiens
gacctacttcttctgcaaattttctaggcatttggaatccctgccagcaatgtggaggagtacgtagtgagccagcgaaacccagaatgttagaaggaggcaggtgtctcccagagctaggtcagaagcactgacagggcattaaataacaatatcgcatagactgagaaagacactctcttcccaggtctgtttcagtccttccsatgaatcaaagagcgagccatgtgtcctgtttcaacagagagcaagagcggccctcgaaactctagctgatggtgggcaagatctgccctcggaactctagctgatggtgggcaagaagatctggctagaatttaataatattgcttagttttcatgggtggtcagtgagattgcattttcatttatggtaatgaggtcagatttcctttgttaacaaatgtgtgtgtgtataaaaaggactgagtttgaagaagagtacctaatcatccattgttcaggtggtggtgctacatatggacaaatcacgaagcaggtagcacaacg

SEQ ID NO: 534648 - DNA, 531 bp, Homo sapiens
gacctacttcttctgcaaattttctaggcatttggaatccctgccagcaatgtggaggagtacgtagtgagccagcgaaacccagaatgttagaaggaggcaggtgtctcccagagctaggtcagaagcactgacagggcattaaataacaatatcgcatagactgagaaagacactctcttcccaggtctgtttcagtccttcccatgaatcaaagagcgagccatgtgtcctgtttcaacagagagcaagagcggccctcgaaactctagctgatggtgggcaagatctgccctcggaactctagctgatggtgggcaagaagatctggctagaatttaataatattgcttagttttcatgggtggtcagtgagattgcattttcatttatggtaatgaggtcagatttcctttgttaacaaatgtgtgtgtgtataaaaaggactgagtttgaagaagagtacytaatcatccattgttcaggtggtggtgctacatatggacaaatcacgaagcaggtagcacaacg

SEQ ID NO: 534649 - DNA, 660 bp, Homo sapiens
gctgacctaataaactagagacttgcaaaattcattctataaaagtccgggattttacagctacactgtcttttcaattccaaatgcaatcatgacacataattgttgctaaaatctctctcacacacacttttgactactgtactgttttgcggaaagatcactctgaattcttaagtgaaaataagcacctaataccacaaacacctgacaaaatgttgatgcaatgtgccagtaatgagctattaggttggtgcaaaagtaattgcggtgtttgctgtttaaagtgacctgatctccccactattcatcccacaacccttcagccctgccaccttctcttgctctgagtgttttaaccaagctgaggacgtttaacattcagccttttttctgggagtcagtccagtgtcttctaccttcaagacatgagatttctttatgtattagaaaaataatgagtgaagttttattaatgaagagagacttttaaaartaaatagttctcaagtatttacttatagtgtttgatgatattaattttgctgtcaagtttaacttttgtgaaatcatcattgaattaaaaattgggaggaaaatgctctcattccgtaactaaaatgtttacagctctcatgttcgacatgttaggataataaa

SEQ ID NO: 534650 - DNA, 617 bp, Homo sapiens
aatctggtgaaggcttctgtcaaattgaactattgaactcagggcagtaaaagtccctccccaggcaagagatttaaatcattttcaaagttaatttcctgctcccagatggagaacaaatctaatcgggtttacttcattctttggatgaacaggaaaatgtcacttgcatactcaaaaartgaaaagaaaatcttagggaaggcagcctccaatccacctcacagcagaaaaagaaagtaatcctgaaatggaatgtatggggtcattttgaaactgaaagcaaatctaaatttaatctagacaaatctctaagcttacttctaacctagttctgttcagagatgatgtctgtttacccctgaaatacacgtttttaaaactgttcgctgtaaatgggaaaaacagtttctagtcctaaaaaggaatctgagtaaactgcctgaacttaatctgtgaaatgaggttagaacccttcaaagccctttggatagtagaggaattttgctccttatcagctacagcttaaaaataaaatagggtgagttgacgtttgaattacagaataatgggactatagaaaaagtgaagtaaatattcttgttcttgatttaaca

SEQ ID NO: 534651 - DNA, 677 bp, Homo sapiens
attcttcagctgtttgttatttatttatttgaagtgggattctggtgtgtaaatatatgcaatttcaattttcagaagtgagctgaattttgtttcttagtgaaaaataagctaatacccatttccaataggttgatttgtgtatgcggggatgattaaagttgtatcatgtactatggaactamtccatagtacacactctagagtgtgagcaaaatatctttatcttttcaagcttaaatttcttataggtaaaatggtgataataatagtacatactcatagaattatgagctatgttaattaaaatcatgcaggtttgtgtatattctcccaagtttagtaaatatcttccccaagttagttattttttcttgggctaacatttttactttaaaatatccaagatatatatcaaacgtgtaaataaaaattaagtctataaacatattaatatgtttaaatatatttaacatttaaacaccttaaacatttttataatattctctttaaaatatttagctaatgtagcctttagaagttgttaagaaatcatcattatatttataagcaaatatatattggatgtatttataataggtactataaggtatgtttatatataagaatccttacaatgatgttgcatatatattgtttacaatgaaagagtcagg

SEQ ID NO: 534652 - DNA, 612 bp, Homo sapiens
gtggtttgtcatagatggctcttgttattctgaggcatattcattcaatacccagtttattgagagtttttaacatgaaaccttgctaaattttatcataaaaaatttcctttctcattcccagaagaaatttttcatatcaaatctttttgaaacttttatatacagaatttgcttgatatttctgatataagctataactagggaaaaaaaatatacagtgtgtgtatatgtatatacatatsagaacatacatatcagaatatatatgtatacatgcacacatatcagtatttacacactcaagctctcttttaagtggccacctttgtgagccatgcatctcccaaataatttttaaatgtcatttttggcactggatgtaaaaaccacattttaagtattttcacaatggttttatcctttcagggtggaaaacatttctttaatgaaccaaaactatttgggacaagtaggaatttagactataaagtaataaaatgtattttcttatgagacgtatattgattcttagaacagttccaaaagtggattagaacatatttgttggaacatgatggcattatttatgtaggcacataggctcatgac

SEQ ID NO: 534653 - DNA, 557 bp, Homo sapiens
tgacctggatactcattcctgataggtcagcctraggtaatcatacttttctcaaactaggagtgctgcacatgtcaattaaccattaaaattgaacaagagaatcccacaaggcatcaaagtagatcacctggattccacacgcatacctctctccccttacggtaaaagcaaacacctcatttgggagatcaggttcaatttctcctgccaggatgatgacttctctcctgctgtcttctggatacaaagtttaacactcccaggagcagctctatcttgtagtttaacagaatctctgctgttttccttggcaagagtttgccccttttgcagactaggacctccaagtgggtcattagaactaatggcagatggttagggtgccattttttctccagcccttggttcttgggtccatatagccttcctatttagacctctgacttagcgtatatatcgtgtcccaaagtataccaacccacccttgtccagcattgccatcaaggtgtcactccagcagtgccatagaagtgccttccagcattatgggacac

SEQ ID NO: 534654 - DNA, 487 bp, Homo sapiens
ttccctttgccattaacaaagccagttctgtgaacacttatctgaccatcagccctggcttgcagaggagagctaccactgacgttcttggtgatgcagatgcccctatcatattctcattcttgacctcaatgaatggtgtgtattctgggctcttccatrcaatacaatcctctgtttggttttcgggtcttacagccattcaagcatgttcacttcctgccggggaaactcaggcatttccactttgtttagaatgggccatcactttccccaggcttctaactgcccctctaacgctgagtttgcattatcccctatggtctttgctgtagtgttaaatcttttgttccaataaaagacaccccagtcaatgaagacatctttgcatattcagacttacattctggcttacttgatcaagcaatcataaaatccatcttatcggcactctcttgaatctatctggtacatgttaatgaatttt

SEQ ID NO: 534655 - DNA, 715 bp, Homo sapiens
actgtgacatgaggagtttaaataacagtgccacatagatagcaatattgagctggttgggaaatgaccataaggtctatatttattctaacaaaccactttcccttccaaaaagattgccataaatcttagactttatgatcttctttcaaccacagttttataaaaagacctgttatctgagctttccatgttcagtgctaaaaagtgacaaataatatgcaattctgaggatctagaaaaagtgtcctcattagcctcataaaggagaacaaatgagagagtttgtagagatactgaacatatatgctttcactgtagcaaactttgaaaaaaaattacataggaaattttcaggatattttaaagattttttctagtactttactttttgcatatggccatgacaagacagaagttatatatgttcaagtatataatttatatatgcacatgtatacaagcacayacttgatatgacctgattctattagctctctcctatatggttgatgtgctaaattgttcctgaataatgctttctagaatactgcatgttctcacttataattgggagctaaacactaagctcacatggacataaacatggaaacactgggtatggcagactactagagagggaggaatagagaggaaggtgagttgaaaaactacctaatgggtactatgctcagtagctgggtgcaatataccc

SEQ ID NO: 534656 - DNA, 627 bp, Homo sapiens
ttttattggaatacagcctcagaaactcccttggcaatatcaaaaagagcgtataaatcagatttacaacaaagtttatcccagcactttgggaggccgaggcaggtgaatcacaaggtcaggagttcgagaccagcctgggcaacatggtgaaacctcgtctctactaaaaaatacaaaaaattagctggacgtggtggcaggcacctgtaatgccagctactcaggaggctgagacaggagaattgcttaaacctgggaggtggaggttgcagtgagccaagatcacgccattgcacttcagcctgggtgacagtttgagactctgtctcaaaagaaacaaaaacaagcagaaaaacaaaaacacaatttaaattctttgtacactcaatgctcaactgcctgttttgaataccctgatgtgcaaaaaaaaaaaaaaaaaaaaagaaaagaaaaaaggacactctaccctttattctagagtttagaatttggctgtcactgctgcagcctagctttgrttctaggtcaaggaaccagggagagatgtaaagtttaccactttgaaatgtaaacttctacaataaattcttaagtagattccgttgggtcaggaaagaaacgttt

SEQ ID NO: 534657 - DNA, 541 bp, Homo sapiens
gggttgcctagttaacaactacttagagcaataaaacaggtcatcagaatagttatgttctaaatgaggaaaagaaacactctttggaagctggcaagtaaagaatcttatccaaacctagaagatcggcttctgtctgagtagctataggactacatgtctatgtgtattaagtatacatgatatttctatataatttgagataatctttggtaaatacagctaatttaaaaattgttggtaaaataaaatgtctttagaattttcagtactaaaawtaatttaaaattttttgcgtgggactattgatcagattttggcttcccctgttagcagtcttaagatcatgaaactgttgcctctgtaatttttttatatttgtttggtttttccataagctgaagctgtaagggctgcctgctgggctcccctgaagccttgcacacatcttgctgtgagcttatgtctttgtttttgagcctctggattctcagatctggacaggtggccatggagaggtgtgtctacagcacctgggtca

SEQ ID NO: 534658 - DNA, 541 bp, Homo sapiens
gggttgcctagttaacaactacttagagcaataaaacaggtcatcagaatagttatgttctaaatgaggaaaagaaacactctttggaagctggcaagtaaagaatcttatccaaacctagaagatcggcttctgtctgagtagctataggactacatgtctatgtgtattaagtatacatgatatttctatataatttgagataatctttggtaaatacagctaatttaaaaattgttggtaaaataaaatgtctttagaattttcagtactaaaaataatttaaaattttttgcgtgggactattgatcagattttggcttcccctgttagcagtcttaagatcatgaaactgttgcctctgtaatttttttatatttgtttggtttttccataagctgaagctgtaagggctgcctgctgggctcccctgaagccttgcacacatcttgctgtgagcttatgtctttgtttttgagcctctggattctcagatctggacaggtggccatggwgaggtgtgtctacagcacctgggtca

SEQ ID NO: 534659 - DNA, 492 bp, Homo sapiens
tgcctcgctgcagcctcaatctcctggtctcaagccatcttcccacctcagcctccagagtcactgggactacagacctgagccaccacactgggctagttttttctgttgtttgtaaagatgagggtctctctatgttacccaggytgttcttgaatttcttggctcacatgaccctctcttgccttggcttcccaaagcactggggttatagttgtcagccaccacacctggccccttttctccttttaatctgctctttgtcaattgattttcagcaaactttcagaaggcaaagggaaagttttaccttgaccccttccctgctttgatgattactgcttgcccctgatgtttactgaaaaagaaagagcagggctgtggtaaatttgggatgtgacttaaattgttttatgggtagaggcaactttgtctttcttggaaatcaataactccttgtcttgattttacaattctgttctgtggaccctg

SEQ ID NO: 534660 - DNA, 555 bp, Homo sapiens
caatgaatgtcctctttatcttactgttgcttttagagttattgacacaattaatcactcatatttgcatggagatttataaatttrcaaagtgaacaagcagtagttacatgaatcataattaggataatccattaaaaaccctaataaatggacatttaactaaatggaaatggaactaagggctcccaactcatcttttatcaactagtttgatgatggtagggtgtggccttttcttgcttgccacggtgtctggcttagaatatgcagttcataaatatctgtcaattaaatgaactagaaattggtgacaaaagatgaagaagtccattgcctgaaaatgctgtttcttaagcacagatttgaatgcatacatgggaaagatgtctaccgttagttttctaagcatctataattagatagtaacatcaatctctggaagggagagactagtcatttgaaatgatgtgtatgcatgggacagtgtaagggcattgagagaaagatgaaatcggagaaagacagagacagtttagtgtaaagatatgttct

SEQ ID NO: 534661 - DNA, 555 bp, Homo sapiens
caatgaatgtcctctttatcttactgttgcttttagagttattgacacaattaatcactcatatttgcatggagatttataaatttacaaagtgaacaagcagtagttacatgaatcataattaggataatccattaaaaaccctaataaatggacatttaactaaatggaaatggaactaagggctcccaactcatcttttatcaactagtttgatgatggtagggtgtggccttttcttgcttgccacggtgtctggcttagaatatgcagttcataaatatctgtcaattaaatgaactagaaattggtgacaaaagatgaagaagtccattgcctgaaaatgctgtttcttaagcacagatttgaatgcatacatgggaaagatgtctaccgttagttttctaagcatctataattagatagtaacatcaayctctggaagggagagactagtcatttgaaatgatgtgtatgcatgggacagtgtaagggcattgagagaaagatgaaatcggagaaagacagagacagtttagtgtaaagatatgttct

SEQ ID NO: 534662 - DNA, 279 bp, Homo sapiens
ttgtacctataagctggtgactctgttctgtagatagttaggtccctgtctcatcttcccagccggactgtgaggtattcatggtgggatctatgtctgatccatctcagggagtcccgtggagcttgacctaatgcctggcatgtgggaatcccrgagaggaaacagtatgtgcaaatgctggagatctgatggcacctgtggcaatacggaagattccatgtgtgtaaagggcaacaaaatagagcagtattagataaaataaatattcttgagtgc

SEQ ID NO: 534663 - DNA, 279 bp, Homo sapiens
ttgtacctataagctggtgactctgttctgtagatagttaggtccctgtctcatcttcccagccggactgtgaggtattcatggtgggatctatgtctgatccatctcagggagtcccgtggagcttgacctaatgcctggcatgtgggaatcccagagaggaaacagyatgtgcaaatgctggagatctgatggcacctgtggcaatacggaagattccatgtgtgtaaagggcaacaaaatagagcagtattagataaaataaatattcttgagtgc

SEQ ID NO: 534664 - DNA, 671 bp, Homo sapiens
aaatggattaatcataagctatgtcttctctacagttctttcaccatgtatttcctttagaaaaacactaaagtaagtatgaaaagctttggctctaatttctcataaattacttataatttgatatttacaaatataattatgaattataagttgatatcgtattgtaataacattttgtttctataatcatgcctctttttaatgtgattttctcatgtattttaatatattgcagaaatgcaataactgaagaacttgttttatgtacagtgagaaatttgtrtacaaagtcttctaccataataaaaaaaatgaagaggagcaccaaaacaagtaatttgccaagagtcagttttccttggattcgtacattccaattcccctgccaccaccccacacagacatgttcacatttgccaccactctctcactgcctgcaatgagatctagttagccagagatgtttttcaggctttttcagatattatgttcatgttttgacttgccatgtagcatagttaaggaggcctggctttgttttcctactgtgaaaggtttggagagtttgatgtcccactgggctgaatgaatgacagtcaattcaactttcttcctcatgtaggtatgcataagtgacttctcaactattagaaagttacttttaagta

SEQ ID NO: 534665 - DNA, 217 bp, Homo sapiens
ctcgcctgcatcactggcaccacccacttggtgtcaagggacccyaggtgtctttgaggatctccatggtgtcagacaccatctctccagagaattcgcttgaaaaaaaggtgcacctcaaactttcattcgatttgcctttccacagaggtctgcttccatttctacttcaggaactagactttaatatttggaactcactccctctgtggttaat

SEQ ID NO: 534666 - DNA, 424 bp, Homo sapiens
gcctgcatcactggcaccacccacttggtgtcaagggaccctaggtgtctttgaggatctccatggtgtcagacaccatctctccagagaattcgcttgaaaaaaaggtgcacctcaaactttcattcgatttgcctttccacagaggtctgcttccatttctacttcaggaactagactttaatatttggaactcactccctctgtggttaatgtgcctcatcttttgagtgtattccctgtagatttgttcacattattcttctccttttygagcattgtgaacttaagaaaacaaattctccttgcatggcaataaccatgtgatttgtgaaatcatactttgagcatcttattctagccatacaaaacagtgtggctcagaaattcaatgtgatcgttcctctggtcagtgacatatccc

SEQ ID NO: 534667 - DNA, 424 bp, Homo sapiens
gcctgcatcactggcaccacccacttggtgtcaagggaccctaggtgtctttgaggatctccatggtgtcagacaccatctctccagagaattcgcttgaaaaaaaggtgcacctcaaactttcattcgatttgcctttccacagaggtctgcttccatttctacttcaggaactagactttaatatttggaactcactccctctgtggttaatgtgcctcatcttttgagtgtattccctgtagatttgttcacattattcttctccttttcgagcattgtgaacttaagaaaacaaattctccttgcatggcaataaccatgtgatttgtgaaatcatactttgagcatcttattytagccatacaaaacagtgtggctcagaaattcaatgtgatcgttcctctggtcagtgacatatccc

SEQ ID NO: 534668 - DNA, 424 bp, Homo sapiens
gcctgcatcactggcaccacccacttggtgtcaagggaccctaggtgtctttgaggatctccatggtgtcagacaccatctctccagagaattcgcttgaaaaaaaggtgcacctcaaactttcattcgatttgcctttccacagaggtctgcttccatttctacttcaggaactagactttaatatttggaactcactccctctgtggttaatgtgcctcatcttttgagtgtattccctgtagatttgttcacattattcttctccttttcgagcattgtgaacttaagaaaacaaattctccttgcatggcaataaccatgtgatttgtgaaatcatactttgagcatcttattctarccatacaaaacagtgtggctcagaaattcaatgtgatcgttcctctggtcagtgacatatccc

SEQ ID NO: 534669 - DNA, 424 bp, Homo sapiens
gcctgcatcactggcaccacccacttggtgtcaagggaccctaggtgtctttgaggatctccatggtgtcagacaccatctctccagagaattcgcttgaaaaaaaggtgcacctcaaactttcattcgatttgcctttccacagaggtctgcttccatttctacttcaggaactagactttaatatttggaactcactccctctgtggttaatgtgcctcatcttttgagtgtattccctgtagatttgttcacattattcttctccttttcgagcattgtgaacttaagaaaacaaattctccttgcatggcaataaccatgtgatttgtgaaatcatactttgagcatcttattctagccatacaaaacagygtggctcagaaattcaatgtgatcgttcctctggtcagtgacatatccc

SEQ ID NO: 534670 - DNA, 577 bp, Homo sapiens
actcattctatgtatttgtaactyagcaaccagagtgagcctttaaaaattatcagagagcgccactcctcttagtaaagcactaccccaccccagtcacgtagctttctgattcacaggagtaaaagccaaagtccttataatggcctaaaaatcgtacataatctgttccttttcagatttcattcactaccatcttcccccttctctctctgttccagttacaacagctggctgcccccctcaaacacaactagcacgttcctgccccagggcctttgcacctgctttttcctcttagtgcaacaagcttgctccagatatctgaaaggctgactatcttgccaccttcagatgtgtgttctaatgtctctttatcaatgagagcttctttgtccaccctgggcatcttcttgcccttccctgctttattcttccccatggcagttactcacattggacactaaacacttgtttccttagctaggcattcttctcctaccctcacaacagtaggaatgtcctaaggttctgagaagactcctgtgctaggtttccagactcctgtcctctcaca

SEQ ID NO: 534671 - DNA, 577 bp, Homo sapiens
actcattctatgtatttgtaactcagcaaccagagtgagcctttaaaaattatcagagagcgccactcctcttagtaaagcactaccccaccccagtcacgtagctttctgattcacaggagtaaaagccaaagtccttataatggcctaaaaatcgtacataatctgttccttttcagatttcattcactaccatcttcccccttctctctctgttccagttacaacagctkgctgcccccctcaaacacaactagcacgttcctgccccagggcctttgcacctgctttttcctcttagtgcaacaagcttgctccagatatctgaaaggctgactatcttgccaccttcagatgtgtgttctaatgtctctttatcaatgagagcttctttgtccaccctgggcatcttcttgcccttccctgctttattcttccccatggcagttactcacattggacactaaacacttgtttccttagctaggcattcttctcctaccctcacaacagtaggaatgtcctaaggttctgagaagactcctgtgctaggtttccagactcctgtcctctcaca

SEQ ID NO: 534672 - DNA, 591 bp, Homo sapiens
actcattctatgtatttgtaactcagcaaccagagtgagcctttaaaaattatcagagagcgccactcctcttagtaaagcactaccccaccccagtcacgtagctttctgattcacaggagtaaaagccaaagtccttataatggcctaaaaatcgtacataatctgttccttttcagatttcattcactaccatcttcccccttctctctctgttccagttacaacagctggctgcccccctcaaacacaactagcacgttcctgccccagggcctttgcacctgctttttcctsttagtgcaacaagcttgctccagatatctgaaaggctgactatcttgccaccttcagatgtgtgttctaatgtctctttatcaatgagagcttctttgtccaccctgggcatcttcttgcccttccctgctttattcttccccatggcagttactcacattggacactaaacacttgtttccttagctaggcattcttctcctaccctcacaacagtaggaatgtcctaaggttctgagaagactcctgtgctaggtttccagactcctgtcctctcacatttggtgctcatgc

SEQ ID NO: 534673 - DNA, 577 bp, Homo sapiens
actcattctatgtatttgtaactcagcaaccagagtgagcctttaaaaattatcagagagcgccactcctcttagtaaagcactaccccaccccagtcacgtagctttctgattcacaggagtaaaagccaaagtccttataatggcctaaaaatcgtacataatctgttccttttcagatttcattcactaccatcttcccccttctctctctgttccagttacaacagctggctgcccccctcaaacacaactagcacgttcctgccccagggcctttgcacctgctttttcctcttagtgcaacaagcttgctccagatatctgaaaggctgactatctygccaccttcagatgtgtgttctaatgtctctttatcaatgagagcttctttgtccaccctgggcatcttcttgcccttccctgctttattcttccccatggcagttactcacattggacactaaacacttgtttccttagctaggcattcttctcctaccctcacaacagtaggaatgtcctaaggttctgagaagactcctgtgctaggtttccagactcctgtcctctcaca

SEQ ID NO: 534674 - DNA, 623 bp, Homo sapiens
gctgtaaaaaagaatgagattatgtcgtttgcaggaacatggctagagctggaggctattatcctcagcaactaacgcaggaacagaaaaccaaatactgcatgttcttacttgtaagtgaaggctaaatgatgagaacttattaacacaaagagggaaacagcagacactggggtctgcttgagcatgcagtgtgggaggtgggagaggagtggaaacagtaactgttgggtactgggcttaattcctgggtgattaaataacctgtacaacaagaccccatgacatgagtttacctttgtaacaaatcttcacatgtacccctgaccttacaataaaagttaaaagaaaaaaaaaaaagccaagtcccttaaaaagtctcctaagccatttggctggggaaaccattttctccttagagactaagcctctccagaggggcgtgagctatgttggctgcttctcaggcacgtgctgccacgacttcttgattcatttctctttatcattcatgaatgaaaagcattgggaactcaccagtgcacaagcaccttcttgaaaacccagtatgtagtctaaggygagctagttttgtaaagtcattttagaagctccaatacctc

SEQ ID NO: 534675 - DNA, 263 bp, Homo sapiens
agggtaagataaggaggaaacaggggaatcatgacagggctgctgaggctggagatggagtatatatgttgtaagtaggacacatcactaggataaagatgggacgttgtagaggacacaggagtagtagcagaatragtagacccaaaattgaagtcagagacaaagaaggggaatcggagtgaatcttgtttcaggatctttggcagaagcggactgcttcatcatatcatttacttgctccgtagttcttaggatggatg

SEQ ID NO: 534676 - DNA, 263 bp, Homo sapiens
agggtaagataaggaggaaacaggggaatcatgacagggctgctgaggctggagatggagtatatatgttgtaagtaggacacatcactaggataaagatgggacgttgtagaggacacaggagtagtagcagaatamgtagacccaaaattgaagtcagagacaaagaaggggaatcggagtgaatcttgtttcaggatctttggcagaagcggactgcttcatcatatcatttacttgctccgtagttcttaggatggatg

SEQ ID NO: 534677 - DNA, 263 bp, Homo sapiens
agggtaagataaggaggaaacaggggaatcatgacagggctgctgaggctggagatggagtatatatgttgtaagtaggacacatcactaggataaagatgggacgttgtagaggacacaggagtagtagcagaataagtagacccaaaattgaagtcagagacaaagaaggggaatcggagtgaatcttgtttcakgatctttggcagaagcggactgcttcatcatatcatttacttgctccgtagttcttaggatggatg

SEQ ID NO: 534678 - DNA, 666 bp, Homo sapiens
gctgttggctacttttagaggttcttttcttttctttcctttccttttttttttttttttttttttttttttttgagaccgagtcttgctctgtcacccaggctgaagtgcagtggtgcaatctctgctcgctgcaaagtttggaggttctttttttttcttttcttttctttttgagattgagtctcgctctgttcccaaggctggagtgcagaggctcaatctcggctcactgcaagctccgcctcccgggttcacgccattctcctgcctcagcctcccgagtagctgggactacaggagcccgccaattagcgcccggctaattttttcgtatttttagtagagacggggtttcacctgatggtctctatctgctgacctcgtgatccgcccgcctcggcctccgaaagtgctgggattacaggcgtgagccaccgcrcctggcctggaggttgttcatagagtctcagcgtgagtctctggttagagtgccttccaattgaaatagattttgtattttttcaactaaaagacatgcacccaagttcaaacactctgtaatttgttagcagtgttagcaatgagtgaaacaataaaaggtcccctccctctgggttcaaggttagttttctgatgttggtgttttttcaaaatgccagatca

SEQ ID NO: 534679 - DNA, 554 bp, Homo sapiens
ggttcaggatagacttgagtatccacggttctggagtgcaagggaggagaaaggaaaggtgcattcagacaaaaaaaawgtgtacagaacacaccacggatatcagaagaggctgctcatggcaaggcgtggtggctcgtacctgtaatcccagcagtatgggaggccgaggtgggtggatcacctgagctcaggggttcaggaccagcgtgggcagcaaggcgaaaccccatctctaccaaaaatacaacaaaattagttaggcatagtggcacatggctgtggttccagttacttgggaggctgaggtgagaggattgcttgagcctgggaggcagaggttgcagtgagcccagatcgtgcctctgcactccagcctgggcaacaaagtgagaccccgtctcaaaacagaacaaaacaaaacaaaaaaagagactgatcaagaccagactcggctcctaggccttgaactccagtcccacctcacaccctaaggttcctaaagaatcagtaacttagttcaccctaccccactcctggcttccagatgtagc

SEQ ID NO: 534680 - DNA, 554 bp, Homo sapiens
ggttcaggatagacttgagtatccacggttctggagtgcaagggaggagaaaggaaaggtgcattcagacaaaaaaaaagtgtacagaacacaccasggatatcagaagaggctgctcatggcaaggcgtggtggctcgtacctgtaatcccagcagtatgggaggccgaggtgggtggatcacctgagctcaggggttcaggaccagcgtgggcagcaaggcgaaaccccatctctaccaaaaatacaacaaaattagttaggcatagtggcacatggctgtggttccagttacttgggaggctgaggtgagaggattgcttgagcctgggaggcagaggttgcagtgagcccagatcgtgcctctgcactccagcctgggcaacaaagtgagaccccgtctcaaaacagaacaaaacaaaacaaaaaaagagactgatcaagaccagactcggctcctaggccttgaactccagtcccacctcacaccctaaggttcctaaagaatcagtaacttagttcaccctaccccactcctggcttccagatgtagc

SEQ ID NO: 534681 - DNA, 554 bp, Homo sapiens
ggttcaggatagacttgagtatccacggttctggagtgcaagggaggagaaaggaaaggtgcattcagacaaaaaaaaagtgtacagaacacaccacggatatcagaagaggctgctcatggcaaggcgtggtggctcstacctgtaatcccagcagtatgggaggccgaggtgggtggatcacctgagctcaggggttcaggaccagcgtgggcagcaaggcgaaaccccatctctaccaaaaatacaacaaaattagttaggcatagtggcacatggctgtggttccagttacttgggaggctgaggtgagaggattgcttgagcctgggaggcagaggttgcagtgagcccagatcgtgcctctgcactccagcctgggcaacaaagtgagaccccgtctcaaaacagaacaaaacaaaacaaaaaaagagactgatcaagaccagactcggctcctaggccttgaactccagtcccacctcacaccctaaggttcctaaagaatcagtaacttagttcaccctaccccactcctggcttccagatgtagc

SEQ ID NO: 534682 - DNA, 475 bp, Homo sapiens
tttgcagactagacatgacatttggtattcctaatatgcccacttggaggaaattgccagcttaggccaaccagggtgaaatgcatgcrcttataaactcataagcccaataataattttcagaaggaggcactcattcacttcggcttataaacttgcaaatctgtagattcattagtctatcacttacatgggaaagacaaaatttatatttaattgttgagacttgacttcaaaattttcaagaatatcaacatttgtttttgttgtgcacctctctgtcaaaagataaatacgtagtacataatcattattatttattaataatatactctgcatggtcttacatttcacagttcatgcattgtttattcattaatataacctgttaacgttaatatgcaccacattaccgagagcccttgtcaactcctcagaagcaactaactcccaaggtaactatgacaacgaatct

SEQ ID NO: 534683 - DNA, 475 bp, Homo sapiens
tttgcagactagacatgacatttggtattcctaatatgcccacttggaggaaattgccagcttaggccaaccagggtgaaatgcatgcacttataaactcataagcccaataataattttcagaaggaggcactcattcacttcggcttataaacttgcaaatctgtagattcattagtctatcacttacatgggaaagacaaaatttatatttaattgttgagacttgacttsaaaattttcaagaatatcaacatttgtttttgttgtgcacctctctgtcaaaagataaatacgtagtacataatcattattatttattaataatatactctgcatggtcttacatttcacagttcatgcattgtttattcattaatataacctgttaacgttaatatgcaccacattaccgagagcccttgtcaactcctcagaagcaactaactcccaaggtaactatgacaacgaatct

SEQ ID NO: 534684 - DNA, 475 bp, Homo sapiens
tttgcagactagacatgacatttggtattcctaatatgcccacttggaggaaattgccagcttaggccaaccagggtgaaatgcatgcacttataaactcataagcccaataataattttcagaaggaggcactcattcacttcggcttataaacttgcaaatctgtagattcattagtctatcacttacatgggaaagacaaaatttatatttaattgttgagacttgacttcaaaattttcaagaatatcaacatttgtttttgttgtgcacctctctgtcaaaagataaatacgtagtacataatcattattatttattaataatatactctgcatggtcttacatttcayagttcatgcattgtttattcattaatataacctgttaacgttaatatgcaccacattaccgagagcccttgtcaactcctcagaagcaactaactcccaaggtaactatgacaacgaatct

SEQ ID NO: 534685 - DNA, 436 bp, Homo sapiens
atccgacatggactgcagccctttgctccggttgtcgggctccacctgccggtcgatgttacctattgcacttgttctctggagctcccgccagagagaagtggccactgtgcaccgggtcgagttccaggatgtccctagcgttagcaggattgttccgcccgctggcaaagcattcgctccccatctgttcgtggragcttggacctgcagcttaagctcggaggaggctcttagccctggatgctctgtggtggggcaacatgcgggtcgaccagcaacccccagtgcctgcccctccaacacgagacctatcggggtcaacacgaaccatcttgaaagggtgtttggaggcctccccgcgtgtgtccccataccagtaccttccatttgaccccattttcctcaagttctgcctcagaggtggcgaccggca

SEQ ID NO: 534686 - DNA, 436 bp, Homo sapiens
atccgacatggactgcagccctttgctccggttgtcgggctccacctgccggtcgatgttacctattgcacttgttctctggagctcccgccagagagaagtggccactgtgcaccgggtcgagttccaggatgtccctagcgttagcaggattgttccgcccgctggcaaagcattcgctccccatctgttcgtggaagcttggacctgcagcttaagctcggaggaggctcttagccctggatgctctgtggtggggcaacatgcgggtcgaccagcaacccccagtgcctgcccctccaacacgagacctatcggggtcaacacgaaccatcttgaaagggtgtttggaggcctccccgcgtgtgtcccsataccagtaccttccatttgaccccattttcctcaagttctgcctcagaggtggcgaccggca

SEQ ID NO: 534687 - DNA, 421 bp, Homo sapiens
tgagctggaagtattatatttaggaaatagggttagagcctgatagtgccgttaagyggtctaagccaccagtttttctaagggctaattctaggccaaattataaagtagcaaattctgctttgatgctgtctcctctctcctttttgtcttccaatttcttcctttcaaataaccagggacctcttgtcttatctgacttctcggaacctactgttttccacactaaaacctgtgcagttagttaacatgctgatctgatcacctaacatgatgaactagtgccaagtgtggatataactggaggagctcgagatttaaaagttaagtaacgttccagaaaatacatagcttataactagtgataactagaggagcaagaagtcagttgcaggcctgtgagcgtttccagtcattatta

SEQ ID NO: 534688 - DNA, 643 bp, Homo sapiens
gcatttagagggtaggacaaaaggtcatggtggtgggttgaatttggtgagggtacgggaggaagaattcagggtgccaccccagttttctagcttaagcaggtgagcagaggaaagtacaattttcggaatctacttgttgggatgagtgggtgggtgtggggagaaaagtctcaggccagagcctcttagaaatagggaaagggagctattcactaatcaattctcatatatttgagattcacctgaaaggtctaagtgttgacaactcttagaacagatcttctccatctgtgcaattgcaataataaacttaccttgttagatgattacaagggttaaattaattaatattgggaaaacttttagaacaatgcctgacatatgtaggcttaatataagtgctaaacataataaactctgatggctgcttcagtaggaaggcaggagctagagagataagacctttgccttgcaaactgtcctgaatgcgctttgcttgtgcccaccccaccccctgagatgctggcatgaagctgggcatcttggcttcagccaaatcagagtgggttttccttttgtgcaagatgtgagatgycatgatcaagcacagagtgactgtcccctcctcctctcccttcct

SEQ ID NO: 534689 - DNA, 571 bp, Homo sapiens
ctcatttcactccttgagaagttrtgcgaagagaagaggagtcttagtgtcacccacatggaattgcccaccttggaagactctccagaccttgttactgtgggtgcctaggatacctggtcacttggtgcatgatgtggttacaaaacaagacttcgaagatccctttgaaaccacaatatctacgattgagcaaatgttttaaaaataactttaacaaaacaaacttgagtaatttatatttttgagctccttttctactaaccatttaccagggaccaccacttgattgtactatctccatttaatctgtccaacaactctgtgaggagtataattactatcctcattttataaataaggaaaataaatcacataaaagttaagaagcctccctcacccacacagagctcagagtccagcagtcatctagaatttgaaccaagtctgcttctcatgctcagttggatggaaaggaagtagagcaagtccagtccagcctcacaagtggactgtggtatctaaaggagagatgatatccatgggcttctgcagaactgattctactgat

SEQ ID NO: 534690 - DNA, 579 bp, Homo sapiens
ctaaattcctgcagccctatcacatatcaagcttcctccatgggaagcaaagaaaaagcaaagcataagtcacaggctacttcccggcatgactgaagtgacatcggatgcaaaaaaagtatccgtgtgtgaccatgtgtgcgtgtrtatgtgtctgtgatgtgggaagagaggcagaggtctgacacttccgatttggggtttgagtcctcagggctcttaagcaaatgtgagacagcaatgcaccattacaagcagcctctaatttattgattgactcttcataaatgccagctaacaatgttgccataaaataatgtgcccgtaaaagacctggaagatttctcttatggaaataagggcagcactgtgcttctacattgggtgtacaagtggcagaggggtgtcactttagcaaatcctagaacttactaagccaagatggatgggaacctatgggctttattagcctgtctgttgggatttgcgtgtgagtggcacatatgtgcaggtgtgcgaccgcataattattcataatttttctgtctgtttgcctgtataaggatctatgcaggtcca

SEQ ID NO: 534691 - DNA, 522 bp, Homo sapiens
acagaaagcagttagactccctggggtttttgggaagataggagcagagtgttgtacaattgctccaaggcaggacattatgttaaacttttctttttttttttttttgagatggagtctcactctgtcatccaggctggagtgcagtggtgcgatctcagctcactgcaaactctgcctcccagcttcaagcgattctcctgactcagcctcctgagggattacaggccactgtgcctggctaatttttgtagttttagtagtgatgaggtttcactatgttggtcagacttgtctcgaaactctgacctcataacccacccgcctgggcctcctaaagtgctgggattacaggcgtgagccaccgcgcccaccctatgttaaacatttttactcagaagttgtwaattaattctcttgtctatataaacataatcattttaaaattaagatatataataatatagcatctactgttcaacccaaagcagaaatattttctccagaatcactgaaaaggag

SEQ ID NO: 534692 - DNA, 563 bp, Homo sapiens
gctactgcctgctagagaagtctaggatctgtaagtctgggattttgatctatagatactttgggcaatgttctgttctctcataagctccatgatttctcagacaataaaaacaaacacaaaagatctctgttttgtgaccgtgtgaataaattcgatggataaagcatgccttggcacaacacatctgcaggaggcaggtgtccacagaacacacctttctgaagtcacccgtatcctctcatcattagatgagttgaaccgatcatccttttctctgaagtattcttctatgcattgctcttcaaagtcatgtactttcttgagctcatcatcggttatgaagagttctgtggaaaaaaaaaaaaagraagtcttgagggagagaagtaaaagcgatggcatctgatttgtgggcctagtgacattctcagtataaatctaggtgggaaaaggggcctagattccttgttaagtctcaaatgaaatccaaatccaattaggcaacttgcatcactgtcttctttctgaacatgaaatttattatgggtctctgaagttca

SEQ ID NO: 534693 - DNA, 563 bp, Homo sapiens
gctactgcctgctagagaagtctaggatctgtaagtctgggattttgatctatagatactttgggcaatgttctgttctctcataagctccatgatttctcagacaataaaaacaaacacaaaagatctctgttttgtgaccgtgtgaataaattcgatggataaagcatgccttggcacaacacatctgcaggaggcaggtgtccacagaacacacctttctgaagtcacccgtatcctctcatcattagatgagttgaaccgatcatccttttctctgaagtattcttctatgcattgctcttcaaagtcatgtactttcttgagctcatcatcggttatgaagagttctgtggaaaaaaaaaaaaaggaagtcttgagggagagaagtaaaagcgatggcatctgatttgtgggcctagtgacattctcagtataaatctaggtgggaaaaggggcctagattccttgytaagtctcaaatgaaatccaaatccaattaggcaacttgcatcactgtcttctttctgaacatgaaatttattatgggtctctgaagttca

SEQ ID NO: 534694 - DNA, 399 bp, Homo sapiens
ggtttttagtaaccatttgtgtataaatgtggaaaatatatgtatttgcttggatacacataaaatatcttgggaaggatttagaaaaaatagtaatatttgattgcttctggaaaaggcatctagatagctgacggagaaggttgggaagaaaattttccattacatatccttttatactttttgaattttgacccacatgagtgtttacttatacaaaagataattattttatttttatttttgagagatgacaggagatctaactatgttgcccacgctagagwgcaatggctattaacaggtgtgattattgcatactgcagcctcaaactcctggcctcatgcaatcctcctgcctcagcctcccaagtagctggccctataggcatacaccac

SEQ ID NO: 534695 - DNA, 265 bp, Homo sapiens
attaccaacagtagaacatatattctccataacagacaatggagaccatgggtataaaacaatcctcagtaaatttaaaagaattaaaatcaaataaattatgttctccaaccacaaacaaattagtaatcaataacaaagttagaaaaattgacaaatatttgacaattacactatactctcttaaatatttaataactctaaaaagaaataacaaatttattgagayaatttgaaacaaaagacaacataccaaaatttatga

SEQ ID NO: 534696 - DNA, 587 bp, Homo sapiens
aaagaatataattcatccctctaaatttattgttatattcattatcattccaatctttcaaaaatattatttgataaaactagactaattaaaaagtctatctgaaagtaaataatgttttaattttgccatgaaacaaaaattaaacatatatagagattttccatattatatatcaaaacttactacatgattataaaaatataaaaagggcaattgatcagtggaacagaagcagaatacagaaatagacccatataaraggattcagtacaagacagaggaggatttttccgtagataagtgaacagatttttcaataaatgcttgggaacaactggataaacatttggaaaaaatatagtgggataattcacaaaattaaaaaaactaactttcagaaatattaaaaatagttgtataataaacccaaacttataattactgtgacacaatgggccatctgaattgagaaacaaaatccagaaaccataaaaaaagtctgataaattaattgtgcttgaaattttaatttcaaaatttttcagaaaaaaagatatttcaacaaaattaataaaattaagcag

SEQ ID NO: 534697 - DNA, 564 bp, Homo sapiens
cccatcctggaaagggtcctgcatcacacccagaaggagaaaatgctgtacagagagaggccaagaaaaatctaaacagattggccttgctgagtttcccttcggtcttttaccagtttcatttttagataactgttcactcttcattgaatctaagcataaaaatcgttttcccttgagccttgggtcttcattcccattaaataagataaggaataaggaatcttaggctgtcatgagtaaatataggtgtgctttgtagtctgataaaacaccttcatattagaagactttgcctttagcacaattggaaatgtgattatctctaattttccgaaaccaatggcagttgctatagttgacaatacagctcatcatggctaacctgactaattcaagcatttcttgttcctgaccaaaacacycttttctattctttcctcttctcactactcactattcctgagcagttccttctaccccaatggcttcaacttgtatgtcagtgactatacaatctatactactttttcatcccttattctttttttacctaattatcac

SEQ ID NO: 534698 - DNA, 564 bp, Homo sapiens
cccatcctggaaagggtcctgcatcacacccagaaggagaaaatgctgtacagagagaggccaagaaaaatctaaacagattggccttgctgagtttcccttcggtcttttaccagtttcatttttagataactgttcactcttcattgaatctaagcataaaaatcgttttcccttgagccttgggtcttcattcccattaaataagataaggaataaggaatcttaggctgtcatgagtaaatataggtgtgctttgtagtctgataaaacaccttcatattagaagactttgcctttagcacaattggaaatgtgattatctctaattttccgaaaccaatggcagttgctatagttgacaatacagctcatcatggctaacctgactaattcaagcatttcttgttcctgaccaaaacacccttttctattctttcctcttctcactactcactattcctgagcagttccttytaccccaatggcttcaacttgtatgtcagtgactatacaatctatactactttttcatcccttattctttttttacctaattatcac

SEQ ID NO: 534699 - DNA, 521 bp, Homo sapiens
ctaacagataaatggcaaagtttggaacctgctgaataacaggcaagcaccattgcatgttagacctgcagttctaaagaccaatatcagtgacagcaagagattataaaaggtttgagaggtcctagaacctccagcctggctaattgatgaagacttttctctgcctaaagccagttacacaaagattgtgagaggtggtagtttttgttaaatgcccaagttctggcaaaagttacaaggcatattaaaaaactagaaaacatggtcaaatcaaagaaacccaaaactccagaaattaagactaaataaatgcaatytgtgagctgtctgaaaaagaatctaaaataactcttataaagatattcagtgaactaaaagacataataaactggatgaaatcagaaaaacatgcatgaacaaaaggaaaatatcaacagagagatggaaagcataaaaaataataaaataggaattccacatttgaaaatatcgtaagtacactgaagaaattattagcg

SEQ ID NO: 534700 - DNA, 521 bp, Homo sapiens
ctaacagataaatggcaaagtttggaacctgctgaataacaggcaagcaccattgcatgttagacctgcagttctaaagaccaatatcagtgacagcaagagattataaaaggtttgagaggtcctagaacctccagcctggctaattgatgaagacttttctctgcctaaagccagttacacaaagattgtgagaggtggtagtttttgttaaatgcccaagttctggcaaaagttacaaggcatattaaaaaactagaaaacatggtcaaatcaaagaaacccaaaactccagaaattaagactaaataaatgcaatttgtgagctgtctgaaaaagaatctaaaataactcttataaagatattcagtgaactaaaagacrtaataaactggatgaaatcagaaaaacatgcatgaacaaaaggaaaatatcaacagagagatggaaagcataaaaaataataaaataggaattccacatttgaaaatatcgtaagtacactgaagaaattattagcg

SEQ ID NO: 534701 - DNA, 521 bp, Homo sapiens
ctaacagataaatggcaaagtttggaacctgctgaataacaggcaagcaccattgcatgttagacctgcagttctaaagaccaatatcagtgacagcaagagattataaaaggtttgagaggtcctagaacctccagcctggctaattgatgaagacttttctctgcctaaagccagttacacaaagattgtgagaggtggtagtttttgttaaatgcccaagttctggcaaaagttacaaggcatattaaaaaactagaaaacatggtcaaatcaaagaaacccaaaactccagaaattaagactaaataaatgcaatttgtgagctgtctgaaaaagaatctaaaataactcttataaagatattcagtgaactaaaagacataataaactggatgaaatcagaaaaacatgcatgaacaaaaggaaaatatcaacagagagatggaaagcataaaaaakaataaaataggaattccacatttgaaaatatcgtaagtacactgaagaaattattagcg

SEQ ID NO: 534702 - DNA, 622 bp, Homo sapiens
ccatccaggctgaagatctgaataggcaaaaaatgttgaccctccctggaataagagataattcctcctatctgcctgtcttcaagctgggatattggtttgttccagccttcagattcaaactgaatcatcagctcttcctggtctcaaggctgctaaccatggacttagaacaataccatcttctttcctgggtctccagcttgcttttagaacctgccatccttcataattgcatgagccaattttttatttgatagatattaatagatcgagatattgttagatataatacaggtgtagagataggtaggtagacagacaggcacacagacagatagatagatgatacagatagagatggatacatacatcctattggttctgtttctctaattctgtcaaatacagtctgtctttcacttttctgtagatttggccttcttcaacttctttgctcttctctcactcccccatgctccccytgtcaacttttggccaaagttaagcaaaggtagcataaaaagagcctttcagggttaaagcaaacctaactatctagagaagtacagcatcgagcatgttcctccttcccttccctgcttcatgaacatcttcaact

SEQ ID NO: 534703 - DNA, 527 bp, Homo sapiens
gtgtcatctctgattaaaaaggctccttgggcttgcctgtcctgctcttacactaacgyatgcaacgggggcctggccaggttgcaaaaggatatgagggccagagaagatctatctttaagtaggagacggttgaggcagcttaacagagcaactaagagcacagaccctggagccagactggctggggaagaatcccagtgttgccgctgaccagctttgccaccttcagcaagttacctaacctttctgtgccttggttttctcatcagtagagtaagaatataatcagtcttcacatgatgtgaggctgaaacaagttaatacattttaaatgcttagaaggtacctggcaaacattcagctctatttattgtttgttattttattaaaaataaaatgaatgttatcgatggacatgggtgagaagcagtgaggagtagaaagaacataagcttggccatcagacagacttgcatttgaatcctgattccacaaccttttaaaatcaacatttatatttttct

SEQ ID NO: 534704 - DNA, 625 bp, Homo sapiens
aattcactgccaaaggccacaggcagttttgcttgcttatcagaaatattctaaaggtgatggcaacttggaaacatactttcagcaggacttagctttctggagagtggccactgtgaaaatggcctgtagcttggaaatctcagggggtgtgaatgtaatttgacattctttgtgcacaggcatgggctagcccctctgggtgaagaagctttcaggaaagtgactgttactactcagctaacaatgtagtgctgagcactttgcaggaccgagctcacgraagtctcacacaagtcctaggaggaaggtgctattattatctccagtatacagatgagagaactaaggcttgagaaggccatgaaacttggcccaagctcacacaactagtcaagtgtcagagccctcagctctctctgccttctgatttagagattttaattagtgcaagttcaatatctaaactctaggaagttgctaagtatttggggtagaaccacatgattcaggtgatgatcagtgtatgacactttactatgacaggccaaagaattgagtaagtagcatttaaagtttttactgaatgggattaatgtcttgttccaggaaggattgaaggcag

SEQ ID NO: 534705 - DNA, 688 bp, Homo sapiens
ttatcccctcccccccatatatgtggcatcttcaggaatggatttggagactccaggagacaatagctttgttagtttgctatcttttcagaaacaagaagttaccagattgaactttttatttagcaatactgtatggtaaagaatttgtgaaattatttgagggatatcccaaatatcctttcttctgggcttcccatgacactgctatcgggggaaccagcccccaatatttcaatgtaggttcttttctattttccctaagtgttggcaggtctgagaaataaagagaaagagtgcaaaagagagaaattttatagctgggtctccrggggtgacatcacctgtcagcaggttctgtgatgcccccaagctgcaaaaccagcaactttttattggcgattttcaaaggggagggagtgtacgaatagggtgtgggtcacagagatcacatgcttcaaaaggcaataaaatatcacaaggcaattgggggcagagcaagatcacaaggccagagcgaaattagaattgctgatgaggtttcatttcccactgtgcatgcatcgtcactgataaacatcttaacaggaaacagggtttgagagtagacaacccttctgactagaattcatcaggccagaatttcctaatcctagcaagcctaagggcgctgcaggagaccagggcg

SEQ ID NO: 534706 - DNA, 688 bp, Homo sapiens
ttatcccctcccccccatatatgtggcatcttcaggaatggatttggagactccaggagacaatagctttgttagtttgctatcttttcagaaacaagaagttaccagattgaactttttatttagcaatactgtatggtaaagaatttgtgaaattatttgagggatatcccaaatatcctttcttctgggcttcccatgacactgctatcgggggaaccagcccccaatatttcaatgtaggttcttttctattttccctaagtgttggcaggtctgagaaataaagagaaagagtgcaaaagagagaaattttatagctgggtctccaggggtgacatcacctgtcagcaggttctgtgatgcccccaagctgcaaaaccagcaactttttattggcgattttcaaaggggagggagtgtacgaatagggtgtgggtcacagagatcacatgcttcaaaaggcaataaaatatcacaaggcaattgggggcagagcaagatcacaaggccagagcgaaattagaattgctgatgaggtttcatttcccactgtgcatgcatcgtcactgataaacatcttaacaggaaacagkgtttgagagtagacaacccttctgactagaattcatcaggccagaatttcctaatcctagcaagcctaagggcgctgcaggagaccagggcg

SEQ ID NO: 534707 - DNA, 518 bp, Homo sapiens
ataagatgcatccaaatatggtccagtggtgggagcacttgacagataaattttgaattctaaattactttttattttgatctgtgcccatttttatgtgatcattttgatttattctgtaattcatcawacttgaggcagaagtacactggccaggtccctgctaatattatttccaacggcgagttttattttccagcggccttctcatttgagcgggggagagggaacaatgtacacccctggggtgctaaaatatccaggcgtgtttgccgactaacggaggtttgtctattgaaagtccactcccataaggaacaaaggagctttcacatcagaaaaaaaaaagaaagaaagagagagagaaagaaagaaagaaagaaatgtcaggcatacaagctgtgtctcaaatgtaacaggaaggacattactgtttttcacaaaaatctgtctcctggcctaagcctaaatactcacttgtgaatcccttagagaggattggtggctataaccaaaac

SEQ ID NO: 534708 - DNA, 680 bp, Homo sapiens
gagtaaggatttctttagagccatcaattatcccagctatttaatctgtctcttcatagagaatttgtcttatcatgtgtaactagagaaatttggactacaatccaaatttctacaatcctttctataaagtagtccagaaaggttcctgtctataaattgggattccagaaatacagttctgacacggattcaacaatgtcttagcccaaacacgagcacacattttatactgtctccttcccatttgttcatatttctttgatgattcttctgaggctattgctgcaaaagccaaygtgtggtatggtaagatgtaaggaaaattacgaacaggtgaagtttgcatattcttcttttcttttgcttcccatgtctgccctcattttgaactgttttgatatctatgtcataagagatcgctaggacctgacaccctttacaccatcatgtaataaattttccttcttgaaacagtcttagcccagatcacctagaagacagcctcaggtaaagcttaaatcttaacgaatagattagaaacttttcccgttatatcctttaacaacaacaacaacaacaacaacaaacaacaaagaaagttgtaattgaatttcaacatagtcccatggtttctgcctcagagaaagtaatacaaatctcagagccttgctacaatg

SEQ ID NO: 534709 - DNA, 649 bp, Homo sapiens
tcattatgggaaaacaagagtgcctatagtattaccaattcacaggaattacagaggtcagtggaacatactaaactacacaatgagcacaatcaactttgtgaaactgtrtaagacaaatgacctgttttttcaaccaaacaaaaaattggacagaaaaaagagatgaaagagaaaacctatagattaaaagagacttaaattgtgtatcaatcaatcatcatgtgtggaagttacttggattctgattcaagcaaatagacaaaaacacatttatgacatgtatgagacaactggaaatttgaaaacaggatatttgattatattaagttgttttgttaatttttagatgtaatatatttgctgttatgtcttcaaagtttatcatttaaagatacatgctgaaatatttacagatgaaatagaagaccacatttcatgtatgtccacaagttataggtcttcactttaactgatcctgtcaccaagatgaccgatgttctttaaagacaagaaagcagagatatggcaaaaggaactgaccctctggacaaaatgcagagattcaacaaatttaaatgaaaaatgcccctacgtagacagaaattacctcactcccttttttttcccatctccccaacctcctcag

SEQ ID NO: 534710 - DNA, 604 bp, Homo sapiens
attaacttttagttcattaagccaactcattatttagtcagtagaaagtattctaatataagaatatggtacttttaagacagtttctcaactttagctccattgatgttttgggacagagaattttgttatgggaaactgtcctgtacactacyggatgtttagcagcatcccaggcctctatgtactagatgctaaaaaagcatctcccactttatcaccagatgtgacaaccaaaacgtctgtacacgttgccaagtgttccctgtgggacaaaactgctcctggtttagaaccactgctttaagacaatggttctcaattggaaaggtaaatcaaaatcacctttggaactttttcaaaaagttaaaaaatacccagtacccattatgtagattttgtcttagtagatctggagtggccgagaatgtacggcttaggcacatgtttttaacaggctccaaagccatttttcaatgtctggttaagaattattacactgagaagcacttttaacataagcttcttgatactagtgaactggaatgaatgggatttgatgatatttcactgagttctacataaatttattttattatataaa

SEQ ID NO: 534711 - DNA, 535 bp, Homo sapiens
ctcgccaccactgcccctccagctccatgggacccggcggcgcgcccagcccgacgcggcaactcgagtctgtaagacacaccccaggcgcggtcactgccggctcccccgcgaccctctgcgccccctccccggggggtgtgacctcaggccacccggtgtggctgctcatcttcacttgmctcttcctcaacccagcccgacccgagtcgtttcccccaacgccacacgcgaagccgggtctgcccccgcaggaagagccgaaggactctgagactcactgctcgactatgtgtcgggcaaaaggggatccactcgggccctgagttgccaaagcgcggagccaggtgcgagctcgggaagagctgggggaggcccggctggggctccctgcgtccggggctggagttctcccgccctcctgaggagcggggagaggtgacacgctcatagccccgctgaggggaaacgctcccatggcaaagcccgggggtgagcgtctgcctggccgcgggtctccgcatggacgtcggga

SEQ ID NO: 534712 - DNA, 619 bp, Homo sapiens
ctaaaaatacaaaaattagctgggcgtggtgaggtgcacctgttatcccagctacttgggaggctgaggcagragaactgctggaacgtaggaggtggaggttgcagtgagccaagattaagccattgcactccatcctgggtgacagagcaagactctgtctcaaaaacaaacacacacacaaaaaacccttctaaaaaactagagaaaaaaattgaaaacaaccagagagaaacaaaacattacttataggggaagaatgaaaaattcaacgtatggtgggtctctcaccagaaaccaagaagaccagagagaaatagaacaaaattttttaaatgctgaggtgcctcagaaaagaatgaaatcatgtcctctgcagcaacatggttgtagctggagaccattatcctaagtgaattaatgcaggaacagaaaatcaaatatcacattctcacaagtgggagcaaaacattgggtactcatggacataaagatggcaacaatagacactgggtactactagagcagggagggagagaaggggggaaggactgaaaaactaactgttggttactatcctcactacctgagtgatgggctcattcatatctgcaacctc

SEQ ID NO: 534713 - DNA, 557 bp, Homo sapiens
ctggcggggctagcaagctgcacaatccatcactgccaggcagctcttggcagcggccagcactgcggggcctctggagccgtatctccagtcagggaccagtaattaggtgtttagattcaaatcaacatttaaaacagccttggggaagttttcggtatgctaggagaccaagtaagctaccgtcaataaaatcacgtgaattgaaactccacatagggaagtttgtaaattctcctgaagatagaattattttgacaagaaaatttagtttgcttttctgactacttcctctgcttatagaagaatattacatattcactaattcatttactttaattaaatgaagttgattagaaaaaaawattgttgagcatttgctgggttggtcttgattgagtactaaggatacacagattggtaagtggccctccacttcctccggaagctcacagacctcccagcaatgaaacctcacgaagcagcaatcacggaggccagcagatatcaccagagtactgggtgggagtcggcacctggctcacagacacaggggc

SEQ ID NO: 534714 - DNA, 577 bp, Homo sapiens
tggggcttcctgcagggcctggggcttcccgggccccctgcatctgggccatctggtcagcggacccaaggtcacagcaacaagctcacagatccgagtaatgacccacacttgagcctagtgagtcccattctgagggctaacgaggtgcagaggcctcaagaattcctctgccagaaacatcagatggaagctggtacagttggcccaaacaccagccaggggacwgtttatcagaccacccaagaggcaggaatccaagcctgctggaaaggtctttctgagggctggacccagcaccatggaccagcctggggtgctccggaaactcctggagatggcaggctggccatacccctcgcggcagggctcaggtgttgggggtgtctggggagcagcggtcaaagggtgggtggctggtgtgattatgacctgcatttgcaccctgataactcctaggagggcctgcttggacacatcacttggattgactgtcccgagtggtcccttctgaaacgggggccagagggcagggctgggaggagcactcatgtgccttggccagggagtctgtgca

SEQ ID NO: 534715 - DNA, 577 bp, Homo sapiens
tggggcttcctgcagggcctggggcttcccgggccccctgcatctgggccatctggtcagcggacccaaggtcacagcaacaagctcacagatccgagtaatgacccacacttgagcctagtgagtcccattctgagggctaacgaggtgcagaggcctcaagaattcctctgccagaaacatcagatggaagctggtacagttggcccaaacaccagccaggggacagtttatcagaccacccaagaggcaggaatccaagcctgctggaaaggtctttctgagggctggacccagcaccatggaccagcctggggtgctccggmaactcctggagatggcaggctggccatacccctcgcggcagggctcaggtgttgggggtgtctggggagcagcggtcaaagggtgggtggctggtgtgattatgacctgcatttgcaccctgataactcctaggagggcctgcttggacacatcacttggattgactgtcccgagtggtcccttctgaaacgggggccagagggcagggctgggaggagcactcatgtgccttggccagggagtctgtgca

SEQ ID NO: 534716 - DNA, 456 bp, Homo sapiens
ctgtcaatcaggttctcaaatacatctgggcacctactggaaaggtaagggatgggttttcctcaaagtgaaaaaaaaaaaatccagaaaacaagatgcagctaggtgccaaatgatgtcatcccagaaggagtagtcagcctgccagactaacattgctcatgagggatccatggcaaaggagacagaggaaggtttccttggagaggactttattggataataatccraatgactaacatttagcaagcgtttcctaggtgctagacattgtctaaggcgcttacatgactaactcacttaaccatcctatgtggtaggcttctaatttgctcaaggttacctagctagaaacttagcctgacttctaagattttgatttgaattggcccataaagaacaccaatgggtgtttatgtaggacttaaccatgtgcaagtctgagcctcttacgta

SEQ ID NO: 534717 - DNA, 617 bp, Homo sapiens
tgctcctcagaactggtccagtgcctccccagcaacacttacttctcccccatcctcccttcacctgcagagactcctacctcctgcttgcctagaaaacccagtctccaattcactctccagaaaagtaactgcacaggacgctcggagacacgtgcaagatcgttgcttacaacactgcagaagaaaacagctggaaacatgctatctgtctacccacaggtaaatgattgaataggctctgaatcacacatctgcagaatataaaattaaaaaaagaaaaacagagcacagaaatatgtacttttatagtctgtgttaatttatagataaaacataagagatatatagccgattaaaagagttgaccatctccaggcagaagtctaggatggtgacagggtcaagaggaacttttatttcttctgtgttattgtctawcttgaataagttttacatatgtgtgtgtatttgtgtgtgtgtctttatatgtataatatgtgtgcatatataaacatacacatgtatgtgctagtgtaaatgaacctactgagatgccagacatataaagtagagcacatgcaattatgtacaatgtataatgcttgataataaat

SEQ ID NO: 534718 - DNA, 617 bp, Homo sapiens
tgctcctcagaactggtccagtgcctccccagcaacacttacttctcccccatcctcccttcacctgcagagactcctacctcctgcttgcctagaaaacccagtctccaattcactctccagaaaagtaactgcacaggacgctcggagacacgtgcaagatcgttgcttacaacactgcagaagaaaacagctggaaacatgctatctgtctacccacaggtaaatgattgaataggctctgaatcacacatctgcagaatataaaattaaaaaaagaaaaacagagcacagaaatatgtacttttatagtctgtgttaatttatagataaaacataagagatatatagccgattaaaagagttgaccatctccaggcagaagtctaggatggtgacagggtcaagaggaacttttatttcttctgtgttattgtctaacttgaataagttttacatatgtgtgtgtatttgtgtgtgtgtctttatatrtataatatgtgtgcatatataaacatacacatgtatgtgctagtgtaaatgaacctactgagatgccagacatataaagtagagcacatgcaattatgtacaatgtataatgcttgataataaat

SEQ ID NO: 534719 - DNA, 480 bp, Homo sapiens
cagggatgagtgcagaaacagtccacayttagttcgaaactgttgggatgcctgtgggtctccagaggacaggcagggatgagtaggcagacgtgctttctccatacttttttttgtcactcccctgcttaaaaaaattgtgtttctatctgctttaaagggaaattttagaaagagagttttagaatttaacatttaggccaaacctcacaattttataatactctagccttttcttattaaaagtgaccatcttttgcgactttctgagctctcctttgtttagaaaagcatcccatttcacattgatcatctcctttcacaatcctggaaagaacctgggcaaggatttgtattataattacatgaaatagtagcccctcttatgggaaaagggactaagtctcagggtggtcaagcgactggcctggggtcacccagcaggaaaccctgctcctttgcccctgagtgaccttgtga

SEQ ID NO: 534720 - DNA, 467 bp, Homo sapiens
ctggtcttttccacttggagccccttctatctctgtagagagggctgtttctctttstcttctcttctcttctgcctattaaacctccgctcctaaactccttgcgtccgtgtcctaaattttcctggcatgagatgacgaaccccagggtatatatcccagacaacatagccacttcaccacagctggtagagctggtctaggttagcactttcactatggtcttcaaaagcagcatggtaattgcagatgttctttgagggaaacccaggctttgaaaagcaactcagtggtaaggcttttcaaattttatgagaatctctgcgtcagcaggtctggacaaatgcaaaatataaagcgtctgtgttggacttcagttttcccatctgtattgtcagaactccttttttattcccacccatttttcccccatcatagcttcttgagacagatatcaggaagggatc

SEQ ID NO: 534721 - DNA, 467 bp, Homo sapiens
ctggtcttttccacttggagccccttctatctctgtagagagggctgtttctctttctcttctcttctcttctgcctattaaacctccgctcctaaactccttgcgtccgtgtcctaaattttcctggcatgagatgacgaaccccagggtatatatcccagacaacatagccacttcaccacagytggtagagctggtctaggttagcactttcactatggtcttcaaaagcagcatggtaattgcagatgttctttgagggaaacccaggctttgaaaagcaactcagtggtaaggcttttcaaattttatgagaatctctgcgtcagcaggtctggacaaatgcaaaatataaagcgtctgtgttggacttcagttttcccatctgtattgtcagaactccttttttattcccacccatttttcccccatcatagcttcttgagacagatatcaggaagggatc

SEQ ID NO: 534722 - DNA, 549 bp, Homo sapiens
gtattttaggttttttgttttgttttgttttttgagaaagagtctcattccgtcacccaggctggagtgcagtgctgtgatctctgttcactgtagcctctggctcctggattcaagtgattctcgtgcctcagcctcccgtgtagctgcagttacaggcakgtaccaccacaccggctaatttttgtatttttgatagagatggggtttcatcatgttggtaggctggtcttcaactcctggcctcgagtgatctgcccgcctcggccttccaaagtgctgggattaaaggcatgagccaccatgccccactttattttaggtttttgagaggagataatttgtcaaacccagcactctgcctaccacaaaagttgatgtgcaggatatatttacggaataatttaacatatccctctacctccctgccccagcaacttggaaggtcaatgaacatgtgctgaattaaccccactcttgctgtgtgtgtattcttctctcatacaaccaaaacctaacttttgttaattagggttcagcattagccat

SEQ ID NO: 534723 - DNA, 436 bp, Homo sapiens
gtcgtgctcctggcccgcgtgcccaggaagggcgcagcggagtcgcgtgcccgtccgggcggaggacgccgtctccgcgcggcggtgccgggcccctgcttccggaacgctaattttagggttcgccggcccccctttcttttcacccgctttccgtgcgagccgctgcgcagcagtctgcgcttcgagtgcgctgtgttttaaggaggccccggcgcttkccccttgggctcgggggcttgggtgcgcaggtgggggctggcacgcagcccgttgggcaggtttcgcgcagcgaccctccccacgccggagctaagttctttgggtgagacgtgcaacaacgcaggccccaaagctctctgcgcgcagcgccgcggggcttggccttctccagtcctcgggagtcagccaccgtctctggcttgttataggattc

SEQ ID NO: 534724 - DNA, 670 bp, Homo sapiens
ctggcttctggctgggttcagctaagggaagccgccccagagacaggagagtgtgaggctgggaaatgccagagtatttttccccatccctcactatctcagggagcttctcctacagcagctctattttctttgtggttctagctcccatgtgataggcctgctatagtttctgcttctgctgagtaatcccagatgctacaaccttaagagtcatataatctgatcyagtttcctaatgtgtaaaacagggagagaatctgctcacattatctatttcaagaaaaagaaaaatccctggttgtctagtggttagggggaaaaaaacaaagaatgtacattaaaattgtaaacaataaagtgctggacaaataaggaatttaagggtatacgaataaggcaatatggtgtagcagaaaagaaaacaggactggggataataattcttggttcaagatcttgcttttctgcaaattggagacaacattgttggtaatgtagtggttgcagagacgcatcaatgaaagtatttgtgaaactttatattatcaagtataaaaagctatacaaacaaatgaattcgctagctataagcagaaaaaaactttatttctatcaaattgaaaagtatgaaccttcaagcaagataatcaacataatcaataataca

SEQ ID NO: 534725 - DNA, 604 bp, Homo sapiens
cacaattcaacctaggctcatgacttcatgactrcactggacttcctcactacctcttgctcactcaaggaggccaaagaccatttgctaagtcccagggtggaggtatggaggactcaaagaggttacagtagcatggaggcccaggtctgtcaggaagagttaagttaccctcccagttcagagtgaggcccttagtggtctagaaaagtaacactctataataaattttagatgcagtggctcatgactataatcccagcactttgggaggccaaggtgggaggattgcttgagcccaggagttcaagaccagtctgggcaacatagtgagcccttgtctctacaaaaaaaatcaaaagattagcccagtgcagtggcatgcatctgtactcccggctacttgggaggattgcttgaacctgtgaggttgaggctgcagggggccatgatcatgccactgcactccagcctgggagtttttgagacagagcaagaccctgtctcaaaaaaacaacaacaaaagagagagagacagagagagagagaaatttgggaaaaacccattttattctttctctaattcagaagaataggaagctgg

SEQ ID NO: 534726 - DNA, 604 bp, Homo sapiens
cacaattcaacctaggctcatgacttcatgactgcactggacttcctcactacctcttgctcactcaaggaggccaaagaccatttgctaagtcycagggtggaggtatggaggactcaaagaggttacagtagcatggaggcccaggtctgtcaggaagagttaagttaccctcccagttcagagtgaggcccttagtggtctagaaaagtaacactctataataaattttagatgcagtggctcatgactataatcccagcactttgggaggccaaggtgggaggattgcttgagcccaggagttcaagaccagtctgggcaacatagtgagcccttgtctctacaaaaaaaatcaaaagattagcccagtgcagtggcatgcatctgtactcccggctacttgggaggattgcttgaacctgtgaggttgaggctgcagggggccatgatcatgccactgcactccagcctgggagtttttgagacagagcaagaccctgtctcaaaaaaacaacaacaaaagagagagagacagagagagagagaaatttgggaaaaacccattttattctttctctaattcagaagaataggaagctgg

SEQ ID NO: 534727 - DNA, 515 bp, Homo sapiens
tgagaaagaaatttctgggctggacatggtggctcatgcctgtaataacaacactttgggaggctgaggtrggaggatcacttgagcctaagaagtcaaaggtgtaaagaaagaaaagaaaaagaaagaaagagatttctgttctttgtaactacccaactcaatttatagtattttgttacagtagcccaaacagaccaacatacccccttttgtggggttgtgggtggacactcaacccttgggcaagttatttaatctctctgaccttcatagcattgtagggaggattaaacaagatagtgaaaaacacttagtaaacactcactaaatggtaagcattattgttcataacatcatcatcatcccagttggcaggggacgcaaaggaaaggaaactcagtcttatccataacaggataatttgagcattgcaggccttccttgaattgaacacagaactgtcttcttatggcattttgttgctggtctttgttctgccttgggctactcat

SEQ ID NO: 534728 - DNA, 515 bp, Homo sapiens
tgagaaagaaatttctgggctggacatggtggctcatgcctgtaataacaacactttgggaggctgaggtgggaggatcacttgagcctaagaagtcaaaggtgtaaagaaagaaaagaaaaagaaagaaagagatttctgttctttgtaactacccaactcaatttatagtattttgttacagtagcccaaacagaccaacatacccccttttgtggggttgtgggtggacactcaacccttgggcaagttatttaatctctctgaccttcatagcattgtagggaggattaaacaagatagtgaaaaacacttagtaaacactcactaaatggtaagcattaytgttcataacatcatcatcatcccagttggcaggggacgcaaaggaaaggaaactcagtcttatccataacaggataatttgagcattgcaggccttccttgaattgaacacagaactgtcttcttatggcattttgttgctggtctttgttctgccttgggctactcat

SEQ ID NO: 534729 - DNA, 515 bp, Homo sapiens
tgagaaagaaatttctgggctggacatggtggctcatgcctgtaataacaacactttgggaggctgaggtgggaggatcacttgagcctaagaagtcaaaggtgtaaagaaagaaaagaaaaagaaagaaagagatttctgttctttgtaactacccaactcaatttatagtattttgttacagtagcccaaacagaccaacatacccccttttgtggggttgtgggtggacactcaacccttgggcaagttatttaatctctctgaccttcatagcattgtagggaggattaaacaagatagtgaaaaacacttagtaaacactcactaaatggtaagcattattgttcataacatcatcatcatcccagttggcaggggacgcaaaggaaaggaaactcagtcttatccataacaggayaatttgagcattgcaggccttccttgaattgaacacagaactgtcttcttatggcattttgttgctggtctttgttctgccttgggctactcat

SEQ ID NO: 534730 - DNA, 558 bp, Homo sapiens
aaactaacgtttcacgtattacttattaattgcaaaggagaaaatgttcctttacataaagagatcttctggacatcgyccataaataaaattgatatcatgggcttcttgacacaatgcattgagaaggacacagcatcatctatgtagtattcctgccaaaaaaatgtttagtctgaatttattaatcaggaaacaagtggttaaatccaaattgaaagatattctgcaaaatagttggcctagactcttcaaaaacatcaacatcctgaaacacacaaaaaggttgagcaactactccagattaaaggagattaaagatatttgacaactaaatgcaaagtgtgctccttgattagatcttgaattagaaggaaaaaatagctataaaggacattattgtggtaattggaaaatttttaaaaaacactttatattaggtaatattattgtaccaatactgagggtgatcattgtattgtgtttatgtaggtgaatgtcctcctaattcttaataaatatatgctgcaatatttaggaatgaaatctagtattgca

SEQ ID NO: 534731 - DNA, 570 bp, Homo sapiens
cctgtttataagttgttcacacactaggggcccagggcagggatcatactgtgtctactttaaacaagatacagaggccgggccacagctagcacactcaaagctttacataagttagaaaaaaagggacttccctgaacagatgagttggaaggcgctccttccccagggttgatgcagccaaggctctgggcatggctaacagggcctggctggggctgagcccctgtgcaygcccctcaggtgggagtccttggcaggccgaaacctgcaatgtggttagaagtggctgtgcctcatggtttgtgggcttgagggcagcaatggcccttctcacgggctcttcctgcccacttgattgcggtttctgctcaagccctcaaagcccacctcataccttaaactgcctttgtaagattataactgaggaaattatgacagtgaaagaaatcagacctaactgactccatcttgcttctaaactttaagcaagctgtccttgttcattcctgggcgtaggccgaactaactatgggaaggaattcagttcacggtttgactctgaaacaa

SEQ ID NO: 534732 - DNA, 570 bp, Homo sapiens
cctgtttataagttgttcacacactaggggcccagggcagggatcatactgtgtctactttaaacaagatacagaggccgggccacagctagcacactcaaagctttacataagttagaaaaaaagggacttccctgaacagatgagttggaaggcgctccttccccagggttgatgcagccaaggctctgggcatggctaacagggcctggctggggctgagcccctgtgcacgcccctcaggtgggagtccttggcaggccgaaacctgcaatgtggttagaagtggctgtgcctcrtggtttgtgggcttgagggcagcaatggcccttctcacgggctcttcctgcccacttgattgcggtttctgctcaagccctcaaagcccacctcataccttaaactgcctttgtaagattataactgaggaaattatgacagtgaaagaaatcagacctaactgactccatcttgcttctaaactttaagcaagctgtccttgttcattcctgggcgtaggccgaactaactatgggaaggaattcagttcacggtttgactctgaaacaa

SEQ ID NO: 534733 - DNA, 410 bp, Homo sapiens
acagctgccggtcacagcttgtccrcatgatctcctgctccttctacttctctaactgttaaacagaaactcagaccaagaaacttcagtactcccctatcctctaaactcaatccaaatggcttctagaagtccagtgcggccaggaaaaagcaggtcttcatcaaattttataccataccttattttattaatacagaaaatgttgagaatccttagtttgattggaaaacatgtaaaggtttgaccagatgataaatgccaatattaaatctgctggaattccgtgtacagaatgaagagacaataccaaaattagttaaagacataatttctttaactgtggcttaagaaacaatgaacgcttaaaaccctaccttatgaataagaatagattttatcttatctag

SEQ ID NO: 534734 - DNA, 410 bp, Homo sapiens
acagctgccggtcacagcttgtccacatgatctcctgctccttctacttctctaactgttaaacagaaactcagaccaagaaacttcartactcccctatcctctaaactcaatccaaatggcttctagaagtccagtgcggccaggaaaaagcaggtcttcatcaaattttataccataccttattttattaatacagaaaatgttgagaatccttagtttgattggaaaacatgtaaaggtttgaccagatgataaatgccaatattaaatctgctggaattccgtgtacagaatgaagagacaataccaaaattagttaaagacataatttctttaactgtggcttaagaaacaatgaacgcttaaaaccctaccttatgaataagaatagattttatcttatctag

SEQ ID NO: 534735 - DNA, 451 bp, Homo sapiens
ctggcatgcaactaaatccaatccattaatgtgaatgagcttagaagcagatcctcctccccccgtgatgacttcagttgagactgcagccctggccaacattttgactgcatttatgaaagaccctgagctagaggaaccacctaagccaaacccagaatcctgaccctcagaaactgtgtaataaataygtgacgttttaagccactaaaactttgtgtaatttattgtgtggctataagtaacacactaccccttcactccctcgtgcctgaccccaagaccttaaactacttaagattgggccgggtgcaattcacgcctgtaatcccagcactttgggaggccaaggtgggtggatcatttgagatcaggacttcgagaacagcctggccaacatggtgaaaccctgtctctattaaaaatacaaaaattagccagccatggtgtc

SEQ ID NO: 534736 - DNA, 535 bp, Homo sapiens
tgcttaattcaatttaagaaattcaatcacctagactttttttttcctctaagacaccagccaagtgtttggactaatttttttttatttccagagaatttattggttcacatcacatagacaagaactctatgtccaaagaacttggagtttcaaagcgacatgatgatgcaatgagacattttgaccaaattccatcctgaatttgatgaatccacccaaaaggagaaaagtggctgcttctggtttgcacccattctcaaggcagtggggcatagtacaaacatacctggactgggaatgtggaagtcaggattctcttaagggctctgctcctaactggctacaaagcctgggctcaggcttcctcatctattaagtaaactatttgaactggttgatttcagaggttctacccagctctaaaaattctataatcctgagaacatctctttargcatagttctctaactttgctgttctgaataaacatgatctggtcacactgaaatttcctgtccttggtaattacaat

SEQ ID NO: 534737 - DNA, 652 bp, Homo sapiens
cctttttaaattttttcaaaagaagtcagcaatctgggttttatgtaatatccttttatttttaaatgttggaaactaattccaattgtgaaaactccttttggggaaactggccctcaatgaatgcccttttatgacctctgctggagtgggtatctagggaggggtgaaacaaagtgggacaaagcaacactcccaaaataatatcctgtaacatagggagtggtactgggggttttgaagaaggcttwtcagagtctcccagggtggcgcaaagagaggaagtgtaggatttttgtttgatgtttcttaaagaaagccatggttcccaaaggctgccttagtgagtggccacccaaaagaagccacacacatgggaccatgtgctgtgaacagaggagtcagggagcatgaggctgaagtccacaggtgtggggtcaccaccactactcatgcaggcatgtatgtgcccacactctctctgcctatagaccatgtcatggctagtggggcaggaaatactttgacagagacgatcagcaatatagaatcttggacattcggtgctcccgacaacctcaacagtcttttcaaccttgtcattttacacaaataatctgagcccaaagaagaaacagacttcttgctccca

SEQ ID NO: 534738 - DNA, 639 bp, Homo sapiens
ggggcccagccacctgtgtcttcagaagcccttcaggagttcctgatgtgcactcaagtttgagaactactatttcatttcatgcttcttagagcttgcttttgtggccatttgttcaactggtctggaaaggggaagaaactttgaaagtgcttgttctccattcagactgctgattgttgatgcagaatagcagctggggttactggccatttcttcccaggtcccccttcctgaacctctcatcttctgttttcaggctcctggctgtagtttctggtccctgcagtctggcttcctggatataatctttgcctgttgaacctgaggcagctgyctcttccttcccgcctcagtttatctcccaggctccagaccctgctcctctctctaggcctccccactatgcttccttctctcataaaagttgaggcccagcttcatcctctagttggcatggagtcccagatgatgccagctctgttcatcctctttgtttgccctctcctggcctgctacgtttagttagcaaacatgctgctattagcaaatacttttgaatgaaagaattaagtactttttggtttccaaaatccttctacctgcattatctcatcagatcattgtgacagtgaaagt

SEQ ID NO: 534739 - DNA, 639 bp, Homo sapiens
ggggcccagccacctgtgtcttcagaagcccttcaggagttcctgatgtgcactcaagtttgagaactactatttcatttcatgcttcttagagcttgcttttgtggccatttgttcaactggtctggaaaggggaagaaactttgaaagtgcttgttctccattcagactgctgattgttgatgcagaatagcagctggggttactggccatttcttcccaggtcccccttcctgaacctctcatcttctgttttcaggctcctggctgtagtttctggtccctgcagtctggcttcctggatataatctttgcctgttgaacctgaggcagctgcctcttccttcccgcctcagtttatctcccaggctccagaccctgctcctctctctaggcctccccactatgcttccttctctcataaaagttgaggcccagcttcatcctctagttggcatggagtcccagatgatgccagctctgttcatyctctttgtttgccctctcctggcctgctacgtttagttagcaaacatgctgctattagcaaatacttttgaatgaaagaattaagtactttttggtttccaaaatccttctacctgcattatctcatcagatcattgtgacagtgaaagt

SEQ ID NO: 534740 - DNA, 492 bp, Homo sapiens
gaattttcaggggattaaataccttctagtggtttcccattggttacttggtatayaccctatgtaaatgaagtagtggcccactaccagtttgattggttgcaggagaggaccaatcagaggctgaagcaaagttacaacgttacgccctatcaagcatctgattagttgcaggaagcaaccaatcagaagctgaaatgaagttacaaagttatactcctatgtaaatgaagacttggcctgcgaccagcctgattggttgtgggaggggaccaatcagaggtactttcaatttctgccacacagaaaaggggagcgttgcaaagggagtagcctctggtccttttgttacttgggtgtggatagttagggttttccttttgatttagttctagaaagtcagagtgaatcagctttaggttccctgcctccaggccctattctcctgcctcaatttctgacctgtgcttctgtgacctggccctgaaagag

SEQ ID NO: 534741 - DNA, 602 bp, Homo sapiens
agggtgtgcctgtgtggctctccctgcacccaccaagttgttccagctatgaagtaaacaaaagcgacaccgcagccagcaggaaacgagccgccaggccattccagagacacttgaaactcctgatgaggcataaagagttaagcaagtttgagggcttccttgtgaggggaaatggaagacagtgaaaaggatggaacatactagtttagtggtaaggaggccacttactgagtttaatgccagtccaacttaaaactagagcagcttctcaacctcagtactgtgctactcayggacgtttctccatcgtggaaggctgtccatgatggagaaacacgttgaaggatgtgtagcagcatccttggtctctacccactagatgccagtagtatccctcctcccccagtgtgacaaccaaaaacatctccagaacattgccaatgtgccctggtgacatttttgtgccctcattgagaaccactgccttagagtgaggcaggaactcaagtggtcaggaattatgggtttggttagatgcttctctctaaaatgttgagggactgacaaaggtggccaacaacatgtacagattgccttac

SEQ ID NO: 534742 - DNA, 494 bp, Homo sapiens
tcagccataaaatcagaagagagtgaatatttatgagcactgccccactttgggcaactgyagggtcaaagagaccaatatttcaccctcagagggatcaagaagaaagagtacctgaactcagttcggatatgtacatagtgcatagcggggctagaagcagcctgaatgtcactgatcaacctcacctctttcacctaggactgtcccaagtcatcgacaacagaggggacttattcaacccccaaaacacatgcaggtatttagattccccacctcttgtatctggctgatggataacaccctcaaatacacccagctaagttataaaatctttctagagctaacgccttagtgaatttgtttattcactgggagcaggtctcctggaccatttgaccccacaattccactcccttgtgttcacactccaggggaggttccaggagaaaactgtctcatgtcccctctcttttactggtactggtgattac

SEQ ID NO: 534743 - DNA, 486 bp, Homo sapiens
aagatggctccctaccatgcatccagggcccactctggcagggagagtggcttacccgcttaacctggcatgccgaggtctcggctgtgcccctgaatcattgctgagtgcgtcaaggactccagtccccaaccctctgcaggcctgactcatgcagcagcttccccagagtacgcccacgggctccaggtactgctcacaagctggtctcctcctccacgtagacacacaaacaaagccagttactaggcttgctaagctctgcttaaagttacagggccttgcctttggggccgcaggctgcctcatgcacgcctctcttgttgtggatgctgggctcttccatgacaacataggaaacccaccaagggtccctttcacattgataatgatgttatgaaatctgcggccaatcttgaaaaatgcagtgccttatrggaggggaaaaagaggctgggagggcaagggaactttatcaagcagcaa

SEQ ID NO: 534744 - DNA, 501 bp, Homo sapiens
aggcatggaagcatagttaaaagattaaatctaatgacagttatctgctgagacatacaacctcttatatggaaaaagttagagactgactctgactctaaaagtcagtctctgacttcttttttttttttttttttttgagatggagttttgctcttgtcgcccaggccagagtgcaatggcacaatctcactgcaacctccacctcctgagttccagcgattctcctgcctcagcctcccgagtagctgggactagtctctgacgtcttgaaactctaagcatcaaattgtgttttctctaatcatactcagactctgctatacagcatgagagtctccagtacttgcctgcctcagggaagrgtgactcctaggccaggccaggtgggccatctaagtatgggtatgtacccagtgagagaacccacctatttctatcacctcctctatcttctttaatatttccagcctgggagcatttccccaggggtgtccccag

SEQ ID NO: 534745 - DNA, 433 bp, Homo sapiens
tgaaccatgttttgtctttcagatttgtagatgctgaggagccaaagagaggtcactagggctggaggacacagaacttggccccacacttccatcagaccttggtccccaggggagaagccctggggcagctcctgctagtgccactcccttaacccagccaaggaacagggagggaggagcggtgctcagccaatgaggcgacgccctggagccccaccccacccatgctggccccaggaccccarccccaggccagaccctccagtgctcctgctgaccttccgtgtctgcagcccggctttggactgtggagatgccctcagcctctactcagtggctccagcctcatatttgcgtgctatacctttaacctcaagtcctcttgctgctaacttaagctgcgactgtccaggacctgcacacacacaca

SEQ ID NO: 534746 - DNA, 449 bp, Homo sapiens
gccagaccctccagtgctcctgctgaccttccstgtctgcagcccggctttggactgtggagatgccctcagcctctactcagtggctccagcctcatatttgcgtgctatacctttaacctcaagtcctcttgctgctaacttaagctgcgactgtccaggacctgcacacacacacacatgcacgcatgcacacacacacacacagaaggtgaacacacaggatgaggccctgaaaactcatttcacccgtgtacctcacccaaaaattcccctttgtactcctatctttatctctaactgacagcatgaaggtagcccgaagtcccctcaccctgtctgtcctcctgattctctagcccagttccctctagctccagcacagactcttatctccagccctgactgccgaaaccctccagccccagctccagcccctcaggagggga

SEQ ID NO: 534747 - DNA, 543 bp, Homo sapiens
cacattgaaggagcacaatgccctcctgtgtygatgccacttcccagggtggagacagtggaaaagaaccgaggacaggaaaggattgggtaggtgaaggggtcaggggactggtagtcacccaatcttggagaggtgcaaaaagcactgggggctacccgttagctgcatctgccctggctgtttgcccgttcatgtcacaaactgccactactatgtacctgcagtggggttgcagagatgggggagactcaagtcttactccccaggagctcccagggcccaaggaggagaatgctgcctcctttcagtctggtctacacccactttctggtagcctctctgcttcctgtaattctggctgtttttccagactcagctcaaatagtgcccctccttaagcccatccctcgcccccagcctgaggtgatctttccctcctctgaactattagagcagttactgtctgttcagttcgtttggcaggcacacacagtggcataaattctattgttttgaactctgatttaaaattaaattgca

SEQ ID NO: 534748 - DNA, 614 bp, Homo sapiens
gcctgattccccaaggccatctgctctagttccgggagcttggagcttctgtggggccttagtcagcctgggagttaagccccagtccctccagcttcagtggagtcagctttccccaggcagcctgggcttaggggagatggaagccagagactctttcccaccctgggtcytctccagaaaattcaggctcctgagaaagggagggctgggcatcccatcccgtcgtggggctcaggggatatggtaggggttgagagtggtgatggcgatgaaacgggttcacagggtggtgtatgtggcatcatggccaggaggcaatcccagaaggttgagggcacaagcaaaaatcccaatctgtgtttactaatcttgtttcacagcctcctatcaggaagttctttctgaggtctcattgacatcccactttagctcctcaagaacagggcagaaaccaggacaattgcagtgactctggggacctcttccagctctcaccaacacactgagagacccagcagctttgggagccagaaaaggatcggtgccccttcccagccccgtgtatggccaaagcacactaggggacactaaccggcacgtcttagggacag

SEQ ID NO: 534749 - DNA, 282 bp, Homo sapiens
gcaggatagactaaaacttctgatttctaactgrtagagcagccactgtctcacagtttagaaactcaggcacgagagtcagggccatcttaccctctgaagtcaatggatccacaccgttactgcagttctgcagagcaggtagctgagtctcaaatacaggtgacttgcacgaagctactgggtaaggcagtggcctgtccaggcctgggtccccagtctcagagtacatcttctaagcccagagacatctgactgtagagagaagccttggcgggtcca

SEQ ID NO: 534750 - DNA, 404 bp, Homo sapiens
agcaggcagacttgagtctcctttctgtccatgggctcgggccactgtcttaggtccacccgtggctccaaaatggtctcctggtccgtgatagcaaagatccaggaaatactgcagaggaagatggtgcgagagttcctggccgagttcatgagcacatatgtcatgatggtgagtgggtgggcagcacgaagtgggtggggctccgccagggccgtccatgaccccctccccatgctgaccccatgggtcacattgtccattccttgcctctgagctgggagcctggggaagcagcagaggaaagtaaggagggggggctttctcatcaagyctttttggacagaaagggctcataatatgtgggggtcaaatgaaaccatgcactggggtatccggggcac

SEQ ID NO: 534751 - DNA, 640 bp, Homo sapiens
caggcatgtgccaccatgcctgactagtttttgtatttttagtagagacggggtttcaccatgttggccaggctggtctcaatctcctgacctctggtgatccacccacctcagcctcccaaagtgctgggattacaggcttgagccaccatacccagcctctttctaatctttctaccttgaaaaatcaacaaagaagtctttcgtcagctttagataattaaagccaagcaagcaacaaatgttggtctttttcagtagaaaccatgttaaaaatagttacacaagcatcaagcatctctacccccatcacacaccttgtccttgagaactggttttgctgtgtttcagttctgtccagttctccctggtgaccctttcctcccttgattagttccacagcactgcaggctaaggrgaaaaaggaatgtgtgggcccaggaggggactgtcctaggagacaggccgatactttttacttttagataagaaatgaaaaagtgttcatgacttttccctctgcagactctcccttcaggttcaaacttggaactttctagctttggtcatgtattttatgcccttaaagggtttgtacttttctccatacatatccagatgaccctaagtccagaaatag

SEQ ID NO: 534752 - DNA, 668 bp, Homo sapiens
tgttaatccttggatgtaggaagtatagggaatcttttttcttatttttacttttctgtagcttccttttttttggtaatgagcttctaatacatttttgtttataattttaaaatcatcagtgcccagctcctcccttcccactccaaatttccccactccagaagcaaccttcacagtgttaggcacttctgacatctgctttcatgtttctaagtaacagtctgatgctcctatggaagatgagaatttagctctcatacctcctaaccattcatatacccaaacttacttatttacatacttttctcatcctccaagagtttatatcttaaatattggtcagaattyatggtttacatttttgttactatgtaaatattattcacagcagggacatgtggtatgctatgatgacattttctttctttcacaacttttgtttaccctggagttatttattaactatctctatttttatttgcttagcttcctattaatctattctaaattcatccctaaactgtaccagagtagtaaatctcctgtttctatatgcagacacctcaggtaaccatcagtttcatcttctccttggagatatctgctcctggagccatccctccttctgttcccatctggacgggttgattgccgtgtttcctgaa

SEQ ID NO: 534753 - DNA, 628 bp, Homo sapiens
tacttctctagcaagacaaatatcattaacaccatcttcctccatggggtaagtatgctttagagagagaggataacttgtctaagtactcacaggtagtaaatggtggtccaggatttaactgaggtctatttatggagtggagttcatgctttttcccctgcaccttccctcactacttctttttaataggtatatttcataatctgtkttacagaaaaaaaaaatacaagaaatcagtcagctcccacttgaatgcactttgaaagcatttacccagacagacaggctgagtataaacacctggtccaaagaagaaggatgggaagatgataattgagtttgtgtgtggctgtgggtggatgagtcacatgctcccctgctctcttgaggtaatctgcctttctgttgaattagggaacccaagggtaattgttggcaggattctcctaaaattctgctctgatgagcagaagacaagagcaaatggggaaaggcagaccatggcctgaggagatgaacaatctggcgtatgagacagggaatgtctttttttatgagcaaagaggtatttttatggtttgccttgagtgagtagcctctgatgctgggaaaacagactggtaac

SEQ ID NO: 534754 - DNA, 668 bp, Homo sapiens
atttgttcaaaaattatgggacttccatctgtactaatctggaacagttgactttctaaacaaaagatacttcagaattacaataaccaaattggggttcttttttccccaaaactaggcttctccaaattatattggaagaccatggctctaaaacaraacaacctgaatgaagtacatattttagttagcatctggaagcatccaaacacattcaggactctaaaattgcttctcgctagagcagtcttgaaactcacagaggctaataaaaaaaccaaaagagaaagaaaaagtccttgaagctctggtttcttctactaactctcactctcctatttctgctctccaacctctatgtcctacacttgctgacttcccttctactcttctgactctaaagcttcccttgattcccgtttctgttaaaactgttcaaattcaccctttcaagctccatcggaataatgaggtcactctactaaatgtttcctatacactttggacaaaagctgaacttagagatatagctaaagagttcaccaagattactgaggaccctcataaactgctgaagatttaaaaatgttatccaaacacataaatctgatttctctaacttttatccattaatacagtcatctctcagtatacacaagggattggtt

SEQ ID NO: 534755 - DNA, 668 bp, Homo sapiens
atttgttcaaaaattatgggacttccatctgtactaatctggaacagttgactttctaaacaaaagatacttcagaattacaataaccaaattggggttcttttttccccaaaactaggcttctccaaattatattggaagaccatggctctaaaacaaaacaacctgaatgaagtacatattttagttagcatctggargcatccaaacacattcaggactctaaaattgcttctcgctagagcagtcttgaaactcacagaggctaataaaaaaaccaaaagagaaagaaaaagtccttgaagctctggtttcttctactaactctcactctcctatttctgctctccaacctctatgtcctacacttgctgacttcccttctactcttctgactctaaagcttcccttgattcccgtttctgttaaaactgttcaaattcaccctttcaagctccatcggaataatgaggtcactctactaaatgtttcctatacactttggacaaaagctgaacttagagatatagctaaagagttcaccaagattactgaggaccctcataaactgctgaagatttaaaaatgttatccaaacacataaatctgatttctctaacttttatccattaatacagtcatctctcagtatacacaagggattggtt

SEQ ID NO: 534756 - DNA, 570 bp, Homo sapiens
ttcacttgccctccatttaaaagctttcttcctatggtgatctgtttcaagatcctagccagaggcataggagcctccaaccagcagtcaagggcattctgagtatcagaagtatttaattcagtagggacatatgcaagaatctattcctttacagtttaactacttttgtacacaacattatatccttatattctcctataattttttaaaygagactagctctaggatcctgtgggttcctttctctaattaatacaccatcaatagagaatcaaaggttcagttatcagattgtctttctttctctaagccagtccagaagggtggataggacttactattgcatagtcttcaaatataactacccaattaaactggtctagatacttttaggatatatagcagtgatctcccttatcatttgtaattccctgctgtaaactccaatctgcatatggaaattttaagttgggtcatccttataagtctccaaaaacacttctggaaagggacattttggcaatatgtatcaaaagctttaaaaacgtatatatgctttgactaaaa

SEQ ID NO: 534757 - DNA, 597 bp, Homo sapiens
atatatgatcatctttcttgtctctggttgatttgcatattgtgcctcagcacattctgggattgaaccaagtaatgatggaggaggtctggaaccccatcttaactagggcacatctccattgggagaaaccagtctcacayacatcgaagggtaccaggatgaaacatagatcactatgagtatggggtgagtgccagttattctctagtctagttggggcaaatgcaatctgtgatgaagcccaacaattataagtttagttgatatctaaagagcaaatcagtgggacaaccttagaacttaaaattctgaaaaactgtgcaacaactataggaaaagagcactgtactaggaactactgctaaatcttcactaagaatgctttatcacctatctctcttcatctaatactctgtctaggcaaactcatctatcccttatggctttaccccctacctatatactaatattgtagtccgaaatttaaatctccagtccaggcttcttctgaactccaggccagcgatatcaatcatttctatctgaacaactcacaggcatttcaactggtgcatgtgaaaaaataaattcatc

SEQ ID NO: 534758 - DNA, 493 bp, Homo sapiens
tgacagcattcattttcagtcatttaacacatcattgtagtttaattctctgcattgtatctatcatcatttgatttttatgtwtttatttccccactaaaatgtatgctccaaagaatgcaaagactttgtctatcttgttcaccactgtattccaagtatttagaatggtgccaagtacatagcagatgctcaataaatatttattgaatgaatacatgagaaaactctgaaaggattttatgtctgtattgtgtagggtcaacaaaaaagactctatttctaatgttttttacattcattttaccacactgtataaaattttaacttcaaatagcaacactgaaaagaaggcattgacaagactaaatattggggtttgtggaagtacctttggggcagatttaaaatatggtcccaaattctttgacactattttcatagaaaggttggggtatatatctcctgtccttgaattcagactctgtgacta

SEQ ID NO: 534759 - DNA, 562 bp, Homo sapiens
ccttctctactaaaaatacaaaaattagccaggtgtggtggcgtggtgaggttagcctcaggaggctaaggcagaagaactgcttgaacccaggaggtggaggttgcagtgagccaagatcatgccactccactccagcctgggcracacagtgagactccatctcaaaaaaaacaaaaaaaaagatgaagaaagttctggagatagatgatggtaatggttgcgcaacaatgtgaatctctttaatggccctgaatagtacacttaaaatgattaaactggtaaattttatgtcatgtatattttaccacaattaaaaataaaatttaaacttccccccaaaacaaaaacaaacaaacaaaaaaccaaaaactttatctagcctttaatacatgggctggattgcattttcaaagtgatttttcaacactacttatatgaaatttttaacctctcacttttctctaataccactggggatttttatttttatttattttctttctttttaaaattttatttcttctaagaaaacaacaggatacatgtgcagaatgtgcag

SEQ ID NO: 534760 - DNA, 618 bp, Homo sapiens
aaaaaaggagggactctttccatagtggcttcacccactctaagacagagattctccatctttctcatctttctaggccttccatagtcaacagggggtggtgggatggggaaggtatatcacaatctctaggatgggttggaaaggaaacattgtttgaaaaaccacaattaatattatgcatcttatagcatcattttatattttttaaaacaaaaaaaaattactctataccagtgtcctcttgtagaaagtgaagctttacaaaatcttggccagcaaagctgggttaaaaagttgcaaaacactacaaatactggtagattaaaggtcttaataggcctattagcagatattctagagaattgctaccacttttcctatttagttttgactgaatctgacaatcatttttwaaaatcacgcaaggcaaggaaagatactgatcaggaatttttcttttatgtgtcagaaaaaaaaaatagagatttatctctcttaatgtgtatgtactaaatatacagtgaaatataactagaaacacataaacatccccagcaacttgaactaacaataacaaaaatgtcagcactctaaattaccagctctgtattcctt

SEQ ID NO: 534761 - DNA, 366 bp, Homo sapiens
actatagttacagaaagaatgaaaactttgccaaccttggcaatataaaagtaaagrgacagttgatagaaatagaaggtagaaatggagagaagaaataccatatgtgaggggtgatatccttacataatatatgatgattcagaaaatattgtctaaactattagaataataaatggagaggtaaaggagaagggacccagtaaaccaagcacatggaatttgcttgactcttggttagaatgacttatggcagcactttcttaagtatgctctggagaatatcacttctacaggatattaacattatgtggaggaaaaaaaaataaaacattccatggtcaagtaagcttgagaaatgctggg

SEQ ID NO: 534762 - DNA, 662 bp, Homo sapiens
ttttatgagggtttccacaaactacaggctagaccacaagtaggtgtgtatatctggaggcatgtgcatgtattttgaaacaccatattgtagtggaaagaacaagggctttggagtcaaaaagacttgtgatcagtcccctggctcaaattaaataacatggaaaatgcctcgtggtgaacattgagtagctgggcattatttgatttgtgtgtgcatgcacctgtctgtcaagtgtatttgattgctagtcstttcccaaagacccttgacatggacagtatgctctctctgtggtcttgcataagagccaacagtgtgtagaaagaaacaccatcctactctgcagatgccccagtgcatgctgggactatgctgctgtttgtggtaactgtgaattgccgtggtgatggctgggttgggagagactcttgcatctgttctgagcctgagtagcacacacattctctccccagttgctccattttcagggaaaggcttggagggcagcccaggataacatcatgagctcctccccatagaccttggtgtcaccctggggcctgctaggagccctacctgcccccttcccccctcaaaccctacttgcgcgcacacacacacacacacacacacacacatacacacacttcactcttgca

SEQ ID NO: 534763 - DNA, 557 bp, Homo sapiens
tttgcatttgattaagaagcaccagcgtcctcccacccatggttcttccttcccaaccttcttctctttgaagtgctccccccscaccctgccccaccattctcccagctctctccctttgctgtgctcaggaaatcctccagttgggctcctctccgttgcctcggccactcccgcagatctgcttggcattctctgcttctggcctcttttccgaggccagctctgcagagtttgcctgggtacaatgtgttctcattgtgcctccaacagtgtcagttcctggagctcactgtcaggaatccagcagctggcttagaaatcagctgcctttgctgagggctcatggagatggggtgaggcctatcctccatttctgtccgcactagccacaagcactagctcatgtaggaaaccactagatgcagaataatctttgaaaagccctctcctctactcttcccatctcagtctctctctggaggggtgagggcaagagcaccccaccccccccactgcccaccacctcctgaggtcagctggatcaccttcactcc

SEQ ID NO: 534764 - DNA, 557 bp, Homo sapiens
tttgcatttgattaagaagcaccagcgtcctcccacccatggttcttccttcccaaccttcttctctttgaagtgctccccccgcaccctgccccaccattctcccagctctctccctttgctgtgctcaggaaatcctccagttgggctcctctccgttgcctcggccactcccgcagatctgcttggcattctctgcttctggcctcttttcygaggccagctctgcagagtttgcctgggtacaatgtgttctcattgtgcctccaacagtgtcagttcctggagctcactgtcaggaatccagcagctggcttagaaatcagctgcctttgctgagggctcatggagatggggtgaggcctatcctccatttctgtccgcactagccacaagcactagctcatgtaggaaaccactagatgcagaataatctttgaaaagccctctcctctactcttcccatctcagtctctctctggaggggtgagggcaagagcaccccaccccccccactgcccaccacctcctgaggtcagctggatcaccttcactcc

SEQ ID NO: 534765 - DNA, 539 bp, Homo sapiens
ctgggagggtcaggcacattactattggccactctcagcattggccattctcacctccccatccctctgcatcctcagttaagctcaatgcagaaattcaaacgcaaggaacaggccctgccctcagagagyccccattctgatgtgggagagagggcagaagagttcaagacccagatcgttaacaagggaaggcacaggcataggacagaatgtatgtagccgtgggcactgtaaggggcatagcagttgaatagcagccttgtctagagcctagatgtggaatattgcccaagagttgcactttgtaaactgagtctataaataccaagagaatgtcgaagagaagctattgaagccaggtagagttagggaaggattcttagaagaggtcaaacgtgaagggcagcagtcatggagaaggtgcttcatctgaaggtagggcccagtcagtgccttgaagcggcaaccaaagactaggaaagcctaagccaacatttctcagtcctgttggggactgcgccagccactgctctaag

SEQ ID NO: 534766 - DNA, 539 bp, Homo sapiens
ctgggagggtcaggcacattactattggccactctcagcattggccattctcacctccccatccctctgcatcctcagttaagctcaatgcagaaattcaaacgcaaggaacaggccctgccctcagagagcccccattctgatgtgggagagagggcagaagagttcaagacccagatcgttaacaagggaaggcacaggcataggacagaatgtatgtagccgtgggcactgtaaggggcatagcagttgaatagcagccttgtctagagcctagatgtggaatattgcccaagagttgcactttgtaaactgagtctataaataccaagagaatgtcgaagagaagctattgaagccaggtagagttagggaaggattcttagaagaggtcaaacgtgaagggcagcagtcatggagaaggtgcttcatctgaaggtagggcccagtcagtgccttgaagcrgcaaccaaagactaggaaagcctaagccaacatttctcagtcctgttggggactgcgccagccactgctctaag

SEQ ID NO: 534767 - DNA, 454 bp, Homo sapiens
ctggtcccacagtcctccgcatggaccacccttgaccttggcaagtcctttcctaacgtgatcttgttgctaaatattagtggctgtggaggtattgctttctcctggaactttaagctcgtctccccggcccaagyttgctgccaaaggctgcacttttgcacacggctgagcagggctgagctgtcctgtgacaggctgtggcctgaactagccatccgcgtggggctgccctgtggtcactgcctgccctcagctcgctgcagagagaggctgccactccccagaaagggtcagcctgggtgtggtggagggggtggggtgactgtcctcccagctcatcaggcagctcccagcctcaagaacactgcggaggagcagaggtgaggcctcagagcacagatctgaaccctgatctatttaatatttccccaggggactggagcagaaaggc

SEQ ID NO: 534768 - DNA, 620 bp, Homo sapiens
gagcctcttggaaactttggccctgaatcagagcttgccaagtggggcttgtgggtccccagaacctccctggtgccgaaggctggttggttaatcccagaagccaggccctgctccctctccccaagaaccgggtgggctccccgtcatagatactgcaaactcaggctgttctcccagcctggccacgaggcctagggttgcgggaaagatgtcagccctaggagtgcagagtcctgggaggaaaggagctgtgctaagcaggagactgagggagagagacctgggcggtggctcccgagcctgagcgagacgctgyccacctcgctgcgctgcagtcgcagcaaggccacagccggctgaggaccggcaacgcccccttgtggccattctcagcaacaagcccccagagagcctggcgggggctggactggggctgggttctcttgctgcaaggctgaggtggctaggtgacttctcttatcccaagcctggagatgaaggaggcggcttttcctgagaacagacttgtgcctgaagagtagatttgttctgaaggccagggacactttgcgtagccacttggcatcaggaagtcaagccctggttttctaatggac

SEQ ID NO: 534769 - DNA, 454 bp, Homo sapiens
tggagatgaaggaggcggcttttcctgagaacagacttgtgcctgaagagtagatttgttctgaaggccagggacactttgcgtagccacttggcatcaggaagtcaagccctggttttctaatggacatccaatactggtggtatgcaaygagatgtaaggattttccaaaatgtggccttatgtagcacaccctccactgtgggggtttgcaaagatgaggccccatctccatcctgttgaatcagaagctctggggggtgacaccctggtatctgcctttttagcatactctgagagaaaagatgcttttatgggcttcagccaagtacaaaaccatagaaccagactgtcaaagctgggtaggggcttgggtatcctctactcccactcccatatttgtagatagggaaactgaggcccaaagaggggaagtaattcaccctagctccca

SEQ ID NO: 534770 - DNA, 586 bp, Homo sapiens
gtgtgcccccaagctagaactctaaaaattattattttttatagtgatgggctcttgctgtgttgcccaggctggtcttgaactcctgggctcgaggtatcctcccatctctayctcccaaagtgttgtgattacaggcataagctactgcccctcaccctctttacgtgttctaagttgtccacccagcatgccctgctttacgattcctcttagcccagtgcccagtggagatgcattaccgagggtccctaatccaagccatctcactcagtgaaaatcaaaaccgtaggtgatctggaaagatacctgcctggcagttccaggctgagatggccgtgcatgctcctctctctggccccagatttgcttctatttcctagtttttctttccttgcctcacacacccatgtggccaacacattagtcctttagtcctggctctttctgggtatgtgtccccatgcagcaaacaacaggagtgccattgagcgctgggctccagttcagcccactcgctgattgagatggttccggattctctggggtaaggacgaaaaccctgggagctcccctggggagcagg

SEQ ID NO: 534771 - DNA, 586 bp, Homo sapiens
gtgtgcccccaagctagaactctaaaaattattattttttatagtgatgggctcttgctgtgttgcccaggctggtcttgaactcctgggctcgaggtatcctcccatctctatctcccaaagtgttgtgattacaggcataagctactgcccctcaccctctttacgtgttctaagttgtccacccrgcatgccctgctttacgattcctcttagcccagtgcccagtggagatgcattaccgagggtccctaatccaagccatctcactcagtgaaaatcaaaaccgtaggtgatctggaaagatacctgcctggcagttccaggctgagatggccgtgcatgctcctctctctggccccagatttgcttctatttcctagtttttctttccttgcctcacacacccatgtggccaacacattagtcctttagtcctggctctttctgggtatgtgtccccatgcagcaaacaacaggagtgccattgagcgctgggctccagttcagcccactcgctgattgagatggttccggattctctggggtaaggacgaaaaccctgggagctcccctggggagcagg

SEQ ID NO: 534772 - DNA, 586 bp, Homo sapiens
gtgtgcccccaagctagaactctaaaaattattattttttatagtgatgggctcttgctgtgttgcccaggctggtcttgaactcctgggctcgaggtatcctcccatctctatctcccaaagtgttgtgattacaggcataagctactgcccctcaccctctttacgtgttctaagttgtccacccagcatgccctgctttacgattcctcttagcccagtgcccagtggagatgcattaccgagggtccctaatccaagccatctcactcagtgaaaatcaaaaccgtaggtgatctggaaagatacctgcctggcagttccaggctgagatggccgtgcatgctcctctctctggccccagatttgcttctatttcctagtttttctttccttgcctcacacacccatgtggccaacacattagtcctttagtcctggctctttctgggtatgtgtccccatgcagcaaacaacaggagtgccattgagcgctgggctccagttcagcccactcgctgattgagatggttccggattctctggggtaaggaygaaaaccctgggagctcccctggggagcagg

SEQ ID NO: 534773 - DNA, 556 bp, Homo sapiens
ggtagtatttgctgattcctatggtataaatgttcccaccataactgatttcaagctattaatgtgacataattgaataagaagttgggaaaaaatgcacgacagaaccctataatatagtatttctaccatatggataaataatctcgagaacacagataagagtaaaatgcagtagaacaattaggaagtgatgagttttgagtatttttgcctttgtttttaamataatttaattgaaagtttatgtaattaaattttcaataatggctgaaagattcttgaaaatttaataatcatctctcataagttagtataaacttgctccagcatatcactgagtttcctccactttaaatatcttctatgaatttcttcacctgtccaaacccttccttattcttcaactgtacctataactacagttcacattactctacttttgtatgttgatgtgcacacactgagacacacaatgtatatatgtactaaaaatggaagtttgtacagagtgcaatgggaatgcagaggaaggaggatctaaacctgcaatgga

SEQ ID NO: 534774 - DNA, 556 bp, Homo sapiens
ggtagtatttgctgattcctatggtataaatgttcccaccataactgatttcaagctattaatgtgacataattgaataagaagttgggaaaaaatgcacgacagaaccctataatatagtatttctaccatatggataaataatctcgagaacacagataagagtaaaatgcagtagaacaattaggaagtgatgagttttgagtatttttgcctttgtttttaacataayttaattgaaagtttatgtaattaaattttcaataatggctgaaagattcttgaaaatttaataatcatctctcataagttagtataaacttgctccagcatatcactgagtttcctccactttaaatatcttctatgaatttcttcacctgtccaaacccttccttattcttcaactgtacctataactacagttcacattactctacttttgtatgttgatgtgcacacactgagacacacaatgtatatatgtactaaaaatggaagtttgtacagagtgcaatgggaatgcagaggaaggaggatctaaacctgcaatgga

SEQ ID NO: 534775 - DNA, 398 bp, Homo sapiens
aatttgcacttctacatggtccgcttgatcctaatgtcawccttctctatcactgaacatctatgcctctttgcacctttgccccagtaagacaaatagaacatcttttcatcagcaagcacaggcccctgtaactctgaaaggctaaatgggtggctggcacctcatttgaattcatctttgccatgttccctttcaaatgtttcatcgaaacagtgcacctgcagcgtctatcttctttaatctggagtcctttgaagaaaatgtcagactgaggcagagagcttcaaaactttcacagcacctttacagacaagtcaagaaaaggcttattttttaaaatgctatgttcatccccacccgtatctcaaaatgaacacatcttaagaattttaaac

SEQ ID NO: 534776 - DNA, 475 bp, Homo sapiens
ggctcactgtctggcaagacctggagaagttcactcttcacttacagttcagagtacaaaataagtaatcagtgtttgtcaagtagcctgaatataactggtacagaatctacacgacgctaagaactcaatcactgagaattcagccactgagaaaagggaatactgtatatttgacaattggttttaatgtccataggacgttctgagggcccacctggtctagcttccgaccaatctcaaacttgacaccaactactttgactgcagccttgaagcgacggtctctgtaactaagagtgayttctagagctgctcacagtacgggaataaggtgtctgagctgaagaaatgataccaaaaagcctaaaattgctggtggaggctttctttgaaaactctcactgccgtactgtgaggtttaatgtaagatttgtcctactcccatttctcacttttattgaacgatgctcac

SEQ ID NO: 534777 - DNA, 617 bp, Homo sapiens
agaataataaagcaaatgtagcaaaacattaacagttggggaaatctgtgtgacgggtatatgagtgttcattgtattattcttgcaactttcctgaaacttgaagaaatattaattaaaaaataattaatcaatggaggccgcccaccagtgtgagaagtgctgtctacacatttaacaggcctgatgcgaggctcttctgggacttaaccttggrctccactccactttcacctctctaggctagtggcctgccctgcgtgtgggaatggctgcattgaattacgtggacagtgctataattatgtcgtcttccctttcatcttccttgcaggactccaagtgagaatgtgtggagtgagctaatgatttgccacatatctctgatgagtactatattatttgcatcataatattttcatttcctccccctgcacataacgccacattgacagcaaggtcagttaagttactataagggatttttaatgaaaacaattataaatttaaaataactgtgtttaaagcatttaacaatcactagggtcaagtgattacagcagttacaagccccatgggacatgttcacaccaaaacaaagtgaataaattacctca

SEQ ID NO: 534778 - DNA, 650 bp, Homo sapiens
gtgtcttgcttattaatactaatgatacatagtccatgctctggaaaacactgatctggtttaaattgactcattttaccatgaagaatctgagccataagtagaactcagattttctaactttcaattcacttatctttccacccacttaattttgcaagctaaaatatacctgcacttggagaataaaaataattttaaaaatgacaaaatactggcaaatcagtcacctaactctggcaaccattaatatctagagagacagtccaaaattattggaattagttgtcaaaaatatccaagttttagtgctctctatccagtcatggataatttacatgagaagtgaagtaatgacttctcctaaactaaataagtctcctaagtttaccaaaaaaataaaaataagtctcctaaatgaaaaaaatgcatattacagggagtgaacaatacagaagtttgttttttaaaatgctgataaagatataaaggttcctcattctcaaggatctcacgtcacatgyacatatggattttgcttccacatacaggtctcttcagagggactagttcagttgactgatgagtctcattagaaagagccctggctgtggaatccagtggcttttgtgttcttactacatatatca

SEQ ID NO: 534779 - DNA, 602 bp, Homo sapiens
tgataattaaattgttaatctgtctgttaacttagtcaactataagaaaactgattttttagaaaggggtaaagtaatmaaaatagtctattcattagattctcccttaattttaaaggaaaagtctcttataatacattttgaggcatattttcctattttcttctgcacactgctatgcagtgcttaagagaaggtaaggacatcttttagagaaactgagtatttctagttcagagttatttgaatgctggttacttggagtggaagacttgatcgtgggcagactagcaattaaagatcatgaaagtctacactccaggaggcgatagacacttgacttgctcactcctttctcagtcaaatgccctccctatatgccatctgtgggctgtgtcaggcttagggatcctgaaggaaaactacttttggagaaataaatgactgcttgatatgattgaagtgattggtttatacgttagtctttttgagttatgtcatctgtatgttccagaagtattaaagtttgctttccttcttttaaattctagatctaaataaatttaattttggtcagatttggggctaaaatttgatatagt

SEQ ID NO: 534780 - DNA, 603 bp, Homo sapiens
cactgtttttacttacataaactcatgaacartgtgtcagccagctttacacactgtgaccgtgagggatgtattttcccaaacattactgatcctttattgaaatggaaaatttagtttgcatgtggaataatttccctttgcaagtcaattgtgatttattaaatttccttgtccttcacaagatgtcaatggtgttatctcttgatacacctcaggacacgtcttgtctgtttgtcgtcactaggccttcatgatatacagcctttatgatatgtcttcctgaactctgaactcttgtaggaaatggattctatcatataaaactcagtatcctccaaatatgcctcagatgaagtagatttcagataaatatttgtaagttaatgagataattttatcctgtatgaaaataattctgaaatggaagacagcatgtagatacatcgtaaatattgttcactctatgtggacatctctccatggcaaaagaagactcagacaaaccaaactattatactaccaccaaaaaagtctgtgcaattaaaaaacagtgcaacacaatgcaacaatgcatccagccatgatggtctgaataggtgc

SEQ ID NO: 534781 - DNA, 444 bp, Homo sapiens
tgtttaattgaccacttaatctttcacagaagaatatatatatgcgcctataaattttgtcatatgcaaaatgttaaataggaaataatccctgttagtattgtaatcagtgcctgggacaggacgtgcataggtattcagtaagtaggtgttaaaggaacttagacatgttttggcaaaatctgcaatctaattaggaaaacaaagcaagcacacctaagaaattaaagtgcacagagcagttgacctgaatggaaatcagtaatataakaatatccatcttctacccaaaggtcatgacacccccccaacctcgccatcagcacttacttggaagtctcccttctttcagttcaaggcatcctaaattaaataactcatctttcactgaaaacagtccctccactttcttcctgttttgttcaaatcttttcctaactactg

SEQ ID NO: 534782 - DNA, 444 bp, Homo sapiens
tgtttaattgaccacttaatctttcacagaagaatatatatatgcgcctataaattttgtcatatgcaaaatgttaaataggaaataatccctgttagtattgtaatcagtgcctgggacaggacgtgcataggtattcagtaagtaggtgttaaaggaacttagacatgttttggcaaaatctgcaatctaattaggaaaacaaagcaagcacacctaagaaattaaagtgcacagagcagttgacctgaatggaaatcagtaatataataatatccatcttctacccaaaggtcatgacacccccccaacctcgccatcagcacttacttggaagtctcccttctttcagttcaaggcatcctaaattaaatmactcatctttcactgaaaacagtccctccactttcttcctgttttgttcaaatcttttcctaactactg

SEQ ID NO: 534783 - DNA, 444 bp, Homo sapiens
tgtttaattgaccacttaatctttcacagaagaatatatatatgcgcctataaattttgtcatatgcaaaatgttaaataggaaataatccctgttagtattgtaatcagtgcctgggacaggacgtgcataggtattcagtaagtaggtgttaaaggaacttagacatgttttggcaaaatctgcaatctaattaggaaaacaaagcaagcacacctaagaaattaaagtgcacagagcagttgacctgaatggaaatcagtaatataataatatccatcttctacccaaaggtcatgacacccccccaacctcgccatcagcacttacttggaagtctcccttctttcagttcaaggcatcctaaattaaataaytcatctttcactgaaaacagtccctccactttcttcctgttttgttcaaatcttttcctaactactg

SEQ ID NO: 534784 - DNA, 694 bp, Homo sapiens
gctttacccggtggatcccacaccggggctgcaggtggagctgcctgccagtccagcgccgtcccccggcactcctcagcccttgggtggtcaatgggactgggcgccctggagcagggggtggtgctcatcggggaggctcgggccgcacaggagcccatgggggaggggggaggctcaggcgtggctggctgcaggtcccgaaccctgccctkcggggaggcagctaaggcccagcgagaaatcgagagcagcaccggtgggccggcactgctgggggacccagcacaccctctgcagccgctggcccgggtgctaagcccctcattgcccagggtcggcagggccggctgctccgagtgcggggcccaccaagcccacacccacccggaactcgtcctggcccgcaagcaccacgcgcagccccggttgccgccggcgcctctccctccacacctccccgcaagctgagggagacggctccggccttggccagcccagaaaggggctcccacagtgcagtggtcggctgaagggctcctcaagtgccgccaaagtgggagcccaggcagaggagaagccaagagcgaaagagggctgtgagaactaccagcacactgtcacctctcaatacgctgtgctggcagtggccacacatacatactagaacgagacaggcccaactgagctgcag

SEQ ID NO: 534785 - DNA, 694 bp, Homo sapiens
gctttacccggtggatcccacaccggggctgcaggtggagctgcctgccagtccagcgccgtcccccggcactcctcagcccttgggtggtcaatgggactgggcgccctggagcagggggtggtgctcatcggggaggctcgggccgcacaggagcccatgggggaggggggaggctcaggcgtggctggctgcaggtcccgaaccctgccctgcggggaggcagctaaggcccagcgagaaatcgagagcagcaccsgtgggccggcactgctgggggacccagcacaccctctgcagccgctggcccgggtgctaagcccctcattgcccagggtcggcagggccggctgctccgagtgcggggcccaccaagcccacacccacccggaactcgtcctggcccgcaagcaccacgcgcagccccggttgccgccggcgcctctccctccacacctccccgcaagctgagggagacggctccggccttggccagcccagaaaggggctcccacagtgcagtggtcggctgaagggctcctcaagtgccgccaaagtgggagcccaggcagaggagaagccaagagcgaaagagggctgtgagaactaccagcacactgtcacctctcaatacgctgtgctggcagtggccacacatacatactagaacgagacaggcccaactgagctgcag

SEQ ID NO: 534786 - DNA, 610 bp, Homo sapiens
gcaatcggtactgtttttagaagaaaaaaattgatgccataattcagggtcaccatggcaatccttatttgcttattaatttgttactactttaaagttttcctcttggctcattcaatgtagcctggcaaacatccataccttgtttctcatggtgtttatttgctcattccatgatttttaccaatgatgctgggcattttcaagattcagcctaacaatgtacatggacaggcttagtctcctctgggattttctgcctgggatgatgcaatttccaggagctcattacaccataaaggagacgcacgccccttttcttaggaaacaatcttctgtctgttggaggtctcttgctctccagtttaaaaagctttaactgtgctttaagactttgtcattcaattcttatttattcttcttaatctccttgggattcttacattaggtgtacaataatcctgttaagccctcaagacttctcctaaatgagtggcagttctgggtaatggattgaaatatsccttgcattttctagaaacactgtatcttgttttatgatcgtcgttttctgggagtcccagctaatttaggaagtggggaaaagaaa

SEQ ID NO: 534787 - DNA, 645 bp, Homo sapiens
tgagattgctgcaaaagacagattctctctagsaaacaatacagaaggaagaccctaaggtaagaagggagtagatactgagggggaagaaaaactaggaaacagtgcagaaggaagaactctaaggtaagaagggagtaaacactgagggggaagaaaaaccctctggcaaattagctcacatcctaaacacaaggtattgctagaggaatttgaggctatggtgcactgaaaataatcacgatagtcctcccttatccatgggggatatgttccaagaccaccagtgaatgcctgaaacctcaaattgtgccaaacctgattgctgtcagtgggaatatgtctctgtttatgtcttccacccacaaatttagtgcctttcccatctttataagcctttatcatggactatggttgtaacttttgcagtttgaggtgcaacagcaaaactagtacaaatttcgtttttcttctttacaatttcatggatagaagattcattcttaccatagatcttagcaacctcagcatataattttcattatttattaagttgagaactttcacattttcacttaaaggaaacgctttataatttccctttggcatattctaattgccagcatcattactgtggtacttggg

SEQ ID NO: 534788 - DNA, 605 bp, Homo sapiens
gtgtccatgtcttctcatcatttagctaccacttataagtgagaacatgccgcatttggttttctgttcgtgcattagtttgctaaggaaaatggcctccagctccatccatgttgcagccaacaatcttctagctttgttaaccagaaatgagccccatcactaagaatcttggattctctctgttctccgtggactttcagcttgcagggctcttggctaggagtctgggtcaagttcagagacagactgaccagtacggattccagctctgctgctttctttaacttccttatgcctcagctttcccattagtaaaatgggtgccataaaatgatctaccttctgggtttattgtgaacatttaaaaatggcacacatgaaggctgggcacactacctggcacagaggaatccgcaaattttagstgccagtattactgttgtaggacgttctccttagttaagctaaaagcgggatccttgtcacaggaccaggaaagattaggttcgtggatacacggaagggtgagaaaaatggaatttactgagcataaaggaaagaaactcagcaaagcaagagaggttcctgttaataagccccca

SEQ ID NO: 534789 - DNA, 605 bp, Homo sapiens
gtgtccatgtcttctcatcatttagctaccacttataagtgagaacatgccgcatttggttttctgttcgtgcattagtttgctaaggaaaatggcctccagctccatccatgttgcagccaacaatcttctagctttgttaaccagaaatgagccccatcactaagaatcttggattctctctgttctccgtggactttcagcttgcagggctcttggctaggagtctgggtcaagttcagagacagactgaccagtacggattccagctctgctgctttctttaacttccttatgcctcagctttcccattagtaaaatgggtgccataaaatgatctaccttctgggtttattgtgaacatttaaaaatggcacacatgaaggctgggcacactacctggcacagaggaatccgcaaattttaggtgccagtattactgttgtaggacgttctccttagttaagctaaaagcgggatccttgtcacaggaccaggaaagattaggttcgtggatacacggaagggtgagaaaaatggaatttactgagcawaaaggaaagaaactcagcaaagcaagagaggttcctgttaataagccccca

SEQ ID NO: 534790 - DNA, 599 bp, Homo sapiens
ctgccgcgaatccctcagatgaatcctatcctcatccatgcatctgatttctacactcggggtgggatagagtttgagattggaaaataatgcaagagctttacaccatgacttatgagcgctggctgaggtatctgggaagatgtagctggaacagatgaagtctcacaggtgacactgctgtttctaaatatttgaagggttttatacgtaacagacaggattagattttttctgtatggttgtaaagtatgcattgtccaattgagggaaactataggaaaaactgacttggttcacaataaaaattattgtgcctatcattcggtgagtgactaatacgtgctgtcatattatactgagataatcgaatcctttcaacaaccctgagaggtgcatgcttttaacctcatygtatagatgcgcatcctcaggtgcctttaggtttcaaacctatctgcctgactctctctttccattgcattcaggttcacttggggaaaactattctgtaatatgttttcccctgatggagctttcagaggtgaaatggaccgtgtgctgggtggataattctccctccacctggagatcactgc

SEQ ID NO: 534791 - DNA, 611 bp, Homo sapiens
gagggtagtacttatcccatgagggagctgttatgaggataaatttggctttattgaatgtgcatgattcctggaacccataaagatgtcaaatttagaagcctcagagagatttcctttgctctgtgaataactaaatttggttagctggggtggggtctgggtacttttccttgtgaagaatttttccctcattctggtcatctcctcccctcctatagaggcaccatatatttttcttgtctcaggtacctatagtgataaaacaccctgagctgaaaggatcgctggatagggcagtctcaatacaaaagaatgtggcagaagctcaggcttcagtgcacatcagaatagaagcttcatgagggcagaggcttttgtctgctttcctcattgcagtatccccagaactttgagcaagtgcacactcgatraatacttgaaagaataaatcaatgtcagacatctgggcttatgtctcatctttctactgttctcaactaagagattctcgtcattctacaactttcctgagcctgctctccttctccaaatattcacccttccaggcactgactccacctcccacatcagagctttttcttaaagta

SEQ ID NO: 534792 - DNA, 669 bp, Homo sapiens
gtcgggagcaaagcaaaccatgtaggaaacctcatcatgctgggtagttaataagtatgccctagcacacgtkttcacagagaaaacataatacgcttcatttgtaatatttaagtattacatctaaagttacaatgtttaaaaatttatatatacccttgttggatacaaagcatgtttaaaatatgtgacctcatttgatcctcagtaatctctgttagtttctaattatattcagtagtggtattggtattgtatgttttggcctcattgtggtttaaatacacttttgtgaactagcctgagaatccaaccaccaacacaatgatgtaatgagaaaacgtgctctgagttccaaacaaatggctaacagataagtgctcagaagtcaacctttttgtaagctggggtatcactggccagcagtcacatgccagcaggtgtgagtagacagtggggaacaatttcctctcatgtgtatggctccctaaagtgttggctgagcattgtccacatgggtgatgcaaaggatcactgaactaggagcagttgggaaaaaatacaatcattgggaattcctgtagcatcgaaggtgcctacagggaggtagaagtattcatacaacagttctctggtgttctctgttgtagcaaccagtcagccaaaagg

SEQ ID NO: 534793 - DNA, 528 bp, Homo sapiens
gctggatcaaaatggcagctcaggatttaaaggattctagtcagataccagacatcctcacatagagaaaactctgaatggctgggggagaaggagtcaaatgccctggatctttttcttgggcctcaaagtcctccttctgtcatcatccttccagtattgggcaggacctgactgcaggcatcatggcctctgtgaacttctcaagggtatgtattatcygacaaaaactacgatgtccactaacaggccactgaaaaggtatcttagtcagttctgctcattgcccagccaaggcctacgttttataacatgatatcaaagattgcatctaaaattgtgatgatttcctaaaataatcatttcatttagatttttctattttaatccaaggtattcttcagtggaaataaggaaacagtttactctcccaccaaaccttggccagtaccatcgacagagcataagtacctctggcttcccctctcttcaactagtaagtatgagttccaggtttacttagcgatt

SEQ ID NO: 534794 - DNA, 528 bp, Homo sapiens
gctggatcaaaatggcagctcaggatttaaaggattctagtcagataccagacatcctcacatagagaaaactctgaatggctgggggagaaggagtcaaatgccctggatctttttcttgggcctcaaagtcctccttctgtcatcatccttccagtattgggcaggacctgactgcaggcatcatggcctctgtgaacttctcaagggtatgtattatccgacaaaaactacgatgtccactaacaggccactgaaaaggtatcttagtcagttctgctcattgcccagccaaggcctacgttttataacatgatatcaaagattgcatctaaaattgtgatgatttcctaaaataatcatttcatttagatttttctattttaatccaaggtattcttcagyggaaataaggaaacagtttactctcccaccaaaccttggccagtaccatcgacagagcataagtacctctggcttcccctctcttcaactagtaagtatgagttccaggtttacttagcgatt

SEQ ID NO: 534795 - DNA, 655 bp, Homo sapiens
tacttgctaatctggcctctcagtgcaactgtttattttactgacctctccagagtcaggctaactccaaaaaatattttgacactgacttagagcccaagtggtagttttcatctctctggaggcaagctttgttgtctgtttttttttttttccccctcataatcctgtttacatccctaacgtcatcaacatcacaagcttcttctctgggaaattacacttttaccctcattacctcaaacctcaatagaggttccctgtcacaataaaaagctggctactgaggtttagaggcaactagattatagtaatactctctatttgaagccaactttacaaatgaattaaatccttgaayctaactttatgaattatatacatttttctcatttagctttcataataattatgggagatggctattttcatttataaaggaagaaactaaatctaacaccctcatcatcacaggatactatattttatatacaatcacagggactttttttttttaattgaacacacacccatcaagtaaaatgacataattttaaagtctttgtgaaatcttttatgccacataaaatcagtctgtgtacaatgctacacaaatgtcaataatcatatatcagagccaaaccagtttcacaat

SEQ ID NO: 534796 - DNA, 655 bp, Homo sapiens
tacttgctaatctggcctctcagtgcaactgtttattttactgacctctccagagtcaggctaactccaaaaaatattttgacactgacttagagcccaagtggtagttttcatctctctggaggcaagctttgttgtctgtttttttttttttccccctcataatcctgtttacatccctaacgtcatcaacatcacaagcttcttctctgggaaattacacttttaccctcattacctcaaacctcaatagaggttccctgtcacaataaaaagctggctactgaggtttagaggcaactagattatagtaatactctctatttgaagccaactttacaaatgaattaaatccttgaacctaactttatraattatatacatttttctcatttagctttcataataattatgggagatggctattttcatttataaaggaagaaactaaatctaacaccctcatcatcacaggatactatattttatatacaatcacagggactttttttttttaattgaacacacacccatcaagtaaaatgacataattttaaagtctttgtgaaatcttttatgccacataaaatcagtctgtgtacaatgctacacaaatgtcaataatcatatatcagagccaaaccagtttcacaat

SEQ ID NO: 534797 - DNA, 568 bp, Homo sapiens
ggggtgagagtgcagagaaggcactactactcttaattgtctcagactagaagtggcttcttatcccattcatactccttttgtgactattatttatactatctggtctaagtccacagggactggcaaatgtagagatgaatatttgtttacttcatatcctctgacacagtgaagttgagaattctgggttggaattcttttctctctctctttttttttttttttttttttttgagacggagtctcattctgtcacccaggatggagtgcagtggcacgatctcgggtcactgcaacctccacctcctgggttcaagtgattcttctgtctcagccttctgagtagctgggattacaggcatgcgccaccacgtctggctaatttttgtatttttagtagagatggggtttcaccttgttggtcaggctggtctcaaactcctgacctggtgatctgccctctgtggcctcccaaagtgctgggattacaggcgtgttccacyatgcccagctaatttttgtatttttagtagagacagcgtttcaccatgttggtcaggctggt

SEQ ID NO: 534798 - DNA, 621 bp, Homo sapiens
agctggttgctcaggaaaagattctcctgtttagcagttaagcacacacaaaaaagtcatgcaacggccttccctatagtggtgagatcacattaaatagctacttcaagtgtcactaaagcattataactgctcttaagtgtatgtagaatgagattactttagaaaaacatttcgaaaaatcatatgcttttcccatatgttcagtatttaatgttgttggacaatgactgcctaraacttcatacgcagcaaaaaaaaaaaaaaatctaacaacgaacatttaagtttagttcccacaagtctcagaatttcatgccctcgattttttccctatcatacacatttttaaaagactaatctagtggataaggatatgctatcaaaacctgaaactcatgaatcggaaatcatcttgcacattaacttgtaatcttataacaatttttgtctctgcacacataaaatgtaaattctgcacgcataaaatgtaaaaaatctcaaacagtttagtgttttgtatatttaaatcattatgttctataacaaacaataatttaggtattgtcagtaagatggaattagcaacatttctatttctcccaagtaaaaatatagaat

SEQ ID NO: 534799 - DNA, 621 bp, Homo sapiens
agctggttgctcaggaaaagattctcctgtttagcagttaagcacacacaaaaaagtcatgcaacggccttccctatagtggtgagatcacattaaatagctacttcaagtgtcactaaagcattataactgctcttaagtgtatgtagaatgagattactttagaaaaacatttcgaaaaatcatatgcttttcccatatgttcagtatttaatgttgttggacaatgactgcctagaacttcatacgcagcaaaaaaaaaaaaaaatctaacaacgaacatttaagtttagttcccayaagtctcagaatttcatgccctcgattttttccctatcatacacatttttaaaagactaatctagtggataaggatatgctatcaaaacctgaaactcatgaatcggaaatcatcttgcacattaacttgtaatcttataacaatttttgtctctgcacacataaaatgtaaattctgcacgcataaaatgtaaaaaatctcaaacagtttagtgttttgtatatttaaatcattatgttctataacaaacaataatttaggtattgtcagtaagatggaattagcaacatttctatttctcccaagtaaaaatatagaat

SEQ ID NO: 534800 - DNA, 621 bp, Homo sapiens
tgccctctgaaggcctttgtttttrtaaaccactgagatttttgaattgtttgttatctcaccataagctagcccaccctaacacagatgaacataaaatacagaacatttctattgggcggcttgaaatacaggcttggggcatcagtggtaggtcagcatggaaaatgttgattaaaaagtcatctgtgaggtggagattgggactgaagaatggataaattttctgaatggaaagtataaggggaagagaagaggaatgggcctagaggaagagtcactgtcaatccatacaaaaagaagagatacgaaaagataggaggggggatttggccaacacatggcagaccgttgtagtatcagaaaagagagctaggagggtagttacaaagatcacatgccaaattatgagggcaaagagccattggatttaccctgaaggtggtcattgaaaacctctgaattagcagttttagcggagctgtggggaaggaagtcaggtttcataaggttatagagggagtccatgcagaggaaatagaggaagctggtggaggccactcctttaaaaagcctggatgaggccgaagagaaatgggacaagtggtaaccagaaggccc

SEQ ID NO: 534801 - DNA, 532 bp, Homo sapiens
tctgaaggcctttgtttttgtaaaccactgagatttttgaattgtttgttatctcaccataasctagcccaccctaacacagatgaacataaaatacagaacatttctattgggcggcttgaaatacaggcttggggcatcagtggtaggtcagcatggaaaatgttgattaaaaagtcatctgtgaggtggagattgggactgaagaatggataaattttctgaatggaaagtataaggggaagagaagaggaatgggcctagaggaagagtcactgtcaatccatacaaaaagaagagatacgaaaagataggaggggggatttggccaacacatggcagaccgttgtagtatcagaaaagagagctaggagggtagttacaaagatcacatgccaaattatgagggcaaagagccattggatttaccctgaaggtggtcattgaaaacctctgaattagcagttttagcggagctgtggggaaggaagtcaggtttcataaggttatagagggagtccatgcagaggaa

SEQ ID NO: 534802 - DNA, 514 bp, Homo sapiens
caaaaaaaatgttaaataatgtgacagagagagagcatttttaagctttaagctttacayagtaacatcaaacattatagctaagtatttatttttaaaaggacaatggcctacagtttagaatgtcttctgccaaagttaaaaccaaatttatataaatttcatggtatttataaaaactgacatggtatgccagcgccatgattataataatttgtcattagtatggaaacacttcttagcaatgctcttgcttatgtctataatgtacatgcagatgcatactcatgtcttcagttgactttggcaagctatttatttaatatacataagtgtgtaatttgatgtacacacttgtgtgacacctaaccaatcaagaacacttccatcaccacagaaagtttcctagtaccccttcccagtcagtccttccaacccaaccatcccaggcaactgctaatgtgcttttgtctctacagataagatttgtccattctagaatttcatttacata

SEQ ID NO: 534803 - DNA, 330 bp, Homo sapiens
agggaaatactgttgtgtgtgtgtttctatttgtgtgtacatgtatatatctacaactacagcataggtacattaataggtacgttagaagaattaaatgagawgaagcatttaaggcactagtatattatgagaattaaatgagatgaagcattgccagacagaaagagattaagagtgacttcatgattcgaaatctctatagctagctgggtaaaagatagggtcagtgacaaactcagaagctggacacagacctggtttgggggataatgatagtttgcttttggacatattgagtttcaggtgacagcagccttaaagtatatg

SEQ ID NO: 534804 - DNA, 628 bp, Homo sapiens
gtaggcatacagtaaatgtctgccctataaatgactgaataaataaatgaaaatgaggcaatgagcagaggcttagatagttaaaactaggaagatccaactgtaggtagcagggatccaggccacaagcactcccaataagaatttgctaccggcaagagacggatgaacaggcagggggagagaggcacaagacaggaatcctttactgcaagtggaataaacagaaatagttactaagaagagcaggacagtttgcatcctgcaaccaggatccactgtcagaggaaactagccaccagagtgacacaatgctaagaccctaagctggtaacagagacagaggaaagagaaagagaagagagaatggctttggagcttttccttatttyatttacctatttactcaatcaccaactacatatttatagaatacctgttctgtgctgggcactggagatacaaaaagtctatttcatttggaaggatatgcattcacaaggagaatatgaatgaacagacattgatatatgttctttgtggagcctgggaaagaagcccacccacactggcagtagcctacagcacagaccattggagggtggggggtgggcagaagtgtcatccc

SEQ ID NO: 534805 - DNA, 509 bp, Homo sapiens
cctataaatcacagacatgatctaagtagagagaaacagctcctctagaggagaatggcattatcagaagaggaaaggcatgctaactagacacaaaagacccatctcacaaatattatttttaaagtctttaactccacgaagtagttattaccataaatgtatagaggaggaaactgagactaatagaaatcaaatcatttgccatggatctctctctctctctctctctctctcacgcacacacaacccaaagtgatatagctggaatttaaacccagctcagtctaattctaaatcctattctttcacttactatacatccagaaatatagctattatgtaaataaagacactgtggttagatggcagacaataatacctcacccacccctcccyggtcccctctacgcccccgcccccaccgccccacacacatacaacttcacagtgttgccatacactattctggcttccactaatacatgtgaggaaaaatgtttcatgtg

SEQ ID NO: 534806 - DNA, 506 bp, Homo sapiens
tagtccaagttaaaaaattaaaaccttaaatttcggcgcttcataacctgcattgtagaataactaaatagcctaccttgcctaaaatggcttgttgctgcatatacatttttctcttcttacatgatttttaactttaatgaatcttacattttttatattgccttaaaaggacaagttagtaacaagctcaccacgctttcttctagtaaccatggttaaaaaccttcgggataagagcttttctcctcatcacaactaatatctaccccactgccacatctctacaaccagccccttggccactgttgacctcactttagcaaaaaatccaaatcatgcatacataatgtacttagtgtayctccatcactataaggctgaaacatgttgctcagtggttccttccaaagcattagttgtttcttcctttatgttacacaaaagtggaggttactaaatgctactgcaagttcagaaaatgtgcttgcccatgctattcactt

SEQ ID NO: 534807 - DNA, 609 bp, Homo sapiens
ctgttttacaacctattacaggaatcccttttcccagggacaggcaacacgttagtccggaatgtcaagatgtaggtggacattgagaaggaggttgttccttgaagtgaagctaagatttatattacaagagtcctaggtgtcagtgggagagggtctgccaagaagaaccagagctgggagactgagtattgtgagggcttgggggttgaaagagatatgacaggcagagcaaacttgattggatatcagatgggtcttcaaagttagaaggtagstactagaggttaggtagacaataaattcagtgcaaccacaatcatttttggtgcccttgaatttttaaatatttgaaagatattgtcatatgaaaaatgtggagctgttggttgcaaaaagaacactaaacctagtttctaatctcagggtaccattagcttatcactaaatatttctgtatcccatttcccatatctgtacaatgtgaatattaaaagactgtactggcctatcttacaggattattttgaaactcaagtataaatgagcacataagggatttgaaattcaaaaattagttttatggtttttcaaagtgttttttttttt

SEQ ID NO: 534808 - DNA, 609 bp, Homo sapiens
ctgttttacaacctattacaggaatcccttttcccagggacaggcaacacgttagtccggaatgtcaagatgtaggtggacattgagaaggaggttgttccttgaagtgaagctaagatttatattacaagagtcctaggtgtcagtgggagagggtctgccaagaagaaccagagctgggagactgagtattgtgagggcttgggggttgaaagagatatgacaggcagagcaaacttgattggatatcagatgggtcttcaaagttagaaggtaggtactagaggttaggtagacaataaattcagtgcaaccacaatcatttttggtgcccttgaatttttaaatatttgaaagatattgtcatatgaaaaatgtggagctgttggttgcaaaaagaacactaracctagtttctaatctcagggtaccattagcttatcactaaatatttctgtatcccatttcccatatctgtacaatgtgaatattaaaagactgtactggcctatcttacaggattattttgaaactcaagtataaatgagcacataagggatttgaaattcaaaaattagttttatggtttttcaaagtgttttttttttt

SEQ ID NO: 534809 - DNA, 515 bp, Homo sapiens
ctcacatttttgcacatcttgcaagagagttactaacacccttttacctggagtttgtttttaaggacatttgtactrtctttattgtaggattttttttttttaattaataggcttcatttcttagagcagttttaggtttacggaaaattgaagagacagtacagatctcccatatacctccacttccttccaatcagtttcctattaaaacattttgcattaggtgtggcattttgttagaatagattgggcaatattggtacattactattaactaaagttcatagtttacactagagttcaggctttgtgtcatacaattttatggattttgacaaatgtgtaatgtcatatatccaatattaaggtatcaaacagtataattttagtgccttagaaatctctgtgcaccatttattcatctctctctccctctaacccttggcaaccactaatttttttccatttctacaggtttgccttttccttacatgtcatatagttggaatcat

SEQ ID NO: 534810 - DNA, 515 bp, Homo sapiens
ctcacatttttgcacatcttgcaagagagttactaacacccttttacctggagtttgtttttaaggacatttgtactgtctttattgtaggattttttttttttaattaataggcttcatttcttagagcagttttaggtttacggaaaattgaagagacagtacagatctcccatatacctccacttccttccaatcagtttcctattaaaacattttgcattaggtgtggcattttgttagaatagattgggcaatattggtacattactrttaactaaagttcatagtttacactagagttcaggctttgtgtcatacaattttatggattttgacaaatgtgtaatgtcatatatccaatattaaggtatcaaacagtataattttagtgccttagaaatctctgtgcaccatttattcatctctctctccctctaacccttggcaaccactaatttttttccatttctacaggtttgccttttccttacatgtcatatagttggaatcat

SEQ ID NO: 534811 - DNA, 654 bp, Homo sapiens
tatagtattaatagaattatagtatttagagtgggatattgatagctaatttgtactttaattttcaggcactatatgttaaaagagatgtagacaaattaaaatctggtcagtagacaatgagaataagaaaaaaaatcatatcataatagaaaatgctctagaaattgacttytttttactctggggaagagaaaaatcaggaaaatgtggtgagacacaactacttgaaatgctattataaggaaaaataataagacttcctcttttagaggctgaatcagaagaaattagtaaaaagtgcattaaaaactgtgaattgatgcattacaggatacatttttatgagtatagattattagaatgtttacaaaaggataatcatacatttctacttgatagtgtgttgttcagatggtcacttctatacttagtcatcagatttgttccttgttatttgtgttaggttatacattaattgccaattaattactacccagtcaatcatattgatgatgtagcaacctgaaatgaacatttagcaaaaggaaatatcttgatggatactttgtgttctagttatttatattatttagaaatgggttgtgtcaataatttctgtatattacaacacatttctatatactacttgaa

SEQ ID NO: 534812 - DNA, 680 bp, Homo sapiens
ttaatttagtgacattttctgatctcatattacctttggttgctattcaaaaaatagaacttagctttaatgttgtttttattacttaaattaagaacaagcattactaagcacagtgttatgcattctaagtgaaagttgcttttaaaayagatacgcgtattttatacgtctttaatttttaaggagactttttaaaaattcagactttatacaattatgttggatgacagtagtagtggatttctcaaaattataactgatgtaagtccaactatatcagttagtgccaataataaactactactaaatagtttttgtgtatttaaagttatgtcattatgcatttaaaaaaattagaatggtaagacctatacatgcaaaatgcaatgggattttcaaaaatataggaagaaactctaataataaaaaatatcttgaacaaaataaaaggcaacatgaattgtgctttagacacacattttctgtgtctgtgtacatatgtgtaaaaaactgaacttatgctcatatgaagtgcataaaattatgtgtgatttttcctcttgggcaatgtggtgattggaaaatttctgaattactttatatgttgttacaacttttaaaatacagtacttaagagttctgatccaaagataaaaaaggactttatttaccttcat

SEQ ID NO: 534813 - DNA, 535 bp, Homo sapiens
attgactatttgtaacatatattactagtagcagcagtgagaggtagagagtagataaacataatagaaatatcaagattcttatgacttaaaatttaataagtcaaaaagaacaaatggaattttatttgtatagtcttagaggaaagttgatcgaccagaatgaaaactattcgtacagaaattaagaatgtaagaaaataaattgtgccgaatattgtaatttaagagcaagtatttatactaaaattgattagaacattagaatttctggatcaaatgtggactgtcatatattatcagtggacaccagtggaacaataaccatgtgaagattttggagactcctgtctcctccaatccagataacctaaaatataacaacagggagggatgttacttacaagacgtagtaaaacycacctgactaagaagtcctgcagttctgacaatgagtttgactaatggtaagagctgtgtgaataggtagtgacaagcagctctgcaaaaccattagtttttgtttgttatattt

SEQ ID NO: 534814 - DNA, 651 bp, Homo sapiens
gtaaggttaaatatgaataattaattgtttgtcttaggcactggctcttggtagagactcggcaatagctaggctttttcttatttgcaaggctcttatatcgcttggaacccgtagagtacgccaacaaacaccacarggtggtgtggagaagcactgtttttaatgaccgcctggttacagaagggctgaggcctaaaatggcgtcagcaccagtgaggacagggcaggggttttatagtctcctgtaaacgggaagtgatgtaactgctacacagcacctggacagcctctctctcggtcttcagggggtatgtgtcttctggccagctcccgtccttcttctgttatcttgctgatgcacactactgacacaaatggtcttgcgccttgggactgggcctgagaagggaggagttattcattcccttaagctttcaggccccagggagaatctttcactattcttttgtcaaaggtattccaagttctaatgttgcccttcctaattttatttcatacatttttctaatgtttaattttaccaaatattgtttcataaaaatgtttggttaatataatgcagtatgaagagactcaaatttatcaagaaactaatatgacccaggtactgtgctagttttttacata

SEQ ID NO: 534815 - DNA, 651 bp, Homo sapiens
gtaaggttaaatatgaataattaattgtttgtcttaggcactggctcttggtagagactcggcaatagctaggctttttcttatttgcaaggctcttatatcgcttggaacccgtagagtacgccaacaaacaccacagggtggtgtggagaagcactgtttttaatgascgcctggttacagaagggctgaggcctaaaatggcgtcagcaccagtgaggacagggcaggggttttatagtctcctgtaaacgggaagtgatgtaactgctacacagcacctggacagcctctctctcggtcttcagggggtatgtgtcttctggccagctcccgtccttcttctgttatcttgctgatgcacactactgacacaaatggtcttgcgccttgggactgggcctgagaagggaggagttattcattcccttaagctttcaggccccagggagaatctttcactattcttttgtcaaaggtattccaagttctaatgttgcccttcctaattttatttcatacatttttctaatgtttaattttaccaaatattgtttcataaaaatgtttggttaatataatgcagtatgaagagactcaaatttatcaagaaactaatatgacccaggtactgtgctagttttttacata

SEQ ID NO: 534816 - DNA, 526 bp, Homo sapiens
cgtttgggctggttgtctcaagaggacatctctctacaggcaaaaggtaccactggagttcatcaccttggacttaaactgcagaaaaaacccattcttttcagtctggtggggccctgggcctagactatttatctgtagttccctcaggccccacaatttgatgccctttgttagtgggcttgatcttaaaccgtgagtgttccatctttctttatgtgtatgtaaactattacatccattcttttgcattgttcataaattaaaaaataaaaactatcaagaaaaatgatgaccaagtagtacagtctagataagacttcaaacattctaatccaaatcataatcagacagatttctccacrttatggatcccaccaaaaaggatacctttagtgtctcaatcataagcaaaaacagaaatatctttagagaagacaagatattttataatgtttctttctatgctaaaaatggaacatacattttataagcaaagctataggccagatatttttatttgtac

SEQ ID NO: 534817 - DNA, 608 bp, Homo sapiens
tggaaaagctacctattctcaatgagggctgagtacttatccttcccagatgagctgagggaaagagcaattaagtgcttatcaattggcaactatttggaggacagtgttagggaaagttgaacaggatcccagaatgaaccatggaaagaaaatcacagaaatacaaacagtgaaggaaggggaggaaggggattaaaaagaaaaaagctcaaatcaagcacacactgatagaaatgagtcaaatcaagcacacactgatagaaatgagtctgtaagaagatggaaatgacacaaccaattttcctaaatcccatccttccaaactcagcgaagcttacctatgtgccatctttgtttattagcacaaaatcgcgtcattcaatactgagatgaacagaacatttaggcaacagactgtctrcttgtgacctggaaagtgattcagtgaaatgactgggaaactatggcattgtattttaaagagtttattctgtccttttgatttcaaactggttttctaatgaggatccacagactcagattttttaacggaaaaaaacaagcataaaaaacattttttaagacaagatcttgctctgtcgccc

SEQ ID NO: 534818 - DNA, 539 bp, Homo sapiens
cttcccacactttcagttacatccctgtaaccagggactatatccagaactggaagcttagttttcaggcttcaggctgtcttgtggcttgaaggttgggtttcattgggggcttgtccctatctgcctaggaatttgttggccttctactactatcacaataatttttcaaatgaataggtacaaatcccttagcgtagaggagctccttgaataccagcatgactgggcagttgggctaccaygggtctaaaatcatggatgggaagctcctccgagacccaatatgtttttctctttctacctacggcctgcacctcccccattttgagcctataaaaaccctgccctcatccacacgttgggactacccgccttctggtagggactacccactttgggtctcctctccactgagagctgttccgtcactcaataaaactcttcttggatgcaggacaagaacctgggacccacccaacagcgagtgagaaaggagctgtaatactgtagccttcctgtcctctgttggcgccagg

SEQ ID NO: 534819 - DNA, 539 bp, Homo sapiens
cttcccacactttcagttacatccctgtaaccagggactatatccagaactggaagcttagttttcaggcttcaggctgtcttgtggcttgaaggttgggtttcattgggggcttgtccctatctgcctaggaatttgttggccttctactactatcacaataatttttcaaatgaataggtacaaatcccttagcgtagaggagctccttgaataccagcatgactgggcagttgggctaccacgggtctaaaatcatggatgggaagctcctccgagacccaatatgtttttctctttctacctacggcctgcacctcccccattttgagcctataaaaaccctgccctcakccacacgttgggactacccgccttctggtagggactacccactttgggtctcctctccactgagagctgttccgtcactcaataaaactcttcttggatgcaggacaagaacctgggacccacccaacagcgagtgagaaaggagctgtaatactgtagccttcctgtcctctgttggcgccagg

SEQ ID NO: 534820 - DNA, 611 bp, Homo sapiens
tgttttgtgcttatagatgaaacagagataaattaattggcaacgcctaagtttatgaagttgctactgaaatcatagatataatccagctcctttaaatttctctccagaatactttcagtagttgatactaggaatatcctcagtatacagatctaatatcattatttatcttataggtggtcatggaatttgccaaatttagcagatttataccaaatttaaaagttagacttggtctaaatgtttatttaacaaacttttacttcgtgttttttatggtcattgaatatcttcagctctaatcaagacacataagggccttctgggaatttaccttctactggaggaaaggaaatatacatatcaatggctcagccccaaaaggggaaaaacaaaaagtgccacagagaggaatgcatgtaagtaccatgggcatctactgatggggaaaaaaatcacagctctgggtgtgtgaggattgtagaggattgttgaggagagcaagcctggtgcctaaactgagacttggratagatcattaactgtcagggcatccagacctccatcccatactttggacaaacgcacaaagtcataaaaagatgcac

SEQ ID NO: 534821 - DNA, 596 bp, Homo sapiens
gctattctggatttccggggggtgatttataagtatgtgcgagcaaaaagccacaaaacactgtctcttttaactaaaggggcctggggctatatgaccaacatctatacacaatgtgccaggcagtaaaataatactgtatgtcactcccctcacatgcaaaatactggacagaaccaagtaagactgtgaaataaactgagatcaatggcggccatgctctgtcattattgtgcatggtgactctggataagtcatttatcctctctggacctcaatttcaactgaaaaaggcatgaattgacctagataactttttaagtcctattccaagctacagtcctattatcgaattatccaattagctcattagccagcacaatattaatcagttacctcaggacttayacgaatgactagcgtgggaccttaattctcatctctccaaattatggcggtggaagtggtgccctctcatgctggcaaatctgatttctagccattcattcactttctcccttcaacacatgctcaacattgatcttggatttatactcccattggctccttgctcagtttccaatcagtggtgctga

SEQ ID NO: 534822 - DNA, 522 bp, Homo sapiens
acagcagactctggcacctggatagatcttctgtcatcccctgaagggcttccaacaataaacaaacaacacaaatagacaaagaaaaaacaaaagcccgttgataataaagtcaaaactttgataccatcaaataacgaaaccagtcaaagacattttggggattttttttattaggcttcttttaagggtagctttaggttcacagcaaatttaagtgaaagtacagagagttcccatatgactcctgtccccctcccttgtacacacacagcctcccctgctatcaacatctaccctagagtggtacacttgttgcaactgatgaaccaacactgacctattattatcgcccaaatccgcagtttacgttagggttcatcctagacttatatattctacaagtctggactaatgtataataacaatgtgtccaccattttagtatcatatagaatagtttcrctaccctggaagtcctctgtgtttgatctattcatccctcccttcctgcaacccatg

SEQ ID NO: 534823 - DNA, 522 bp, Homo sapiens
acagcagactctggcacctggatagatcttctgtcatcccctgaagggcttccaacaataaacaaacaacacaaatagacaaagaaaaaacaaaagcccgttgataataaagtcaaaactttgataccatcaaataacgaaaccagtcaaagacattttggggattttttttattaggcttcttttaagggtagctttaggttcacagcaaatttaagtgaaagtacagagagttcccatatgactcctgtccccctcccttgtacacacacagcctcccctgctatcaacatctaccctagagtggtacacttgttgcaactgatgaaccaacactgacctattattatcgcccaaatccgcagtttacgttagggttcatcctagacttatatattctacaagtctggactaatgtataataacaatgtgtccaccattttagtatcatatagaatagtttcgctaccctggaagtcctctgtrtttgatctattcatccctcccttcctgcaacccatg

SEQ ID NO: 534824 - DNA, 394 bp, Homo sapiens
ctgcacttccaagaaagagagagagaggggaatagaatcatatcttaaaagagcagagtgccaggcaaacacatggagctttctcaagcatttggaggmaatcatattaaagcctctgaacagttagtgtcatctttgaaagtggtgtcctgtcactgtaaatggcacaaaaggattgcatgccagacactctgcccaaactctgtttatgctatccaggacgaatttaaggttccttgctgttctttcaacctccccttcttgaagaggagaaaagggatgtaatggggtgaaggcaatgctgttgctatcagctacactcccgacaagatgaaaagcgcacacaaaactgaagactaattgcctcttgtaccatgttccaggaaagccactg

SEQ ID NO: 534825 - DNA, 541 bp, Homo sapiens
cttgccaatgagccacaaaggctgcagaaasaaaatgaacaattgaactgggtcttgactaggagttcactggggagggaaagagaacactgagcattcaagcggagaaaactgtttgtgcaaagtcagaggagggattgacaggctgagggggcatttaggtcctgatgagccacctagatacaggaggcgtggctgaggatgggcccactgctggcagaattgacctatgtggaggcgacccaggtaggggagagcactaggtagtgaccctcagaggcaagctggttgtcctcccttcccagggacatctggggctagggttgaagaaggaaagggggtctctctgatgtggccacatgcttctccttgagagccacaatgccttcacagcaggttggcaagttggcccctctcccatcaggatgggtgttgaaaacaccagctctgtacccctcatccagagctcattcgctcactcgctgctcacccagcgagtctgaatgctcagcctaataaattacgaccctcttccttttcc

SEQ ID NO: 534826 - DNA, 508 bp, Homo sapiens
tcttatttcctcctttgactgtaatcttcaagaggaccaggcccagaggttgaaccatgagaaccatgcttactgatttatttccactatcaggcacaacacgtggcacatagtaggtgcttaatgaatatttgacgatgagtaaatgattctgtttatcaagcataaaggagccgacagtgttgccaaatccttgggtatgaagaygttgaagcattacggtgttaaaagcactggctctggagctcagctacctgaattccacccccagctctcctgattactgattgtgcaagcccaggcaagtttcttagcctctctgggcctcagttttcccatctggaacatggagccattggagttcctacctcatagggttatttctatcagtggcccaatcacctatcaaatcaccaaaaccagtgacctatgaaccatcctaggtcagcctcctgcctcacatcctacatccagtcagtcccccaagtcagtcccccaaagctgccag

SEQ ID NO: 534827 - DNA, 601 bp, Homo sapiens
ctgttccctagtcctgcagccttggctgtcagtacttcaagattatctggccaggcgtggtggctcatgcctgtaatcccagcattttgggaggccgaggcgggcagatcatttgaagtcaggagtttgagaccaggccaacatggtgagaccccatttctacyaaaaataaaaaaattagccaggtgtactggcacgtgcctgtaatcccagctacttgggaggctgaggcaggagaatcacttgaatccaggagacagaggctgaagtgagtcgagattgcaccactgcactccagcctgggtgacagagtgacacttggtctcaaaaacaaacgaacaaacaacaaacaaacaaaaaaaaaaaaaaaaaaaagaaaagaaaaagattatctggtgccttggcccagtccccacccttcactttggaaagggtgtacctgcaaaaggtacgagaggaagtccacacccccacatttagtctggcaatgatgccaactattcaggactcgcctactgtggcctgtgtaggtcctcctcctctcctgctcatgtccaggccattgtctttagtgggacaggggggcctgagggaggagctt

SEQ ID NO: 534828 - DNA, 601 bp, Homo sapiens
ctgttccctagtcctgcagccttggctgtcagtacttcaagattatctggccaggcgtggtggctcatgcctgtaatcccagcattttgggaggccgaggcgggcagatcatttgaagtcaggagtttgagaccaggccaacatggtgagaccccatttctaccaaaaataaaaaaattagccaggtgtactggcacgtgcctgtaatcccagctacttgggaggctgaggcaggagaatcacttgaatccaggagacagaggctgaagtgagtcgagattgcaccactgcactccagcctgggtgacagagtgacacttggtctcaaaaacaaacgaacaaacaacaaacaaacaaamaaaaaaaaaaaaaaaagaaaagaaaaagattatctggtgccttggcccagtccccacccttcactttggaaagggtgtacctgcaaaaggtacgagaggaagtccacacccccacatttagtctggcaatgatgccaactattcaggactcgcctactgtggcctgtgtaggtcctcctcctctcctgctcatgtccaggccattgtctttagtgggacaggggggcctgagggaggagctt

SEQ ID NO: 534829 - DNA, 525 bp, Homo sapiens
tttgtctctcaggcaggggacattttgctctttccctggctgcagtttgaaatatccccgggaaggactctcactggttcagaccacatcaggtgggcctttgagttggtcgcagtggccaagaagaagggcatgtcagaaggtggctggtagctcccattggacccggtgctggaactggggtgcgaggttagaagtagtcatttctaggggaagtggtggtggtggtagcacagaaatgtctccagagagtcattaaaaaattcatttaacaaaatctgatgaataccaactatgtgctaggcatggttttgccatggcagcttactaggaccaatactcagcccctgctctcttggagcttatacatttgtgagggagacaaggaataaacaagtagatgaagtaacataatttcaggtcttaagtkataagtaaaacaaagagaaataatgtaaagagattagaaaaaaatggagggaggtgctggttttgttggggtcatcagggaaggccttgctgtgc

SEQ ID NO: 534830 - DNA, 480 bp, Homo sapiens
tgtgtattgcatatgtgtattagccagggaaaaatgctatttaaaaatagaaatgcctacagccacttttaaactccaggtgtggggcgaggaggtgcccaacagaaggaaggctgctcttttgtttaaaaaaaaaaacaaaaacactatagtcaggctttttggattattcaagggaagkctcactccctacctccacctcgaattgtctggaaaggggaggctctaaactaaattgctctacagaacaagctagcaggaattcccgaacagttcactggcagctcaaaagggagggagttttcagggtcttgtaacagtcaggaaaagaggagattaaataatgttcatggtagagaaattaagtgcctctgaacagggcagcagtctggggctccagaagagtgataagacagatgggtacacagtcatagtaataaagaatactatgggaagtatcctttgttgaggtggttaaag

SEQ ID NO: 534831 - DNA, 559 bp, Homo sapiens
ctttatttgtaatagccccaaactggaaacaacctaaatgcccatcagcaggtgaattgataaacaaatagtggcaaatccatacaatggaataatactaagcaatgaaaaakaactattgatatatgcaaccatgtgggtatatctcacaagaattatgctgagttcaagaagcaagacataaaagagtacatactgcatgcttccatttatataaaatcctagaaaatacaagctaatctgtattgacaagaagcagatcagtagtcgcctgaagatgggggagtgaggaatggaaggggcaggaggaagggattcaaaggacacaaggagacccttgttggagggatggaggtgttcaatatcttgattgtaatgatgtattcaagggtgtatacatatgtctagacttgtcaaattgtgtagtttagacttgcacaatttgttgtatgacaattatgacttaataaaggctgttaataataataataataaacagaacccaggctgcagtctgtctctgtgctggaactctaatttactcactgttctattttcc

SEQ ID NO: 534832 - DNA, 581 bp, Homo sapiens
tctgtttgcattgctataaaggaatactgaagytgggtaatttacaaggaaaagaagtttatttggcttgcagtttgtgggctgtacaggaagcatggtgccagcatctgttctggtgagggcttcgtgaagcatccaatcctggcagaagagaaaggggagctggtgtgtcacatggtgacagagagcaagagacagaggggagggagctgccaggccctttgtaacaatcagatctcacagaaactaacaaagcaagaactcactcattaccgcaagggcagtaccaagacattcacaagggatctgttcccatgacccaaacacctcccaccaggccccacctccaacactggggatcatatttcaacatgagatttggtggacacaaagatcgaaactgtatcagaataggtgaccagagcaggcctgaccctaggactgggcccagtctctcacacagggcaggttctcaaggccgggagcccaggattaccaccagcccaactcaggcactgtcagccttctgactgtccagcttggttcaaagaagctcatggctatacatccccagcaagcag

SEQ ID NO: 534833 - DNA, 509 bp, Homo sapiens
taatagtaggcaaaattgcttatgtaattgtggcctctcattgataaattgcatkgagacagggggttcaatggtgggaaacccaagctttgggcttgtcagagagcagtgactcatataattgggtatgtcccttgagggcatctggaacctaagacaatgttacaagagctatgggctcttgtggggtagggcttccaagccaagtggatctcacatccacctgacgtgagtctctttctcttgtacctgagctgacactcagagtgggaacaaagggaaaagctcctggagcctgtgtgggcctctgtgagggccactcccacagagaagtgactgtttcctggcccgagatagatctgtaggcagcacacagtggctcatgcccgtaatcccagcacttttggaggccaaggcaggcagatcatgaggtcaggagttcgagaccagcctggccaacacggtgaaaccctgtctctactaaaaacaaaaaaattagccaggcttgg

SEQ ID NO: 534834 - DNA, 402 bp, Homo sapiens
tttacaagtgttgtgaacaacagccatattaacatcaactagaaagtaagccaaagcatctctaagtttacctctagttaytaggcaataacattcaatttctaaaacctaacaaatacagcttttaaaggatttaaatgcatccttttacttacagttattgaatagaattagcaattgggccgctcctgaaaatgagagctccagggacttaaactgtaaaattatttcctccctttattaacacagataattatgacctttacttaactattgtgaggcaattaagcaactcaatatatttcactaaataaactgcaagaattacatcagaaatctgaaagctaaagaaaaaaagattatatagctaaccttaaacaagtagtcatctacactgttatt

SEQ ID NO: 534835 - DNA, 402 bp, Homo sapiens
tttacaagtgttgtgaacaacagccatattaacatcaactagaaagtaagccaaagcatctctaagtttacctctagttattaggcaataacattcaatttctaaaacctaacaaatacagcttttaaaggatttaaatgcatccttttacttacagttattgaatagaattagcaattgggycgctcctgaaaatgagagctccagggacttaaactgtaaaattatttcctccctttattaacacagataattatgacctttacttaactattgtgaggcaattaagcaactcaatatatttcactaaataaactgcaagaattacatcagaaatctgaaagctaaagaaaaaaagattatatagctaaccttaaacaagtagtcatctacactgttatt

SEQ ID NO: 534836 - DNA, 393 bp, Homo sapiens
tttagtagagatggggtttcaccatgttaaccaggctgatcttgaactcctgacctcaggtgatccgtctccctcagcatcccaaagtgctggatttacaggcatgagccactgygcctggcccagtagtaccagtcttaacaacacactacgcctatgatcaatgatttccagaattactgtaaccgtttatacttttaccagtggacatcctgctctggatatctgaaatgttttcctctactattctaaccatttctttttcatcactcacattgctgtgttaagtattccttgattcttgctatctttcctcagataaacagatgtctctttccttggggctgccttagtactgcattgatttctctagtatatctttatcacctgaaa

SEQ ID NO: 534837 - DNA, 469 bp, Homo sapiens
agagctctcaagtttccttattatcaactccaaaattaactagccaacttctttctttcctccctcctcctccactcacaatccctcttcctttgcaaaagtaatctctagatctgttgtcctgattctgacccttctgccttcttttgatggactattcccatgacttctcttctcttcatttagcagagggatcttccagcratgatttctatttcttcatctctttctccttcccctgtggctagaaacacgctcagaaataaaaggaaaatcatgctttcccttgatcctgttatgtcttgagtggtgatccaagggctcttcttccagattcctctaaatgcacagctatacccttgctagtcagagtgtggtcctgggacaagaagggtcggccatcacctgagatcttattagaaatgcagaatcgcagacttgtggaatcagaatctgcactactaacaag

SEQ ID NO: 534838 - DNA, 456 bp, Homo sapiens
tccttattatcaactccaaaattaactagccaacttctttctttcctccctcctcctccactcacaatccctcttcctttgcaaaagtaatctctagatctgttgtcctgattctgacccttctgccttcttttgatggactattcccatgacttctcttctcttcatttagcagagggatcttccagcgatgatttctatttcttcatctctttctccttcccctgtggctagaaacacgctcagaaataaaaggaaaatcatgctttcccttgatcctgttatgtcttgagtggtgatccaagggctcttcttccagattcctctaaatgcacagctatacccttgctagtcagagtgtggtcctrggacaagaagggtcggccatcacctgagatcttattagaaatgcagaatcgcagacttgtggaatcagaatctgcactactaacaagg

SEQ ID NO: 534839 - DNA, 387 bp, Homo sapiens
tggccacactgccaatgagttggatgtggaggacgtatcgcaccttctggtggccaacaccctggtggccacctggatgaggcccacaagtccctgctggtagccctctcctgaggactcagatggccccgtgctggccctgctggccttgctgcggctggggagaggctgcttctacgatgccaacccaggtgggctgcagagggcaggtagcagcgggactcttctctgaggagggcacaggccttccgtggcccttgctctccaccccacaacctgggctttggagcaagcaaaccttgttcagccctagttctgccacctgccacaggmcctcacctctttgaccttcagtctcctcatctgtgtcctggtcttttaggttgt

SEQ ID NO: 534840 - DNA, 387 bp, Homo sapiens
tggccacactgccaatgagttggatgtggaggacgtatcgcaccttctggtggccaacaccctggtggccacctggatgaggcccacaagtccctgctggtagccctctcctgaggactcagatggccccgtgctggccctgctggccttgctgcggctggggagaggctgcttctacgatgccaacccaggtgggctgcagagggcaggtagcagcgggactcttctctgaggagggcacaggccttccgtggcccttgctctccaccccacaacctgggctttggagcaagcaaaccttgttcagccctagttctgccacctgccacaggcyctcacctctttgaccttcagtctcctcatctgtgtcctggtcttttaggttgt

SEQ ID NO: 534841 - DNA, 520 bp, Homo sapiens
cggttccttgtgcatagtagtgttcactggagatgcctggaggtctgaaggtgtgcccttttataggcaggaattccaccaggatgggtatagcttgttttttttaaaaggcttgggactggatacgattgcccaagaagacagtgtagacagcaaggagggctgagcatgaatgggatgacctaccagcacaaaaagggcaggcaggaaggcagtaaagaaatgagcagggcccaaaccaggagagtgtggcatgccacratggagactgaacagaagcaaaacgatgggcgactgtagtgttgttccctgttgaaggagagacactctgttacagaagacctggacttcagttcagttcagtttccttagcaaaggacaaaatggggagagaagacagggaatcagggaagaaaaactcactcacttaatgtgacgcaaacatcgcatgcagtcgtaccaaccaagtaaacatgataagctacaaagaactatggttttcgctgctctcaaaatgcca

SEQ ID NO: 534842 - DNA, 520 bp, Homo sapiens
cggttccttgtgcatagtagtgttcactggagatgcctggaggtctgaaggtgtgcccttttataggcaggaattccaccaggatgggtatagcttgttttttttaaaaggcttgggactggatacgattgcccaagaagacagtgtagacagcaaggagggctgagcatgaatgggatgacctaccagcacaaaaagggcaggcaggaaggcagtaaagaaatgagcagggcccaaaccaggagagtgtggcatgccacgatggagactgaacagaarcaaaacgatgggcgactgtagtgttgttccctgttgaaggagagacactctgttacagaagacctggacttcagttcagttcagtttccttagcaaaggacaaaatggggagagaagacagggaatcagggaagaaaaactcactcacttaatgtgacgcaaacatcgcatgcagtcgtaccaaccaagtaaacatgataagctacaaagaactatggttttcgctgctctcaaaatgcca

SEQ ID NO: 534843 - DNA, 632 bp, Homo sapiens
tgttggtaattaaaatactagcaataatggtattatgtggtacttactatgtgccaagtaataaacaaatattatgtatggactgttatatatttctgagcctcaccatatccctgaaaaatggataacagttaatcttcatgattcacagattttatatttctgaatygacctatgtgttaaaatttatttgtaatattgaaactaaaatgcacagcaccatcatagccaactgtggacatgcacaaagtggtaaaaattttgagttggccaatgtgcacttttctagctgaggtctaacatgatgatgttctgcctttttgttttaacccttatattataaccaagtatacatttcagatctttttattgccacatgtttcatacttttggggctttttgttttgttgatttcactgcttaaaatgagcccagaatggtgctgaagtagtatctagtgatcttaagcacaacaaagttatcctataccttacatagaaaataagtatgttagataaaccttgtttaggcatgagataaagtgctgtcggctatgagttcaatgttagtgcatcaacaacatacattaaataaggtgtattttaactgaaacgcacataaaacaaagtcat

SEQ ID NO: 534844 - DNA, 632 bp, Homo sapiens
tgttggtaattaaaatactagcaataatggtattatgtggtacttactatgtgccaagtaataaacaaatattatgtatggactgttatatatttctgagcctcaccatatccctgaaaaatggataacagttaatcttcatgattcacagattttatatttctgaatcgacctatgtgttaaaatttatttgtaatattgaaactaaaatgcacagcaccatcatagccaactgtggacatgcacaaagtggtaaaaattttgagttggccaatgtgcacttttctagctgaggtctaacatgatgatgytctgcctttttgttttaacccttatattataaccaagtatacatttcagatctttttattgccacatgtttcatacttttggggctttttgttttgttgatttcactgcttaaaatgagcccagaatggtgctgaagtagtatctagtgatcttaagcacaacaaagttatcctataccttacatagaaaataagtatgttagataaaccttgtttaggcatgagataaagtgctgtcggctatgagttcaatgttagtgcatcaacaacatacattaaataaggtgtattttaactgaaacgcacataaaacaaagtcat

SEQ ID NO: 534845 - DNA, 606 bp, Homo sapiens
cagtagtgtaataaatgatattcatgtttctataaatgccaaccaaaaactattatagaatactaaaagaaggagaattagracaaatgttaaagttcaaaaaatacatcatgaataggttattacataattgaattctagatacaacgactcgtccgtttttaataatgacatggcaatagttaatctaatctgactgtcatatttgattattctttttgctccatccatacatcccacttctgtttattatctccctcattatctcttcatttataatctttcacttttgcttcacttgtactatctttttggttttcaatgctttgaaattcaaatttcctttagttccattggtgaactttgaaacacatttaataaaacctgttgctatagttgaatactagatttcctgattcagtcgtgacataagaaaacgaagattcaatttgtatcatgaacttcttcatttccctgtcggggtatcagaaagtttttcacacttagtattattctggcaaaaggtacttcgttgctccctgcccctcccccacggtcaaatgtgtagttagaaaatgtggtcattgcaaaccttagccactagat

SEQ ID NO: 534846 - DNA, 607 bp, Homo sapiens
catggcagctggtggaaggcagggacgggccaggccttgggccttgggccttgggccttgggggtagactgtggccctgttacaaacaggggtaaacagatggccccaaaaggcaggggaaaggaaggaccatcgctagtaaagatgcagtctctggggtttgaagaagggttgcaaaaagtagcttcctttcatcaggccgtgaaaataaaggatgagtcagtatctagtggtactctagacactaagaattcacatggcaaacccacttgaaaggcctttattcctaactatttgtaggtaaaaagtcattgttcctaagagtttgaaaacaggaatgggaaaatgaacaaaacctaagcagagatcaaggggcaactggatgatgagtgagcacaggactctgtgctgcaggagtccagatcccaggcagcccaggrctgcaggagtccagatcgcaggcagcccagaacaggagctggttcagcaggcccaagccgagtggggagttccgtgacttgccagagccctgagctggggtcacctccagggtcagtttcagaagtgtcacctcccttgtcaaagccttgctctgacccactgtccc

SEQ ID NO: 534847 - DNA, 549 bp, Homo sapiens
cagacccaagacggttctcaaccaagaaacacacgaaaagggtttcacrctttttcacgacaccccccaactccagtgcctggctcagcccccaggtgttgactagcacctacaaagcatttgctgactggcgcagggaaaaaaaaaatggccctgggtgtcaacagggaagcccctaccatgctgctctcgagggatgtgctgcggcccgaacactgtcagtgccactgaggccgagtgtggccgtggagacaatgacaggacctggaggaccaagtgcactcttagggccccacactgcgagagcacagggccaggagctgcacagggctctgcagcagacacggccgccaggcgagaatcaggtgggcagatgtgactctccacacgtaggtccccaaaccctgcaacctgcaacgcggggcctgaatgcggcttccttagcagagcaggagcttactcttggcactgggggaaaggggaggggtgaggctggggtttttgtcggggaggagaagttgcagagaaagaaaaaatcctgaaacgaca

SEQ ID NO: 534848 - DNA, 562 bp, Homo sapiens
ctggccatggaaaacaggtttggagccagagctctgaaagtcaaaataggaaagttaacaaagctcccaggaagagccatcatccaggataggttattttcccaaagaccctttggtgagtacaattaactgatgtcttctcagagagttcatggaggattagtggaggtgatcacacctgaaatagcaagatacatttgatcaaaccaattcagtaatattactctaatggaaaagatgtctccaaaaggatgaawcatttttaagaggtaagttagccttgggagcttttttatatttaaatataactatattggtgtctaatattttagaaatgtacttattcagaagggagaatacataactattataattcagacctttcctacttgatggtgatgataatgttggaattataatcgctaaatctttttgagtatttactaagtaccaggcacagtggtaagtgatttgtacatatctctcacttaaaatttcaacaacgctaaagctactactacttttttcactgagaagaaaactaaagtttagagtttccctg

SEQ ID NO: 534849 - DNA, 528 bp, Homo sapiens
tgaaaagtgtctttctccagatttgacagtcttgttgtattccctaaagaagttaakgccaacctcatcctctcagttgctcaagagcaaaacttctacataatcttctataaccctttctccctggcccctcatctctaatcagttaccaaagtgtgcccaatctatctccgtacggactataatttacaaccccatcagattttaagctctatcatagtaagaatattagatttgtttgaaatactgtacccattacccagtaccatatctggcacaagaagatacacagtgcatatttgttgactaaagttatatattactatatctaaaggcaattattttagttgttagcctttatatttcacataatcacacatgagaggattttcagggatcttttgcccatcacagaacactgatctaaatttgcttatattccctgttttcctgacgccccaaagtccttaccaatatgcacacagacacacacacacacacatacacacacacacacacacacacaca

SEQ ID NO: 534850 - DNA, 528 bp, Homo sapiens
tgaaaagtgtctttctccagatttgacagtcttgttgtattccctaaagaagttaatgccaacctcatcctctcagttgctcaagagcaaaacttctacataatcttctataaccctttctccctggcccctcatctctaatcagttaccaaagtgtgcccaatctatctccgtacggactataatttacaaccccatcagattttaagctctatcatagtaagaatattagatttgtttgaaatactgtacccattacccagtaccatatctggcacaagaagatacacagtgcatatttgttgactaaagttatatattactatatctaaaggcaattattttagttgttagcctttatatttcacataatcacacatgagaggattttcagggatcttttgcccatcacagaacactgatctaaatttgcttatattccctgttttcctgacgccccaaagtccttaccaatatgcacacagacacacacacacacacayacacacacacacacacacacacaca

SEQ ID NO: 534851 - DNA, 624 bp, Homo sapiens
ctgcattgcctcaatctctgcttccatcagcacaacrcctcctctcctcctgtgcctctgtctcttctcctcttcttataaggcatcagttatattggattagggcttaccttgatgacctcatcttaacttgataacatctacaaaacccctttttccaaataaaggcacattcatgggtatcagggattaggacttcaatatatctttgtaggggacatggtccaacccataatagtccataaccttaatcacatctgccttttaccttttaccatgtcatggaattccttttaccatgtcaggtaacataatcatgggctctggggattcgggcatggacgtcttcggagatcgttattctgcctactgcatttaataataagaacactgaaaatcttttaaacttttttaaaaaataacattctgtttaattgagattcaaaattagctttctttatcatcaaactgattgcaaatctggagaaattattctcaatgatgggtcgaagaacaacaggtagagagctagatttggcctgcaggctgtagctggctgactcttcctctaagcaaaatcttactgaggccaaaacctattagagtgttaccagaaataccatt

SEQ ID NO: 534852 - DNA, 635 bp, Homo sapiens
ttttaaaatgagctaattcccaatatactgacatggacttctgagactggaagataattataacttattaagtaaaaaaaaaaatgccagaacatgtaaagtatgattttaatctataaaatgcatatatatatatatatatatacacacaaacagatattcatatctgtagatacttyttaaatatctagaaagttccatttcacactgttaaaagagactattgctaggaagtggtggaggagcagggactagtgtacattctaaatcataaaatctgagctgtttaattctaacacaggctacttccattataatgttttttttttttttaatgaaagcatctgagctcttaatcatggtaaactcctcacattccaacaaggacaccaggttgcacacctcgagggtgtaggatgtacattatacatcttacgtccctcatggtccttcacagtgtactatgtaagatctccaggaggaaggagccacacctgcatgcacactccagggctttctgaagtggggcccagaggtctcctctgggagagtgtgcgagggcactgacaatatgtctgtcaggatacacggaagttctaccaatagcagtagccaaggtccagaaataacagaat

SEQ ID NO: 534853 - DNA, 566 bp, Homo sapiens
tctatctatagagaaatgttttgagattcagtggtaaagtcatttcatgtaatatgatacagattttgaaatatgatttattaaaattgtgtagtaacataggaaatgcttccaatacagcataaaataaaaatcagagtaaaaattatgtttatgcttaaaatatatgaartaccttagagacacacagagagagagagagagagatgaaagacatttactatatggatgtttctaagtgaaggaatatggttcttttatttttttttccctgaatgtttcatattttcttgaagcagcatgtaatacttttataacatcattttacttaaaattttacaactttattgtcagataacagattaattctattttaaattgtaaacatttaagaccagagaatttttttaaacttgctcaggcacagtactaggtactggtgaaataatggaaaaaaactggtccctgcctttgaacagcaactccactcgggcgtggtgagatgcaaagctcctggtcaggcctctagcttgtggacaccatcttaaccaggccttccaaacaga

SEQ ID NO: 534854 - DNA, 618 bp, Homo sapiens
accttctagagcgtgtgtcttgccagtgtgttccaggaattctctatttatgccactgtgatgttgctcagaaaacaacagagctttcggttagttcaagtaaacttagaatctgcgctgatgcctcagaaaggaagaaaggccaggacggcytcggcttgggtggcactcttatttctcccttggtttcacttccttattttcgtggcttcccatttcatcctgtagcctcctctcagaagctgtttccccccttcctactcccttcccacccccgggttgtttccccggttgttcccacactctagcccatttgtgtcctcagaggtctggccgctgccactgcacctgcctcagacccagtgtcacctcgccagggcttcagccagcctgaccttccagctgccacccagcagctcagcttagggactcagaaccttctggcccagaccttcatacccaactcccgcccaggggcaaatgcagaagcctctgctggtgcagccaacacggagtgggggcaaggcggagaggaaaagcaacagctcagggtgtggtaagagtgctcagggtgcttcccagctcagggcattggtaagagtgggtggaatttgcatg

SEQ ID NO: 534855 - DNA, 618 bp, Homo sapiens
accttctagagcgtgtgtcttgccagtgtgttccaggaattctctatttatgccactgtgatgttgctcagaaaacaacagagctttcggttagttcaagtaaacttagaatctgcgctgatgcctcagaaaggaagaaaggccaggacggcctcggcttgggtggyactcttatttctcccttggtttcacttccttattttcgtggcttcccatttcatcctgtagcctcctctcagaagctgtttccccccttcctactcccttcccacccccgggttgtttccccggttgttcccacactctagcccatttgtgtcctcagaggtctggccgctgccactgcacctgcctcagacccagtgtcacctcgccagggcttcagccagcctgaccttccagctgccacccagcagctcagcttagggactcagaaccttctggcccagaccttcatacccaactcccgcccaggggcaaatgcagaagcctctgctggtgcagccaacacggagtgggggcaaggcggagaggaaaagcaacagctcagggtgtggtaagagtgctcagggtgcttcccagctcagggcattggtaagagtgggtggaatttgcatg

SEQ ID NO: 534856 - DNA, 618 bp, Homo sapiens
accttctagagcgtgtgtcttgccagtgtgttccaggaattctctatttatgccactgtgatgttgctcagaaaacaacagagctttcggttagttcaagtaaacttagaatctgcgctgatgcctcagaaaggaagaaaggccaggacggcctcggcttgggtggcactcttatttctcccttggtttcacttccttattttcgtggcttcccatttcatcctgtagcctcctctcagargctgtttccccccttcctactcccttcccacccccgggttgtttccccggttgttcccacactctagcccatttgtgtcctcagaggtctggccgctgccactgcacctgcctcagacccagtgtcacctcgccagggcttcagccagcctgaccttccagctgccacccagcagctcagcttagggactcagaaccttctggcccagaccttcatacccaactcccgcccaggggcaaatgcagaagcctctgctggtgcagccaacacggagtgggggcaaggcggagaggaaaagcaacagctcagggtgtggtaagagtgctcagggtgcttcccagctcagggcattggtaagagtgggtggaatttgcatg

SEQ ID NO: 534857 - DNA, 582 bp, Homo sapiens
ctgcttcaattaaagaattaaactgtatctgagtagcagcaacatacatgagagccaaattggattcctccttggaaaataagctacagaccacatctttattgtgcagacactcattaacaaatatgtaaaaaaatacccgtcagagaaagatgttttcctgctttggagactttaaaaaaagcatttaattccatctggcacgcatggctgaatctgaaatggctacaatgtgtgactggtgggaaagcatgacaaaaggagttctgtctatcaatccaccctctgcagggcagctatacccagaactccactgggttagggagaaggggccattcctgattctctgaacastggggacatgttttctatgcttgaggaaattctaagtttagggtcttttctgaggaaaagaaatgctggctgcagacaacgaggccagtgcctccatttctctcctcgctcgtgagcagttcagatgctagacaggctacaacatacagaccatgtacagagagacttacaaaccattcccaagaaatggtcccaagtaacctcacatttcacgtttttaagcgtaga

SEQ ID NO: 534858 - DNA, 371 bp, Homo sapiens
gctttcaaattctcaaacacaccaaactccttcccatctcacagyatttgcgtatgctctttctgttgccccaaacactttatgtcccctcccttcttttcctcaaatcttaaatgttccttcatgagagacttcttccctggccctcagacatggtcacatcttctaatgtctgctctcatagagtcctgccctacttcttcttaccattagcactacgaaaattaagtaattgtttaactcattggcttaaggactgtctttcttgctaggttagaaacttcatgatgccaagaacttaatcatagtaggcattccataattaaattctagcacctcctatagccgggcactctactaggcactgggct

SEQ ID NO: 534859 - DNA, 371 bp, Homo sapiens
gctttcaaattctcaaacacaccaaactccttcccatctcacagtatttgcgtatgctctttctgttgccccaaacactttatgtcccctcccttcttttcctcaaatcttaaatgttccttcatgagagacttcttccctggccctcagacatggtcacatcttctaatgtctgctctcatagagtcctgccctacttcttcttaccattagcactacgaaaattaagtaattgtttaactcattggcttaaggactgtctttcttgctaggttagaaacttcatgatgccaagaacttaatcatagtaggcattccataattaaattctagcacctcctatagccrggcactctactaggcactgggct

SEQ ID NO: 534860 - DNA, 512 bp, Homo sapiens
caatacaatagagcaatactttgaaaattagttgtcaacacagaaatgtataactcacctgacttttaatcaagtgtgagggcagtgacattttcagacatgaaagtccamaaatcaccagctgggtagcagacttaacagtgcagatagtccagattggagcaaaagaatggaggactccaggaggaaggctttctgggcagaaaatggcaatttgatgaaacaggtagtatattagagatttggggaaaaactgagaacatgataaaggcatgggagttcaagaagcagagaaaagccttttagaaactgtaaagtggaggggaagggtgagaactaaatgagaaagtcatgattcaaatatgagtaaactaaaagctgataggtggttttcaacacttagactacatcttccgatagccttggttaaagaatagattacaaatattatcagccttggaaagctataaaaggaaagcacagctgacagaattaggaagtggaagggggga

SEQ ID NO: 534861 - DNA, 624 bp, Homo sapiens
ctgtgaactgctcaggacaaatctgtctcccattctattcaaagtcatctctctccttacaggaatagatgcatattctgattgcctcttctggaaagacttatcagaaactcaaaagaacacaaccatctgtctctcacctacatgtgacctggaagaccccagttggcggcagtggggtgggccttgctttgatctctttccccctttctagatggaactaatgtacttttacatagattgattgatgtctcatgtctccctaaaatgtataaaaccaagctgtgccccgaccaccttgggcacatgtcgtcaagacatcgtgaggctgtgtcacgggtgcatcctcaaccttggcaaaataaactttctaaattaactgagacccgtctcaagttttgggggttyacaacacttaaaatagttaagatggtaaattgaatgttatgtattttttttgttacattaaaaaaaggataaacttagagctcatgtcaaatgtttctgtgagatcaagcagaaaatgaagatcaaaaatagaccattggttttagcgacattgactcattggtaatttcaagagctatagttttgatagcttggtgaaagctagattgttttgat

SEQ ID NO: 534862 - DNA, 516 bp, Homo sapiens
tatcttttccatcaagttctcaggtgatgtccatgttgttggtctgtgtaccacactttagccaggtttgaatgaatgatatacccactttctatataggctaatctgatagcttgctcggagttttactgcagtattgttcgctcccaattttcttatacttttgtcaaayatgcccaacttctggttccaactagcagacacttgttgtggctcaaatggcaccaaggagagatcggcctattattctaaaggaagcaagccattagctttggtgacttccaggtgggattaagtctgcaggtactcagaatggctttccattgtggcttttcataccccaaggcttaggcgatgtacatgacaaaactggttgtttcaccaagcggccagcagagacagcagcatggatcatttattacatcacgctctaagatcagaagtggtgaagggctgactgtgcctgctctgtccaagtgaatttatttttatcagataaccccctacatactcttt

SEQ ID NO: 534863 - DNA, 516 bp, Homo sapiens
tatcttttccatcaagttctcaggtgatgtccatgttgttggtctgtgtaccacactttagccaggtttgaatgaatgatatacccactttctatataggctaatctgatagcttgctcggagttttactgcagtattgttcgctcccaattttcttatacttttgtcaaacatgcccaacttctggttccaactagcagacacttgttgtggctcaaatggcaccaaggagagatcgrcctattattctaaaggaagcaagccattagctttggtgacttccaggtgggattaagtctgcaggtactcagaatggctttccattgtggcttttcataccccaaggcttaggcgatgtacatgacaaaactggttgtttcaccaagcggccagcagagacagcagcatggatcatttattacatcacgctctaagatcagaagtggtgaagggctgactgtgcctgctctgtccaagtgaatttatttttatcagataaccccctacatactcttt

SEQ ID NO: 534864 - DNA, 610 bp, Homo sapiens
cttgttcaatacactgattgtattcatccaagagctccaatggttaagctacacatctctgattccttaatcaaaacttaatctggattcacaaaaaacctcatacctgactcttaatggcacttgtgtgtgggagaatggaggtaggttttggktggttaaatcttatgaaattctaactagtgaaaattttgtgtaatttctggaatatatttcagagaaggataatctccacagaatgtatgttcagtgttctcatattagctattaattcagcccagaaagcacaaaaataaatgtttgtattaactacctccccataagaccttattatcatgttatgcaaatatatgcaatttgccagtaaagatcttatgtttatactgactctaaatgctgcattattaatatacctcacagctttcagtaataagaacaacattaatctatccattagcctaattgttgaaaggtccatatgaatttactagaaatggtttacacctttgtgggttttcattggacagtttctaattttctgctatgtcttttcactcaagaagaaaagaagaaagaaaattgtatatgtatccaaaatattgtaatatat

SEQ ID NO: 534865 - DNA, 643 bp, Homo sapiens
aattttatgacgaggaagtttaactgagagagaagttaaaaatatctttctagcattggttaatagttaaatagttttcttaagaaaataaccaagctagatgcaccatcattttaaaaggctggtgcatctgttcatgcactgagtattcttaatgtagaggaaggtcccacgtgggctttctgattcttctgtgcttgaacaatgccaggcaaattggtctgggattgtatttctcatgcttccacctcgctttaccaatcagtagtgtattaaccatctgtacagggataaaatttacacttgcatcttgcagttttaaaagagtacattgttttgatataaggctttggcacatgaaaacaacaaaagtgaattttataactatagaaggacagaggtctagaaaagtaaataaaagtattgcatttatttgacaataatgaaaagttttttgaaaagcagaaatgtttttgatrtatagagaaatttagaaatcttaatctagaaattaagtaaataaaatctttacttactagagtttttatgtttggccagagaataggatatgttggtaatcaaataccatgtgtacattataaataagatattctagaaactgagtcttcaaagcactgaaatg

SEQ ID NO: 534866 - DNA, 504 bp, Homo sapiens
ccttttgcttacggtgatttagtttatcactggctccaaatgcattcagagatatgcattagagccttcagcaaggttcaataactgagtgtctgaggaggtgctctcagctttcctgctgtgtcctcagactgcagcaggcccagagaacctacacrtcaagtgtgtattcaggagtctccatctgtcttccttaccgcccccgacctccgcccccccaccacagaaggccacattcttgtactcagacctagagagcctgaaggacctttctccattctccagtcccatttcagccatgggcactcctgcatgcctgcacctcaggttatatctctctcagctcctctgctccttgcccagccaccagcagtggctcttaccgcacaatggaatctcagactacctaaaggattttttttcatttctctgtctgccctcaggattcagcagaaacccttgtgcctctaactcaggaatttttctcagcactcctgccccagc

SEQ ID NO: 534867 - DNA, 504 bp, Homo sapiens
ccttttgcttacggtgatttagtttatcactggctccaaatgcattcagagatatgcattagagccttcagcaaggttcaataactgagtgtctgaggaggtgctctcagctttcctgctgtgtcctcagactgcagcaggcccagagaacctacacatcaagtgtgtattyaggagtctccatctgtcttccttaccgcccccgacctccgcccccccaccacagaaggccacattcttgtactcagacctagagagcctgaaggacctttctccattctccagtcccatttcagccatgggcactcctgcatgcctgcacctcaggttatatctctctcagctcctctgctccttgcccagccaccagcagtggctcttaccgcacaatggaatctcagactacctaaaggattttttttcatttctctgtctgccctcaggattcagcagaaacccttgtgcctctaactcaggaatttttctcagcactcctgccccagc

SEQ ID NO: 534868 - DNA, 504 bp, Homo sapiens
ccttttgcttacggtgatttagtttatcactggctccaaatgcattcagagatatgcattagagccttcagcaaggttcaataactgagtgtctgaggaggtgctctcagctttcctgctgtgtcctcagactgcagcaggcccagagaacctacacatcaagtgtgtattcaggagtctccatctgtcttccttaccgcccccgacctccgcccccccaccacagaaggccacattcttgtactcagacctagagagcctgaaggacctttctccattctccagtcccatttcagccatgggcactcctgcatgcctgcacctcaggttatatctctctcagctcctctgctccttgcccagccaccagcagtggctcttaccrcacaatggaatctcagactacctaaaggattttttttcatttctctgtctgccctcaggattcagcagaaacccttgtgcctctaactcaggaatttttctcagcactcctgccccagc

SEQ ID NO: 534869 - DNA, 594 bp, Homo sapiens
atattaggcctttccaacctacccttgaagagtcttgtcttttcacatagtcccctaagtttttttactgcatcagtcttccagctcaccaactgtctcctaagttatgccctaaccttaggattaaacaattattttaatttgtatttttaattttaattttttccttatataatttttgtatcagtctgattaatttacatagaagcttttactttgtaacacttcagcttattgtgttattttaaaatctaataagtgtattatacttattttcaagcayatttctggtaatttcaatatcttcggtctgtagttttgtttccatagaccacttcttgctcttgtccatgtgaaaatcttgctcatggcagcctcttctctactacttttgaaattaatgtgagattgtggattcatgcttcttggaccttagtttctgagagtattttgagtcctgagtttaaggtgaatttatccaggaagggtatggatttacttctgataggcttccagaagtcttaatgtaaagaattaatgtaaaaattggtcttaatataagaccaatttacaaaatatttgcctcaaaatttt

SEQ ID NO: 534870 - DNA, 594 bp, Homo sapiens
atattaggcctttccaacctacccttgaagagtcttgtcttttcacatagtcccctaagtttttttactgcatcagtcttccagctcaccaactgtctcctaagttatgccctaaccttaggattaaacaattattttaatttgtatttttaattttaattttttccttatataatttttgtatcagtctgattaatttacatagaagcttttactttgtaacacttcagcttattgtgttattttaaaatctaataagtgtattatacttattttcaagcatatttctggtaatttcaatatcttcggtctgtagttttgtttccatagaccacttcttgctcttgtccatgtgaaaatcttgctcatggcagcctcttctctactacttttgaaattaatgtgagattgtggattcatgcttcttggaccttagtttytgagagtattttgagtcctgagtttaaggtgaatttatccaggaagggtatggatttacttctgataggcttccagaagtcttaatgtaaagaattaatgtaaaaattggtcttaatataagaccaatttacaaaatatttgcctcaaaatttt

SEQ ID NO: 534871 - DNA, 606 bp, Homo sapiens
aaaatatggtacaaaaattaattgatattagaattggacctgcctatattttaaacagtgtatctgtctctcagtctccctgtcaggttgataaagatttaagtttcctaaatgcgcagaatccctctgagaattgaatggaacagaagcgtgattatcattccttcacrgaactctacagaaaccaaagaaagtcttatacagatctgtagggattatattatttcaaatatagttttgttcagcaccttagagaccaactgctgagaaagaaagtgctcagtaagaagaaatctgtctcctaatcaaattgctctagccaccattgtcaactttaaagggtagagtacacacacacacatacacacacacacacgttctttatctctcactgacttgccctacattttgaactctttaactttggaatttccttagtatctatagtggcttatttcacatatattaataaatcctattggtagtctgcatgcatcctttacatgaatttcttatgcataaatggtgcttcgatttatatttaagactcactgaccatgtggtctatttaagcagggttacgtgttgtaatcagtcatggaccac

SEQ ID NO: 534872 - DNA, 562 bp, Homo sapiens
taaaagacagctttttttttgcttacatataaaagcaatagtttaactgttttaaatggactatttcatttgattttgtaaaataatttaaaggcaagaagatggtagtggttgtccttttattggtgggaaaaatatgagttccagaatcaaacccaaagagatttggatacctaccaccactcactgtgtaatcttaggcaagtatcttaaaacattggactttggtttctacatctgaaaagtggttattatataacagctaatatttattgagcatgtaccgtgtgccctatgttgtgctaaacactgtagatgcattacttaattcgaacggtaactttatgaggttaacgctgctttatccccatttcacaggtaaggagctgagatacagagaagtaggcaacttgatcaaggtcgcaaaaccgaatttagggtgttaaagctgggctacrtaattaaattcagggagatagtgtatgtaaagcagggtcagacttaagtgttcagtaagtcattatgtgttgttattgatgctgtcataaaggaaaccagagca

SEQ ID NO: 534873 - DNA, 623 bp, Homo sapiens
aatcctttatctgaagtgcttcagaccagaagcatttcagagttggaaatatttgcattatacttaggttaagcagccctaatcaaaaaacctgaaatgggaaatgttccaattagcatttcttttaagtgtcagtcagagctcagatcacggaacactgtggatttcaaattttcagatgtgagatgctcaacctgtaacacagtatgcttgcattctgcattaatagagaaagagaaatagaaaaaaagagaggttataattctaagtccttgagaaggaagggraggatccagaaaacaagtggaggggatggatgtctataaacagtatacatcaactattttaacgggaaggcaggcagatatgaagagagaggtagggatgctagtcgactggtgctaggaggaaacgagagttctcatgtgatgtcttctttttcctcagtagagtacacagtatggctggggttaagttaaggcagtaagaagaaagtagaacagggcaagggagtgcttacctaggcaagctatgaacagaagtacagatgtaaaggccagtttctggcccccaagtgaaaaacttcataaatattcaaagtagtttctttcataatttcttga

SEQ ID NO: 534874 - DNA, 543 bp, Homo sapiens
gggacatattaattaagacctagtgtgggcctttcgtattctgggtcagataagtgaacaagcaggtgaggttctgtgtgggctaccctggaatacagtgttgcatagggttgtgtgagaggtgcggggaacgcctagaaaactttgcagggagaatgttttctaagccaacacctagaagacaagcaagagtttgctgggcagagagtgaagctgggcgcggctgggatcatggrgccggatgtgcacagccgggacatggggaagagctgcagtggagagtggggtatggtggagagcagtcagggccagacgatgctggcgggcctggaggccttgggagcgctgactttctccaagagctgggggtgccaggacagggtcccaagcagcggccctacgtggcctggtttgctcttcactggcaagctccatggccctgggcaatgtgctgcttctgtttttcttctcatcggtgcctggctgagctctggaatcgtttcctgctctgagcctgaaacttcaagcagtaagaagacggtc

SEQ ID NO: 534875 - DNA, 461 bp, Homo sapiens
gaattttagtgtctacactctctgctcacaaaatctgaaggacacacatatttctgagcattttcctattgcattttaataaatggcagaaatgttactctacaaagcttcaataccataaaaaataaacatgttttcaaaactccaaattcatttgtcaagctttatgttctgtgagaccccgtctgaaaatgtcttcgggttttataaatgcatgctgaaatataaagtaacttttataagaaacaagatttttaatgagacagaagtggttgggccaggggtgaagggagtgaaaaccaagaagatggaggagacgagacaattcccaatcagcaaaattcaaggcttaaatttccagtggctgccagagccctgaagtaactctgggcctggaagccaggaagtccaagcwgaagctacggactcaaagacaagctcaggatctgggggcaagatgg

SEQ ID NO: 534876 - DNA, 656 bp, Homo sapiens
ctgcaacccaaaccctcactctcagagcctcaccaatcaggtcactggtgctcccatagccagtaaatatgaacagacactcaagggccatcagatatcaaagaaagcctctatcatgatacatataaaccaaatcaaacaaacatgtaaacagggtggtaaagcaacttagaaaaaatggagactatgcaggragaaaaaacattttttaaaagaactatcattaatattctcacagagatgtggaaagatactaatatcttttctcaaaggaatgagagaagaaaagatattacaaaaaaaaaaaaaaaccagaatgccaaaaacaaaaaacaaaaaaaagaaacaacattcagaaaacaaaacgtaataaaagagttgaaaatcacccaggatagagtaaaaacacaagatggaaaatattattgaaaagaaaagaaagccagagggctagttcagaaagtccaatacccagacaacaaaatagttcaagatattttcccttattaaattcaattaaatttggtctatttttgtctctgcatttggaatttttacatggcgaactgcaacctcagcgtgtacacaaatggcaaaccaccttaagagtattcttataacaaataatagtcacaggctgccagctaatcagacca

SEQ ID NO: 534877 - DNA, 297 bp, Homo sapiens
attgttttgcagtgtgactctgtcatttgtcagcaaagaggtagacactwtttctctaccacttgcatttggttatgaccatatgacttactttttgatcaatgggactttttgatcaataacaaaagtgacagattaggaggcttatattagcacttgtccttgcttgggcacatttataagctgaatgtttgtgtcctgcccaaactccatatattgaagtactaatgccaaatgtgattacagttggaaatggaacctttacagaagtaattaattttaagtgagatcataagg

SEQ ID NO: 534878 - DNA, 297 bp, Homo sapiens
attgttttgcagtgtgactctgtcatttgtcagcaaagaggtagacactttttctctaccacttgcatttggktatgaccatatgacttactttttgatcaatgggactttttgatcaataacaaaagtgacagattaggaggcttatattagcacttgtccttgcttgggcacatttataagctgaatgtttgtgtcctgcccaaactccatatattgaagtactaatgccaaatgtgattacagttggaaatggaacctttacagaagtaattaattttaagtgagatcataagg

SEQ ID NO: 534879 - DNA, 492 bp, Homo sapiens
cctatgaggtgagaaaagcagtgggtgagaaaccaaggtcaggatatctggcttgctctgatggttgcatttggagcctcttggttgtccagggaacccagctctgctcacttcccatcccttgctatctgtctctgaaccccaagtagaagcagagatagaagctccttgagtttttccctggtcacctttaggaactgaggccgtggccccattatagcccatctactcactcaggatcagcagcagcagccacagaagcatgggcaccggcsgggcagagggttgggaaagtctgtctcaccaaaagcccgacttatctccaagaaggagggcaggaagctgctactcagatgagacctgcaagaatcagaaaagggaagaagagcttagtgtcatattttgctttgggctctgaaaatgtgaatgtggctaccttcctaaatgctgtttgtatctcaatcccggtagtgatacatttttagaagttgg

SEQ ID NO: 534880 - DNA, 520 bp, Homo sapiens
taacaagtttgccttttttctttgaacactttgaaaacattttccattgacttcttacatttaatgttattgttaagaagtcttaggctattctcattcctgtgacttatarataatgctttatgttctttagtatttcaaaatttttccttgttcattgatattcccaaattttactttaatatttaggtttttaaaatcaattcagttagcaaattatgatacttttcattgtgaaatctttagtctttctctgattttgtaaaatttggggttattattttttccataagttttcttctcttatttgtacctgtatgcagtacatgaatcatacagatactgacacttcctatgccatcattcatatttcttaacttgtatactctccttctctgtacctcttcttggtatttttaggagagtttttcctggccttccagctcactatgtttttttctttagtattattctgtatgctaatcaattcatctgtcaggtacttattttgacaattata

SEQ ID NO: 534881 - DNA, 616 bp, Homo sapiens
cccttggccaagcagaagaacaagccatgaagatctgtgtgaaatgacctgctgatgtgattggcaggacaccagcactttggctggctgtttaggaaagagaacacatttttttttcatagcatctgctatatacctagagtcttattaggctattagtattccttatttcaatgaacccttgcaatatttctaatgttttggtgtaattatctccattatctccactttataggtgaaaacactgaatatgggttagctttttaaaaaataacagtgcaagcaaatggtgaagttcccttttctgatttcagatcttatactctctctaccactgcatkttgtacccatatttacatctagtatgaatcatctcctgtcaacttttttcctaaagaattccctcaggaacaatgagttgtgaaaagaggcaccagtctgaaaaaaaaaaaaacaaaaaacctggcataattcacttttctggccttttctccccggactgttttgaatggtttttctttgtaagagatgaagaacacatgcacaggtccagcccagagcacaaaaggcagaacatctacatgaagcagaattttttaagcaaaatgttttattg

SEQ ID NO: 534882 - DNA, 616 bp, Homo sapiens
cccttggccaagcagaagaacaagccatgaagatctgtgtgaaatgacctgctgatgtgattggcaggacaccagcactttggctggctgtttaggaaagagaacacatttttttttcatagcatctgctatatacctagagtcttattaggctattagtattccttatttcaatgaacccttgcaatatttctaatgttttggtgtaattatctccattatctccactttataggtgaaaacactgaatatgggttagctttttaaaaaataacagtgcaagcaaatggtgaagttcccttttctgatttcagatcttatactctctctaccactgcatgttgtacccatatttacatctagtrtgaatcatctcctgtcaacttttttcctaaagaattccctcaggaacaatgagttgtgaaaagaggcaccagtctgaaaaaaaaaaaaacaaaaaacctggcataattcacttttctggccttttctccccggactgttttgaatggtttttctttgtaagagatgaagaacacatgcacaggtccagcccagagcacaaaaggcagaacatctacatgaagcagaattttttaagcaaaatgttttattg

SEQ ID NO: 534883 - DNA, 644 bp, Homo sapiens
tccaaatactatggaaatacagatgaatgtactgttaactgttcagacaaagaaaaaccacagcactttgggaggccgaggcgggaagatcatgaggttaggagatcaagaccatcctggctaacacggtgaaaccccgcctctactaaaaatacacacacacaaaaaaaattagccgggtgtggtggtgggtgcctgtagtcccatctactcgggaggctaaggcaagagaatggtgtgaacccaggaggcagagctcgcagtgagccgagattgcgccactgcactccagcctgggtgacagagcgagactctgtctcaaaaaaaaaaaaaaaagaaaaagaaaaacgacatttataaaaatggacaagaatggaggatagaaaagaacatacttttctgtatttattaaataccwtttcatttcttaattcaatcatttactcatttatcaatcaactcatcaatcagttaggtagtaaagacttattgaataccaaacatgccaggcattgcgtttggtgctaactataccaggaaaaatataacaagttcctagcccttatggatgcacagataaataagaccatgcttgcacttatgaggattaaaatatatacatgactacagcaacttatatgtgt

SEQ ID NO: 534884 - DNA, 590 bp, Homo sapiens
tgacttttcggttaggctgttttatttggtttattttttgtccaggacagccaaagaatgaagtaattttaattgcataaatttgactttcaatggatgcagtcactaaatactcatctccagaatgaagctttagcttgcaaagctaaatataaatttccttataactgaagagaaaataygcatcttgaaatgggacaaaacaaagatattttccaatattaactgcaaagtcagtattgttttcatcctttcgtgtttatccccattatcacatttctcaaaatgtgacatttagtttttatgatccatcaaaccaactatttggaagactaccaaatattaacagaataaattcaagacaattgtttttctgtttcatcttctgtccaatagaaaaccttagaatgtatgtgtacatgtatctatatttacatatgtcttctgttagcaatttaccattcttaaagttttgcttattttaatctgaaaactcccttcttatatgtgcatgtatgataaatttttgatattcaagtatttataattaaaagtattattctgaacattaataatccaaatcaacactg

SEQ ID NO: 534885 - DNA, 461 bp, Homo sapiens
cttttcggttaggctgttttatttggtttattttttgtccaggacagccaaagaatgaagtaattttaattgcataaatttgactttcaatggatgcagtcactaaatactcatctccagaatgaagctttagcttgcaaagctaaatataaatttccttataactgaagagaaaatacgcatcttgaaatgggacaaaacaaagatattttccaatattaactgcamagtcagtattgttttcatcctttcgtgtttatccccattatcacatttctcaaaatgtgacatttagtttttatgatccatcaaaccaactatttggaagactaccaaatattaacagaataaattcaagacaattgtttttctgtttcatcttctgtccaatagaaaaccttagaatgtatgtgtacatgtatctatatttacatatgtcttctgttagcaatttaccattc

SEQ ID NO: 534886 - DNA, 644 bp, Homo sapiens
tggtagtacctttgttttaggagttttacctcagatcctctttgttaactgacaagggcttgtacgcatatgtgagtgctgggcagctcatgtcgaaggtcaaacttttgcacgcacatcaacatctttatagtgactatttctagacaataaggacatgcatactcattaaaaattaaatactcttttttctcaatgatttctaacctgaatattgtatgcacatgtttcagaacaccgatgagtaacctgaaggggtaaagttcaaagcgttataaaccttatttcaacatacatgatagtgctaagatgatcatgcatgtttgactttaattttttaaataatctaaataatttcaggtagatgggctgataaatagacaaaattctgtgtttcattcttttcttctgatagcttgtgagttgctcctttcagattttacattgtcaaggctgagtgcttatctttayagagattcttaaatgcagtatccaataactaaagagaacaccatttgttttcaatgctaagggatatcagtcctgttaagtagtcctgaaagaagctaaatggtaataaaatgctcagttttcttcatatatatttcaatttctgacaagacaccacccttcttccactcatg

SEQ ID NO: 534887 - DNA, 529 bp, Homo sapiens
gtggtagttaaaggcctggaccccagaggcagacaggcttgcatctgtgccttgawacttacttgtctgtgaccttgctcgagcatgtttgccttaggtttcttatctctaaaatggatagcagtagttaccccaatagaggtgctgtatagattaattgagatcatgactgtaaagagtctattacggtactgggcacataataaaagctcacgatattttacacataatttcgtctcttttgatggtctaagtagtaagacatgcaagtattaagattaaagtgtattatagatctgttcttacatgttttttattttttaaaatagaattgccaatgttcaaatctgctgcttaaattttaaaattcttaaacattccatttgtgaatatggaattcatcttcttctgaataggtatttattaattcttcaacattgtagcatccttaatttaattcagactctggaaacttgcattaagctttcaaaatctgtagggatgattacgctcacttggaaattttgag

SEQ ID NO: 534888 - DNA, 529 bp, Homo sapiens
gtggtagttaaaggcctggaccccagaggcagacaggcttgcatctgtgccttgatacttacttgtctgtgaccttgctcgagcatgtttgccttaggtttcttatctctaaaatggatagcagtagttaccccaatagaggtgctgtatagattaattgagatcatgactgtaaagagtctattacggtactgggcacataataaaagctcacgatattttacayataatttcgtctcttttgatggtctaagtagtaagacatgcaagtattaagattaaagtgtattatagatctgttcttacatgttttttattttttaaaatagaattgccaatgttcaaatctgctgcttaaattttaaaattcttaaacattccatttgtgaatatggaattcatcttcttctgaataggtatttattaattcttcaacattgtagcatccttaatttaattcagactctggaaacttgcattaagctttcaaaatctgtagggatgattacgctcacttggaaattttgag

SEQ ID NO: 534889 - DNA, 607 bp, Homo sapiens
atgtagtgtccctttgtggagaagttattgaagttagagactgtgcccaacargagctggccccaggcccagggccaggtttccatatctaagcttactgcatggtgagaccagtctgaacaatgctctctgcaggtagaccacaagagacgggtgatggaagaagctgagctacaggtattctggtcctctcccaaaccctccaatcaggcaattcactccacttccgtcagaggagtagtggtgggttttcaataaatctctccttgtagaaaacagaaatgggaaagaaaatgtgtctgctcatattgccaatcaacatttctttcatgaaaaatttaagcatattggaagctaacaaagtgtaactacaggattttttttaaatttattttccagcaagtgcccaatcctcctaaatcaccatctctagaaaactcatttttctgcaagaaatcatcaaatgagcatgttccactgcttatacatgttctaaatagatgatataggttccgctgcaatattcacttgactctgtgtcatttaagtctccgtgactttttataggtacagattttatagcagccagggatcatgtctgtttaat

SEQ ID NO: 534890 - DNA, 607 bp, Homo sapiens
atgtagtgtccctttgtggagaagttattgaagttagagactgtgcccaacaagagctggccccaggcccagggccaggtttccatatctaagcttactgcatggtgagaccagtctgaacaatgctctctgcaggtagaccacaagagacgggtgatggaagaagctgagctacaggtattctggtcctctcccaaaccctccaatcaggcaattcactccacttccgtcagaggagtagtggtgggttttcaataaatctctccttgtagaaaacagaaatgggaaagaaaatgtgtctgctcatattgccaatcaacatttctttcatgaaaaatttaagcatattggaagctaacaaagtgtaactacaggattttytttaaatttattttccagcaagtgcccaatcctcctaaatcaccatctctagaaaactcatttttctgcaagaaatcatcaaatgagcatgttccactgcttatacatgttctaaatagatgatataggttccgctgcaatattcacttgactctgtgtcatttaagtctccgtgactttttataggtacagattttatagcagccagggatcatgtctgtttaat

SEQ ID NO: 534891 - DNA, 546 bp, Homo sapiens
ctgatttgtaatttgctttatctttaaaaacagttttcttgaatttaatatgccagcagttataaagctatctttctctctgctatctactgataattttgcrtatctgtaatgatctatgttctttttattttaaggaaatatagttcaccaggatggttgagaacaaaagtattgtggtgaaacaaacctaggttttaaccccactgtacccatgtactactatgcaatagcatgcaagttacatcacctctgtaagactcagttaacaggtctgcgaaactgggataagaatatacagacagttcctgacttacaatgatttgaattatgattttttgactgtacaatggtgagaaagtatggtttcagtagaaactgtacttcaagtactcatacaattattcggtttttcactttcattataatatttaataaattacatgagatattcaacactttattataaaataggctttgtgttagatgattttgcccaactgcaggctaatgtaagttttctgagcacatttaaggtaggctagg

SEQ ID NO: 534892 - DNA, 546 bp, Homo sapiens
ctgatttgtaatttgctttatctttaaaaacagttttcttgaatttaatatgccagcagttataaagctatctttctctctgctatctactgataattttgcgtatctgtaatgatctatgttctttttattttaaggaaatatagttcaccaggatggttgagaacaaaagtattgtggtgaaacaaacctaggttttaaccccactgtacccatgtactactatgcaatagcatgcaagttacatcacctctgtaagactcagttaacaggtctgcgaaactgggataagaatatacagacagttcctgacttacaatgatttgaattatgattttttgactgtacaatggtgagaaagtatggtttcagtagaaactgtacttcaagtactcatacaaytattcggtttttcactttcattataatatttaataaattacatgagatattcaacactttattataaaataggctttgtgttagatgattttgcccaactgcaggctaatgtaagttttctgagcacatttaaggtaggctagg

SEQ ID NO: 534893 - DNA, 553 bp, Homo sapiens
gttataaaatgatctgtaaccagcaagagtattaattgacaagaaaaagtcaaaggtgcaagctgaaaggtcaaatgctggcatagatcttgatatctgctctttaacgtctcactcatgtcatttccttgccacataccgtaggcttttcctaacacacttagaaacctacaaaccttggcctgaaggagctgtaagagttgctgatgttgatttcttcagagttttttcactgagagctgttaagtagtaagttgtagttggcagttagccacctgctcactaaatattttaaactctgaaatgaaatgcctctcaatgtgctgtacagacattccaaaaaataaaaaaataaaaaagaattttattacctcacttaaactcaattggcatttaatgaggtatgagcaatgtctatgtaatgtcatgaactaaaaarcaaatgacctcagaaggtgggggatggtcccaaaacctgaactgcatctaaaataagattgtattttcctctgcaatctgtttgatgcagaatgcattagtgtcttggcattgg

SEQ ID NO: 534894 - DNA, 641 bp, Homo sapiens
catccccaaatcccagaggcttcttggagacttttccatacctctttcttcctgcagccactgwgggtgtccatgatagtaataacttccataagcatattcctccctcattgtgggagactgatagctctgatatgaattctcataacctggcctaaaatatcacaaagaagactggtcagttgaggacaagggtagtaaagagagaaaccaatgaagaacttgacaaactaaacaggttcagaggacagagttgtgaccccagcctagaatctgcttgaaagccacagttaattctagatcctgtaaacagaatcaaagcaggagtcaggcctttgttgcacaacaggagtagaatttttatagtacaattttttttacttaaaactctttttctaaaaacctcttttttatttaaaactcttttattttgtagtaaaactctcactccccaaacacatacatattatcttagaaaactccatcctgatattatctgagaaaaccacttcctgagatgactgtgttaagtctccaatacaccaccgtaatttccatgcttatcccagatggagttgagatttaaaagtcaaactggactatgttaagtctgattacttttattgcctctgtcctgaaca

SEQ ID NO: 534895 - DNA, 522 bp, Homo sapiens
gttaaatgttaaattaaaaaatataaattttccagtttaaattatttatttacatattaaatttttaaatgtatttattcattccatttttattgaaagttcaaacmgttttgtatttttttacaattcaaattattcttacataagaatgtttagaattttttgtctttctagttatttttgcgaggaaattcctatagattgaatttatgatataaaagttatgcaattcaaatgtcaaacgtttaccagcaactaacacatgttaattgctatggtaggcaatttctacactatctcccaaattccttgtatttatgtccttgtggaatcctacctgcttgagtgtgggggtccacctagtaactcccttttatgaatagaatatgcaaaagtgataaaattatgccttaaatattagtttcaaagacacttttgctacagtcttgcccctcctctccctctttcatctgctcttattctcccttttgtttgccaggagggaaacaagctatcatgttg

SEQ ID NO: 534896 - DNA, 522 bp, Homo sapiens
gttaaatgttaaattaaaaaatataaattttccagtttaaattatttatttacatattaaatttttaaatgtatttattcattccatttttattgaaagttcaaacagttttgtatttttttacaattcaaattattcttacataagaatgtttagaattttttgtctttctagttatttttgcgaggaaattcctatagattgaatttatgatataaaagttatgcaattcaaatgtcaaacgtttaccagcaactaacacatgttaattgctatggtaggcaatttctacactatctcccaaattccttgtatttatgtccttgtggaatcctacctgcttgagtgtgggggtccacctagtaactcccttttatgaatagaatatgcaaaagtgataaaattatgccttaaatattagtttcaaagacacttttgctacagtcttgcccckcctctccctctttcatctgctcttattctcccttttgtttgccaggagggaaacaagctatcatgttg

SEQ ID NO: 534897 - DNA, 578 bp, Homo sapiens
tctgccaaatgtgaaattgcaatttacatagaaaattttatgaagacttcagaatgaagaagtctgcattttcaagtcttctggtaaactcatgttcttgttgcacatctgagaacagccccacctgttgacagatctttgatggcaaggctacatttttgatggtttccaaagatggaaaaattgcagaataaagttcagaaaacatggtgagcttaaatgaataagttatatttaattgggtatatggtattgttttcaatattaaagrtattttgaggcccaattagacaagactttactgacctgaagatgtctaaaattatattatagttcaagaacaagagatgatagaaatttggtcagatcatttcttaatttctctttgttcacttattattaatcacgttgttaggagtatggggactattcctatgagaactaaaggaatctttttttgtttgtagtttatgtcccagtaggtggataatacaatttagttttgctttaaggattttaggatgcatatgtgtttgtttttatgtattttatatatagtgtatatacacatacttatg

SEQ ID NO: 534898 - DNA, 607 bp, Homo sapiens
atattgccaagaaatgtttgaatggattatttttttaagaatgataaaaaatctatattctagattaataggaagctagttcttttctgtttcattcaaaatattcgaaagacaagtcagaatcattttagaaaaaaatgacattttatatcaaaccatttcaagcagtttttacttcttttctcaatcccctctaggcctttacagcatagggttatagaagacagtcattttcagtctcttctatttttataaaagatggaagtagtcatatgtaaaaaataaaagtgactcttccttagaaataaggctaaataattctaaaaagatttcaagctaagcatggctctcaaatgcttttcagttctagaagcgctgcatcattcattcatttatggataggaaaaagcgattgtattattcttccaattctttttttattgctgttgtttcccagaaggtaatgctagtagtaagggacttcttttttagaaatgcattaaaaatagtaagccttttaaaaatccartgttagaaaactttgttcagtttcaccttttaaatgttctgccatatttgagagacaattgtctaccctattgtgaag

SEQ ID NO: 534899 - DNA, 508 bp, Homo sapiens
tcttgtaaacatggtgtacacatattatttggagattaaaggcaaatattttatttcataaattatcagcatagaagatgaagataattggtaagtagcatctgctgtgaagatactgaagttggattatagcagatgtagtcagaagaaattgaggatggattccattttcctgttgtttgtttycttgtgttccttgttttcttttcatttatttcttttagtttaagattctgtcattctcctactcaaaaccttcgaatggcttcccatcggaactataataagctcctaactctaacctggcataacaccacttaatctggcctctgtacaaatcattggctttatctcattccccatcctaccaggcttcgtattttctccacagaacatttgcactagctctgcctggaattatccttcatcatctttatttgactggatccttttccctcttcagctcttcattaattcttcagagacgcttccttgaacactctccaaa

SEQ ID NO: 534900 - DNA, 472 bp, Homo sapiens
tgcaaaggatgaaggaatgctttctgygccccagatgtgggccatgggtgagggagagtttgtgtgaccctgtccaggactagctggaggggtgaggtgaccccagggtggagaactgaagggtgctcaggagcagaggaagaagccacaaatagccaattgggggagcatttcacctgcatcaagagcacggcaggagagaaagtcctagtaatgagggactcagaaaagcgccccaggagtctaaaggggccactgcaatccttgccaggcccagtaagcccaatgccagctctgagcaagtaaggtatttcctgcctcttccaccactcctaattccaactctggaggggttggacacctgggtggatgggatgatggggaaagaatgcaggctggccaaagacagaagcggccagcctatactccttttcccaaggcaggtggccggcctgctgcaggcctgagctgg

SEQ ID NO: 534901 - DNA, 472 bp, Homo sapiens
tgcaaaggatgaaggaatgctttctgcgccccagatgtgggccatgggtgagggagagtttgtgtgrccctgtccaggactagctggaggggtgaggtgaccccagggtggagaactgaagggtgctcaggagcagaggaagaagccacaaatagccaattgggggagcatttcacctgcatcaagagcacggcaggagagaaagtcctagtaatgagggactcagaaaagcgccccaggagtctaaaggggccactgcaatccttgccaggcccagtaagcccaatgccagctctgagcaagtaaggtatttcctgcctcttccaccactcctaattccaactctggaggggttggacacctgggtggatgggatgatggggaaagaatgcaggctggccaaagacagaagcggccagcctatactccttttcccaaggcaggtggccggcctgctgcaggcctgagctgg

SEQ ID NO: 534902 - DNA, 486 bp, Homo sapiens
ctgttgagaattctgtgggcaagtatggtgtatcatttaggacttccagaaataactggagctcactcagaggggtcccttattttaagtcttccctgatttgtcccttgcttctgggccttacccactcccctaggcctgtctctgccagtgtacacaacatagtaaatgggaactgtttgtttacttaggttttcaatctacactgccagctcctcgaggaccatgctctgtgcctagcaggtgcctgggaatgttatcatatgaatgaatgaattgtgggaacaagagtgctgagcagagccaggggttggagtggcccacatgtggggtgtctggaagggaggccatcatctgcttattggctcaggagtctggggagtccctggttccccactcagccccctcctctggaagggagttgggggtgggggaggccactgtcatcaagcgggcrtctgtaccccatccaggactccagttggc

SEQ ID NO: 534903 - DNA, 674 bp, Homo sapiens
gctgccggggtccatcccttccccctggcactggggccctggccacgcccagcactgtccttgcagacagctccacgtccacaggggccacgttgctatggtgactccactacccgcacagtgtccagggagacagcacggggtatagctggagctgttctcaagacttggagaaaccggcactgacagtctgggaagattctggaaagrgtcagagggagtgggggatgggaactaagagaaactgcatccctaggagtagcactgtgtgtgggtgaatctgtgtgcacgcactcacacacgcacccaccctcgtccgagcagaggtgtagcccctagagaggcctaatcttgtgactgtcataggtttctgcctgagggggtattcatggtttctcactgtgttaagctgctattttgaaaactaaaagggagaaaaaagcggcatgtatatggcagcagagcagacagaactgtgacttcggctgcgccatgtctgaacctggtctcatggtctaccttgtcccctgtcctttaagatttacagaacccagtgtgggacaccaggaaattacactgtgacgaggatgcaaggtgacaagctgtgatgcctatccctcctcctacatccctccatgcagcactctccctgagttccaggcggcttgtctgaa

SEQ ID NO: 534904 - DNA, 629 bp, Homo sapiens
ggctctccctaacctgctgagtaagaggcaaggctgaagccaggccccagccccttggttgtgggccagcctcactgaaagctctggccacagcactggaagagactctttatattgtacccacctttcccctgatcgggaggagggagggcattttataacctcacctgccctgttctaacttattcatgtgtttcaaaataacatatattaatacatatttattttggattataaaaattatccatgtcccttgtagaaaatgtgaaaagtacaggcacgcaccaaagagaaatcagtctcctgaaacctcatcattcagacagactcatgggacacttcacattcagatgtgatcctttttattttaatttctttatcatttattttggtccctcacattataaaactttttccatggcagtggttctcaatcttcttaaccctatcgttttttaaattgtgataaaatatgtataaaataatgtttactgttttagtcatttttaagtgtacaaattcaatggcattaagcacattgaccatgttatacaagcatcaccactatttatctccagaactttctcatcatcctraactgaaactgcatacccattaaataactccca

SEQ ID NO: 534905 - DNA, 670 bp, Homo sapiens
tgccagatatgcagcctcctgctgtatttgtacacccatacaaaacaagacacaaaaactgtcctctctgacaaggccttctgaggggatgtcaatgaagatttaggggccaggcagagcagggttgtatcagagaaagtaattggagcagcatcaagctgaacatgagaagcccctgacctgggccctccgcagccacccttgggtggtctccacctcccactcctctttgcctaacagtttgcactatgaaattttgtttgagaggttcttccgctcctcccaggtcctgtcctcaggaggaaaatgaactccagcctattttctcagcagagtggctggccgcccccgacggccatggtctttcctacccagaaacacatggaggttctttcttccccaccaggaggcaccaagatcgtctgctctttaagagkaattctgggcccagctttagatcatatcaactttatctccttacaccctaggagacactgcaaccagtgtgactgggggatcccagagtagaacccaggagccccacctcccagcaggataccctttctgagtcaccaaatcttgtccatttttcctttcctatttctctgatctgcatctttttctcttcctgcctgagctcccttgcctggcgcctggacggctgctgcac

SEQ ID NO: 534906 - DNA, 627 bp, Homo sapiens
actgattatttaagtcagatgttggcaaatatttcccataaagagctagatagtaaatatttaggttttgttagccagtgtatgtcagaattactcaacaccatcattgtaaaagcagttataatcaatatgtaaataaaggtacatgcctgtgccctaacaaaacttcatttaaatacctagtagtttgtccaccattgatcaaagcaaaagcagaaataccagagtttagccaagaatggaaaaagctttttccccaaagggatttgcaaaatgggtgaaactgatttcttttgactgcctagtgagccctgaacttcagaagtcaatgcccagggtccttggtaaggaagaattttaaatggagatcctctccccaagtaaaacagggaaatcagattaaaatatattaaagataagactaaaccagaactaactcttccccctccttaatccttgagatacttttatgaaaatgtctttggtgttgaagaaaatggtagggtgtagaggaatggatggaamagtccctgaaagaagtcataaccacaagttggttcccatgaggatttgcagcccaaacttacaccttagtgataaaaaacagcaaaaataacaacaacaaaa

SEQ ID NO: 534907 - DNA, 346 bp, Homo sapiens
attacaaatgggaaaactgagaatcagtagyaaataactgatccagagagattaagtgaatttccagtagaggtaagattaggatgtaagtttcttgactttctgtctcagtaggaacagcttccttggtattagaataccaacaaacacaggaaggtgcacatcttacaacataggttcttatcagcttgttatagtgttttatacctgcccaaactctacccctaaaacaaaatattattatagctaatagttatcgagtatatatttgtacaattacatctcatgattctcacaatagtcctaatgatgtgtagcaaggttgaataacttaccagaggtcaca

SEQ ID NO: 534908 - DNA, 518 bp, Homo sapiens
caattactataactgtccagagtcagcataagtaggatatcaaatttaaatgggaattgatagtaatattcagacataggcatatatacatattactactggctaaattttttttattttcacggtagaccaaatatttcaactcatgtaatattgtttatcatgtatcagtggaaatctaagcttttctcataatttctgtaaactacttattatccaagctctgcagaaaaaggcaacataacagagtgagttcagactatttgtaattaccacctttatcacttgctgggtrttctcattaatttttattcatatgtaaatgagtataatcatgatctctattctcggagaatcccctttttcctggttttctatttccgtatgcagcaagttctactggaaaccactattggtttctcacccaatagattctgtgttgcttttcccaagtcctctctttaggaccaaggcattcatttctttaactgcaaggctactgactgccaacaggccac

SEQ ID NO: 534909 - DNA, 664 bp, Homo sapiens
aaaaaaaaattaaggctgatgtgtgaggttggcaaacagctatcactgtccctattttacaggagataatgcaggagagccatctgggaagttgggaatcttgtctcaggtcacacactgactacatgacaaaagctttgaaaccaagtctcctgacttctggcccatgcccattcttccccactacctaggtgagatctacctcagaaattccccagaccacctcggagagggagtaaacttgagtgtgtcacacacagcccttatttggcattcatttctctgtgtctgattgccagcagccatagatcaggtgggatttgcggatgagggcctctgatgactcagccttggggcaggccacagggagtaccttgcctgggggctctcctggactgctgaggaaggcttgggcaagtctytgccctgctccttcctgacatgccctcagagaacaggatttttattggacatttggtgacaggtgcacgatgtgagcagaagggacctcggtttaatgtctcatgagacaagcagcacgtattatacagctagtgactcactactaatttactgccctagaagactggtgttttctgaaagaacaggaggcaagagcagaaactgctttttgtcccagacttctttcactacagatgtttgc

SEQ ID NO: 534910 - DNA, 670 bp, Homo sapiens
tggaaaaccaatccactgtaagaataascatgacaaccataaatattacctgatattctatgggtattcttgacaacccagaggcctcaagagaaaaaagaatgaaactctgatcatgtatatagtataacaaattaaggggcacagcttacagagaccttgcaagcaaaataagcagcaagaagaaagtagaagatagtgggataaaggaacctactctttgttgtaccttttatcaaatggaatttatacagggctatctgctaaagaactcatcaaatctttgagcctatagggtctgtagaacttagagttgatgtagtccaagacttttttctaacgtattagtctttcctggatggtaattgatatggtttggctctgtccccttccaaatctcatcttgaattgtagctcccataattcccacgtgttgtgggagggacccaggagaagataatttaatcatggggacagttgccccatactgttctcatggtactgaataagtctcatgagatctaattgttttataaggcatttcccctttcacttggctctcattctctcttgcctgccactatgtaagatgtgcctttctccttctgccacaattgtgaggtctccccagccatgtggaactgaaaatcaattaaatctctttttcttt

SEQ ID NO: 534911 - DNA, 670 bp, Homo sapiens
tggaaaaccaatccactgtaagaataagcatgacarccataaatattacctgatattctatgggtattcttgacaacccagaggcctcaagagaaaaaagaatgaaactctgatcatgtatatagtataacaaattaaggggcacagcttacagagaccttgcaagcaaaataagcagcaagaagaaagtagaagatagtgggataaaggaacctactctttgttgtaccttttatcaaatggaatttatacagggctatctgctaaagaactcatcaaatctttgagcctatagggtctgtagaacttagagttgatgtagtccaagacttttttctaacgtattagtctttcctggatggtaattgatatggtttggctctgtccccttccaaatctcatcttgaattgtagctcccataattcccacgtgttgtgggagggacccaggagaagataatttaatcatggggacagttgccccatactgttctcatggtactgaataagtctcatgagatctaattgttttataaggcatttcccctttcacttggctctcattctctcttgcctgccactatgtaagatgtgcctttctccttctgccacaattgtgaggtctccccagccatgtggaactgaaaatcaattaaatctctttttcttt

SEQ ID NO: 534912 - DNA, 670 bp, Homo sapiens
tggaaaaccaatccactgtaagaataagcatgacaaccataaatattacctgatattctatgggtattcttgacaacccagaggcctcaagagaaaaaagaatgaaactctgatcatgtatatagtataacaaattaaggggcacagcttacagagaccttgcaagcaaaataagcagcaagaagaaagtagaagatagtgggataaaggaacctactctttgttgtaccttttatcaaatggaatttatacagggctatctgctaaagaactcatcaaatctttgagcctatagggtctgtagaacttagagttgatgtagtccaagacttttttctaacgtattagtctttcctggatggtmattgatatggtttggctctgtccccttccaaatctcatcttgaattgtagctcccataattcccacgtgttgtgggagggacccaggagaagataatttaatcatggggacagttgccccatactgttctcatggtactgaataagtctcatgagatctaattgttttataaggcatttcccctttcacttggctctcattctctcttgcctgccactatgtaagatgtgcctttctccttctgccacaattgtgaggtctccccagccatgtggaactgaaaatcaattaaatctctttttcttt

SEQ ID NO: 534913 - DNA, 414 bp, Homo sapiens
aaataaaataaaaaagataacatttttcccctccactgaggcaatcgtagatactagtttcttgtatgtcctagaaatatatattaatagctaaaattgattgaacatttagtttgtgtcaascactattctaagtcctttgtacttaatgaatttaatcctgtatgatgcagttgctattattattccttctttgtagacaagtacactgaagggaagagaggctaagtagctgccccaatccacgcagacagtggtggcttcagggtctgagttcttaaacctactttatattacctttgtgcagagtttagatattatctttatttattttattttatttatttatttttttgagacagtgtctcactctgttgtccaggctggagtccagtggcgcgatctcagctcact

SEQ ID NO: 534914 - DNA, 621 bp, Homo sapiens
tcattgaacaaagagtggaatggtggttaccaggagctgaggaagtgagaatgggtgctattaaacaatggacttcacatttcaatcaagcaggatgagtaagttccagagagctgctgtacaacattgtacctattgttaatgatatcrtattgtacaattaaaatctgttaagagggcagatcttgtgttaattgttcttgaaataaaatttaaaataaataaaacatgaaatcttgtattttaaaatctttcaaatcagtaagaattaaagcatacgttaatttacaatttactgtttcaaaacatataggataattacaaaagtaagaaatcaaactcatgcacctaaggtaattacgtcatttatgtcattccacattgagaataatgacccaaagtctaaccagcatcttccaattaaggcctggcattttctgtagcttagtgactttgggtatcttgccttttgattccataaatgttagtggtagtttttcttattttgttaaagacagcactaaagaatcctgaatactcgctaccaattagcaacaggttcctaactgaagcaaatgccatgctcaatgaccatatctcactagaaagggcaggggatgg

SEQ ID NO: 534915 - DNA, 462 bp, Homo sapiens
taatccaaatttataatacctcaaagttgttttacatgctacatgacaagagtataaagtagacatattgtcactttacagtcaaaccgtttacaaaattaattcacccrtatttcataaataatgcacatcattcattccagataaagtctgtccttgttcagcacgtgctgggcttctcgtcactcccaggcccttccatgggcctcctacccaggacactgcctctcttaaccttctgcataactgacggtcctacagcaggctgatgcagggctctctattcagttgtctctggcaaatcccatagtttataatttgaggactttaacactgcttcactctccaaaaaatgttagagtattttacatttagatactaaaatgtatatgatgtgcaaaaacatgcatcctgttagttgtgctactttcatgaagtaacattgtccagtggaactaagta

SEQ ID NO: 534916 - DNA, 677 bp, Homo sapiens
ttctgttgaagttggtaggrtctttatttattttattttatttattttgttttgttttattttattttatttttgagacggagtctcagagtctcactcttgttgctcaggctggagtgcaatggtgcgatctcggctcactgcaacctccacctctggagtttaaatgattcccctgcctcagcctcccgagtagccgggattacaggcgcctgccaccacgcccagctaatttttttgtatttttagtagagacggggtttcaccatgttggccaggctggtctcaaactcctgacctcaggtgatccacctgcctcagcctcccagagtgctgggattacaggcgtgagccatggcgcccggctggtagggtctttattaaagaacagttatgagagatgtatgaagtatgagtaaagatagaataatttaggtctttaattgtaatgctatatcctaaacatggaaatctatttgaccaatacattgtggatgaggatatactttattctgccttcctttaacaaatacgtataactgagctgttactatgtgccagaccctactttaggtgccagttatataataagcaaacagacacccttcctgtcttcctggaggtgagtctaatgaggaccaggcaataaaaagtaaacaaataaatgcatcattatg

SEQ ID NO: 534917 - DNA, 593 bp, Homo sapiens
ttaggggcacctgccagcctctcratgaaggcaagcaaagtggaatggggaacaaagatatcttaagatacactatagcactagtcactaaaaatatgatagacagtcttttgttcaaataactatcacagtaagttttttaaaaaaataaaatctgtccaatctgatgttatttataaaatatatttgtaaagtgtgttcataacacgctcccagaaagcattttagtagaagtcattttggttttggataaatttgatctctttaagttcagtaaatgatcaaggacagatacaatataattttagtagtttacattgtcatcttttcttatttatttttgaaacggagtctcactctgtcacccaggctggagtgctgtggagccatctgggctcactgcaacccctactttctgggttcaagtgattctcctgcctcagccacccaagtagctgagatcacaggcacgtgccaccacgcccagctaatttttatatttttatatttttagtagagatggggttttgccatgtaggccaggctggtctgagttcttggcctcaagtgatctgcctgccttgtcctcccaa

SEQ ID NO: 534918 - DNA, 593 bp, Homo sapiens
ttaggggcacctgccagcctctcgatgaaggcaagcaaagtggaatggggaacaaagatatcttaagatacactatagcactagtcactaaaaatatgatagacagtcttttgttcaaataactatcacagtaagttttttaaaaaaataaaatctgtccaatctgatgttatttataaaatatatttgtaaagtgtgttcataacacgctcccagaaagcattttagtagaagtcattttggttttggataaatttgatctctttaagttcagtaaatgatcaaggacagatacaatataattttagtagtttacattgtcatcttttcttatttatttttgaaacggagtctcactctgtcacccaggctggagtgctgtggagccatctgggctcactgcaacccctactttctgggttcaagtgattctcctgcctcagccacccaagtagctgagatcacaggcacgtgccaccacgcccagctaatttttatatttttatatttttagtagagatggggttttgccatgtaggccaggctggtctgarttcttggcctcaagtgatctgcctgccttgtcctcccaa

SEQ ID NO: 534919 - DNA, 582 bp, Homo sapiens
accttttcattagagtcctgtttttgctatgtcttgtaagtttttgttttttttgttttttttttgttttttttttgttttgaggcagagtctcgctttgtcgcccaggctggagtgcagtggcacgatctctgctcattgcaagctccgcctcccgggttcacaccgttctccccgcctcagcctcccaagtagctgggactacaggcacccgccaccatgcctggctaattttttttgtatttttagtagagacggggtttcactgtgttagccaggatggtcttgatctcctgaccttgttatccgcccacctcggcctcccaaagtgcttggattacaggagtgagccaccgcaccaggccgtcttttaagtttttatatgcagtgttctcattaatttttctaaattatcaataattgcasttatttcctctctaccaaatagttattttagagaatgttaaattttcaagtgattgtatttttaatttaaatagtcatcagtgtacagagaaaggacttttttaggattcttttgaagtcccttgattaagagaggtgtttttccctcctataagg

SEQ ID NO: 534920 - DNA, 664 bp, Homo sapiens
gcaaatacagggaatcaaggtggggcatgaagtcatatggcacaggttcatgtggggcccctctgtcctattaaaaatgctgacaagtcctggcacagtggctggtgcctgtgattccagcactttgggaggccaagtcaggaggatcacttgaaaccaggagttcaagaccagcctgggcagcaggktaagaccctgtctctataaataaataaattaattaattaaattaaataaaaaaaattagctgggcattgtggtgcacacctgtagtcctagctacttaggaggctaggtgggaagatcacttgagcccaggagttggaggctgctgtgagctctgatcccaccactgcactccagcctgaatgacagggtgagactctgtctctaaaaaataaaaaataaaaaatacatgaaataaaaattaaaatgttagctttaactctgaatatgatggaaagccattggcatgatctgagttacaggaatgggatggtttgaatgaagattttggaggatcacacaccctgccaccttgtgagtagaccaaagggagacaaggacagaacagaactgttaggaagcagttttaataatcccagtaaaggagagcagggaatccagtgatagcaggaaagatgaagacaggtagaatgctggg

SEQ ID NO: 534921 - DNA, 664 bp, Homo sapiens
gcaaatacagggaatcaaggtggggcatgaagtcatatggcacaggttcatgtggggcccctctgtcctattaaaaatgctgacaagtcctggcacagtggctggtgcctgtgattccagcactttgggaggccaagtcaggaggatcacttgaaaccaggagttcaagaccagcctgggcagcagggtaagaccctgtctctataaataaatwaattaattaattaaattaaataaaaaaaattagctgggcattgtggtgcacacctgtagtcctagctacttaggaggctaggtgggaagatcacttgagcccaggagttggaggctgctgtgagctctgatcccaccactgcactccagcctgaatgacagggtgagactctgtctctaaaaaataaaaaataaaaaatacatgaaataaaaattaaaatgttagctttaactctgaatatgatggaaagccattggcatgatctgagttacaggaatgggatggtttgaatgaagattttggaggatcacacaccctgccaccttgtgagtagaccaaagggagacaaggacagaacagaactgttaggaagcagttttaataatcccagtaaaggagagcagggaatccagtgatagcaggaaagatgaagacaggtagaatgctggg

SEQ ID NO: 534922 - DNA, 488 bp, Homo sapiens
atttcctaacatacctctctgtccccgaatctcagatgtgcatttaggagytggcctggcgacgactctgagtaactgccactattcttggatttcttgtccctttacctgtagtgcaataagtcacatcccaagcctgcatcattcttggatgcattctgtcctggaagaccccacagccatacccactggcagctcaactcacccacagcaataggcatggcttcagttctttccaacaggcttttctgagcttccacaaacactcttctcccaggaaagactctcctaccattttgaaaaaaatgctcaggaattcctgaaatctagtacagagtagtaagaagctgtgttgcagtctgggaacccagggaggtgagaggaactcagagctggaaaggagcatgcgggaacagttttccacatgaccataccgctggcttccacacctggagcagctttccacatgaccgtaccgctggcctcca

SEQ ID NO: 534923 - DNA, 619 bp, Homo sapiens
tggagcagtttctacactaccctaccgccagcctccacacctggaacagtttctacwctaccctaccgccagcctccacacctggagcagtttctactctaccctaccgccagcctccacacctggagcagtttctacactaccctactgccagcctccacacctggagcagtttccactctaccctactaccagcctccacacctggagcagtttctacactcccctactgccagcctccacacctggggcagtttctaccctaccctactgccagcctccacacctggagcagtttccactctaccctactgccagcctccacacctggagcactttctacactaccctacggccggcctccacacctctgacatatttgactatttgtttatgaaaggccaccagctaactgcatcctgatggaaaacaatttgtaagttactaggcactgagaggataatgaccttcaggagaggaattctagggtggtattcagccaaaggacagcagaaggaagggtaaggggacagggcagggtccagagtaggaagggtttccagggcaaagacaacaagttatatagaggccaaatgttcccatagggcgagaatgaaag

SEQ ID NO: 534924 - DNA, 619 bp, Homo sapiens
tggagcagtttctacactaccctaccgccagcctccacacctggaacagtttctactctaccctaccgccagcctccacacctggagcagtttctactctaccctaccgccagcctccacacctggagcagtttctacactaccctactgccagcctccacacctggagcagtttccactctaccctacyaccagcctccacacctggagcagtttctacactcccctactgccagcctccacacctggggcagtttctaccctaccctactgccagcctccacacctggagcagtttccactctaccctactgccagcctccacacctggagcactttctacactaccctacggccggcctccacacctctgacatatttgactatttgtttatgaaaggccaccagctaactgcatcctgatggaaaacaatttgtaagttactaggcactgagaggataatgaccttcaggagaggaattctagggtggtattcagccaaaggacagcagaaggaagggtaaggggacagggcagggtccagagtaggaagggtttccagggcaaagacaacaagttatatagaggccaaatgttcccatagggcgagaatgaaag

SEQ ID NO: 534925 - DNA, 588 bp, Homo sapiens
ctgtttctgagtccttcataaraacgttattatgtaacaaactatgctctcagagacattatagtagataaaatgatgggttttcatagggtattctaagagtcctcgtggtctgatggcatcaaattgattttgatttcattaaatttaattctacaagagtcagcatggaacagataaccacaagctctctaatgatctgacatggttcaaggccatattttagaatatcgtgcacataaaacaggctctgtcatctttacaatcaagatttgatgaatattggagacaaaagctaaaaacatccagtaagtatttggaaggtacacatttagcattgagagttgaatgaggacttgtgaatgaagacactggagctggattggggttggctgcccttaggaaagccaagaagcttgtggagacatagttacctgcccaaagataatgccacatttcaataggaaaatggctttgcatattttcccatgcacaaatggacaacggaacccccgaagttattgcctgtgtgactccagtgattttaaccttcaaaaatttaaggcaggtagagatagagaaccatgg

SEQ ID NO: 534926 - DNA, 531 bp, Homo sapiens
tgtttctgagtccttcataagaacgttattatgtaacaaactatgctctcagagacattatagtagataaaatgatgggttttcatagggtattctaagagtcctcgtggtctgatggcatcaaattgattttgatttcattaaatttaattctacaagagtcagcayggaacagataaccacaagctctctaatgatctgacatggttcaaggccatattttagaatatcgtgcacataaaacaggctctgtcatctttacaatcaagatttgatgaatattggagacaaaagctaaaaacatccagtaagtatttggaaggtacacatttagcattgagagttgaatgaggacttgtgaatgaagacactggagctggattggggttggctgcccttaggaaagccaagaagcttgtggagacatagttacctgcccaaagataatgccacatttcaataggaaaatggctttgcatattttcccatgcacaaatggacaacggaacccccgaagttattgcctgtgtg

SEQ ID NO: 534927 - DNA, 483 bp, Homo sapiens
tattctaagagtcctcgtggtctgatggcatcaaattgattttgatttcattaaatttaattctacaagagtcagcatggaacagataaccacaagctctctaatgatctgacatggttcaaggccatattttagaatatcgtgcacataaaacaggctctgtcatctttacaatcaagatttgatgaatattggagacaaaagctaaaaacatccagtaagtatttggaaggtacacatttagcattgagagttgaatgaggacttgtgaatgaagacactggagctggattggggttggctgcccttaggaaagccaagaagcttgtggagacatagttacctgcccraagataatgccacatttcaataggaaaatggctttgcatattttcccatgcacaaatggacaacggaacccccgaagttattgcctgtgtgactccagtgattttaaccttcaaaaatttaaggcaggtagag

SEQ ID NO: 534928 - DNA, 603 bp, Homo sapiens
caaattttgaaattctctttggcttccctaaactttgtctatataaacgatcccaaacttctactttttggagcacttgtaaacagacagggagggattataggaatttagtcaattagagcaatcagcctgttatacagccttctaccctgcagcctattcttccccaaatcctggatggaatggtttaaaccatggtcaccttgttggtttaaaccagctcctggaagaccccaagcaatttacagataaacctgagctttcctcttgagcatgctacagtcttcacctcaggaggaggtataccttcgttaccataacacgtagtttatgtgctgacatgatgactcactgtgtctgcgcaactgaaacctctcctctacttgtgatgatgcccctcttccctctcctttgccctataatgccctccttttacctttcccaaggggagacaytgttttgaagaattttcccagtgttcccctcctgccaagtaataaaaatcctattgatcataacctatgctatcttggagagtcttttgttacttggtaggttaacgaacgctggtattttgggggtaacacacagacttccattttt

SEQ ID NO: 534929 - DNA, 585 bp, Homo sapiens
aaacaggatggagaacccccaaacagccatgcatgtatcaacacgagataaatgagaacaattgcaggttattatgagaaacattaagattgctatgacaactggcttctgcatttttaaaaattgaccattttggttatttttctatttataccctcataacagttctctggccttctctatcttttggtcgcctgggaaagctaactttatgaactctcttacataaacttccttggcctttggcttctgattaggttcagctaatgacaaagaccagtaaaagatcaaaaggtaagagacaaagacctaaatgtattttcctgagcagcaatggctttattgcctcagcaatgtcacatctctgagagcacaatgtctgctccstgtccccttttgttttactctcgtgaatacccatctctttcagattacaggtggcaatgacttcacacaaactgctgaaatctgcatgccaatatctttcttatttctttctttaactctattcacacttctgtaaaaaggctcctaattaaaccctttcccaaatccagaacctgactgcgtttttctgaaatttga

SEQ ID NO: 534930 - DNA, 632 bp, Homo sapiens
ccattccttgatcctacatactgttctcttttgctgctggagctgttgacaatgctgttatctgaaagtgtgacctttttgtatctcaaccaagttgaaacccattgtccttatrgtgacagattttcaaacaacctgggaaagctttttaacatttaacacctaacagaatttacacatatttctcacttgaattcttaaagggaccactgacacttcagggcataaaattaagttttaattgcacagtatcattaaaatacaccacgtagggagagttacactagctgcaacaccaggtgttttacttttccttaaacaaaaagttttcattcattctcaactatggtgttgggggcggggattgggggaacttgcacaataagcaagaaaatttaagacaccaaaaaatagctgttcatgatttggggttgtgctcaatttaagaagcttcagactcacagatctcttctggcagagctctgtgtttcaagagtagtgtcctgtgctctccccctgcttttcaccaggctcctgcgccacctcccaccacgtgtagttctgctgtcagcgaaggatttgggtcttggtcttcctaaatatctctccacttcttggattttccgtttaca

SEQ ID NO: 534931 - DNA, 637 bp, Homo sapiens
tccgtggcacgttccctctggcctcaggctcctcgtcgctaatgcttcatcagtgagccccaagatccttttcaactctgacactctgtgaaacctcaccctgaattctaggagcccaggttgttgatttgtgttgcacagttaaacgcttcatgcttgcgtgaggctgccgttctctggaacactctgaagcagcggcttccaaacgcaggtccctgcaccaagctgaatcataattacctgtagggctttataaaaacacatatgccaggccgccacaccaaacccacggcgtcaaaatctcaggggcggagcctggggatttgtattattagaaatctcccaggtgagcccggtgctcagatccacccgtagaaccagttgtgcagctgccgcacctgcgtttccgatgcagcacctgccacctggtgcacatagaaggtactgcagggatcctgcaggtccaggcagctcactgcaaagggtggaagaggactctgrggtttctcatctgggtaaccagctgtcagatacagctgggcttaaatcctcacactgacacctccagcaatgtaaccacaggtgcacttagaaaaattgggtggaaatccagtgtcaaatgtgggttctctcttgg

SEQ ID NO: 534932 - DNA, 550 bp, Homo sapiens
agcttacagtctaatttcactgcagatccggtgatatttcatcagcttgctaacctgggattaaaagtcatgaatcctgtaattcttctgagctgctggacaccagaactgccaaacgacagcccaaggagtatttgaaacacaacttatgtgactagctcctcttgccaggtacatttgtgataccctacgtctgaggaatgaccacctaaataacagaatttcaggcacaggacagagaatatattcttaggtaggaagccattccagcacttgtcaagcctcttccacctgcatatgagcccacacttgggcctgaaggccaccaacactctcctgagtcaggcctggtcaggttcactagatgccagactaggtcactgggtattaatcattgccaagggagccrttaaactgaaagccagttcattaaagattaagcttcatctccatagccctccaggaaagggagttttgggtagggagccaggccctattccaggaggtcacctactgtgaacaggaggcatcaggagcatctgagtagaga

SEQ ID NO: 534933 - DNA, 603 bp, Homo sapiens
taatgaataaataaaaatattacatgtgctttttaacctttatactcaatgctgtgtaaaacattgcctgatgctgtgtgcattgtaggctcagtacatatttttaaaatgaactaatttattttattcagccattaatttgtatctctatcttgctgcagtttaggtataatctcatacttatcttgttaagaacacattagcctcagacaatagacacaaaaatcataaccacaaatatgtaattgtaatactgataactgcattttaccaagtgctccaggtttcaggccctaggttgattgttttagatattttatctcatttaattatcatacttattctatgatatacatcatcgtcatttaaaaattagaaatttgtttaataagccaaaataacttgtcctcatttatattactattgtaataagtatcaaagctaattccgcctttagctttgtaaagctgtgtaatctccaaacccattccttttaatcattmcttgggaactatcacttgcagtctctctctctctctctatttctctctcaatggccacactttagctatctttcctcttttcttttacaacattaaaaaa

SEQ ID NO: 534934 - DNA, 556 bp, Homo sapiens
tatttgctcttctgctcttcttcctcttcttcaaacacacctgcgtgttcctgcctcaagagcttttgaacccagttcatttttcctggaacaatctacatttacttcattcatgtttctcatcgaatgtcatattcagagagacaatttcttttaaaactttgataaagatagccgttctccctcatcttrtaagtttctcatcttaacccgatttgaagtttcttaatgccatttgttataattattaaatatactgtttattaatttgctgattttctttgtgtttgatatatatatacttcttttttatagctcttctttcagtaagattaatttcttggaagatgttggtatcatattttactccagtgtttctggaaacacagttcctttttaatatagatttccttttatgtttttaatatgctatttataatcaagagacagaattttaaatctatcctttgaaacactcctcatgatattttaatattctgcagcactctctgcctttgtgaaaatcattgacataattacagttttccaatgttag

SEQ ID NO: 534935 - DNA, 580 bp, Homo sapiens
gtatctaatgcaacatctgggagctggcaaatgcacaaagtgctcccctctggcatatgcatgactgataagtaaatatacagcctgagtacaatttattaayatagagtcagattataatacgtagatgtgtgtaaaaatatgaaatttcatcaaattatctcagcctaataagtttctctacatttaaagttatatttcagtgtgaaaaaccagaaacctctattgggaaataaaatatctttttctatgattttatgccatacaaattgcatagaaattgagatgtgtttcaacagctttataacatattgtcagtatgtattaactgcctagttaagaaagtgaattttaaaatcaaatacaaataccctcttattagtaaagacagcatatcctgcattaaattaaaaaaattgcatattaagaaattctagttttattaggattattgatttttttccagggagttatagtgcttaaattaatttcaatattatagtttgtactaatattatttttgacgctcattcaaagtagggaaattttaaaagttgtctagtttttagtttttaatttc

SEQ ID NO: 534936 - DNA, 580 bp, Homo sapiens
gtatctaatgcaacatctgggagctggcaaatgcacaaagtgctcccctctggcatatgcatgactgataagtaaatatacagcctgagtacaatttattaatatagagtcagattataatacgtagatgtgtgtaaaaatatgaaatttcatcaaattatctcagcctaataartttctctacatttaaagttatatttcagtgtgaaaaaccagaaacctctattgggaaataaaatatctttttctatgattttatgccatacaaattgcatagaaattgagatgtgtttcaacagctttataacatattgtcagtatgtattaactgcctagttaagaaagtgaattttaaaatcaaatacaaataccctcttattagtaaagacagcatatcctgcattaaattaaaaaaattgcatattaagaaattctagttttattaggattattgatttttttccagggagttatagtgcttaaattaatttcaatattatagtttgtactaatattatttttgacgctcattcaaagtagggaaattttaaaagttgtctagtttttagtttttaatttc

SEQ ID NO: 534937 - DNA, 580 bp, Homo sapiens
gtatctaatgcaacatctgggagctggcaaatgcacaaagtgctcccctctggcatatgcatgactgataagtaaatatacagcctgagtacaatttattaatatagagtcagattataatacgtagatgtgtgtaaaaatatgaaatttcatcaaattatctcagcctaataagtttctctacatttaaagttatatttcagtgtgaaaaaccagaaacctctattgggaaataaaatatctttttctatgattttatgccatacaaattgcatagaaattgagatgtrtttcaacagctttataacatattgtcagtatgtattaactgcctagttaagaaagtgaattttaaaatcaaatacaaataccctcttattagtaaagacagcatatcctgcattaaattaaaaaaattgcatattaagaaattctagttttattaggattattgatttttttccagggagttatagtgcttaaattaatttcaatattatagtttgtactaatattatttttgacgctcattcaaagtagggaaattttaaaagttgtctagtttttagtttttaatttc

SEQ ID NO: 534938 - DNA, 653 bp, Homo sapiens
acaacagaagcattttgtcatgtggaaatttattgtgatataataatacatttgtataccccagtgagataaatttgaactcatagtcaccccataccagaatcaaaatactaaatgtgtgaagcttgtttattcttacatgtcaacatgtgccagattatcctacacaaagtatgtaaaattcatttgcacaagaaccatcagattcagaataaacagtttcaaaatgcattagggttaacacagcaaagaatttggtactcagtagagatgaacagcattgaaatgcctgttaactgcctctttactgaggaagcacgtgctatttggatgctttttagcatagtaaatctatttctatgcttcaaacataacataacaagaaagacaacatgctctactcttaagttaagaaaacatatgggcatgatgckgagttttgatgatccattcaacctggaatttagcctagacatgattcactaaatcttagattgaaaagaaacaaaacaaacctcatcctccacagacttgtgttaagttttgctttagaaacagatggcaaagtagaaaagctggctggaaattgattgaatttgaaaaatcagatgaggaaaaatcaagtaattcacaagtccaatagattgttttga

SEQ ID NO: 534939 - DNA, 564 bp, Homo sapiens
tgttgattttctattttgcatctttgctggatttctttattagttctagtaagtttattgtggaatctttmgggttttctacatataagattgtgtcttctgtaaagagatttaatttcacttcctttccaatgtggatgccttttaaaaatttcttcctttttttttttgccttattgctctaaataagacttccagtaatacattgaataaaattggtgagagtggtattgtgctttttattgttatgatttctttctagtttggccttgaggtctctctgctgagagtgatgagacatgcttccttctttcttgtgtgccttgttacatttgtcgttgttgtgatttgtccaatagaaaaaacagccacctctttcagtctttacagagtagcttctcacaatggaaggccttccccaatcaatcaccctggctaggcattctgtggtcctctcaaaccttttatggggatatttctctgatcttgtgcctgtaatgtccaaatttgagacatttgttaatttccctttcagaggtttgtaatttcttccttcctctggtg

SEQ ID NO: 534940 - DNA, 586 bp, Homo sapiens
aaatagagcaagcaaggtggaagccaaactgttcaaaatctaatttcagaagtaccatcctgtcacttttgctgtattctatccactaaaaggaagtcactagatccagtctacaatcagaagaaaaaattacacacagacaaaaattgacaaatgaaagccatcttagaagttgtctaccacagaaggtatgaaatgcatacatgctttaaaatgtrttatatgtattacagtaatttatgtagattttttattctaatagtttatttttcaacattaccagaaaattaatcatcctttaattattttgtttattaaagctaattggagccattgggaagtaaattatctaatttaacaattaatttgggatttatgagaaacatttttactaagcgcagttaggaggaaaaaaaacactaccaaagtttttcttaaaataatattaaatgaggttgtcgtagtagaaaaactcaagtttattgattttagaatttttattctaagtaactatacaaattttaggattttgatatttcaaaatagattcacggaagtaatgtgaaattttgtcagctatcttcat

SEQ ID NO: 534941 - DNA, 524 bp, Homo sapiens
ggcccctccatatttgatttcccagcatacaaaactgtgagccaatatatttgtttctgttcattatgaattaccctatctgttctaatatatataacagcacaaaatggaccaagacagtcaacaagaattacctcattttcacaaaaacagtaaagacagacaaggtcttatgttttcttctgttctctgagtatggcactattattctcatcttcattgctaacagactcttttttcctagcttctgtgacaccatacgttcttggctctcttatgtaatctgtgttcatttttttctcgatcttatttctagacaactgttcatctctttcacccttaaaatgctgttgtttcctcaaggttaagcctgtgttataacatttttcccttttgcagaattatcttaactaactttatgtactttcatacttggtcaacacaaaggacgagtgagtcccaaacttgtgtctattatcttcattattatacaaatgrttacatatgctactatattggtatct

SEQ ID NO: 534942 - DNA, 608 bp, Homo sapiens
ctgcatggtgcagtaactgcctctatttcctgtgtgtgggtgtggtgggggtgaagggttaaaatgagggtgtttggcagacaggatagaaagttgaaataagtaacggaatgagtaatttatgttctcgcctgagacaggctgctggatagcagcagttcatggcaaactcattgtcttagtctgttcaggctgctacaactaaatatcttagtctgggtaatatataaacaatagaaatttattgctcccagttctggaggctgagaagtccaagatcaaggcataagcataygcagtgtctggtgaaagcttgatctcttcttcaaaacagcatcctcatgttgagttctcacatggtggaaggggtaaaccagctcccttcctattttataagggcactaataccattatgagagttgagccttcataacctaatcatacccaagtctccttctcttaatagtattggattggggattagctttcaacagaggaatttgggaggggagacacaaacttttaggccacagcattagtctttattccctttctaataactatgtgtgtgtgtgttgtattaactttaggttcaaaacctgtgctaa

SEQ ID NO: 534943 - DNA, 600 bp, Homo sapiens
agtcatgtaatgtcacaacactatttaaaagtatacaaatattaccatctcaccttagaaccaattacttagtttttgtcatgtcaaaaaaggtatacattatctggtctctagcttcctgttttccctatcactttgcctcaaccatatggcttttgcctcactgatttcctttctgacactgtagtaactgaacccattacacctatccctctgctctatgtttacttttttctctccttggacgattatcttgcagagatcctcatgggtcatttcttcatcatgttcaagtctctgcacaaataacaccttatcagagaagtactcatgaatgactaaggtacgtagcaggtctttcatcactttagttgatttttattttaaaacctgtcaactccgacatgtttatctgcttgkttttttgtttatgtaagtttttgtaagcaagaatgtagattttattgctcactatttgggctttgttccctgtgtctagaacttacctgggaacaccaaatgtgctcagtacatatttgatacattaatgaatgaatgtttagaaatttttttagcaatttctctgagtaaacattggag

SEQ ID NO: 534944 - DNA, 591 bp, Homo sapiens
cttaggcacatacctatgaaactgggagcactaaggaaaaacagaaacttctaaaagatcctatagaggaaaaaaatggttacctcctaaacccatctttactaaaaatacaaaattagcagggcrtggtggcttgtgcctgtaatcccagctactcaggaggctgagacaggagaatcacttgaacccgtgaggcagaggttgtggtgagccaagatcgtgccataacactccagcctgggcaagaagagcaaaactccgaaaaaaaaagaaaaaaaaaaaaggtaacctcctagggaatcagaatcagaatagcttttgacttcttattagcaacattggatgctagaagacaatggaataatgccttcaaagttctgagggaaaataattttgaccatagaactctattcccagccaaaccactagtcaagtaaagaggaaaaagcacatcaaacatggcataaattatagtttataattctgaaaaaaattaattgaggatgaactccagcaaaagagaaacaccatgaaagaggaaggcaagggatatcaggaagagtcggtctaacttagaagggcagagagaga

SEQ ID NO: 534945 - DNA, 523 bp, Homo sapiens
ggattacagccgtgagccactgcgcctggccaatatttgtccttttgtgtctggtgtatttcacttagcataatgtcttcaggtttcatgttgtaccatatgtcagaattttattcctttttaaatgctgagtaatattccattttatatattttagtaattttttgaaggactgaataggctcaagtacagcaatgacatattttttgttcatttccctgttatcttttttgctgtgaactgtgattttaaatcatgaaattaacattgaactatgctagagatactagttttgggccacatcttctgttctgaccttaggtaatccactttgcttgggttgtttgtcttactcagttgtaagaktttattgtaaattctggatacaactcctttatcagatatgtgttttgcagattttatctcctagcctattgcttgtctttccattttcttaatgatgtcttttttttttttttttttttttgcaaaaatagagatggggtcttgcattgttgcccag

SEQ ID NO: 534946 - DNA, 523 bp, Homo sapiens
ggattacagccgtgagccactgcgcctggccaatatttgtccttttgtgtctggtgtatttcacttagcataatgtcttcaggtttcatgttgtaccatatgtcagaattttattcctttttaaatgctgagtaatattccattttatatattttagtaattttttgaaggactgaataggctcaagtacagcaatgacatattttttgttcatttccctgttatcttttttgctgtgaactgtgattttaaatcatgaaattaacattgaactatgctagagatactagttttgggccacatcttctgttctgaccttaggtaatccactttgcttgggttgtttgtcttactcagttgtaagagtttattgtaaattctggatacaactcctttatcagatatgtgttttgcagattttatctcctagcctattgcttgtctttccattttyttaatgatgtcttttttttttttttttttttttgcaaaaatagagatggggtcttgcattgttgcccag

SEQ ID NO: 534947 - DNA, 528 bp, Homo sapiens
tgacttgttcaggctgggtgtggtggctcattgcctgtaatcccagaacggtgatcaaatgatccacccacctcgacttcccagagtgctgggataacaggcgtgagcygctgcagccagcccctccatctttttgagcaaccacagatctaacatcaccagccattgttgagaaattaccccagtcatacagtaggaactttagaaagaaatttaactccaagggccaattcccatttgcgaagaggacaggataggcaagaaaagaatttaatttgaactgaattagccaaaccatctgtagtcaatttaagatgagtctagagtagacgagttaccctttcttcttccatgtaccaggagtagaaggtgtgtatgttgggagcgggtattgggttcaggaaggaggaaaaggaatgacttttgtttaattggtaaaatcctttaaaactgtcaaatgctttcatgttcattacagaaaggaggtttctattaattgattgcctgcagagaaatagaagctctccc

SEQ ID NO: 534948 - DNA, 528 bp, Homo sapiens
tgacttgttcaggctgggtgtggtggctcattgcctgtaatcccagaacggtgatcaaatgatccacccacctcgacttcccagagtgctgggataacaggcgtgagccgctgcagccagcccctccatctttttgagcaaccacagatctaacatcaccagccattgttgagaaattaccccagtcatacagtaggaactttagaaagaaatttaactccaagggccaattcccatttgcgaagaggacaggataggcaagaaaagaatttaatttgaactgaattagccaaaccatctgtagtcaatttaagatgagtctagagtagacgagttaccctktcttcttccatgtaccaggagtagaaggtgtgtatgttgggagcgggtattgggttcaggaaggaggaaaaggaatgacttttgtttaattggtaaaatcctttaaaactgtcaaatgctttcatgttcattacagaaaggaggtttctattaattgattgcctgcagagaaatagaagctctccc

SEQ ID NO: 534949 - DNA, 497 bp, Homo sapiens
tgttataaagaactagtaacttggctgggcaaggtgtctcacacctacaatcctagtactttgggaggctgaggtgggtggatcacctgaggtcaagagttcaggagcagcctggccaacatggtgaaactccgtctctactaaaaatacaaaaattagccgggcttggtggcatgcgcctgtaatcccaactacttgaaaggctgaggcaggagaatcgcttgaacccagagggcagaggttgcagtgagccgagattgcgccacttcactccagcctgggcgaaagagtgaaactccgtctaaaaaaaaaacaactagtaactctatatgtatctacatagaaaagaaacctcagccaggcacagtggctcacatatgtaatcccagccctttgaggggtggaagtagaagggtcacttgaggccrggagtttgggaccagtctgctaaaacataacaagaccctgtctctattttaaaaagaaagaaaaaagag

SEQ ID NO: 534950 - DNA, 554 bp, Homo sapiens
aaaaagtggcctgagtgtgctttccgaaacatgaatatcccagaggtatcccgacacctagactggaacctcaaaccttcgtcatagcctggccctgcccrcctccatggtcccatcccctgtaagtttcccaccatccactatccacatctagtcccaaggaggttttagacatatcaaggtgaatctcattataggatctttgcacaagctgctcttactacctggatgtctcttccccggtgtcttcaaataataccacctccaagaggccctccttaactgcacatcccatcattcatcactgttccattacctggctcaattttcttcaggcacttattgctgtctggtaacattcgttatgggtttactgtctgtctataacaatagatgaatgtctatcttgtatcctgctttgtctgggcagctagatctgtgtctggcacacagtagaggctcaaaaaacatagaaagaagggagagaggaaacccccaaagtgtagtttagggcaatctctggggctccataagagaccaaaaagcccatatga

SEQ ID NO: 534951 - DNA, 554 bp, Homo sapiens
aaaaagtggcctgagtgtgctttccgaaacatgaatatcccagaggtatcccgacacctagactggaacctcaaaccttcgtcatagcctggccctgcccacctccatggtcccatcccctgtaagtttcccaccrtccactatccacatctagtcccaaggaggttttagacatatcaaggtgaatctcattataggatctttgcacaagctgctcttactacctggatgtctcttccccggtgtcttcaaataataccacctccaagaggccctccttaactgcacatcccatcattcatcactgttccattacctggctcaattttcttcaggcacttattgctgtctggtaacattcgttatgggtttactgtctgtctataacaatagatgaatgtctatcttgtatcctgctttgtctgggcagctagatctgtgtctggcacacagtagaggctcaaaaaacatagaaagaagggagagaggaaacccccaaagtgtagtttagggcaatctctggggctccataagagaccaaaaagcccatatga

SEQ ID NO: 534952 - DNA, 554 bp, Homo sapiens
aaaaagtggcctgagtgtgctttccgaaacatgaatatcccagaggtatcccgacacctagactggaacctcaaaccttcgtcatagcctggccctgcccacctccatggtcccatcccctgtaagtttcccaccatccactatccacatctagtcccaaggaggttttagacatatcaaggtgartctcattataggatctttgcacaagctgctcttactacctggatgtctcttccccggtgtcttcaaataataccacctccaagaggccctccttaactgcacatcccatcattcatcactgttccattacctggctcaattttcttcaggcacttattgctgtctggtaacattcgttatgggtttactgtctgtctataacaatagatgaatgtctatcttgtatcctgctttgtctgggcagctagatctgtgtctggcacacagtagaggctcaaaaaacatagaaagaagggagagaggaaacccccaaagtgtagtttagggcaatctctggggctccataagagaccaaaaagcccatatga

SEQ ID NO: 534953 - DNA, 554 bp, Homo sapiens
aaaaagtggcctgagtgtgctttccgaaacatgaatatcccagaggtatcccgacacctagactggaacctcaaaccttcgtcatagcctggccctgcccacctccatggtcccatcccctgtaagtttcccaccatccactatccacatctagtcccaaggaggttttagacatatcaaggtgaatctcattataggatctttgcacaagctgctcttactacctggatgtctcttccccggtgtcttcaaataataccacctccaagaggccctccttaactgcacatcccatcattcatcactgttccattacctggctcaattttcttcaggcacttattgctgtctggtaacattmgttatgggtttactgtctgtctataacaatagatgaatgtctatcttgtatcctgctttgtctgggcagctagatctgtgtctggcacacagtagaggctcaaaaaacatagaaagaagggagagaggaaacccccaaagtgtagtttagggcaatctctggggctccataagagaccaaaaagcccatatga

SEQ ID NO: 534954 - DNA, 230 bp, Homo sapiens
cttacaggttctgactattttaggcctccttgttttattctctgggcccttttatgagttccctgggagctcattaaagccwtcactcttaaatgacacagtttggttttaaataacccttccattttttttgccaaaggctgaaatccttcattagctatgctgagcacagtcctactgggacagtctgaaatttacatcatgtggaccttgttaggagcaatgagaga

SEQ ID NO: 534955 - DNA, 577 bp, Homo sapiens
tgactgtaggggcagtaggctgacttcttggcctcctgggagcaaaccagcagctgctggacacactcaggcttcagggtgcaggcaggacgcttctgggccatgttggtaccccgggcaggcagcagagcagcggaaacaggagctccggccagcctgggctggggccccagacacgattgcagctcctycccctgggtgtgtccctgcagccagaccgcaggctctcaggtacgcagctttcaggatgcagggtctaggagaggagcctcccatggtttggactcagcaggtgtggtgtaagacactgcctacgtgtgcttcacactctcccttaggaaccactctcactggtggacacactgaggggtgggtcagaaggtggtgccacgctactggaaggggaagctactgggtggggcagtgtgagatctcaaaggtccaagctccaagggctgacagtcctcactttgttaaatcactttttctctccttcactgagggaagggctgaggctgaaagggcagggctggggcagccactgcggcatcccaaggcaggaggcatgaacaagctg

SEQ ID NO: 534956 - DNA, 577 bp, Homo sapiens
tgactgtaggggcagtaggctgacttcttggcctcctgggagcaaaccagcagctgctggacacactcaggcttcagggtgcaggcaggacgcttctgggccatgttggtaccccgggcaggcagcagagcagcggaaacaggagctccggccagcctgggctggggccccagacacgattgcagctccttcccytgggtgtgtccctgcagccagaccgcaggctctcaggtacgcagctttcaggatgcagggtctaggagaggagcctcccatggtttggactcagcaggtgtggtgtaagacactgcctacgtgtgcttcacactctcccttaggaaccactctcactggtggacacactgaggggtgggtcagaaggtggtgccacgctactggaaggggaagctactgggtggggcagtgtgagatctcaaaggtccaagctccaagggctgacagtcctcactttgttaaatcactttttctctccttcactgagggaagggctgaggctgaaagggcagggctggggcagccactgcggcatcccaaggcaggaggcatgaacaagctg

SEQ ID NO: 534957 - DNA, 577 bp, Homo sapiens
tgactgtaggggcagtaggctgacttcttggcctcctgggagcaaaccagcagctgctggacacactcaggcttcagggtgcaggcaggacgcttctgggccatgttggtaccccgggcaggcagcagagcagcggaaacaggagctccggccagcctgggctggggccccagacacgattgcagctccttcccctgggtgtgtccctgcagccagaccgcaggctctcaggtacgcagctttcaggatgcagggtctaggagaggagcctcccatggtttggactcagcaggtgtggtgtaagacastgcctacgtgtgcttcacactctcccttaggaaccactctcactggtggacacactgaggggtgggtcagaaggtggtgccacgctactggaaggggaagctactgggtggggcagtgtgagatctcaaaggtccaagctccaagggctgacagtcctcactttgttaaatcactttttctctccttcactgagggaagggctgaggctgaaagggcagggctggggcagccactgcggcatcccaaggcaggaggcatgaacaagctg

SEQ ID NO: 534958 - DNA, 605 bp, Homo sapiens
aactaatatttgtacataaattaataacatagagatcaagggaaggagctctagcgtaagatagatatatatttgagacaatctctgccaattaccagctatgtggtcatcgacacataagttatgttctcaaagcctcagtttcctcatctgatgtcctgatctgactcacattttagatgtttattggtttaccaaacttaattccttgcccatgtatccaactgtgcttggcaaacagatcccatcttatgcttctgatcccttttcctgttattttccaatttccagttctaatttccaattgctccttttctaggccttcctaagccagagccatgctttcacagcaattaacccaggcaagccagttcagccaagtcctatacctaaaaatgcattccttgacatcactgctgagtatccttctgagagaggatggagtttcaatttagctgwttctgctctgattctgagaatagaatccagaaagaatttaggaggagaaaataaagatatttaagtagtgattgaattagatggtgcttgtaaagcatttggtgttaacaactttagatgtcaaatctgttaatagaaactttgta

SEQ ID NO: 534959 - DNA, 621 bp, Homo sapiens
tctctttcccagtggtcatggtcacagatgaaagttcctcatttttttgttctcctattctttatagctagatggctgaatgaattcaaggcccctcctgtaacctggccatctctttttctctaaaggaaactaatgcatgatgaaccctaaatttaggttcgaaataggggtgagagtggaaaataaaatgtcccagcttagactaagcttgagacttgatcacttttgactaaagtacattaaacgatcaatacattgatgttttgacacttgttctgctgttccttggatatagggttttttrtatgaaatcctttagggaggagaggtgagtagcacagaattattggggattccactatcattggctttatatcctttaaacagcaataaaatttggctcagaatctattatggatcattgtattcactccataaatgcctgttgaaccaatcaatacctcctgtccagctcacaaccaaatgtttgtcttccttctaaagcatctctctcaaataattggtctctgcttgaattataaaatatcaactaccttaataggactaaaattttaaattagaacatcagtttggtactatatttattttagagaaaaa

SEQ ID NO: 534960 - DNA, 631 bp, Homo sapiens
taatatttcttcctcactaattggcagaaaaagtaaaccaaaaaatcagttaagagtataaaagatttagaccaccatcatcagctaacatgacctaatttacattcatagaaaatacaataccccaaaatgaagaatgcatattcttttaaagaatacaggctggccatggtggctcatgcctgtaatcccagcactttgagaagcctatgcaggtagatcccttgagctcaggagttcaaaaccagcctgagcaacatagtgaaaccctgtctcacaaataaaaatwaaaattaaaaaattagataataaacagataaaatttaaaagaatacatggcacacttaccaagagagactgtattctggcccataaaactagttgcaattcatttataaaaattgaaatgataaagtatgttctctggtcacattgatattaaattagcactctaaaacaataagatagctaagaacactcatgacaaacatttggaaattaaattatgggcttctgaataatccagagtcaaagaaaaaattataagaaaaactgaaaatacttcaacctaaatgacaattaaatcacaacatatgtaaatttatgggattcaattaatactaagctgagg

SEQ ID NO: 534961 - DNA, 216 bp, Homo sapiens
tttcagttgtttcagggtattattcctctttcctctattaaactataaattgttgaagtgagaggatctataktttgtatctcaaaaatgcagaataattaactatatacctaatatgtatgtattgacccattgcctattggaagttttgacaaaataatcttgtttctgagaaagaggatcaaaattctcatagcataatccaagaccatctct

SEQ ID NO: 534962 - DNA, 216 bp, Homo sapiens
tttcagttgtttcagggtattattcctctttcctctattaaactataaattgttgaagtgagaggatctatattttgtatctcaaaaatgcagaataattaactatatacctaatatgtatgtattgacccattgcctattggaagttttgacaaaataatsttgtttctgagaaagaggatcaaaattctcatagcataatccaagaccatctct

SEQ ID NO: 534963 - DNA, 607 bp, Homo sapiens
cctgtcctccaggcagcttaaagggtgacattattttgatgaatttaaccacacttttctcagtctggatcccaagcttatgggtttcctaaaaccaagttttatcagcaattgagaaagaatatatttcccagtggggagcctcatgtgaacaaagccaataaaattaaatttatgtatatttttcatcttcaaaatagaataaaatgagttatatttaccaacatatctggaactagatgacraatacatgatagcttattgttatatataaaatcaaaatgttaatagattaattaccactgagaaatagaactatcagtccgagtgttatttttgcataatcagggcaaattacacttacacacaaggaaaaacaattttcgttataagcttgattaaaaaaatggattggagaggaaataaaggcaaaaattttttacaaaacttttgaaagtgtgattgtaaaggaaagaaaagattaaaatggtggctgaaacagaaagtctggttaaagaatgttgaaagtttagtattttgctttattaagatagtgttatgggttgaattgtgtccccaaccaaaagtatatatatatattttgaag

SEQ ID NO: 534964 - DNA, 649 bp, Homo sapiens
cctgtcctccaggcagcttaaagggtgacattattttgatgaatttaaccacacttttctcagtctggatcccaagcttatgggtttcctaaaaccaagttttatcagcaattgagaaagaatatatttcccagtggggagcctcatgtgaacaaagccaataaaattaaatttatgtatatttttcatcttcaaaatagaataaaatgagttatatttaccaacatatctggaactagatgacgaatacatgatagcttattgttatatataaaatcaaaatgttaatagattaattaccactgagaaatagaactatcagtccgagtgttatttttgcataatcagggcaaattacacttacacacaaggaaaaacaattttcgttataagcttgattaaaaaaatggattggagaggaaataaaggcaaaaattttttacaaaacttttgaaagtgtgattgtaaaggaaagaaaagattaaaatggtggctgaaacagaaagtctggttaaagaatgttgaaagtttagtattttgctttattaagatagtgttatgggwtgaattgtgtccccaaccaaaagtatatatatatattttgaagtcctaacccccactactttgcaatgtgactttttatttagaa

SEQ ID NO: 534965 - DNA, 586 bp, Homo sapiens
tttatttggcattctgtttgcatcacagtatagtaaggatggggtgattttgttcttagagtcccaggccactggcatcccagacactctgccaatatgctttgtgatctctgaaattttcttagctttttttttgattgtataaatagggagaaatgatcattcttgatatacgtatatacatatatatatatakagagagagagagagagagagtaaatttaggtcatgtcaatgtgtcagagaaacataggaaattcagagataaatcatagcaaaattatcaagtcagtgaagtgagtttttcaaaatgtgaacctcctctatgtaggctttctgagttgacttttggtgtcactctgagggcagttcattgtccttggacatgtattctttatccctctcttcccctcagcttgccactatgtacttcattaaatttatttgataatcctgtcagagattaggctaaagttggggataatattaagaaatgaatgtggataagacaatgaaaactgtctcatataagtagagaaatttaaactctctttggcaagctcttgttcccaatattgctgactcc

SEQ ID NO: 534966 - DNA, 206 bp, Homo sapiens
accttggtccacagggatggagctttcagccccagcaacagagcagcgggacagtggaatgggtgggcctgtgccgactcacgcccttctctgtggacaaggagaacggtaacgatggtgacggtggtggctgtgatracagtggcagccagcagcactgaggcaggcactggttcaggccattcactggacctttgcagttaaac

SEQ ID NO: 534967 - DNA, 469 bp, Homo sapiens
tttgcacaccgcttccaccagatgccttctgacctttgcactctggcccctcacactacctactctccccggcacacgcmttcctcgctcaggttccagtaccctgaacctgggtggggtcacgttgaggatatgctgagagctgaatacaaattagaaatacagactcccgggtgggcgcggtgactcacgctcgcccgtaaccctagcactttgggaagccgaggtgggtgggtcgcttgagcccaggagttcagaccagcctgggcaacagggcaaacctcgtctctactgaaaatacgaaaattaggccgggcgctgtggctcacgcctataatcctagcactttgggaggccgaggcgggcggattgctcgaggccaagagttcaagaccagcctggccaacatggcgaaaccccgtctctactaaaaatgaaaaaaaaaaaaaaaagtaacagagcatggggt

SEQ ID NO: 534968 - DNA, 435 bp, Homo sapiens
aacacattcttctgttactcaggcagaaaaaaaataaataaataamccagacaggcccatgactcagttagcagatgcccacacaaagatagggtggccaaccgtactgatttgtttgcccaggactgtcccagttttagcattgaaagtcccaccttccaggaaaccccggtcccgagcaaaccaggccggttggtcgccctacttgccaatctcgcctgttgacagcaaagccagagacaggagagccacacccccgcgctttgctccagcaacagggaactgcctgtttccctgctgactttaacctccttccctttacccacagggccgcccttccccttcccagccccctaacttacctgtcgccctgtcatcctccaggcatcactccccgtccaaggccttccgtcactcctctggcgcaggtaagtt

SEQ ID NO: 534969 - DNA, 435 bp, Homo sapiens
aacacattcttctgttactcaggcagaaaaaaaataaataaataaaccagacaggcccatgactcagttagcagatgcccacacaaagatagggtggccaaccgtactgatttgtttgcccaggactgtcccagttttagcattgaaagtcccaccttccaggaaaccccrgtcccgagcaaaccaggccggttggtcgccctacttgccaatctcgcctgttgacagcaaagccagagacaggagagccacacccccgcgctttgctccagcaacagggaactgcctgtttccctgctgactttaacctccttccctttacccacagggccgcccttccccttcccagccccctaacttacctgtcgccctgtcatcctccaggcatcactccccgtccaaggccttccgtcactcctctggcgcaggtaagtt

SEQ ID NO: 534970 - DNA, 643 bp, Homo sapiens
cttattcagtgattcattcattagaaactattccagtcacctagattgtatttgtgctgcactcactgaatctcccagtgttccctcagcattyacaatctaagagctttctgggtacgaaatgttctatccatcacatcttcaatttatgaactactaattgactaaaaggaagggggattttagatcattgattagtccacattttaaaatcattagttaaaagagacatacgtgtatattttttgcagatgacaatattgatatgtgggatgacacaaggaagatacaacaacctaagaatggatagcttgtgctagaaaatcaattacaaaatcttatatggcttttcctccctgccagatgtcattccggcatgttgcgtatattaattcatgtaatgccaccacaatccattattaaccgtattttacagatgaaaaatctggtgctgtgagaagcttgcccagtggcactcatgcagctggcaatggccagagccaggattggtgccaaacacttgactccagaatccctgctcttgaccactattctacccactccatacctaaatcccagttcgttatataaaagagttgtgacatagtatgttttctctcataatactttaaagttaaatcaa

SEQ ID NO: 534971 - DNA, 594 bp, Homo sapiens
ttaggtactttccaacaaatggctcttgtgtactttgcacatgaaattgctgaggcacatcaggagacggaaggagctcatgggcaggcaaatgtgaccagaatgtctctactgcagtctaagcccccacgatcaagtccaccccatgcccaagccctacatgcccttgcaggtacctcccctcycaccaggccttcccaacagtgtcagcccccagagctctccctcctctcatctcctgtatcatttactgcctggcctgcgatcccagtcctggctgttcttgggaattcaccggaagcccctggggagctttcttggcactgtagagttttggaccgacgtccagatctatggaactgagatcgaggagagtttggctagcaaatctgcaattttaataagcctcctaaatgattctgaaagaggcagccttgaagggcttcatattaagcaccattcaattttcgtcttatctccatcttgtattctcaaccatctgtgagacctgaaggaaagaaattagacatatttctttgtatatataacatctagcccattcattaattcattccctcaaaaatattgattgaa

SEQ ID NO: 534972 - DNA, 594 bp, Homo sapiens
ttaggtactttccaacaaatggctcttgtgtactttgcacatgaaattgctgaggcacatcaggagacggaaggagctcatgggcaggcaaatgtgaccagaatgtctctactgcagtctaagcccccacgatcaagtccaccccatgcccaagccctacatgcccttgcaggtacctcccctcccaccaggccttcccaacagtgtcagcccccagagctctccctcctctcatctcctgtatcatttactgcctggcctgcgatcccagtcctggctgttcttgggaattcaccggaagcccctggggagctttcttggcactgtagagttttggaccsacgtccagatctatggaactgagatcgaggagagtttggctagcaaatctgcaattttaataagcctcctaaatgattctgaaagaggcagccttgaagggcttcatattaagcaccattcaattttcgtcttatctccatcttgtattctcaaccatctgtgagacctgaaggaaagaaattagacatatttctttgtatatataacatctagcccattcattaattcattccctcaaaaatattgattgaa

SEQ ID NO: 534973 - DNA, 594 bp, Homo sapiens
ttaggtactttccaacaaatggctcttgtgtactttgcacatgaaattgctgaggcacatcaggagacggaaggagctcatgggcaggcaaatgtgaccagaatgtctctactgcagtctaagcccccacgatcaagtccaccccatgcccaagccctacatgcccttgcaggtacctcccctcccaccaggccttcccaacagtgtcagcccccagagctctccctcctctcatctcctgtatcatttactgcctggcctgcgatcccagtcctggctgttcttgggaattcaccggaagcccctggggagctttcttggcactgtagagttttggaccgacgtccagatctatggaactgagatcgaggagagtttggctagcaaatctgcaattttaataagcctcctaaatgattctgaaagaggcagccttgaagggcttcatattaagcaccattcaattttcgtcttatctccatcttgtattctcaaccatctgtgagacctgaaggaaagaaattagacatatttctttgtayatataacatctagcccattcattaattcattccctcaaaaatattgattgaa

SEQ ID NO: 534974 - DNA, 598 bp, Homo sapiens
acctgcggtcccagctactcaggaggctcaggtgggaagattgcttgagactcataggtgaagactgcagtaagtagtgatcacaccaatacactccagcctgggcatcagagcaagaccccatctctaaaaaaacaaaactcttgcaaaaaggaagaaacacttttttttaggttatttgttgatgactttttccagcagcatgatccatttgtgaaggattccatagaaaacrgacaaaaaattacccccagtatattgctgattttattgttatgtatataagaatattctcaagatttggtagaggcagaggcatgggtacagaggaggaaaaaatgaaatttattcagaatagatgttagtgtttgaaaaatgcttagacttatttcttaattttactgaagagcaaattgggaatcaaaaaagtaaagcttcttattcaatttcattgtggatcttaaacaagttgcttattactttgcaagcccatttgtgttttaaaattatttctgttctgccttgaggtataatgtattaccagcagattaagatgacatggaagtctttatcttcagctttgatcgcttctatagct

SEQ ID NO: 534975 - DNA, 630 bp, Homo sapiens
  misc_feature (1)...(630): n = A,T,C or G
ccagtttctgaatttactggggtcttaggcaggagatacaaatgtagtttccctcaaggagcttgcaatcaagtcattgtttcttaattacctttaaaatatattttaatggaatgaaatacagatttagaataagacttaccattttaaagtgtacattttagtaatatgtagtgtattcacaacattttacagccatatgctctattcgttcatttcaaaacattttattactccataaaaatgcccaatattcattaagtaatttccttccacctcctacctcccattgtattgtaaaccttaatctactttctgtctctatagattggcccattctggatatatcatatttacaagaaagattcaatataaaattttctgttctggattcttccacttagcataatggttttatagcattataatattatatatacatatatgttatatttatactatgtgtgtgtgtgtgtgtgtgtgtgtgkgtgtatactacggttgttttacccattcattgatggacatttgcggtatttcaaccttttggcttgaatacaaatattggtgtacaggtttccttgtagacacattttgttttcttttgngtatatacctagaaatggaatt

SEQ ID NO: 534976 - DNA, 509 bp, Homo sapiens
agaattttaagcattaaggtaatatgatttgattgacatcaaattgccaaaaatgaaaatgcttagattaatatataggaaatgaagagcamgaaaattacatgttttactaatagattttgtgtagtacctgaagaaaagtaggaatcaaaaaggagtcataaatttttggcctgaaaatctattggttggtgatgctatttactgagatgaagaagacttaagaataaagggctttgtagggaaaccccagagttttgtttttgacatgctacatttaagaattccagtagacatttctatttgatagtacttttttttagttgcaagtgacataagcccatcatactacctgcatttgtttttatatattgcatagcaggttacaatgaacttggtggcttaaagcaacacacactattattgcatgtttttggtgaatctgcagtctaagaaacgtttagctagttcatctgcaaggctgtaatcaggatgggagcaaggtatgt

SEQ ID NO: 534977 - DNA, 510 bp, Homo sapiens
cacttttttattaaaactaagacacaaacacacacgttaaccaaggcctaccagggccagaatcatcaatgtcactctcttctactcccacatcttatctgaaaggtctaagacatcactaggtgctggcaatttttcagcaccattatgaacttacrggaccactatcataaatgcagtctgtcattgaatgttgtcatgctgtgcacgactgttttcatctggtcttggaattattggaggaaactttcagatattgtaaatagattcgccaaaaaacgtgaccttcagagaattgtcaatgatgcttttaaataatagattcttatcactaacataaaatagatgtttcaaatgcaaaatttaaatcagtattgttaagaataattcttcgttactagtgtttatttttctccacatgaatccatttattgcatttataaataaaagttgaatttaatgattgggaaagaggaaaatttatccgtccaacaataaaattttgattaa

SEQ ID NO: 534978 - DNA, 655 bp, Homo sapiens
tacaaggacaaataagtgattgaatttgggaataagaaagtcactggtgacatagaagaaggtagttttaatagtaattggagtcttagctagattacaaagtgcaaaggagaaagtgggtggtaacaaaatgcaggcaatagaaaataaatttttggtttttgacaagtttagaagtaagaaaagatgtaaatttggatggtagctggagaaaggaataatgtggaagtaaatttttattttaggatatttataggcttagttggaagaaccagaagaaaattatagactaaagrtaaatatcaaaagggggggtgccatggaaactgctaatcatgcctcaatatctctctcttccttccttagtaatagaaacatcaaattttgtctaagctcatgcaaaggtacattacccaatcaccttggaagctaggtttggctatttgactaacctctggtccatgggatgtaagcagaaggaaatatgtgcacttctagaaagtgatctgaaaaggaaggagtacccttttcttgtccttttttctgcttcctgttttctggactgtgtacctactggatagaattgtagttcttggtttatgagacagacattgtggtgaaagtgttatgttgggaataggaacaagatataagg

SEQ ID NO: 534979 - DNA, 645 bp, Homo sapiens
tgcagtcagccagaagtattcccagaaactgggggaacgagcccttcagttcttacagggaatcttggcagtgcatcacagcatccactacaagtgtctttcttgaaataattattatatgagatattaatcagtgtttcaagaagaaaaatgacttctatggtcaactcagtttagcaaatcctaggctaaacaagttttttttttaagtggaagaattttcagaaatttaaatatgctgttttaaatggtgaattgtsactctccaagggtgggatagaataggtagaagatagcaaccacaagtgaccagaaggcacatgttttgaggaatatcccttatgcatagtactactgaacatcagtttaaacaatgctgtttcagaggcaacggtgacaggaaaagtactatggggatcattgggatggggatctggagctctagtatctcagattttgtctcaaccaacatgacaaagcacttgtcatggttcaattattagcaagatctattacctgtgattagattgctgtagactattaaatctgatccgtgactaaatcaaacaggacttatctattaatgaaagtctaacttagtatgaagacaaagtatttgctttattgttgactacacttcttctc

SEQ ID NO: 534980 - DNA, 429 bp, Homo sapiens
ggatatttgatgacctcatggtagaatcacatcaattgggtgcagtggctcatgcctgtaatccccacactttgggaggctgaggcaggtggatggcttgagttcaggagtccaaaaccagcctgggcaacatggcgaaaccccatctccacatctccacaaaagatacaaaagttagttgggcatagtggtgtgctcctgtggtcccagctcctcaggagactgaggcacgagaatagcttggacccaggaggcagggttgcagtaagcagggatggcaccactgcactccagcctgagtgacagagtgygattaccgtctgaaaaaaagaaaaaaaaagaaagaaaggctgtggtctggggtggaccgaggctcaaaagatagacaaaatgaactcttaaaacctatcaaacttgttagtaggatta

SEQ ID NO: 534981 - DNA, 489 bp, Homo sapiens
gagaggctagatacatttatttatagatataagtgtagttcatgggaagaaagccaccgcacttgtatttgatagaaagcttcctggagattcttcagacttgtgtgccttgtgattatttgcctgggaaagcaacccaagttcgccaaagtaaagagtcagcacatgaatccctttgtacttttttggccattccttgtcctgagtgatacacagaatctrtgcaatcattatttatagcaagatacaagaaaaaatactatagggagctaaaggtttcagtccacaaagtgtttttgaaattaatgttgatgtcactgatgacaaccactcagaattgttcatattcttttcttagtagtgtcaccgtgatttatgacatgaacagaatatgtttttttcatatcgtctctcttacctgaatgtcaggctctgttgctatttctacttctctgtagtggtgataattgaatgaggagaagcaaaaaa

SEQ ID NO: 534982 - DNA, 571 bp, Homo sapiens
tggtcgttgaagcatggacaatcatctagaggactgtgcccttaacctgtaaagtctgacctcactccaggtagttggtgttagaactgcattgcacacatttctctgtgaactctagaacgatagagccaaaagggaaaccttactatcagtcacaaaaccatattagctcaaatggaagatatgattagaagccagatctgcagaaacttgaatctgattctcctttaatagaacaggttgcttcttgtgagcttaggtaagcaggctaccatctgagccttggtttccttatctgcaaaatagaaatcgattacataaatcaagggttggcaaatttttctgtaaagtgtcagttggtgaatattttaggctttgtggccacatatggtctctatctcatagtctccttcttcctcctcctcctcctcctcctcctcctycttcttcttctccttcttcttcttcctcacacatctttaaaaacgtaaaaaccagtcttactttacaggccatggtttgctgagcccttatataaattaagttcttttgcaattcacaacctgattat

SEQ ID NO: 534983 - DNA, 571 bp, Homo sapiens
tggtcgttgaagcatggacaatcatctagaggactgtgcccttaacctgtaaagtctgacctcactccaggtagttggtgttagaactgcattgcacacatttctctgtgaactctagaacgatagagccaaaagggaaaccttactatcagtcacaaaaccatattagctcaaatggaagatatgattagaagccagatctgcagaaacttgaatctgattctcctttaatagaacaggttgcttcttgtgagcttaggtaagcaggctaccatctgagccttggtttccttatctgcaaaatagaaatcgattacataaatcaagggttggcaaatttttctgtaaagtgtcagttggtgaatattttaggctttgtggccacatatggtctctatctcatagtctccttcttcctcctcctcctcctcctcctcctcctccttcttcttctccttcttcttcttcctcacacatctttaaaaacgtaaaaaccagtcttactttacaggccatggtttgctgagcccttatataaatkaagttcttttgcaattcacaacctgattat

SEQ ID NO: 534984 - DNA, 471 bp, Homo sapiens
tgcatcacattgaaccagtagcttaacctccacttcctcagtgtccttatctgcaaaatgagcataataaaagcacttacttcacaggtgtatgatgaggtccaaattagttaatacatgaaaataattagaccaatgtatgacatattgcaatagctataaaactgttattgctgctattatgaaacgttattgtaatctttactccctctgattgattttcctccagcacagggtgttttcccaacttagatgtaagggaatcatctgagaatcttactaacgtgtaggtgcagatccagtagatcttccgttgggggcctatgaatcagcayttctaacaagttctcagatgctactgatgcttctggaccatgcactgcacactgattagtgccttgtggttcataaactggtgttggcccacaaactgtttgtgaatgataagagtacaaaaattgagaataagca

SEQ ID NO: 534985 - DNA, 627 bp, Homo sapiens
ctgtcttagtcttttcaggtttctataacaaaatgccacagaccagggggcttataaacaatagaaatttatttttccacaattcaggaggctggacagccccttcctgctgtgtcttcacatggtagaaagagatagggatctctctggggtcccttttgtaaggccctaatcccattcatagggccccgccctcatgacctgatcacctccaaaggtcccctctcctcattatcgccttggaaatttgaatttcaacatataaatttgggtgaagaagggacataaacattcagtccattgtaccaacttaattaaaaactccccaaaatgaggactgaattgtttatttcttgttaacccttaatgtcatagtttgtatgaacatgacatattgacatgccacttaaaytctgtaagatttggtttcttcatctctataaaaacacttgttctgcctgtcttcatacaacttctatgagcataaccacaataatagtaattataatttattgagcttttatttgactgtgctctgcgactgcatatattagttttacaaggtatgtattataccccctttacagttgagtaaacaggatcaaaaccaagatccaactgtctcta

SEQ ID NO: 534986 - DNA, 627 bp, Homo sapiens
ctgtcttagtcttttcaggtttctataacaaaatgccacagaccagggggcttataaacaatagaaatttatttttccacaattcaggaggctggacagccccttcctgctgtgtcttcacatggtagaaagagatagggatctctctggggtcccttttgtaaggccctaatcccattcatagggccccgccctcatgacctgatcacctccaaaggtcccctctcctcattatcgccttggaaatttgaatttcaacatataaatttgggtgaagaagggacataaacattcagtccattgtaccaacttaattaaaaactccccaaaatgaggactgaattgtttatttcttgttaacccttaatgtcatagtttgtatgaacatgacatattgacatgccacttaaactmtgtaagatttggtttcttcatctctataaaaacacttgttctgcctgtcttcatacaacttctatgagcataaccacaataatagtaattataatttattgagcttttatttgactgtgctctgcgactgcatatattagttttacaaggtatgtattataccccctttacagttgagtaaacaggatcaaaaccaagatccaactgtctcta

SEQ ID NO: 534987 - DNA, 596 bp, Homo sapiens
tctctttaaaataatgaacattttattatttctagtactttgcgtatgaattatgcaagagtgggatttgaaaatcactgtgtggtgtggaggaaaatctgagcagttatcagtgtgtgtgatggttaatactgattgtcaactcaattggattgaaggatgcaaagtattgttccagggtatgtctgagagggtgttgccaaaggagattaatagttgagtcagtagactgggagagacagacccacccttaatctgggtgggcaccacctaatcaactaccagcatggctagcataaagcaggcaggagaagacggaagagcagacttgctgagtcttctagccttcatctttttttcatgctggatgcttcctgtccttgcatatcaggctccaagttcttcagcttttgggctcttggacttacaccagtgatttgccaagggctctcaggccgtcagccacagactgaaggctgcactatcagcttttctacttttgaggtttggggactcagactggcttccttgctcctcagcatgcagacggcctattatggggcttcrctttgttactgtgtgagtcaattctcctt

SEQ ID NO: 534988 - DNA, 553 bp, Homo sapiens
gcagtaaatcctaagagcaaagatgctcctaggcatgggaagaaaacctacatgcagggtaccaaggaagcacttccacagcaccctgctatttccatttcataaaattcctcacacataattcagctatttcacccactagtcatggctctgtagaggtgaagaccatgtctatctccacttctgtagtatacctagcatgatgcttcaacacaggataaacattctttttatttaaaaaaaaagtgttgatttaaactgaaaatagaaatacatactaaacagtactgaagtataaaatggtataagtttttcaaattgaaccataaaacrttcctgtattttgtgcccagcagcacccagagccatggagtgctgatgggaaagaagggcacacacacagggaagcaggtccactgacaccaagtacacagagtgtggaggggagagagagcacgcagcatggaggcacgctggcagctggcagctggagaccacggacagaggggttgtgggggtgaaggaagaggagatggtaacaggcagatgagat

SEQ ID NO: 534989 - DNA, 640 bp, Homo sapiens
ctgtcaggagtgtagtgccaggtcatcttaccagttgtgtcttacagttaaacaagttactccagatagcatagacaaggatctggcatctttcaaaagtattagaatgcgatcagaggaaaccacacacacaaatcattcaacttaaaatctaccatgaaattgcttggctctttttctttttttaaattcataagtccctgaagatgttgtatgtctaccttctgtttttgaagacatgtaggactacctctaggattaactgatctctgtgtttatttatttattttttaaagaaaggtcagctgtctgaactacaaaagaggggctgttagtttcccaatcttgttaagttctcccttgtggcggaagcagtttgattgaccatgaatttctgttactctttagtagttttgtaatagatcgttaatrcagacttctaggtttgaaaggttagcatctcattttgaagtttagaaattctatgtagggaaattagcttatggtctttggagattattatgccgtgttgtacctttagttattgtcataaatagctgatactaaatgaattttgattgatagagtaaaaagttaaacatatgaagtttccctttaagtctcctgtgtcgtttatgaa

SEQ ID NO: 534990 - DNA, 640 bp, Homo sapiens
ctgtcaggagtgtagtgccaggtcatcttaccagttgtgtcttacagttaaacaagttactccagatagcatagacaaggatctggcatctttcaaaagtattagaatgcgatcagaggaaaccacacacacaaatcattcaacttaaaatctaccatgaaattgcttggctctttttctttttttaaattcataagtccctgaagatgttgtatgtctaccttctgtttttgaagacatgtaggactacctctaggattaactgatctctgtgtttatttatttattttttaaagaaaggtcagctgtctgaactacaaaagaggggctgttagtttcccaatcttgttaagttctcccttgtggcggaagcagtttgattgaccatgaatttctgttactctttagtagttttgtaatagatcgttaatgcagacttctaggtttgaaaggttagcatctcattttgaagtttagaaattctatgtagggaaattagcttatggtctttggagattattatgccrtgttgtacctttagttattgtcataaatagctgatactaaatgaattttgattgatagagtaaaaagttaaacatatgaagtttccctttaagtctcctgtgtcgtttatgaa

SEQ ID NO: 534991 - DNA, 580 bp, Homo sapiens
ctgcaccattttacattttcatcaaaagtgcaccaaggttccactttcaccacatcctcaccaacacttattttctgttttttgaaagtagccatcctaatgggtgtgaggacactgatattattttagactgttgtaaataataaaatcctaaatcacgaaataatttctccccagacatcagaaaaaaatgtttacttaatttgttttccatttaaaacttttttttttctttggaggcagtcttgccatgtctcccaggctggagtagagtggtgcagtcatcgcttatcacagcctcaaactcctgggctcaggcaatcctctagcctcagcaccctgagtagcaaggactacaagcacatgccaccacacttggctaatttaaaatttttttcttgcgtagagatgaggtcttgctgtgttaccctggctgatcttaaggtcctgccttcaagcgatcctccctcctttggcattccaaagtgctgggattacaggtatgagctacagtgcccaacaacaacaraaaaattttaaatcatgagatccaggaaaaaaaaaaaaagcctgttaaaaa

SEQ ID NO: 534992 - DNA, 583 bp, Homo sapiens
ctgcttaacccgtcctcttgttttccactccatcctcatcccagccctggtggccctcagcagagtcccaggttgctacccagagaccctgccatccgtcctcttgtagctctctctgccgtgacttatcagttacctcttctctgtttttttttctttcaaagatttgttgtaatctcttgagtgagcttctcctgatcaacttgtccctatgggtcttctatgttttcattcattcatgattattttagtgagatcttcaaaggaagaagaaaccagtgagtgtaaacaggttaaactgccgtcttccaccagacatttcctcatgtctttaaacagttaaagtttcttggaaacattatttgaaggcagatgttctcctgggggacatttacaatgcttrtaactttttactattgtaaataatgctttgatcactgccctcatgcagaatgttttgtgcatctcggttacttttctagtataaatgcttagagactcagtcaaatctttgacaaaattaaaacctctgaggtatattgccagaaggccaccaaaaattttgtatcattctacccagata

SEQ ID NO: 534993 - DNA, 226 bp, Homo sapiens
gctgggtgttgcagtgcacacctgtaatcccagctactccgggaggctgaggcaggagaatcatttgaacccaggaagtggaggaagttgcagtgagccgagatagcatcactgctcactgcaatctaacttgggcaacagagcaagactgtcaaaaaaaaaaaaaaaaagaatacagrgtgatctgcgatgttaaatgccaagaggtccagtagaatgatggccc

SEQ ID NO: 534994 - DNA, 551 bp, Homo sapiens
gttcgtttcctctgcagcttccatctccattttccctccccaggagacccctggtcatgttcaggtggagcctcccgtcctctgctgtcacgtgcttcaagggacacagaccctgttcctgggtccacaggggtggttcctgataggcgaagggtattagtaaatggcatttctccggggaatctttttgggctagggtgagcacaggatctaaaatagcccaatcagactgaagacagaagctcagattccatggctgggaaagtgtcctttctctcccttccactgtgccagttactcacagttatctctcatccaaggaaagaaccttcaaccctcaggtgaagccaacgccaagcacagcagagcagagaggtagaaagcacctgggctctcagtaaaatggtggagctgctgagtcgacccaccccaaggcctgcccttcgtcgcttacacttccttattggttgagatcttgcatttgctcctccctttggttctttgacaccacaatcgtagctccsgcaactctctggtaaatccctttctgt

SEQ ID NO: 534995 - DNA, 474 bp, Homo sapiens
agaaaagccacaccatggcctctgtttttctgtgcaacagtggccctgccagggagacggtgtggggaacctgcagggaagcttttctaacgaaagggattggggaggacttctaagggagagagggagaaagtcctcaattcaatctcttcccccttctcttcccgcaacctgtttgtctactgacttctttagctgctcctctgtcatttcctgaacagatcaacattttctgaacaggcacaagatattaactaggaagctcaggtgtggaagagcagagacctcggaactcaccccaccctgtccaaaactttttcttttttttttttttyctttttgagatagggtcttgctctgttccccaggctggagtgcagtgtcaccatcatggctcacagcagcctcggactcctggactcaagcgatcgtccttcctcagcctcccaagtggctggaactataggcatatga

SEQ ID NO: 534996 - DNA, 610 bp, Homo sapiens
ggtgatgagtaaataggacttactgtactatttttacatttctgtgatctaaaaattacttcaaaataaaaagttacaatagggcatctattagtttgtaagtgaaataataaagaaaaacaaagtaaagtgagtcataaaatagatgcccacaacatattgttgaaatttaaagatgcagatggcagagcagaatgcctacacaaaacatacccagcaaaatggtgcacaaatatgctcagagaagtgtatggttggaggttgccaaatctaatagtggtgatcagtagacggaagtgtccactttttgggggtaacttttttttttttcttgagacaaggtatggctctgtcacctaggctggagtgcagtggcaaaatcacgcctcactgtaacctctgcttcctgggctcaagcratcctcctgcctcagcctcctgagtagctgggaatacaggagcccaccaccatgcccagctaatttttgtatttttagtagagacagagtttcaccatgttggtcaggctggtctcgaactcctgacctcaagtgatccgcctgccttggtctcccaaagtactgggattacaggagtgagccactgggcc

SEQ ID NO: 534997 - DNA, 641 bp, Homo sapiens
aatgaaatcatatagtatttgtcctttttttgactggcttatttcgcttagcataatgtcatcaaggttcatccatgytgcagtatgtgacaggatttccttcctttttaaggctgcttaatattccatagtgtatatataccacattaaaacaatccattcatttaactatgaacattttggttgcttctatgtcttggctgttgtgaatagtgctgcaatgaacataggtatgtaaatatctttttgagatcttgcttagaaatttttgggatatatacccagaaatgtgatcgctgggtatggtagtcccatttttaatttttttgaagaacctccatactgttttccataatgactatcattttgcattactatcatatcttccttgtttattgtttaccagagattagaagctaagtgttagaacgaagaccaaactgcaggcctctgattccagatctggtactttccccctctctgtgccaactccttggtattaggtttttccatatattactctctgatctctacaatgacccagacaagaaggaagcttaagggacactccccagaactacaggatggttgtcctgctcgctctttgtttaccaaggatccaaaggtctgagaagttgcca

SEQ ID NO: 534998 - DNA, 353 bp, Homo sapiens
gcaatttttaaacaaacacacaaaaacacaaacatctcactgtggttcttccaccaacttgtctctaaactttggcaaatcacctgacattgaatttcctgtcatgaaaggtagagagtaccctatttacccacctctgcagcacatgagaaaagaaaaaggacacatctggaaagcagtgagagaatgagagtaagcccagggtatcataccagcaagacagaatctgaagttctaattttacattctcatttccaaaaactgctgctggttctatgtttttccatatgatacggkaatctacaagactgaagctccataaagaaaagaatgatgtcttgcatttcttttgt

SEQ ID NO: 534999 - DNA, 600 bp, Homo sapiens
tggcccatagaaggtgttcagtaggtgccagtatttatctttcgcctctcgtcagtgggccctttaatctctgcctctaatcatgctcaaatcacatctgtctatggaaataaaaatccctctctggattatctcctctaccatttgttcttcctctccacttctcttatgggctctttcgttccacttctcttcataaccaaaactcttgaaagaatggtccatgcagatggaagctgtaacctgagtttcaagaaagcctggagcatgattggagagcacagggatagtggaaagtgggtagcccaggkccaagtcacgggcaagctgaggtgttggactttatccagaaggccgtgccgagctgttgacttctggcaaagaagtggtgcagtcagaactgttctttaagaatattaacctggtagcgatgtgtaggtaagagctcttagaaaattgttgcactgggaaaggtgaacttacgagctataaaggggtgaaatacataaaatcaacactaatcgaactgagagtccttggcgagggatgaggtatgggaaaagagacagaagaaatcatgatgagtgtgaggtttccagc

SEQ ID NO: 535000 - DNA, 531 bp, Homo sapiens
taggatttatgaccagccaagttaactatcrttaagaacaagaaaacatgcttcagaagaggctagcagaatcttctgctatgggtctgtaaaagccccagtgactagctagcgcaggcaaggccgcaggaaaggacagggcccccagaaataggcataacgtaaaggtccctgcctctgctgcactcccagctctcatctcctttctgaagctgctcagttctacagcctcagcacacaggatacaacatgtgagtttcaggggtaactcccttcttttacagaggacagtgaggcccaaagcagttagcagatggcagagaaggggctcagtctccctcaagctcctggcttctagtctaggacccctgcattcttccaaactctctcccttgggggtcccaaatgcagtctggtctccctgtctacctcctcatatcccgctggtctcctggtcatactgtgtcctctctccaaaacacacaaaagcataaagaaatctgataccctggtcgtgcctagaaaccccca

SEQ ID NO: 535001 - DNA, 531 bp, Homo sapiens
taggatttatgaccagccaagttaactatcattaagaacaagaaaacatgcttcagaagaggctagcagaatcttctgctatgggtctgtaaaagccccagtgactagctagcgcaggcaaggccgcaggaaaggacagggcccccagaaataggcataacgtaaaggtccctgcctctgctgcactcccagctctcatctcctttctgaagctgctcagttctacagcctcagcacacaggatacaacatgtgagtttcaggggtaactcccttcttttacagaggacagtgaggcccaaagcagtyagcagatggcagagaaggggctcagtctccctcaagctcctggcttctagtctaggacccctgcattcttccaaactctctcccttgggggtcccaaatgcagtctggtctccctgtctacctcctcatatcccgctggtctcctggtcatactgtgtcctctctccaaaacacacaaaagcataaagaaatctgataccctggtcgtgcctagaaaccccca

SEQ ID NO: 535002 - DNA, 472 bp, Homo sapiens
ctaggtccagtagggagggacctactgagaggtgattggattatgggggcggtttccyccatgctgttctcatgatcgtgagtgagttctcatttgatctgatggtttcacgaaaggctctttctcctttgctttctcttctctctcctgctgctatgtgaagaaggtgcctgcttccctttccgctgtgattgtaagtttcctgaggcctcctcagccatgtggaactgtgagtcaatgaaacctgtttcctttataaattactcagtctctggtattcctttatagcagtgtgaaaatggactaatatacttgcccttcatcccaacgatggatttaagactagagacatttcaaatagtaggttttttgccaaatgcctttcgctgtagaaattctatacatggcctttgtctgttacactggaagtcctgccacttcttagatggtggagattaaaacagcgattgct

SEQ ID NO: 535003 - DNA, 554 bp, Homo sapiens
cattagggtatccaagggtgtcagaggtgtcctcggagacgtagagtgaagaaccacccagtaggacacaagggagaccaaagtaagcaagagaagtcaaagcagggggtgattctgggaaatacctggggccaggtaggtccaagctgggggttgctgtggaaggacaatcaggtttaaagagcctgtcaggttatcaagtagtatgtttatggtgacctcatatctgagctgttttaaatgagagtcccaatgtcaaatgctcttctccaacctgtcagatcttgtgtcccaagttcatttgctgggtattctaaggcacctctscttggccaggtactgggctaagaaactctggtatatggtcagaaccaaggtgtagaattactcctctcaaattaatatcttgtgaggctgaccaatgattatgatagaatactgagggatgaactgtagaagctggagcatctggtgattaaagtagtaattttgtctttttcttaaaattgttatgactacttttgttattataacgtgatgttcttagaatataa

SEQ ID NO: 535004 - DNA, 532 bp, Homo sapiens
gtggctcatgcctgtaatgccagcacttttaggaggtcgagaagggtggatcacatgaagccaggagttcgagaccagcctggccaacatggtgaaaccccatctctactaaaaatacaaaaattagccaggcctggtggcgcacgcttgtaatcccagccactcgggaggctgaggccagagaattgcttgaacctgggaggcagaagttgcagtgatccaggattgaccactacactccaacctgggtgacagagtgagactcagtctcaagaacaatgcagtctcaaaaaaaaaaaaaaaraaagaaagaaagaaagaaagaaaatggcccttccctgtttgaatccagggttttatacagctcttcagatggtcagtctaagtgtcccacagcctgattttcttatgtttaatgcatccatagaaattttgttccctgaagcacttctcagttctgaaatgcaaaatgctggggaggagaaattaattgaaagtcatgctgtggaggacaaggtcttctttaaggtga

SEQ ID NO: 535005 - DNA, 492 bp, Homo sapiens
caaccccttgagaaatgcaagttggtaatgcccactgttccttattttccttgcctctctggctactggaaaagccaagtggtgactgggcatggtgcctcatgcctgtaatcayggcactttgggaggctgaggcaggcggatctcgaggtcaagagttcaagaacaccctggccaacatggtgaaaccccatctctactaaaaatacaaaaattagccaggcatggtggcgggcacctgtaatcccagctactcgggaggttgaggcaggagaatcgcttgaatctgggaggcagaggttgcagtgagccgaggtcgcgccactgcactccagcctgggcaagaaagcaagactccatctcggaaaaaaaaaagccaagtgggtcatggagatggacagtgaatttccacagacgtaatcagatggagacgggaacgggagctgtgactgtttgtaggatacctcgacaggagcgatacttcagttacag

SEQ ID NO: 535006 - DNA, 492 bp, Homo sapiens
caaccccttgagaaatgcaagttggtaatgcccactgttccttattttccttgcctctctggctactggaaaagccaagtggtgactgggcatggtgcctcatgcctgtaatcacggcactttgggaggctgaggcaggcggatctmgaggtcaagagttcaagaacaccctggccaacatggtgaaaccccatctctactaaaaatacaaaaattagccaggcatggtggcgggcacctgtaatcccagctactcgggaggttgaggcaggagaatcgcttgaatctgggaggcagaggttgcagtgagccgaggtcgcgccactgcactccagcctgggcaagaaagcaagactccatctcggaaaaaaaaaagccaagtgggtcatggagatggacagtgaatttccacagacgtaatcagatggagacgggaacgggagctgtgactgtttgtaggatacctcgacaggagcgatacttcagttacag

SEQ ID NO: 535007 - DNA, 492 bp, Homo sapiens
caaccccttgagaaatgcaagttggtaatgcccactgttccttattttccttgcctctctggctactggaaaagccaagtggtgactgggcatggtgcctcatgcctgtaatcacggcactttgggaggctgaggcaggcggatctcgaggtcaagagttcragaacaccctggccaacatggtgaaaccccatctctactaaaaatacaaaaattagccaggcatggtggcgggcacctgtaatcccagctactcgggaggttgaggcaggagaatcgcttgaatctgggaggcagaggttgcagtgagccgaggtcgcgccactgcactccagcctgggcaagaaagcaagactccatctcggaaaaaaaaaagccaagtgggtcatggagatggacagtgaatttccacagacgtaatcagatggagacgggaacgggagctgtgactgtttgtaggatacctcgacaggagcgatacttcagttacag

SEQ ID NO: 535008 - DNA, 492 bp, Homo sapiens
caaccccttgagaaatgcaagttggtaatgcccactgttccttattttccttgcctctctggctactggaaaagccaagtggtgactgggcatggtgcctcatgcctgtaatcacggcactttgggaggctgaggcaggcggatctcgaggtcaagagttcaagaacaccctggccaacatggtgaaaccccatctctactaaaaatacaaaaattagccaggcatggtggcgggcrcctgtaatcccagctactcgggaggttgaggcaggagaatcgcttgaatctgggaggcagaggttgcagtgagccgaggtcgcgccactgcactccagcctgggcaagaaagcaagactccatctcggaaaaaaaaaagccaagtgggtcatggagatggacagtgaatttccacagacgtaatcagatggagacgggaacgggagctgtgactgtttgtaggatacctcgacaggagcgatacttcagttacag

SEQ ID NO: 535009 - DNA, 310 bp, Homo sapiens
acaaagtacttttcagttaaaagtcaactcatacttagtgggtatttccaacattgacatattcttatggtttatgaatcttccataattttagccaatgtttctttccgtagtcaagatttcatattgcataaatgtgtgcagcaaattaaggaagactttaacacaatagaaaacttttcttcttaaatctcatawgagttttatgtaaaaatgtctactatgatagagtagtgagaaaagcagttccttttctggccacctacattgacctaaatggtaagtgtaatagcatgaaatagcaaaacag

SEQ ID NO: 535010 - DNA, 554 bp, Homo sapiens
cattagggtatccaagggtgtcagaggtgtcctcggagacgtagagtgaagaaccacccagtaggacacaagggagaccaaagtaagcaagagaagtcaaagmagggggtgattctgggaaatacctggggccaggtaggtccaagctgggggttgctgtggaaggacaatcaggtttaaagagcctgtcaggttatcaagtagtatgtttatggtgacctcatatctgagctgttttaaatgagagtcccaatgtcaaatgctcttctccaacctgtcagatcttgtgtcccaagttcatttgctgggtattctaaggcacctctccttggccaggtactgggctaagaaactctggtatatggtcagaaccaaggtgtagaattactcctctcaaattaatatcttgtgaggctgaccaatgattatgatagaatactgagggatgaactgtagaagctggagcatctggtgattaaagtagtaattttgtctttttcttaaaattgttatgactacttttgttattataacgtgatgttcttagaatataa

SEQ ID NO: 535011 - DNA, 527 bp, Homo sapiens
tggggtttcatgccttctgacagagcgcttgtctttgtggataaccatgacaatcaacgaggacatggcgctggaggagcctctatacttaccttctgggatgctaggtaraaaaccaagttctctatttttttaacacctcttttaatgatggtatgaatattgtgatattctatgataatataattatgtaactttcaggctgtacaaaatggcagttggatttatgcttgctcatccttatggatttacacgagtaatgtcaagctaccgttggccaagatattttgaaaatggaaaagtaagttttggagttgttcaaaatatccttttctcaagaaaaaagaggcaatcttctcctaatttaatatgacaactattaagtgtttatttattcaacaaatatttaattattgtaaacctgatacaggattgtgatttagtaatgcaggttatattaaaggaataaactttatattctccattgaaaaagaatagcaagctttttcagagatatgacaaacatc

SEQ ID NO: 535012 - DNA, 527 bp, Homo sapiens
tggggtttcatgccttctgacagagcgcttgtctttgtggataaccatgacaatcaacgaggacatggcgctggaggagcctctatacttaccttctgggatgctaggtaaaaaaccaagttctctatttttttaacacctcttttaatgatggtatgaatattgtgatattctatgataatataattatgtaactttcaggctgtacaaaatggcagttggatttatgcttgctcatccttatggatttacacgagtaatgtcaagctaccgttggccaagatattttgaaaatggaaaagtaagttttggagttgttcaaaatatccttttctcaagaaaaaagaggcaatcttctcctaatttaatatgacaactattaagtgtttatttattcaacaaatatttaattattgtaaacctgatacaggrttgtgatttagtaatgcaggttatattaaaggaataaactttatattctccattgaaaaagaatagcaagctttttcagagatatgacaaacatc

SEQ ID NO: 535013 - DNA, 627 bp, Homo sapiens
tatcaaaaaagcatttgagtagtctattgattggtaattagcaagtttatgttaagcagccttgtcctgaatactttttagtatgtaccattaagcatttgcctttctcaactagggctaattaaaaaaawctcaaaacctcacattgtacacgttgaatatatataattttaatttgtgaattataccaccataaaactaaaaatctaattaagttgagtttgaatacattttagggaaaatacgataaagaaaattaggagcttaagaatatgcatagataaaaaataaacttgatagaaatattatttatatattatatattatgtatatttatatatatttatatataatatataaataataatatatatataaataatactatatgtatttcagaaaatcatataaaaagctgtgctaaaattttccagagagagagtaaatagttctcctgtagtggattaaaatgagattagcattggagtactagcgtaatacaacagatagagtctgaagtcagatctcaaaaatacaatatatttgctaagtaatgcgagacaagctatttaaagtttttggacctaaatatccagtctgtaagtttgttggaaaaaataaatacgc

SEQ ID NO: 535014 - DNA, 536 bp, Homo sapiens
tttccttgtttacttctttattgtttgactctccttctagaaagcaaactccaccagaagagagacttcgttgggttcgttgttttatccagtgcycaaaatggtgcctggcatataatatgcacccagaaagtatttgctggatgagtgaatgaatgaataaatgaatacttgtatccctagagtcaagtgcagtgtctagatcagaataaatgcttactacatggaaatgtgctctgattccttcttataatttagtaacaatctgattttgacccagctagaagctatgattaatgtttcatatagtcaaaggcaataatagactgcattttataaacagatagttcatgttcaggaacaaggaggtaccttttgcctcaccaaacttttacaccggtcatcagttgcaagttctgaattgaaaaatcttctcctggtatgagcttttggatcacttttgactcagtggtcctccaccacctccccttagggccagtgaaaattaaccttgggagatgttctgttgagacaaa

SEQ ID NO: 535015 - DNA, 608 bp, Homo sapiens
aaaacctttgctttctaatgtgagcaaatcttctctaaggagagaagggaaggtcctagggtgttacaaccctttgaaatgtgaacatatggctcaaggggagagaaacttgtaaatctctcctaggtaacttactatccttaactttctacccttgtttgccattcactcactctctaacccaaattgctcagaaagctcagagcatacagaattgtgaaaatattcccattgttttctgacactaggcagctcaactaaggagtcaagtgccacagattyaaagaggcaagcagaaattcagaagtcagagtcagaaggaatgagatcagtggactctggggctggtggaaaggctatttttctctttctgtctgttgggtgtgggtaaccctaggccaaggggtatcaataaaggaaacactgcctcagatttggaagataagagaaagtagaattctctggtagccagttctagtgatggcagttgtagcatggcatagttagtaggctatgggattcacaattaaaagaagggaaaggaaactagaatttattatcacagctacatgctagatgctacattccacatatgttctcctgcttaa

SEQ ID NO: 535016 - DNA, 551 bp, Homo sapiens
tagacgcatactcccaaacttaaaaatacgcttaaaaaggatcaggtygaatggtaagtaacttaactccctggcaaaacaaaattcggctttccagaggaagactacaaaatctagactttctttttttttttttttgagacggactcttgctctgctgcccaggctggagtgcagtggcacgatctcagctcactgcaacctccgcctcccaggttcacaccattctcctgcctcagcctcccaagtagctgggactacaggcacccaccaccacgcctggctaatttctttctttctttttttttttatcctacatcagttttatttaaaacacaaacaagtatttctctttctgtaagggcaaatggttcaaataatgcggaacacgaaacattgactaatacaagtttattttttaaaaaagcaaaagaataaagaatatatacaaaagggacctggaatctgtaagctgattccaaaagcgaaataagtagaaaatccgtggtgaaacctgaacattctacccctgctttggagaagggctatca

SEQ ID NO: 535017 - DNA, 551 bp, Homo sapiens
tagacgcatactcccaaacttaaaaatacgcttaaaaaggatcaggttgaatggtaagtaacttaactccctggcaaaacaaaattcggctttccagaggaagactacaaaatctagactttctttttttttttttttgagacggactcttgctctgctgcccaggctggagtgcagtggcacgatctcagctcactgcaacctccgcctcccaggttcacaccattctcctgcctcagcctcccaagtagctgggactacaggcacccaccaccacgcctggctaatwtctttctttctttttttttttatcctacatcagttttatttaaaacacaaacaagtatttctctttctgtaagggcaaatggttcaaataatgcggaacacgaaacattgactaatacaagtttattttttaaaaaagcaaaagaataaagaatatatacaaaagggacctggaatctgtaagctgattccaaaagcgaaataagtagaaaatccgtggtgaaacctgaacattctacccctgctttggagaagggctatca

SEQ ID NO: 535018 - DNA, 551 bp, Homo sapiens
tagacgcatactcccaaacttaaaaatacgcttaaaaaggatcaggttgaatggtaagtaacttaactccctggcaaaacaaaattcggctttccagaggaagactacaaaatctagactttctttttttttttttttgagacggactcttgctctgctgcccaggctggagtgcagtggcacgatctcagctcactgcaacctccgcctcccaggttcacaccattctcctgcctcagcctcccaagtagctgggactacaggcacccaccaccacgcctggctaatttctttctttctttttttttttatcctacatcagttttatttaaaacacaaacaagtatttctctttctgtaagggcaaatggttcaaataatgcggaacacgaaacattgactaatacaagtttattttttwaaaaagcaaaagaataaagaatatatacaaaagggacctggaatctgtaagctgattccaaaagcgaaataagtagaaaatccgtggtgaaacctgaacattctacccctgctttggagaagggctatca

SEQ ID NO: 535019 - DNA, 615 bp, Homo sapiens
aaactgtctgaatttgaattcctgttctgctacttacctgctctgggcaagccattcaagcttcctgtgcctcagttacctcatctgtcaaatgaaatcatggtagagttgttatgaggactcagtgcgttgccatatttaaagtccttggaatagcacttgacatactgtaagtatgtttaagtgtttgctattattattgttataatttataccctgtatcatttcaatactcatctggtctccctgcttcctctcttgcccatataatctcttattcacagaatattgttcacagtaagaattatatatttaaaacataaaatcaagtaatctcttggattataatcctccaagggcttcccactgtaattaaatcatatcaaaaattctaaccagagcctacaaggcctggtatgatctagtccatgacttaccacccaacctcatgtcagtctactgtctctgttgctgactcgcttttcccaactactgttcgtttggttctccaaactcaccaaacttgtttctgcctcagggcctttaagtgrgctgttcccctgcctggaatgccattttcccatgtctttgcttgactgactccttttagaaatt

SEQ ID NO: 535020 - DNA, 612 bp, Homo sapiens
aatacatcagtcacttgtccataggaatgatggaattctgattggacaggtctttgaaaattccctgctccggtagctgaggaagttccttagctgacactagttctgctccctagaaggaattcttgatcattgtccttcatccccagtgacattgctaagtttttgttacgtcgttatccttcaagaccatatctaaagtaggtggtgggaaccatgttctgttagcaactgtacaactttcatatcatactttctgcttatacaattttgatgtcctgtatattggtaaaagcttaagcaattatttctttgaaaatagaattccctcaaaaaattcatagatttaagatacctttgctcataattagtcccatgtgttagcaacctaactaaagtttttttgtgagcatagctctaattcttgcttcatttcattatttaacasacacttctttcttactttaatggcagctacttttaggtcttctgaaccaagaggcctggtttggaaggccacatccttggtctgttctttgcctacctagcctgtttctctctgaggagcttaatgttttttgtttgtttttttattcttcttcaaggttacat

SEQ ID NO: 535021 - DNA, 620 bp, Homo sapiens
tagtcccatcacttccttcaggtcttttttcaaaaatcacctggttaacttctctaaattttctacccaaacactaccattttacattctctttccctgaggttattttttctccttaagactttaycaccatccaaaataccgtacatttgacttttctgtttattgttatttccatattaaaatataatctccatgaggacagatcatggtctacttcataaccacatttcaagtgcctagaacagtgcttgggcatctaggaggcactatgaattatctgttaaatgaagtgttattgaataaatcaggctagcatacctcccttggatattatgtagccattagtttttttaatgaaaagtttgatatgccagagaaaaatgggcatccaaatcttacatcacaaatatatcaaagtctctcttggaaagcagcagcagcacagtgtatatactgaagaatacacatgggccttagaataacacaaatcagacttcaaatccttgactctgtttcctcgcaatgtgaccactggcataatatttgagctttctgaagcctaatttcttcacaggtaaggataagaaccctttaataatgctgttttaagaataagg

SEQ ID NO: 535022 - DNA, 668 bp, Homo sapiens
gctacataggcatttcaattaaaaatagattaaccatcagttttatagatttttttttgcagcattcaacttccacttcctatgtttaatgtaaattatataatacagrgattttgttgttaaaccaggagttaactgattgattcagcagttaatattttgctaacctacctatgaaaagcactgtttggttctgttaaccaggcagttattgatttataatggtaagtcagtcaaactgtctccagcatttgcttgtatagtatatatagagataaacattttaaaaattaatcacacaattttttttttcaattttacttttaagttctgggatacatgtgcagaatgtgcaggtttgttacataggtatatgtgtgccatggtggcttgctgcacatattgactcatcctctaagttccctcttctccctcaacccccaacaggccctggtgtgtgttgttctctcccctgtgtccatgtgttctcattgctcagctcccacttaagagtgagaacatacggtgtttggtattctgttcctgtgtcagtttgctgaggatgatggcttctatgtccctgcaaaagacatgatctcattcctttttatggctgcatagtattccatggtgtttatgtaccacattttcttaatctagtctatcat

SEQ ID NO: 535023 - DNA, 668 bp, Homo sapiens
gctacataggcatttcaattaaaaatagattaaccatcagttttatagatttttttttgcagcattcaacttccacttcctatgtttaatgtaaattatataatacagggattttgttgttaaaccaggagttaactgattgattcagcagttaatattttgctaacctacctatgaaaagcactgtttggttctrttaaccaggcagttattgatttataatggtaagtcagtcaaactgtctccagcatttgcttgtatagtatatatagagataaacattttaaaaattaatcacacaattttttttttcaattttacttttaagttctgggatacatgtgcagaatgtgcaggtttgttacataggtatatgtgtgccatggtggcttgctgcacatattgactcatcctctaagttccctcttctccctcaacccccaacaggccctggtgtgtgttgttctctcccctgtgtccatgtgttctcattgctcagctcccacttaagagtgagaacatacggtgtttggtattctgttcctgtgtcagtttgctgaggatgatggcttctatgtccctgcaaaagacatgatctcattcctttttatggctgcatagtattccatggtgtttatgtaccacattttcttaatctagtctatcat

SEQ ID NO: 535024 - DNA, 668 bp, Homo sapiens
gctacataggcatttcaattaaaaatagattaaccatcagttttatagatttttttttgcagcattcaacttccacttcctatgtttaatgtaaattatataatacagggattttgttgttaaaccaggagttaactgattgattcagcagttaatattttgctaacctacctatgaaaagcactgtttggttctgttaaccaggcagttattgatttayaatggtaagtcagtcaaactgtctccagcatttgcttgtatagtatatatagagataaacattttaaaaattaatcacacaattttttttttcaattttacttttaagttctgggatacatgtgcagaatgtgcaggtttgttacataggtatatgtgtgccatggtggcttgctgcacatattgactcatcctctaagttccctcttctccctcaacccccaacaggccctggtgtgtgttgttctctcccctgtgtccatgtgttctcattgctcagctcccacttaagagtgagaacatacggtgtttggtattctgttcctgtgtcagtttgctgaggatgatggcttctatgtccctgcaaaagacatgatctcattcctttttatggctgcatagtattccatggtgtttatgtaccacattttcttaatctagtctatcat

SEQ ID NO: 535025 - DNA, 436 bp, Homo sapiens
gcctatcctggacatgtgtcttcctcggctctccactctcctatcccagaagaaaactgattgcttgatattggaccatggcagggggccttaagggtacctccattagggtcccgacaatgacagcctctgtgactgatacaagtgctatcaccttgacccctccactaagtctgaagataaagagatttgccaacctttacccagatcactcaatagggtgagacttctctgtctctggggagaggatgggacaaatgccctatatygaaatcaggataatggggagggagggtaaaattgcacctcttgagtcttttggatacctatgcacaggtaactatgattcctgcaacccctggcataacaataaagtggaaacaactgatgctgatttaggatctaaggctaccactactgggatccttgacaatgc

SEQ ID NO: 535026 - DNA, 436 bp, Homo sapiens
gcctatcctggacatgtgtcttcctcggctctccactctcctatcccagaagaaaactgattgcttgatattggaccatggcagggggccttaagggtacctccattagggtcccgacaatgacagcctctgtgactgatacaagtgctatcaccttgacccctccactaagtctgaagataaagagatttgccaacctttacccagatcactcaatagggtgagacttctctgtctctggggagaggatgggacaaatgccctatatcgaaatcaggataatggggagggagggtaaaattgcacctcttgrgtcttttggatacctatgcacaggtaactatgattcctgcaacccctggcataacaataaagtggaaacaactgatgctgatttaggatctaaggctaccactactgggatccttgacaatgc

SEQ ID NO: 535027 - DNA, 590 bp, Homo sapiens
ccacatgaaacagtctctatgaaatgcagatgtttggtagggttgggtgttgcttcccccgcaatttaaaagccttycatgcctgctgcttacttagagacttcttcctccccacactgtttggctcagtgggttcgagagggtgttttggggtgtttggataacagtgcattgtggtggtgggatttattaacaacagccattcttccccactcctgcaagttgctgcctcatagtccatatttaatgtttaaattaaggtgaattaaaattaattttgttggaggaattctgcagctcccgcttgagataagtggagacaccctggggtgatataaaattgaggttaggaattgctgcattggagtgctgtgctaatgaggtgaaggtcaggggttcaattcccttgtgaagggagcattttatttcactctccctcacggcctcagattccacccttaaccctggccatctgcctccaagaggagccactggtcaccagcaggacaaagtgagatagaggaccagatctatacaaatccatcaaacccgttagaatgacaacccaaagcatgacccatgagtaatgt

SEQ ID NO: 535028 - DNA, 590 bp, Homo sapiens
ccacatgaaacagtctctatgaaatgcagatgtttggtagggttgggtgttgcttcccccgcaatttaaaagcctttcatgcctgctgcttacttagagacttcttcctccccacactgtttggctcagtgggttcgagagggtgttttggggtgtttggataacagtgcattgtggtggtgggatttattaacaacagccattcttccccactcctgcaagttgctgcctcatagtccatatttaatgtttaaattaaggtgaattaaaattaattttgttggaggaattctgcagctcccgcttgagataagtggagacaccctggggtgatataaaattgaggttaggaattgctgcattggagtgctgtgctaatgaggtgaaggtcaggggttcaattcccttgtgaagggagcattttatttcactctccctcacggcctcagattccacccttaaccctggccrtctgcctccaagaggagccactggtcaccagcaggacaaagtgagatagaggaccagatctatacaaatccatcaaacccgttagaatgacaacccaaagcatgacccatgagtaatgt

SEQ ID NO: 535029 - DNA, 583 bp, Homo sapiens
gacatttcagagtgggtccatttgctcttaggaacttccagggcaccccagcaccacttgtttttgcctttgtctttgctttccttccccacatccctacaaaaccaaacagacttgctctcccagcttcacaaagagaaacggattccaagaggaaatcacttcacagcaagtgagccctgggaagaattaaagactgaggagcccttgtaatgagattaagggaaaaatgcttttgtgcatccaactcagacccgtcctcagtatgcaggacgcgagtggtgccaaaacaaacatgggcattgttttgggaaggaaaaggttaacaagctatgaaaacaaaattagagatattttcaaagcatgaccctcagcagaatgagtagaatgcagtctacccaggcagcagcattccctcctcacttgacatttatcctgcagcttgtkggggagcagcttcggctgttatgttcccaacggatgaggagggagctgcactccttgcggcggagaagccgcatccactgggcagaggcataaaagcttgggtccaggggaaaaagacatcgagctccttggcgcc

SEQ ID NO: 535030 - DNA, 516 bp, Homo sapiens
agggcagtgcctgatgggacatcattcattgctattgctatgatttcagaggaagcttgagccacttaaaacaygtaacccaaacccagtagatggagatggtgttgtagatctcaaagccctcttggcctggctgacctccaggttggtaatcactttccctgccggaggagggggttccaagctagtaaggagcctccttgccactgtgttcaacaactcacttgcaattcatccatccatgcagtcaacagtattgacggtatctcagaagctgggcattcacagacttcgggtctcccctcacggagtccattgcccttcaaaggacatgaacagagagagctgacgtcagagaatgtgatcagctctggaagatcagggccagtctgttgcctgctcccacccacatctccaccctatagcctggcatactcagcatcatctcaaggtgccagacaatcatcagcaaagcaaaacaaaaagtgaacaacattggcacgtcctgacagtaaa

SEQ ID NO: 535031 - DNA, 516 bp, Homo sapiens
agggcagtgcctgatgggacatcattcattgctattgctatgatttcagaggaagcttgagccacttaaaacatgtaacccaaacccagtagatggagatggtgttgtagatctcaaagccctcttggcctggctgacctccaggttggtaatcactttccctgccggaggagggggttccaagctagtaaggagcctccttgccactgtgttcaacaactcacttgcaattcatccatycatgcagtcaacagtattgacggtatctcagaagctgggcattcacagacttcgggtctcccctcacggagtccattgcccttcaaaggacatgaacagagagagctgacgtcagagaatgtgatcagctctggaagatcagggccagtctgttgcctgctcccacccacatctccaccctatagcctggcatactcagcatcatctcaaggtgccagacaatcatcagcaaagcaaaacaaaaagtgaacaacattggcacgtcctgacagtaaa

SEQ ID NO: 535032 - DNA, 236 bp, Homo sapiens
attcacagacttcgggtctcccctcacggagtccattgcccttcaaaggacatgaacagagagagctgacgtcagagaatgtgatcagctctggaagatcagggccagtctgttgcctgctcccacccacatctccaycctatagcctggcatactcagcatcatctcaaggtgccagacaatcatcagcaaagcaaaacaaaaagtgaacaacattggcacgtcctgacagtaaa

SEQ ID NO: 535033 - DNA, 236 bp, Homo sapiens
attcacagacttcgggtctcccctcacggagtccattgcccttcaaaggacatgaacagagagagctgacgtcagagaatgtgatcagctctggaagatcagggccagtctgttgcctgctcccacccacatctccaccctatagcctggcatactcagcatcatctcaaggtgccagacaatcatmagcaaagcaaaacaaaaagtgaacaacattggcacgtcctgacagtaaa

SEQ ID NO: 535034 - DNA, 475 bp, Homo sapiens
tcctccagctggtctcggggactgcagtccttctctcctggatgggttgggggtggggggctgttgagagctttcctcctccttttcttcttcctcctcctcctgtctccctaaccctggaagggggccatccactgaacttcggaaagaggtcaccctccctgaaagggggacttggattgctgcatccagagccaccccctgtggtccctcaatctagccacactccgttgctaaagcagggagaggtttcctagtccggtgttccggccccacgcaaacggagctcaggatgacgccacatgtgtgtttgggtcaaagcgcttttaactgtggctccaagaacagcctgtacagccacttgagtttcccagtaagaaggaatgtacaatagatgagactttactggcaaaacaatttttaaaartaaagggagaagcagcagcccagccttgtctctttatagggtcctaga

SEQ ID NO: 535035 - DNA, 584 bp, Homo sapiens
gaccatgatgtcattcctcatgactacaatagaccaatatttaactctaagcgtatttcctttaaaaaaaaaaagttaactacaaaaatgtagttaaargtgctaatctactaattttttggtactgtaatatttactgtattatttatttttctattttatgggcataaccatccacagaagggtcagtaagagagaaatatcactgctttcctcttctatccattatttttgttgtttcgtttcatggctattactaaaaataatgttgtcacagagaagcaaggtgataaaaggattctctctgggggtcaatccatgaagaaagctggagaaatatctgctgaacagagttcatggcttcatgttctatctgagcaagtctcatcctgcagtcagctctcttgaggctgagccaggtctttgcacacctttcctctggctgatgcttttaaattccctctgtcttcgtctctgctattgagttcggtctcctccgtgagtcccccacggggcctggtgaggacaggctctgtgggagcagctttctgttttgagcctgtgatgtctggcccaagggagcg

SEQ ID NO: 535036 - DNA, 584 bp, Homo sapiens
gaccatgatgtcattcctcatgactacaatagaccaatatttaactctaagcgtatttcctttaaaaaaaaaaagttaactacaaaaatgtagttaaaagtgctaatctactamttttttggtactgtaatatttactgtattatttatttttctattttatgggcataaccatccacagaagggtcagtaagagagaaatatcactgctttcctcttctatccattatttttgttgtttcgtttcatggctattactaaaaataatgttgtcacagagaagcaaggtgataaaaggattctctctgggggtcaatccatgaagaaagctggagaaatatctgctgaacagagttcatggcttcatgttctatctgagcaagtctcatcctgcagtcagctctcttgaggctgagccaggtctttgcacacctttcctctggctgatgcttttaaattccctctgtcttcgtctctgctattgagttcggtctcctccgtgagtcccccacggggcctggtgaggacaggctctgtgggagcagctttctgttttgagcctgtgatgtctggcccaagggagcg

SEQ ID NO: 535037 - DNA, 584 bp, Homo sapiens
gaccatgatgtcattcctcatgactacaatagaccaatatttaactctaagcgtatttcctttaaaaaaaaaaagttaactacaaaaatgtagttaaaagtgctaatctactaattttttggtactgtaatatttactgtattatttatttttctattttatgggcataaccatccacagaagggtcagtaagagagaaatatcactgctttcctcttctatccattatttttgttgtttcgtttcatggctaytactaaaaataatgttgtcacagagaagcaaggtgataaaaggattctctctgggggtcaatccatgaagaaagctggagaaatatctgctgaacagagttcatggcttcatgttctatctgagcaagtctcatcctgcagtcagctctcttgaggctgagccaggtctttgcacacctttcctctggctgatgcttttaaattccctctgtcttcgtctctgctattgagttcggtctcctccgtgagtcccccacggggcctggtgaggacaggctctgtgggagcagctttctgttttgagcctgtgatgtctggcccaagggagcg

SEQ ID NO: 535038 - DNA, 534 bp, Homo sapiens
ctggggttcttctgtaaagacgggaaagcagaagtcaggaattgagggatacggctggtgtttgtgggctatgctggttatgagcaaaggctcaagtcagggaaataccacacagcaggcgattgtggacactctcactccatggatcacaaagaaccacaggccaagataggccagaacactggatcatctttccctggaggagtcagagccctataatctatgaggccctcatgggttctttcatccccagagctccaggtgtagctgatgwtcctcctccctctgctggaaccctctgactctcaaataggcttcacacatgaagccgggagattgttttatactctaaataactttctgtttctacaacagatgggaagactgtatcttctagcctaattggaggctcacaattccagggagaatttcggctgggcaggagctctcttcctctgagattttatttcccagggacattccatacttggcccatgacagaggctgcagttgcccaagggaacaatgcgtcaa

SEQ ID NO: 535039 - DNA, 629 bp, Homo sapiens
gggttcttctgtaaagacgggaaagcagaagtcaggaattgagggatacggctggtgtttgtgggctatgctggttatgagcaaaggctcaagtcagggaaataccacacagcaggcgattgtggacactctcactccatggatcacaaagaaccacaggccaagataggccagaacactggatcatctttccctggaggagtcagagccctataatctatgaggccctcatgggttctttcatccccagagctccaggtgtagctgatgatcctcctccctctgctggaaccctctgactctcaaataggcttcacacatgaagccrggagattgttttatactctaaataactttctgtttctacaacagatgggaagactgtatcttctagcctaattggaggctcacaattccagggagaatttcggctgggcaggagctctcttcctctgagattttatttcccagggacattccatacttggcccatgacagaggctgcagttgcccaagggaacaatgcgtcaagggccactcatcctttggaaagcagaagtccagataccagagtaaaaccataactcattaacacttccaacaagtatttattatgtgttgagcaatct

SEQ ID NO: 535040 - DNA, 587 bp, Homo sapiens
aatcatgcttaatgtgaaattcttgtttacatacagccagtggagtgtatagtttagccaataacaataatgtgcaggccccagactaggaaagaacaccaaaagaaacagtgaatccttgatctcttgaaacttataatttgttcaggaaggaaagaaatttaaaaagaaaaacmtaatcaagagaaataattttaaaaaatattttataaaataataccttcacaaacacatataacctacagtctataaatgtcccaagattgatcaggcataagaaagtttgaaaagcaggctaaattaaaatatttcatcttcttcccatgcatactttccccatacaagaatagctacatttaaactatttgttttgtgttagtttcttcatgagaagaaaaatggtcacaaaaagttgttgtaagctgaagaaaaatggctacaaatatttcacagcttctctcatcaaaaaaatgaaatctagttctccactccctgaatctggaattggctgtgtaacttgtttggctaatggaacattaacaaacaggatgtagacaggggcttgaaaagtacttgcaacatgttta

SEQ ID NO: 535041 - DNA, 474 bp, Homo sapiens
tataggcagagccttggtgaggwgctagctagggaggcacagcagggcaggggtggggggtattctgttccttttcatttgtatctttattaaaaaatttttacattgcttgacttgttgatttgttagggaatctaggagaaagcaatttaagctaaatctgcggcaccattattaagaatcttcttggcctggtttagctaacttatcacatcagcaaaaggcaagagagagttattgttttatgtggggaacgtagaaaaataaaataaagatgagaattaatgtattcgcatgcacacacacacaaacacacacacacaaacacacacacagactacactcaaacaaaatcttccaggctacataaattgagtcagaataaacaaaaaccatacaacactgaaaccgtgggaaattattttgtgtctctttggttgactggggaaggacatatattggagcctgcctgag

SEQ ID NO: 535042 - DNA, 513 bp, Homo sapiens
tgtgaaaaaaatcgaggtttactctcttaaatcagatgaagaatttaagggaaaatattaaacagtttctatggactaaataatataatccaaatggattgagttggagtttcctcaaaagctgagcctgagaaaagaaaccaggtagttaatctgggaggtgattctaggaaacaaaagtaatggaacagaaaaagtgggtgaggaaggagaaagaagccaatgtaattatgtatttattgctgccaagtgaaacagtggtttgatttktccctataagcacaagaaacaggaaatttattcattggctcccaattgttattagctgagagttgcccataggggttttattcctaagtacttccaaactgcatgtgtatatgggctgaatgggctcacacaagaatcctaagctttgaagaagtccccaaacataaagtgaaagacttgatggacgagcttaaggcacacactgttagcctgagataagatgaagccctcacaaaactgtcc

SEQ ID NO: 535043 - DNA, 588 bp, Homo sapiens
ctcacaatgttccagtggcttcccatctggctgtttgctccttctctgatatcatctattgtttgccccaccatttcctcctctccagstccactgacctctttgctgtccctcaagcatactagccatccttctgtatgttgttcaaattgcttcagttctctccctgcagacatctgcatgcccattccttcctcctggtttttactgaaaaatcaccttcttgtgaggcttttctggctacctaatcattaaatcctacactgcaccacattttatatccctcttgtggactttattttttcttcctaacaactatcatcatctaatatacaacacattttatgtattaatatttatcttatcttgtttattgcttatctcttttatgagggcagatatttttgtctgttttgtttacagttataacatatatgttatattacatactttgtttactgtaaactcctatatatatgttataatatgttatatatataagtgcctgacataggagaagattggtaagcatttgttgaaagcatggtagtagcttgtttgagaaataggaatgtccagtgctgctat

SEQ ID NO: 535044 - DNA, 588 bp, Homo sapiens
ctcacaatgttccagtggcttcccatctggctgtttgctccttctctgatatcatctattgtttgccccaccatttcctcctctccaggtccactgacctctttgctgtccctcaagcatactagccatccttctgtatgttgttcaaattgcttcagttctctccctgcagacatctgcatgcccattccttcctcctggtttttactgaaaaatcaccttcttgtgaggcttttctggctacctaatcattaaatcctacactgcaccacattttatatccctcttgtggactttattttttcttcctaacaactatcatcatctaatatacaacacattttatgtattaatatttatcttatcttgtttattgcttatctcttttatgagggcagatatttttgtctgttttgtttacagttataacatatatgttatattacatactttgtttactgtaaactcctatatatatgttayaatatgttatatatataagtgcctgacataggagaagattggtaagcatttgttgaaagcatggtagtagcttgtttgagaaataggaatgtccagtgctgctat

SEQ ID NO: 535045 - DNA, 545 bp, Homo sapiens
tttatgcagcaggcttcttttcctctgtagtaggtttcttttctgctggcttctttccaggggctggtttcttggtagctgctgccccttttttctaccagaagcttcttctgcttcttaacaccaacagcagccttctttcctttcttacctaccacaggcttcttgcctgcaacccccttctcatcygatttggcttctagtgctgcagctgtcgctgctgccttatccactcagagcttgtgattcctggcctggtgaagaatggtgttctgacgcgtgcatggtctttgcatatgggtttagcttcaacatgattctcaggtttttcagtgggttcttctttaggactctgcaatgaatctttttgcatggtgctcaaagggctctttggatctctgggcttttcaagattctgctaagatctgtattgaacatcttgtgcatgggaagattgtagttactcttgagggaagcagctttatgccaagtgctatacaattcatctaacttctggaaagcacttttggtccaatgcagaaatg

SEQ ID NO: 535046 - DNA, 588 bp, Homo sapiens
aatccactttatcaccaaatattgtttgtgcaactttaggagtttttctgtggtccataccaccagacattcttgcctcagtttattgactttgaccgcagtggtcgtgtgtactttatttcatcagccttctaccatgaattttgtcatcaccactaattactccacgtatgaaatcttaaaygttaaataaaaattctattataatttggctttctagccttccaactccttctgtgactccctctacatctactcattaccttatcaaggccttgtccttttattcactccttatcagtcaccttctatgctcactgtctccataccctatccggaccctgtgatacaccacttgatatatcacttcacttacctactcccatgtacccatcattctacaccttggatcaatatatttgaatataatttccagtagggcacgaaacatctgttttggtaacagctttatctccagcatctagactaatgtctaacacattgtaggcatccagtaaatgttgggtgaataagtgaatgaataaattctgaaatttgttttatccattccagcacctgacatgctaa

SEQ ID NO: 535047 - DNA, 591 bp, Homo sapiens
gcaaaatccactttatcaccaaatattgtttgtgcaactttaggagtttttctgtggtccataccaccagacattcttgcctcagtttattgactttgaccgcagtggtcgtgtgtactttatttcatcagccttctaccatgaattttgtcatcaccactaattactccacgtatgaaatcttaaatgttaaataaaaattctattataatttggctttctagccttccaactccttctgtgactccckctacatctactcattaccttatcaaggccttgtccttttattcactccttatcagtcaccttctatgctcactgtctccataccctatccggaccctgtgatacaccacttgatatatcacttcacttacctactcccatgtacccatcattctacaccttggatcaatatatttgaatataatttccagtagggcacgaaacatctgttttggtaacagctttatctccagcatctagactaatgtctaacacattgtaggcatccagtaaatgttgggtgaataagtgaatgaataaattctgaaatttgttttatccattccagcacctgacatgcta

SEQ ID NO: 535048 - DNA, 591 bp, Homo sapiens
gcaaaatccactttatcaccaaatattgtttgtgcaactttaggagtttttctgtggtccataccaccagacattcttgcctcagtttattgactttgaccgcagtggtcgtgtgtactttatttcatcagccttctaccatgaattttgtcatcaccactaattactccacgtatgaaatcttaaatgttaaataaaaattctattataatttggctttctagccttccaactccttctgtgactccctctacatctactcattaccttatcaaggccttgtccttttattcactccttatcagtcaccttctatgctcactgtctccataccctatccggaccctgtgatacaccacttgatatatcacttcacttacctactcccatgtacccatcattctacaccttggatcaatatatttgaatataatttccagtagggcaygaaacatctgttttggtaacagctttatctccagcatctagactaatgtctaacacattgtaggcatccagtaaatgttgggtgaataagtgaatgaataaattctgaaatttgttttatccattccagcacctgacatgcta

SEQ ID NO: 535049 - DNA, 591 bp, Homo sapiens
gcaaaatccactttatcaccaaatattgtttgtgcaactttaggagtttttctgtggtccataccaccagacattcttgcctcagtttattgactttgaccgcagtggtcgtgtgtactttatttcatcagccttctaccatgaattttgtcatcaccactaattactccacgtatgaaatcttaaatgttaaataaaaattctattataatttggctttctagccttccaactccttctgtgactccctctacatctactcattaccttatcaaggccttgtccttttattcactccttatcagtcaccttctatgctcactgtctccataccctatccggaccctgtgatacaccacttgatatatcacttcacttacctactcccatgtacccatcattctacaccttggatcaatatatttgaatataatttccagtagggcacgaaacatctgttttggtaacagctttatctccagcatctagactaatgtctwacacattgtaggcatccagtaaatgttgggtgaataagtgaatgaataaattctgaaatttgttttatccattccagcacctgacatgcta

SEQ ID NO: 535050 - DNA, 591 bp, Homo sapiens
gcaaaatccactttatcaccaaatattgtttgtgcaactttaggagtttttctgtggtccataccaccagacattcttgcctcagtttattgactttgaccgcagtggtcgtgtgtactttatttcatcagccttctaccatgaattttgtcatcaccactaattactccacgtatgaaatcttaaatgttaaataaaaattctattataatttggctttctagccttccaactccttctgtgactccctctacatctactcattaccttatcaaggccttgtccttttattcactccttatcagtcaccttctatgctcactgtctccataccctatccggaccctgtgatacaccacttgatatatcacttcacttacctactcccatgtacccatcattctacaccttggatcaatatatttgaatataatttccagtagggcacgaaacatctgttttggtaacagctttatctccagcatctagactaatgtctaacacattgtaggcatccagtaaatgttgggtgaataagtgaatgaataaattctgaaatttgttttatscattccagcacctgacatgcta

SEQ ID NO: 535051 - DNA, 476 bp, Homo sapiens
gcttgccaggccgtccaagtaccaccagaaaatgcacagttgcatattgaccctgcagtaattgaggttataaaaaggctcttgttctcagaactcttgaatgaacgcctctcccagcgggaccctgcaggacccttgaagagagctgacccactgaactactgaactgcccagaacctcaactttgggctgtgcggaggtcaggtcaagaagcaaatgttaaagatgggacgtgaggaatgccagctagtcacacattgaactgaagtcattggktctttgcattgtcctgctggctgctcttcctcatacgttctgcacgaagtgaagcaggggaactgaaatctgttagcacttttccctgggtatcatgtggaaaccttctcctgatttttgtcccccccccccattattaaaagcaagggagtggttgctcgtacagatttcattggtgaagcaaactgaaccatctgctg

SEQ ID NO: 535052 - DNA, 615 bp, Homo sapiens
gtgatgctgctttgcctccattcaccttttccacctaattgtactttccccaggaatttcttttttttttttcttttttttttttttgagatgggagtcttgctctgtcaccaggctggagtgcaatggtgcaacctcagctcactgcaatccttcgcctcccaggttcaaacaatttgtctgcctcagcctcccaagtagctgggactacaggagcatgccaccacgtgcagcttatttttatatttttgatagagatggggtttcatcatgttggtcaggatggtcttgatctcttgacctcatgatccgcccatgttggcctcccaaagtactgggattacagccatgcatcaccrcacccggcctaccccaggaatttctaaataagcagagacatttgttttgaggcagcttattgagttttcctggtgctgttgtctaacatataatatcacctccaatttatttataagaacatcttatgacaacttcccattcttatttttgacattttgtaatgtatattttctaatgtaattggcaaattgtaattttgatgacattttattttctgagcactgtaatattttacttttgttttgtttatgacag

SEQ ID NO: 535053 - DNA, 583 bp, Homo sapiens
gggccagatacagcgattaacacattacgggaaatggtgccagatggttaaagagaaggaaaaacaagccatttgtggacagagctggtgtaagggttaactttgcatttttttaactcaagtctctttttactgaagtttttcccactgttcaaataaagaaaattgaaggccaaataaataggacattatttatccccccttgaatgttgaaagattttttctactgctgttaacagccactagcctaattgatatgagtatgtcgtatatgtgtttgaccccccagcaatcctgtaagctgattatggggagggacaagcttgatctttgttatatcccatcatgtacaacacaatgtctgaacaaaatatgtgcccagaaaataactatttaattggaaatgactttsaatttgaagccctctgaccagcttaaacttggaggctagctgtgataaactccactgtgtctgcctccaggctacacctcttcttaagacattgcttcctaggccatggatatctactcatagatttgaatgggtttcaacaggtcctaagctcagaactgatgctagcag

SEQ ID NO: 535054 - DNA, 598 bp, Homo sapiens
cgctgggtgccatttcccatcttcaccagaggaggctgcatggtttaatgttcccaagtcaagggagcaacctgtaggagcaaatttaataagacaatatccccaacatgtccatcatcctccaagcaacttagcaatcattatcttttttctttttacattctagcattaygtgacacttatctttgatgggaagagaaaaattgcatacatttagggatcccctctcaataaatggctcaggatggaaattaagccaaagacttcatgtcttaatactccaaataagcatcctcaaggaagtctgacttagagaacccagaccattcgatagttccagttttctcttttcctatggtccctctctcttaagtgggagcctggggtcaggatgtggcaaacatactccccctatcttacctttctcacagttctccaatgtcacaccataaagtaaacatttatgcatatgtacaaggggtgctgcaagccacctgcaggaaggtttacaaaattcggtcttcctaagagataaatcgcaggtatttagttcattatgttctaagcagaaccgagggggaaagagtgagaatatgat

SEQ ID NO: 535055 - DNA, 598 bp, Homo sapiens
cgctgggtgccatttcccatcttcaccagaggaggctgcatggtttaatgttcccaagtcaagggagcaacctgtaggagcaaatttaataagacaatatccccaacatgtccatcatcctccaagcaacttagcaatcattatcttttttctttttacattctagcattatgtgacacttatctttgatgggaagagaaaaattgcatacatttagggatcccctctcaataaatggctcaggatggaaattaagccaaagacttcatgtcttaatactccaaataagcatcctcaaggaagtctgacttagagaacccagaccattcgayagttccagttttctcttttcctatggtccctctctcttaagtgggagcctggggtcaggatgtggcaaacatactccccctatcttacctttctcacagttctccaatgtcacaccataaagtaaacatttatgcatatgtacaaggggtgctgcaagccacctgcaggaaggtttacaaaattcggtcttcctaagagataaatcgcaggtatttagttcattatgttctaagcagaaccgagggggaaagagtgagaatatgat

SEQ ID NO: 535056 - DNA, 499 bp, Homo sapiens
acagcaagaacaggggagtaggcaggcacagcagagggcaacagagctagtgggaacatttacctattcttaatttaagtacggctggccctggcccaggcccaaagaaggcagaggattagaagagaaggtggcaggaaggggaagtaaggrtgaggagagacatgcagacttccaagctggaatctgtgtagaggttttctgcccactcttccccctcccccattaaacatatgcaaatggaaatggtaataaactcagataatgatagagtcagcatttaaactcaccatagaatgcacaaattacagaggaggttgttacagatgcaaaggctggatgctttattgctgggtgagagggtattctgaattgcaggtgttaactggatatctcaggccaggcagagagtctgataggaggcttcctacaagacaaagaggtctaaaaccaggttttgctgctgatgaacatgaaatttgttctaagtatattcagt

SEQ ID NO: 535057 - DNA, 499 bp, Homo sapiens
acagcaagaacaggggagtaggcaggcacagcagagggcaacagagctagtgggaacatttacctattcttaatttaagtacggctggccctggcccaggcccaaagaaggcagaggattagaagagaaggtggcaggaaggggaagtaaggatgaggagagacatgcagacttccaagctggaatctgtgtagaggttttctgcccactcttccccctcccccattaaacatatgcaaatggmaatggtaataaactcagataatgatagagtcagcatttaaactcaccatagaatgcacaaattacagaggaggttgttacagatgcaaaggctggatgctttattgctgggtgagagggtattctgaattgcaggtgttaactggatatctcaggccaggcagagagtctgataggaggcttcctacaagacaaagaggtctaaaaccaggttttgctgctgatgaacatgaaatttgttctaagtatattcagt

SEQ ID NO: 535058 - DNA, 630 bp, Homo sapiens
tgaatgtggccagcattcaaatttggctctttgacttaaaatcccttctttccccagatgtcttgaatttcaaaaattattctaaattagaattatactacctgtaggattgccagatatgcaaatggaaatacagatgcccagttaaacttgaatttcaaataaataatgaataactttttaacacaagtgtgtcccatgtaatacaagtatgtcatgcatttgactagaagtcttatattttgtcaggtaacccaaaacatgggagtaatcagagcaggttcgccaggtgatcttcagtctatggtctggagatttttgctatgagaagccccctcaaactcatacttacccaacacatacaaactcaytagttggcatacctcctacctgttttgaaaaatcatcccaggataatatcacagggatagatggataatcctacaacacagaggggcaaaggtacaagaacagaagactacaactcttggctgtatgaatgaggaagggttcccatcccagaattctggttttggtgcagcattaaaagaaataccagtgctgtagtatgctgaacagtagtttgggactacagcacccacattcttttctccctcaggaagtgactta

SEQ ID NO: 535059 - DNA, 486 bp, Homo sapiens
gtaagagcgtaggtgaatccctagaaacaaaaaatacagcaaatccgaagagcagacatttcagtacatgcagaggcaatgttctaagagtttgaatgaggaacacagcctaaattcacataaccctaaacctcactggacgtatcttttgctgaggagttatggatatctaaacatctgctgacttccaaactactttttgagyagacttattcacctttatattcaaagccccaaagtagcctgtcattgttacctgattcacttgataaatgagaaagtcaacttgggatctggcctctatactgcctgagactcacaccagtgtccattctgggaaatgaggcattactgatgcaacttaacaaagagcaacaacacatggattgtacatgtgtctgcttgtttaattgcacccatttaaatatgccatcaatgctaaaggaaaaaacttaggactacactgaataatgcttcaacacagaa

SEQ ID NO: 535060 - DNA, 388 bp, Homo sapiens
taagagcgtaggtgaatccctagaaacaaaaaatacagcaaatccgaagagcagacatttcagtacatgcagaggcaatgttctaagagtttgaatgaggaacacagcctaaattcacataaccctaaacctcactggacgtatcttttgctgaggagttatggatatctaaacatctgctgacttccaaactactttttgagtagacttattcacctttatattcaaagccccaaagtagcctgtcattgttacctgattcacttgataaatgagaaagtcaacttgggatctggcctctatactgcctgagactcacaccagtgtccattctgggaaatgaggcattactgatrcaacttaacaaagagcaacaacacatggattg

SEQ ID NO: 535061 - DNA, 654 bp, Homo sapiens
  misc_feature (1)...(654): n = A,T,C or G
nnnnnnnnnnnnnnctcattcttttgccattgacattgttggcattatcacaaaaacccgtgctatttatcatttttattgatattaacctttccacactcctaatttctgtttcttcaaatgtgttttctcaaggataggagataaagcctacacatccacagcagattatcatcacttccatttattgggatttgtgacctttaagtcattgtgctaggtccttcatctatattacaacaacctcttgaggaaagtattattacacccatgttatagatgaggggcatggaaaggatgaataacttgcctgagatcacagagctagtaagtggcagaggtgaatttccaacccaggtctgactaactccaaagcctgtgcttaagaaatgtttgattgattatttaatggagaaaaataagattgctagtggaacaacaggaagctagtcagtctttctgtgtcctcctctggctaaagttcatgttcagaactgataaagatttgatatgcagttacctggcaaaagaatcacttttcctacaytatgaaactctctggagatggcttccagattttaagttatatacgcacattgcttcatagtctttttgtctaaaatgacctgtctacagagggataattgtttactt

SEQ ID NO: 535062 - DNA, 619 bp, Homo sapiens
gaagcacgactggtgagaactgggcagcccttccacgctccgcactgcaagaactgcctgtccggaagggtgactgcaccagctccgctccggatatcttggcaggacgcgccctctggcggcgcctcgctcrtaggtgggccccagcgcgcagtcgcccgcccccgcgcgttgggaagttgggagggaggtgcgcgcttggccgcgcggggcggggcctctaccggcccgatggagcgcgcgggcgctactagccgcgggggccaagcgcctggcttcttactgcggcttcatactgagggccgagccgaggcggcgcgggtgcaggagcagcacttacggcagtggggtctgacaggtgagcgggctccgggcgaacttcggccagcgggccaacctattgggactgcctcttgcgggccgggggcgcagcgggtgggccgcccggtgggcagtttacccgcccgcgccagggccttccttcgctcctgccgtgggcggagagaaactgcgcccgggcttggtggccacggcccccgcctgcgcggcgcgcggggccggcggacgccagatgaatgaggtcgcgggcccggtagccaggcctggcccctggcctgtg

SEQ ID NO: 535063 - DNA, 619 bp, Homo sapiens
gaagcacgactggtgagaactgggcagcccttccacgctccgcactgcaagaactgcctgtccggaagggtgactgcaccagctccgctccggatatcttggcaggacgcgccctctggcggcgcctcgctcataggtgggccccagcgcgcagtcgcscgcccccgcgcgttgggaagttgggagggaggtgcgcgcttggccgcgcggggcggggcctctaccggcccgatggagcgcgcgggcgctactagccgcgggggccaagcgcctggcttcttactgcggcttcatactgagggccgagccgaggcggcgcgggtgcaggagcagcacttacggcagtggggtctgacaggtgagcgggctccgggcgaacttcggccagcgggccaacctattgggactgcctcttgcgggccgggggcgcagcgggtgggccgcccggtgggcagtttacccgcccgcgccagggccttccttcgctcctgccgtgggcggagagaaactgcgcccgggcttggtggccacggcccccgcctgcgcggcgcgcggggccggcggacgccagatgaatgaggtcgcgggcccggtagccaggcctggcccctggcctgtg

SEQ ID NO: 535064 - DNA, 619 bp, Homo sapiens
gaagcacgactggtgagaactgggcagcccttccacgctccgcactgcaagaactgcctgtccggaagggtgactgcaccagctccgctccggatatcttggcaggacgcgccctctggcggcgcctcgctcataggtgggccccagcgcgcagtcgcccgcccccgcgcgttgggaagttgggagggaggtgcgcgcttggccgcgcggggcggggcctctaccggcccgatggagcgcgcgggcgctactagccgcgggggccaagcscctggcttcttactgcggcttcatactgagggccgagccgaggcggcgcgggtgcaggagcagcacttacggcagtggggtctgacaggtgagcgggctccgggcgaacttcggccagcgggccaacctattgggactgcctcttgcgggccgggggcgcagcgggtgggccgcccggtgggcagtttacccgcccgcgccagggccttccttcgctcctgccgtgggcggagagaaactgcgcccgggcttggtggccacggcccccgcctgcgcggcgcgcggggccggcggacgccagatgaatgaggtcgcgggcccggtagccaggcctggcccctggcctgtg

SEQ ID NO: 535065 - DNA, 619 bp, Homo sapiens
gaagcacgactggtgagaactgggcagcccttccacgctccgcactgcaagaactgcctgtccggaagggtgactgcaccagctccgctccggatatcttggcaggacgcgccctctggcggcgcctcgctcataggtgggccccagcgcgcagtcgcccgcccccgcgcgttgggaagttgggagggaggtgcgcgcttggccgcgcggggcggggcctctaccggcccgatggagcgcgcgggcgctactagccgcgggggccaagcgcctggcttcttactgcggcttcatactgagggccgagccgaggcggcgcgggtgcaggagcagcacttacggcagtggggtctgacaggtgagcgggctccgggcgaacttcggccagcgggccaacctattgggactgcctcttgcgggccgggggcgcagcgggtgggccgcccggtgggcagtttacccgcycgcgccagggccttccttcgctcctgccgtgggcggagagaaactgcgcccgggcttggtggccacggcccccgcctgcgcggcgcgcggggccggcggacgccagatgaatgaggtcgcgggcccggtagccaggcctggcccctggcctgtg

SEQ ID NO: 535066 - DNA, 410 bp, Homo sapiens
ggcttgactttgttcttgacttactccatcattttgccgcctttcttccctcctctygctatacaaaaattttctcgtgttatggaaaatgagacatcacttaccccttgcttctctaaagtaatgcttctcagacttttcaacccatatagctgtagatgagaggatagtgactttacacccccaaacagggcatagttgtagatgactgaccacaggctttcttcagagtctccagtttttcttttcttttttttttgtgtgtgtatttgaattttgcattttactcttcacatatctgtatttattttgctactaaaatgaaagcttatatttctttccattgagcaaattgacattccagaaagaggcaccttgtttattctagggcttatatcccctgttgcatt

SEQ ID NO: 535067 - DNA, 558 bp, Homo sapiens
tactgagttttcgtagtctgataatacaatttgctttgcttttcttaaatttgcattgagatgggatttgaagcatattgtgctcttttgaatgttgaagttgcattgtagaagtttagaagctctggctatgggttatctaagttgatgttttgaggaggcatattaatgttatatacttggctgacttttaaggttgtgttgtagcatgaggaacacaaataaaacaattstaaataaaaaaaaatttgaagtgcctgtgggacatccaattaaagaagtctagatggtaggtagtagatatcaaggtctgagagagatcccgggtaaaggtacaaatttatgagttgtcaccatagattggtcattaaagccatggacttggttgatacgtaagaagagaagaaaaagaaacagagaagaaccttgaggaacacaaatatttaagaaatgggcataaaaagaggagattatattgcagaaaggcaacatggtatatagaccaactaggaggagaggtgagagatcacagtggctcagaaaaaagtggtggcagca

SEQ ID NO: 535068 - DNA, 558 bp, Homo sapiens
tactgagttttcgtagtctgataatacaatttgctttgcttttcttaaatttgcattgagatgggatttgaagcatattgtgctcttttgaatgttgaagttgcattgtagaagtttagaagctctggctatgggttatctaagttgatgttttgaggaggcatattaatgttatatacttggctgacttttaaggttgtgttgtagcatgaggaacacaaataaaacaattgtaaataaaaaaaaatttgaagtgcctgtggracatccaattaaagaagtctagatggtaggtagtagatatcaaggtctgagagagatcccgggtaaaggtacaaatttatgagttgtcaccatagattggtcattaaagccatggacttggttgatacgtaagaagagaagaaaaagaaacagagaagaaccttgaggaacacaaatatttaagaaatgggcataaaaagaggagattatattgcagaaaggcaacatggtatatagaccaactaggaggagaggtgagagatcacagtggctcagaaaaaagtggtggcagca

SEQ ID NO: 535069 - DNA, 592 bp, Homo sapiens
caaaacattagtacttattttagagtgttgtgaggatgaaatgacttaatacatataatgcacttagtgtagtgctgaacatattataaatgctatagaagatagcattattaaaaccataatatattgctactgttattacatatggctgaatcttaaaacctgtatgatttccataactcccatagacttttggtcatcttctaatcaagagcgaagctgtaggtctttttttttatttttgccccaaaccctgcttaaatcgtgaggaaaaggccttagaacaagactsattattctttttctttgaaatgagaggcagagggcaagtttaaaatcagcagggagaccattatcctaatctaattaatgcagaaacagaaaaccaaataccccatgttctcacttacgagtgaaagctaaatattgagtgcacgtagacatgggatgagaacaacagacactgggaaccactagagaagggagagaaggaggggaacaagggctgaaaaactacctgttgggcactatgctcactacctgggtgacgggatcactcataccccaaacctcagtgtcacgcaatatgccc

SEQ ID NO: 535070 - DNA, 563 bp, Homo sapiens
tgagggtcttctggagttcacagtagaggagagagataaggacgatcatttacatccttgagatcaggtgcagtgtagagaactgtggttagtgccacttacattctacttaaatacatttcccagatacatgtacctaatttctttttaattgrctctagaaaaggtaccttatttggtatggcaattgcaattagggcaactacttgacggagtttatagtatctattttcattcctccaggaactatctcagttttgtagagatcagaccagtggatcaaatgaaaatatagtatcaccaattctgcaacttttaaaaattgcattaatttctaccattcttgacatggaatattgttttttgatttactatcttggccacatggggatgcagtttcaaaaacttccacttaaacttccttgctatgattaccctttcttcccaggccaaagaaccaaagtgggagttgtgtcaactatcaagtatgcccatttaaacgataccttcaaagactaggaaaataaatccgaagtatatctttggaaccagtggaccctgtg

SEQ ID NO: 535071 - DNA, 528 bp, Homo sapiens
attaaccaaatctaattggaagccaaaggaaaaggggactaaatgatatagcccattggcatcagccttttgggaaaaaattagtgcacagaagggcagaataaagctcagaaagttgatgtcaaaataaaaaataacaaggacaggatcagttttttctatattttcaaaatgatcaactagtttgatgataatttagtaaaaatatacaattaaaaatatttgctattgaaagtaatatgccatttgttgcaatatcttataagttagcaggtcaatttgaaaagaggagaattaagttaaacagtcttaatgccataatcagggcaaagtaagaggaaaacatcattaaatataattgttcctttagtaaatgggtcaatagcttatggaattgtttcaatttagaaaatacatttcaggccaggcgtggtgggtcatgcctgtaatcccagcactttgggaggccgaggcaggcagatcayctgaggtcgggagttcgagaccagcctgaccaacatgaccaac

SEQ ID NO: 535072 - DNA, 469 bp, Homo sapiens
tgcagtagcaaagtgagaaatgtatttgcataacataattggtaaaaaattaatattttttcggttttttattttcttcaatttgtgactaaaatagaaccacatggttgttcrtgttaagttatccttaaaatacagcaaagcaaacatctcttttcaaatttatgggttggctttctagctaagaaaattgtataaagagtcacctttcttttctaaaaatttgctttttcctaggataaattctcttcactctgattaatttagtgagatgctggctatttcatgataacaaggatttaaatcaagtttggttgagagtctctgtgtaatacaagctgaatttttaaaaggttaaaaaaaggtgtttatataagatttttaaaagagaatgctagcactagaaattatagaaattgctaatcaatcttaccttctcaataaatgaggaaactaagacacaaaaagt

SEQ ID NO: 535073 - DNA, 670 bp, Homo sapiens
acctttctgcatgctttacacacatagcttcagtttaggtggcacagattcttttacctagttgtccattagttttgaaattaagtttcttaatatcttaaagtgacaatttgcttcataattaatacttaactgaggggatactttatagaagttattctctaaaaggtatttgtatagttttaaacaaagttatgcagtagcaaagtgagaaatgtatttgcataacataattggtaaaaaattaatattttttcggttttttattttcttcaatttgtgactaaaatagaaccacatggttgttcatgttaagttatccttaaaatacagcaaagcaaacatctcttttcaaatttatgggttggctttctagctaagaaaattgtataaagagtcacctttcttttctaaaaatttgctttttcctaggataaattctcttcactctgattaatttagtgagatgctggctatttcatgataacaaggatttaaatcaagtttggttgagagtctctgtgtaatacaagctgaatttttaaaaggttaaaaaaagrtgtttatataagatttttaaaagagaatgctagcactagaaattatagaaattgctaatcaatcttaccttctcaataaatgaggaaactaagacacaaaaagttgtcag

SEQ ID NO: 535074 - DNA, 567 bp, Homo sapiens
gaaaaaaacaaacagactggcaattacaacacaatgtgataaattcaccaatgcagccttgcccctggtgcttaaggggcttggattccatatggaaaaaaaattcccaaaacctcttcccaccattgaatattccactcttccactttcttgtctaaagtagtgaagtgatcactgtagcaatgagactatgtaaaagtcaaatgagctaaaggaaatcatagctcctttggaggcatgaggacatggaaaatctccattcccaagaagctgtgagatcatgtctgatttaaatcccaatcctaaacaaaccaggcctcacactggggtttcatgtgtagaatttcatgtcctatccctgtaatgaggtgataaggcctgtgtcacagtaagtcagtagcaggtgatggcaattaacaggattgcactaacctggagatgtgccaagctgtcaaaaaaaggattagaaagtaaatgaagtgaacaaccacgaaccagcaaatagggcttaatggacagtacaagtcrgtgaggcaaaaatgggccaatttgctctcattgattttc

SEQ ID NO: 535075 - DNA, 544 bp, Homo sapiens
gttatcatgtctctgtctggtttaggtatcaaggtaatattggcaccatggatgaattgggaaatgttttctcatattcagttttgtggaatattttgtagtggattggtggcaaccacaacattacagagaaggagataaaaataagcatatttaaacctcactgttctstagatttcattgtttttcttgaatacatgcttcctatattgttcccagccttatttttagtttccagagtttaatatttttttgccagtgttcttattattagtagatatttgaaggttgttattcatgcaattcctgacaatgtcactataagaggttgcttttatatgggtacaacaaggataaactaagtgatccataaataagaggaatcttttggaaacataatggttagcttagaaaattgaccaaatgtgtcagaagtggctaacaccaagagaagcttgatagttaaatagagaccacaattacatctcggtgaacgcctggtgaggacaaagatgtttctatggaaagacgctggatgcttcag

SEQ ID NO: 535076 - DNA, 544 bp, Homo sapiens
gttatcatgtctctgtctggtttaggtatcaaggtaatattggcaccatggatgaattgggaaatgttttctcatattcagttttgtggaatattttgtagtggattggtggcaaccacaacattacagagaaggagataaaaataagcatatttaaacctcactgttctgtagatttcattgtttttcttgaatacatgcttcctatattgttcccagccttatttttagtttccagagtttaatatttttttgccagtgttcttattattagtagatatttgaaggttgttattcatgcaattcctgacaatgtcactataagargttgcttttatatgggtacaacaaggataaactaagtgatccataaataagaggaatcttttggaaacataatggttagcttagaaaattgaccaaatgtgtcagaagtggctaacaccaagagaagcttgatagttaaatagagaccacaattacatctcggtgaacgcctggtgaggacaaagatgtttctatggaaagacgctggatgcttcag

SEQ ID NO: 535077 - DNA, 529 bp, Homo sapiens
cacttttttttgcctccttctttattgaatttgtaatagtcttttaatttaaatgttaataataggggacatataacacttgaattttaaaaactattttaatttaaattttaagaaatttwaaaaatatcattttctagatattaaaaattcaaatgaagtcttatttgaccaaatatgccaactctgctttttgcacccttgttgtgatactacagtttgtagagttaaaatatagaaggaaatggaaaaaaaaaaccaacttgtatgagttttttaaattttctctttcaaaattcctttttcaccagaaaatgaactctgagcttgtattcaagggtatgtcaactgttatctctttgaaacaaaggaatgaaaaaaaaaaaaaagaagtactactgcccaatacctgttagctaaaatataatgaagctcttgtggattttttgcagcggggagagcagagggttaaacggtcagccaacagctccaatttgtttctgtcaaataagtctgttaaaatcttaaa

SEQ ID NO: 535078 - DNA, 607 bp, Homo sapiens
tttctgttaacaccaataataaagtgatttagaatgtattcataagaaaataaacatagccactcaattatttttaggtagcttgaaatcttcataacaagtaacagatgtcctttctttttatcgtattcaatatacataattttttatgagcatcctttagacctataacaaagagaaaattaaagcccagcagatggcagtgtttgctactttttacaaattaattcagtgaggaatgattccccttacccygaaatatatttgttttcagattagtataaatcttgtttcaatttttaaaaaaacattacttgtaaggagcccagtcattttgtccttttctgagcccacattgagtgattctgtcacaatttattaaataagaaaagtattttaagggttattaatcttgtctgagagtagaaagcatttaacttgatccttttctttcagtgttcctggaactgctgtttttctcctcccccactaacccccatatacattgcagatgccatttcctcaaaaaagatggaagttaaaaatcaacttcaggccagaaatacatttgtgtttaaatgaaactgtattgggattacacctagct

SEQ ID NO: 535079 - DNA, 548 bp, Homo sapiens
ttaatttaagcagtgaggaatgatcagaaatggtagtggagtaagaccagaaggagyccctatctccagttcagtgatttttatactcaaagttctcacccaggaagttttcttcttgatgcagactgtgacatctgaaatttaaaacacgcattagaagctccaggctgttcccaccacccctttgctgcaaatagtatccatttagtcctcgctcatatcttacctcaatagattggaaatagaggaaaaatactttaatcccacttatgatctaagagacaaaataaaatgttctatgaagaaagaaggggggtgatttattaacaagtgactctgtgtagtagctatgcaaagtgttaaaagactaggaaaagtcattcctatttctggtgaaagaagataaggagaaatagatatttgccaaggctgatgtttccccaaatccttgccagcaaatcatggatcccagtatcgctcctctaactttaaatgtgtatttctttacttctgtgtgaacagacagggggatagatttaaggtgaaca

SEQ ID NO: 535080 - DNA, 548 bp, Homo sapiens
ttaatttaagcagtgaggaatgatcagaaatggtagtggagtaagaccagaaggagcccctatctccagttcagtgatttttatactcaaagttctcacccaggaagttttcttcttgatgcagactgtgacatctgaaatttaaaacacgcattagaagctccaggctgttcccaccacccctttgctgcaaatagtatccatttagtcmtcgctcatatcttacctcaatagattggaaatagaggaaaaatactttaatcccacttatgatctaagagacaaaataaaatgttctatgaagaaagaaggggggtgatttattaacaagtgactctgtgtagtagctatgcaaagtgttaaaagactaggaaaagtcattcctatttctggtgaaagaagataaggagaaatagatatttgccaaggctgatgtttccccaaatccttgccagcaaatcatggatcccagtatcgctcctctaactttaaatgtgtatttctttacttctgtgtgaacagacagggggatagatttaaggtgaaca

SEQ ID NO: 535081 - DNA, 597 bp, Homo sapiens
ctttaattactctccacctcatggtagacagagttttcagtkcaggtctaggtatgtaaaaggaaattgagaaaaacgttgagctttagttgagatgatgccatagaacaaaatacaggcctcagaattaaggaatttgtcctaggagtcaggaaaaaaataaaagcagccatttttccaaggcccacatctaagcctccaagatcaggtgatctgccagtaatttaactgcctgtcagaataaaacttaacactctatagagaaagataacagaatccagaatcccttataatttatcatccacaatctccagatatataaaataattataagacattatgctaaacatgacaatgtgagtgatctgtagtcaataaaaagagtcagtcaacagaaacagttctattgatacccaacatattggaactagcagacaaggactataaaagatatatgataaatatgttgttctattgatactcaacatactggaactagcagacaagaactataaaagatatattataaatatatttaaaaacactttcagaaaaactttaatacaattgtgaaaagttgtggaattttatgaaaga

SEQ ID NO: 535082 - DNA, 472 bp, Homo sapiens
  misc_feature (1)...(472): n = A,T,C or G
caagtcagagacccaacataataaggnnnnnnnnnnnnnnnnnnnnnnnnnnnnnnnnnnnnnnnnnnnnnnnnnnnnnnnnnnnnnnnnnnnnnnnnnnnnnnnnnnnnnnnnnnnnnnnnnnnncttttcttcaattctagaaaatgtcagcaattctcttttcaagcattggttctccatcatttttctgtttttattccagaaattatattgaaaatcctcattttattttatgtacctcataatyacttttgtctgccttatattactaccctgctatattctgaacaacatcttcagatctatctctagtccagtgatgctctcttcagttgtatctaacctgtggcgtatgctatattttgtgcaaagggcctgagaaaaacaaaaaatcaagcatatgatgtagactgaaactcacagacaaagaggtcagcagcctgcagagaggggttatttagttagagta

SEQ ID NO: 535083 - DNA, 472 bp, Homo sapiens
  misc_feature (1)...(472): n = A,T,C or G
caagtcagagacccaacataataaggnnnnnnnnnnnnnnnnnnnnnnnnnnnnnnnnnnnnnnnnnnnnnnnnnnnnnnnnnnnnnnnnnnnnnnnnnnnnnnnnnnnnnnnnnnnnnnnnnnnncttttcttcaattctagaaaatgtcagcaattctcttttcaagcattggttctccatcatttttctgtttttattccagaaattatattgaaaatcctcattttattttatgtacctcataatcacttttgtctgccttatattactaccctgctatattctgaacaacatcttcagatctatctctagtccagtgatgytctcttcagttgtatctaacctgtggcgtatgctatattttgtgcaaagggcctgagaaaaacaaaaaatcaagcatatgatgtagactgaaactcacagacaaagaggtcagcagcctgcagagaggggttatttagttagagta

SEQ ID NO: 535084 - DNA, 472 bp, Homo sapiens
  misc_feature (1)...(472): n = A,T,C or G
caagtcagagacccaacataataaggnnnnnnnnnnnnnnnnnnnnnnnnnnnnnnnnnnnnnnnnnnnnnnnnnnnnnnnnnnnnnnnnnnnnnnnnnnnnnnnnnnnnnnnnnnnnnnnnnnnncttttcttcaattctagaaaatgtcagcaattctcttttcaagcattggttctccatcatttttctgtttttattccagaaattatattgaaaatcctcattttattttatgtacctcataatcacttttgtctgccttatattactaccctgctatattctgaacaacatcttcagatctatctctagtccagtgatgctctcttcagttgtatctaacctgtggcgtatgctatattttgtgcaaagggcctgaraaaaacaaaaaatcaagcatatgatgtagactgaaactcacagacaaagaggtcagcagcctgcagagaggggttatttagttagagta

SEQ ID NO: 535085 - DNA, 641 bp, Homo sapiens
agacataagaaaactatatcaaaactgaaaaaggaaaataaatgtccctaaattcacaataatctttctttttaggttatcctggaacttcatttccatagaattctatatacatttcagtacattcttcctcaaggataaatataacaaattatttactcctcagatggccaagggtggccacacattgacatatttggacagaaactgccccacatctgctaagatttcatggcctcagattaaacaacagtaaaggaagttaaggcttggggacattggcttcagtaaggacaactgaccagtcaatgcaaagtgcccagtggcctcagaaagctcagacatggtttagcaggccttagggtaccatcccagcaggtagcattaatttagccacttggggatgttcccaaatccaggtcagccttctactgatggtgggaccacagtgagtggttttgctctctgggaaaagagagtagtaagagctaggcagtgttgtgtatcagagtgctcctctaacttccatatattgacaattcacctgcagctatcgttgaaatgcagatcctgattcagtaagtttggggtgggcctcagrcacttgcactcctaaaatgctttcaggtgaggttgagcag

SEQ ID NO: 535086 - DNA, 577 bp, Homo sapiens
gtatgtcttatgggtaagggaaataggagagccacatgattccatgctatttctagatgggtaacagacacagtgaactccagaggaatgcaggtaatcagggaaatatatcccaaatgtttttttccaggacaattaaaacgggtgctaaaatcagctttacaggtaaaaagaagtctcaaaaactttgtcagtgtgcrtggggttagcttttttcagaattaggaacacaatcattaaaaaaaagaagcaaagaactacaatttattgagcacctactaaataccaggcattgccctagatgctttctgtgcactgcaatacttaatctgttcaatagccttgtgaaataagtactactattattatcataaccattttgtagaagaagaagaaaaaaaacaggcctgaagagaataaattactcacctgggatcacaaggtacacagttggagagactcccaggctaattatttgcccaggaaggaaagactgatggagaaacagtcatttgctagccattctccctaagccagaaacggtactggctgtagcttctgggctttatgaggacag

SEQ ID NO: 535087 - DNA, 568 bp, Homo sapiens
aacaggagagatgggaggtaaggaaaggaaaagggggaaggtgatagaaggagagagatgatgagcacaggagagaggaggaaagacagagagaacaatcaacccaagggccatcacagcccaacaactccaaggctgcacaaagtctgccaaactcrcgcatgtccccatgatgcttccaaaaaaagagcagtctaaaatgtttctctttttcctattcaacaaatatttattgagcaatgtctatgtgccatttactgctttaggcactttagaacaaagaacaacacagataagctccccactttcagggagtttataatctagtagcatagaacttttactctgcccatctataaccattaatgcagtaacaagccttcctttgggcacagagagatcccaggagttccggagagaggaaaatgtaagcaaacacttactgagcaccaaccctgtgtgagacactgacctagccactggggatacaacaacacagcagacactgccccttccctggagtagctcaccggtaacaaacggtaataaaaacatgagcatttgttga

SEQ ID NO: 535088 - DNA, 568 bp, Homo sapiens
aacaggagagatgggaggtaaggaaaggaaaagggggaaggtgatagaaggagagagatgatgagcacaggagagaggaggaaagacagagagaacaatcaacccaagggccatcacagcccaacaactccaaggctgcacaaagtctgccaaactcacgcatgtcccyatgatgcttccaaaaaaagagcagtctaaaatgtttctctttttcctattcaacaaatatttattgagcaatgtctatgtgccatttactgctttaggcactttagaacaaagaacaacacagataagctccccactttcagggagtttataatctagtagcatagaacttttactctgcccatctataaccattaatgcagtaacaagccttcctttgggcacagagagatcccaggagttccggagagaggaaaatgtaagcaaacacttactgagcaccaaccctgtgtgagacactgacctagccactggggatacaacaacacagcagacactgccccttccctggagtagctcaccggtaacaaacggtaataaaaacatgagcatttgttga

SEQ ID NO: 535089 - DNA, 568 bp, Homo sapiens
aacaggagagatgggaggtaaggaaaggaaaagggggaaggtgatagaaggagagagatgatgagcacaggagagaggaggaaagacagagagaacaatcaacccaagggccatcacagcccaacaactccaaggctgcacaaagtctgccaaactcacgcatgtccccatgatgcttccaaaaaaagagcagtctaaaatgtttctctttttcctattcaacaaatatttattgagcaatgtctatgtgccatttactgctttaggcactttagaacaaagaacaacacagataagctccccactttcagggagtttataatctagtrgcatagaacttttactctgcccatctataaccattaatgcagtaacaagccttcctttgggcacagagagatcccaggagttccggagagaggaaaatgtaagcaaacacttactgagcaccaaccctgtgtgagacactgacctagccactggggatacaacaacacagcagacactgccccttccctggagtagctcaccggtaacaaacggtaataaaaacatgagcatttgttga

SEQ ID NO: 535090 - DNA, 405 bp, Homo sapiens
actcccagtgtgtcactgggctggtgttctccccacacaggtactgttctttgtcatcaggggcctgatgggtataaatgggaacmgtgagggtgtgtgtgtatgttttcaaagcattagctgatgaagtagttccttaaagcagacagtgttctagctgaggtttcggaacatcgaagatctcttaagtgtgaagtagaatcctttgggagtcaaaggatttttcagattagatggtttctgtctgaaatggctaaaatgtgatttcattcctgcccaacacccaaaatggttaatgttgtgggcttctaggactgtgagattggaaaagcctgtgtttctgggttattgctgaagctatagagagggaccagatggggtggttagttgccaggatggttgtca

SEQ ID NO: 535091 - DNA, 597 bp, Homo sapiens
tgctaaatttactaagcacacactatgtaccaagaactgtttttgagtttcacagcaattgtctcttaattctcaaaagccacaatgcactattatcgccattttatagatgaggaaattgaggtcacacagccagtaagtggaggggccagggaccctgtactggctgtggagccctcactctaaaccaatactcttaaggtgcctcccattcctagactgtgagctccatgagggcaggtaattagccatactcattcttgtatccttggttatgtttttaggcaacataaatatttactgaatcaatgaatgatttctctgattgttatcatatggcagcaaaaactaggtatctgggaaaccgactgtaaacaacatgctttactgttttattgaacaaaatttattcttgggtatgtmatctactcggattcaggctgtggaagctacatgtcataaggtcccaagggaaggtcacaaaggagtagggcgggtatagaagacagcaaaaccaatttctagtttagttagaatacgttacttatcctgctaaaatcttggtcattaggtgacatgagagcgttcctggcagtt

SEQ ID NO: 535092 - DNA, 506 bp, Homo sapiens
tccccatgcaaatgatcagtttggggttttttttgtttttgtttgtaattttgaggaaaattcttgatgcccatcccccatcccactctaaatcccataatacctagaaataagaacagggaaaggcaatcgccaaaatrtttgatcaaagtaagtctttgaggcatcattgctgtgtagaagtatgtttgagcctaagtatcatcctgactttatcgttattactattatttttacattatgtctatttttctcaacaaacatctttcttggtactcaattgtttttcctatatgtgacatggtagaaaaatgtgagatttgcagttataaagacttggattcaagtttacttacttattaaatgactgttacctttgggaaaattattttaaatttattttaaaatatttttattctctgtgaccctcagttttataattcacaaagtggagacaataacatctccattttcacagagatttagaagagaaatatatataaggt

SEQ ID NO: 535093 - DNA, 614 bp, Homo sapiens
aggtgtgcaacactatgctcggctaatttttgtattttttgtagagacagggttttgccattttacctaggctggtctcgaactcctgggctcgagtgatccgcctgcctaggcttcccaaagtgctgggattatagacgtgagccaccgcgccaagcttgatatatgatttcttaattctacaacctccatctttccaaactttattccacgaacaacttaactttgtgaagtcatcgcttaactcaaacactactgtgtctcataactagagaaggcaacttgctactcaatggagaagtagtaacttacaaagtttgagaagtaattctagccatgaaactgggartgatgattttccaagaggtctatagcattctctcgggggttttttttgtttatttcttttttttacccttttaaattacccctcaaatcctgcacaaggacaacccttcccagacaatcgacattgcctggggtgcagaggagaatgtagattttttttttccaggctctcattggtcccagggccacatgagggcggactcagggccctgacctccagagtcgtctcgtggtctgtgctctgcagcctcctgcacaccccagcc

SEQ ID NO: 535094 - DNA, 614 bp, Homo sapiens
aggtgtgcaacactatgctcggctaatttttgtattttttgtagagacagggttttgccattttacctaggctggtctcgaactcctgggctcgagtgatccgcctgcctaggcttcccaaagtgctgggattatagacgtgagccaccgcgccaagcttgatatatgatttcttaattctacaacctccatctttccaaactttattccacgaacaacttaactttgtgaagtcatcgcttaactcaaacactactgtgtctcataactagagaaggcaacttgctactcaatggagaagtagtaacttacaaagtttgagaagtaattctagccatgaaactgggaatgatgattttccaagaggtctatagcattctctcggggkttttttttgtttatttcttttttttacccttttaaattacccctcaaatcctgcacaaggacaacccttcccagacaatcgacattgcctggggtgcagaggagaatgtagattttttttttccaggctctcattggtcccagggccacatgagggcggactcagggccctgacctccagagtcgtctcgtggtctgtgctctgcagcctcctgcacaccccagcc

SEQ ID NO: 535095 - DNA, 638 bp, Homo sapiens
gtctgttttgtccccaattatttattttgtctattttgagccagacactatgttagatgctggagacacagtgatgaacaagacaagtatgatcctttccctcttggggcttgcattctctttctagttgaggagacagaagcttaactaatcacacaatcacatagcaatgactgtgataagtgccattggagaaatgcaggatgataaagagagtgtaacaggagtctgtggggtcggggatggtttctttgaggaagsgatttttaggtagagacctgagggttaagtaggagacatagaagaggggacagagagtcacatgttcaaatgccctgaggaggggaaggagtgtgatggtcagtgtggctggaacacagcaagtgaagacagaaggaacttgggagaggctggggaaacaagcagagggcagggggcagggcagcagggccctgcaggctgtgggaaggtagtggactttatcccaagagcaattggtagccattgaatctagggttttgagcgggaaagtactgtgactggatttaaggagatgaggctgggtgcagtggctcacatccgtaatcccagtactttgggaggttgaggcggaaggatcatttgagcccaggagtttg

SEQ ID NO: 535096 - DNA, 619 bp, Homo sapiens
tttgaaaggtactttatttgctgactcttgcagtgattttggctactaccgtccagaaaatgactccaagtgtgtggaacagccagaactgaagggccacgacctggagttttgtctgtacggaagagaagaacacctaacaacaaatgggtgaggtggccttttctcccttgtcacgatggatgaggtgttcttgttcagagtgaaagctgcttctctccacactgagatccaagccctactttagagcactatttttggcggggttggggaggggcaggatatgaaggcctccttcaagggtcaactacaggaggtgagccatgagtgcttggtgtcagaggactcaaccccaccaacaccacgaggcagagcaggagaacaagctcggccagatcctgcacccctgcctcccgcccaaccacccccaggaagggaggagaggcgagggacccacaggcagaatgacagaagcgtcccrtccgccatgaacgtccatcgctcgtctggcacagtttaggcacagccagggagagctctgtctgataggactttctttggtgatggaagtgttctgtaatttgctgtgcccaatatgatagtcactagccacacatag

SEQ ID NO: 535097 - DNA, 521 bp, Homo sapiens
acttatcagtctgcgaagtggatctcttaacctcccagaggggctgtggtgacgttaacccagggcagaggtccttcttcttcctcactaaatcatggaaagataatttttttgttgttgttgtttgttttgagacagtgtttcrctcttgttgcccaggctgaagtgcaatggtgcgatcttggctcactgcaacctccacctcccggattcaagcgattctcctgcctcagcctcccaagtagctgggattacaggcatgtgccactatgcccatctcattttgtatttttggtagagaccgggtttctccatgttggtcaggctgttcttgaactcccgacctccggtgatctgtccgcttcggcctcccaaagtgttgggattacaggtgtgagccactgcacctggctgataatgtattattttaactcacacctggaaacaggcactgcttttgctgatagagccatgagctaatttaaagtcctacttttgcagggtggagaggggatttctca

SEQ ID NO: 535098 - DNA, 597 bp, Homo sapiens
ttatgctattttgcaagaattatataaattgtatttctcatcagttcaaatttggcatgaacatttctttaatcccacagtttcataatttacaatcttacttctgtgtattgtgaaaatggtctgagcatagggaatgtatgctatttatctttgtaatccctgaggtatcttagcactctgcctctcaagaaatacagcatctgctaaatggaattgatttgttccacagatagtttgccctggtcagaggtaagattagggagtggaaattcataacttaggttctccagatctggttgcacgctaaacataaaggaaacacagagtaaatgcttattgatttctgaactaggagggtgggcttttctaaccacaccaattttagccattgctatatcttgtaaagctataaaggattgattaaacacactgacttgttactgagcaagattcaaggaagatgtgtgtcttggacagggaacarctagagactttgtgctcagttaggctgggatgacacatggagaaaaacatatggagtcaagggtgactgtagccaagaagaaaggtgaagcagagtgtggagcaaaacat

SEQ ID NO: 535099 - DNA, 656 bp, Homo sapiens
tccaccattaactatcatctctctaaataagaacrtgcagtcaactgggaactcagaaacaactttttgtacacattttacctgtatgccttgcaccttaagttatttctaatgtcattagagaataaaaatgtaccatcagaaactgcatcgtgacactctcaaagttactgttgaatagaacaaaaggaaaataaaggtaaaaacctctccccttggtcttctgtatttcactctttattcattgatctttttattccttcctttccctccccttcttttcactcccctcttctcccctcccgttttcccctcccctttctccccttcccttctctctcctctcctttcctcccctcttctttcttcctttctcctgtctttcttttctttccttcctccctccatctccccctcccgctctctcttcttccttccttctttcttccctcccttccttcttccctccctctctccttccctccctcccttctttccttccttcctttcttccttccttcctccttctctcccttctttcctccctccctccctccttcctttcctttcttcctttctctgaactcttcatttttgctaacactctgtttcctatgtgcttgccaaattttagtctattttaatagtctagtgtt

SEQ ID NO: 535100 - DNA, 656 bp, Homo sapiens
tccaccattaactatcatctctctaaataagaacgtgcagtcaactgggaactcagaaacaactttttgtacacattttacctgtatgccttgcaccttaagttatttctaatgtcattagagaataaaaatktaccatcagaaactgcatcgtgacactctcaaagttactgttgaatagaacaaaaggaaaataaaggtaaaaacctctccccttggtcttctgtatttcactctttattcattgatctttttattccttcctttccctccccttcttttcactcccctcttctcccctcccgttttcccctcccctttctccccttcccttctctctcctctcctttcctcccctcttctttcttcctttctcctgtctttcttttctttccttcctccctccatctccccctcccgctctctcttcttccttccttctttcttccctcccttccttcttccctccctctctccttccctccctcccttctttccttccttcctttcttccttccttcctccttctctcccttctttcctccctccctccctccttcctttcctttcttcctttctctgaactcttcatttttgctaacactctgtttcctatgtgcttgccaaattttagtctattttaatagtctagtgtt

SEQ ID NO: 535101 - DNA, 597 bp, Homo sapiens
ttatgctattttgcaagaattatataaattgtatttctcatcagttcaaatttggcatgaacatttctttaatcccacagtttcataatttacaatcttacttctrtgtattgtgaaaatggtctgagcatagggaatgtatgctatttatctttgtaatccctgaggtatcttagcactctgcctctcaagaaatacagcatctgctaaatggaattgatttgttccacagatagtttgccctggtcagaggtaagattagggagtggaaattcataacttaggttctccagatctggttgcacgctaaacataaaggaaacacagagtaaatgcttattgatttctgaactaggagggtgggcttttctaaccacaccaattttagccattgctatatcttgtaaagctataaaggattgattaaacacactgacttgttactgagcaagattcaaggaagatgtgtgtcttggacagggaacagctagagactttgtgctcagttaggctgggatgacacatggagaaaaacatatggagtcaagggtgactgtagccaagaagaaaggtgaagcagagtgtggagcaaaacat

SEQ ID NO: 535102 - DNA, 597 bp, Homo sapiens
ttatgctattttgcaagaattatataaattgtatttctcatcagttcaaatttggcatgaacatttctttaatcccacagtttcataatttacaatcttacttctgtgtattgtgaaaatggtctgagcatagggaatgtatgctatttatctttgtaatccctgaggtatcttagcactctgcctctcaagaaatacagcatctgctaaatggaattgatttgttccacagatagtttgccctggtcagaggtaagattagggartggaaattcataacttaggttctccagatctggttgcacgctaaacataaaggaaacacagagtaaatgcttattgatttctgaactaggagggtgggcttttctaaccacaccaattttagccattgctatatcttgtaaagctataaaggattgattaaacacactgacttgttactgagcaagattcaaggaagatgtgtgtcttggacagggaacagctagagactttgtgctcagttaggctgggatgacacatggagaaaaacatatggagtcaagggtgactgtagccaagaagaaaggtgaagcagagtgtggagcaaaacat

SEQ ID NO: 535103 - DNA, 446 bp, Homo sapiens
tgagtcaccacgcctgggtaattttcaaagttttttgtagagataggatcttgccttgttgcccaggctgatcttgaattcctgaccacaagccatcttcctgcctcggcctcccatagtgctgggattacaggtgtgaaccaccatgcccagcctattcttttcttagaggggcttttcttgacaacctaactaaaccactctccccgccccccggccccaccaaagcttcctgttacagctctggagtcttcactacccaaaattacattgttagtttacctcatccatgtattcatcaaatatttttttaactcaactcataacatgttccaggcactgatttagcctctggggataaactggtgaacaagataaagttcttctccattaactatastccctagtactaggttaacacatgtttgctgatcaagtgaatggat

SEQ ID NO: 535104 - DNA, 606 bp, Homo sapiens
ctggcactgaatggcgtcagtgcccaatgactgatgcaatcatacgaaatgtgcagggcagccaaaggaactcaaaaaagggaagagtgaagagccaagtgattagaaatgattttctctctttatctaaagagtctttattgtttgtggggcaggaggagtgatcatttaccaccgctccggttcgcagggagaagcatttccactgaaacatcctccagacctagctcttcactcgctcacccccrcctccccttgggaagaggaggaactcctctgattagtgggtttgggtgaaggcactgaacatgcttagctcctgccctgcctctctctgggttctgcctgcctgcagaaaattccctgcatcttttttccactagcggagcgggctctgcccgggcgaggcagatctgcagttccagggaggaggttctgtgttctcctgtgcaccgaagctggagttttgatctccatttgtctgattctggtgggaagtgagggatgttatattgggctttcttaagcctcattggtgtcaaaaatgtatcttgctaaaaaaggaaatggatgatatatattttttaagtcagggtttttgcaaaa

SEQ ID NO: 535105 - DNA, 606 bp, Homo sapiens
ctggcactgaatggcgtcagtgcccaatgactgatgcaatcatacgaaatgtgcagggcagccaaaggaactcaaaaaagggaagagtgaagagccaagtgattagaaatgattttctctctttatctaaagagtctttattgtttgtggggcaggaggagtgatcatttaccaccgctccggttcgcagggagaagcatttccactgaaacatcctccagacctagctcttcactcgctcacccccacctccccttgggaagaggaggaactcctctgattagtgggtttgggtgaaggcactgaacatgcttagctcctgccctgcctctctctgggttctgcctgcctgcagaaaattccctgcatcttttttccactagsggagcgggctctgcccgggcgaggcagatctgcagttccagggaggaggttctgtgttctcctgtgcaccgaagctggagttttgatctccatttgtctgattctggtgggaagtgagggatgttatattgggctttcttaagcctcattggtgtcaaaaatgtatcttgctaaaaaaggaaatggatgatatatattttttaagtcagggtttttgcaaaa

SEQ ID NO: 535106 - DNA, 312 bp, Homo sapiens
ctgggggcctcagctctggtccttgcttgctctgtgatgtggcaaacctcagtctccttggcctcaatttccctatccataaaaagatggggctgatgtcccacccagatctcatcgctggtgaggagggagtgctgccaagaaacaaactgcagtgagatggtcagattttccccctgggctgttgaccacagagcctcctaactccccctctgcctccagtctcatcccacctgctccatcctctgcagtctccacatcaggttttgytactcctttgctaccactcaccatggccccattcatccagac

SEQ ID NO: 535107 - DNA, 621 bp, Homo sapiens
aacctggaagcagttcttcatcagacactttgtctgcagaatccttgatcttagacttcccatcctccagaactgtgagaaatacattgctgtttttttgtaagtcactcagtctatgatattgtgttatagcagcctgaatgaactaagccattagagaaggctacaatacttgagaaaatagtgtagtttctatgtaggggtgtgtgctacacagaggttgtcttttcttggcacactgtaataagtaacttagatatagttttattattgaataaatatgaaatataacttggatatatttatagttattttagaaaacataaataagataaaatgtgtgaaattaaacaatacccatcaaaacctgcccgaaatcaccccgtattaattttttcattggcatcttgatattttagataatatattgttgacarttgatagctaaaataaccagaatagaatggattttttttcctttgcaaattaattcatgacttgtccagagataagaaaaatatgccaaatgtatttccacagtcacatttaatgcaaagtaattaatttaagatgaaaattaattataggtactctggaaaaagcattttggattcattgtga

SEQ ID NO: 535108 - DNA, 596 bp, Homo sapiens
gtaaaaagtcttttgatcctgtgtccctttcctgccccccaccaagtaaatatgcaaaattcttttgattttatggtcctggaatttgcagaagcccaccgagtgatagcttcaatggaaaacctctggattagagatttttggtyagtctgttttggggggtatatatatgtgtctatttctggaaataatacattttcagggaaaaattaagtagcatcagattatgacacgggaagaagaattttgtggtggacttttggaggactgctttagacaagtattcaggatatactctttcagaatgagacctttaaccagaatcatgaaaatgctcgtgaaaaaatactatgagaaagttggcggaagaatattctggtcaaagtaaactatattcaaaatctctgaggtaaaaattagcatatacaagaaactggtttggcatgaaattatacacacacacacatatataatatatacgaagtataaataatatatatatgaagaattaatcagagagcacatcatgtaggtctttgtagtccatgggaaggagctggtattagtctacttgtaaagaaagctgttgttgtatt

SEQ ID NO: 535109 - DNA, 596 bp, Homo sapiens
gtaaaaagtcttttgatcctgtgtccctttcctgccccccaccaagtaaatatgcaaaattcttttgattttatggtcctggaatttgcagaagcccaccgagtgatagcttcaatggaaaacctctggattagagatttttggttagtctgttttggggggtatatatatgtgtctatttctggaaataatacattttcagggaaaaattaagtagcatcagattatgacamgggaagaagaattttgtggtggacttttggaggactgctttagacaagtattcaggatatactctttcagaatgagacctttaaccagaatcatgaaaatgctcgtgaaaaaatactatgagaaagttggcggaagaatattctggtcaaagtaaactatattcaaaatctctgaggtaaaaattagcatatacaagaaactggtttggcatgaaattatacacacacacacatatataatatatacgaagtataaataatatatatatgaagaattaatcagagagcacatcatgtaggtctttgtagtccatgggaaggagctggtattagtctacttgtaaagaaagctgttgttgtatt

SEQ ID NO: 535110 - DNA, 596 bp, Homo sapiens
gtaaaaagtcttttgatcctgtgtccctttcctgccccccaccaagtaaatatgcaaaattcttttgattttatggtcctggaatttgcagaagcccaccgagtgatagcttcaatggaaaacctctggattagagatttttggttagtctgttttggggggtatatatatgtgtctatttctggaaataatacattttcagggaaaaattaagtagcatcagattatgacacgggaagaagaattttgtggtggacttttggaggactgctttagacaagtattcaggatatactctttcagaatgagacctttaaccagaatcatgaaaatgctcgtgaaaaaatactatgagaaagttggcggaagaatattctggtcaaagtaaactatattcaaaatctctgaggtaaaaattagcatatacaagaaactggtttggcatgaaattatacacacacacayatatataatatatacgaagtataaataatatatatatgaagaattaatcagagagcacatcatgtaggtctttgtagtccatgggaaggagctggtattagtctacttgtaaagaaagctgttgttgtatt

SEQ ID NO: 535111 - DNA, 525 bp, Homo sapiens
tctgtcacatcattactcattcagtgccccttaaactatttttcttcccaggattctgggtcattatttccctggataggtaaccctacactttattattggtgtcttttcccctctctgtgttggatgccatgaggcaatgctcagatttctcttcaggaatgaagatcttgttgtctcaactgctcaaaatgttgtcactaagttatcttcagtttccagttctcttctgaaatgtctcagctaaaaagaggtgtctcccaagtcccccttcccagagtagcccacaaccaataattgaccaatgtgcmtataaagcccaggccatctagatgaaaatcataactctgaagtgtcattcctttccagagacccctaagaggtcagccaaggtcatggctgggattgcatcacatctgaacttctccctctatccaagcctgcttctcttccttccctgccataggtgttgatacccagggtccttcctaattaaactgctgcagaagcacttcctaataatcg

SEQ ID NO: 535112 - DNA, 594 bp, Homo sapiens
gtttctggctttggcatgtggggaggggttggggattcatgacatggaaaggtcccctaacatagaaagatgttcaaaaggtactggcactcctgaaatgtaatgaaggtcttcaaccatggccaatactttttgggaacttaatgtgttcttggcacacagctctgggtcygttcaccttctaaagataaacagggccctgaaatcacctttcctcactctccaccacatgaattaggatgaattgactctagggatgggtgtgtgactcagactcaactaatctgaatatcagaacctcagtgattagtttggaatgatatgtgaaccagtccaaggcaactaggtgtcaccttggctttttgctgaaataaatgaggacttgggctgtgagggtggagcctagagctgctggaagccaacttcctactgcaaagaacagagatgaaagataggggaaggaagaccaaatcctgatgtattttgtgcttcttggtacctgaatcagtcagaccaccttttatgtgagcatataaattacctgtctgcttacaccaagccaatttgcatagtttcccatcatttgtaatccat

SEQ ID NO: 535113 - DNA, 565 bp, Homo sapiens
gagtgtgactaacccaaaaatgcaagccaaaacaattctggcagagtgaagcccattttactggttgcccctgagcatgaattgctacgtccaattagcaaacacaggatctgagattttcttggctgccgcacaactcagatcgctgcttcagtggcagccaaatgattatccaggagcaaatgagggagaaggacagagatcccccatacagcctgtttgaaacattattatagcagcaggcacaaagctygcagcatgcaggtgaaacttctttcactttcaaatgctaacattaatttctaacttgaagcctactcattttttttaacttgatgtagaaaattagtctcatcatatcaggtaagctaagggattttttagccattcccagttttaaactcagtcatttcaagatgttcgcttcttgcctttctcacaatgctgccatggtggtgaatggaaatgtgttgacttcttagccttggttcatcctgccaggttctcagcacaggttatgaacctccacctttcaagggcagggatggtcttgggaagcttactc

SEQ ID NO: 535114 - DNA, 683 bp, Homo sapiens
tctcagaaggttaaaatcaaggtgtcaatggggctccattcccttctggaagatttgtgaatgcatccgcttctaagtgcacacaggctgtgggttaaagtcaattctttgaggctgcagcactgaggttcccatttccttactagctgtcagccagggcgagtctttactcctagatgctacacacgtttcttctcaagcgttccatctggaccccttccagtgacagcaggttgaattcctctcatgctttgattctctccagctcccctttctgtggcatttctctgctgcatctctcttctgcaatcagaagagaacattttctgcttttaaggacacatgattaaattagctaatccagaacaatcgctccattctcagatctgcaaagttctttctgccatttaacaatacattcacaggttttgaggattggaatgtgaagtctttagaggaagggtctccaactcttgggccaaagactggtaccaggcagctagaaaccrggcagcagccaggcacagtggctcatgcctgtaatcccagcactttgggagaccaaggcaggtggatcgcttaagctcagcagtttgagatcagcttgggcaacatggccaaaccttgtctctactaaaaatacaaaaaagcacattgcatttattgtgcactttatttacagc

SEQ ID NO: 535115 - DNA, 619 bp, Homo sapiens
ttccatggcaaacacttcaagcacaacatctcctggcctatattcatctcctccccacacccagtcttgcccagtattccctatctcagcagaacctagagtcactcttgattcctcatcaccttcacctttcacattcatttagacatcaagttmtagctgttctccctcataaatatatctcaaaacaccatttttctccatcttaactgccactaccttgaataatcctattaacccaccatccattcttgcccgaaatcacaccatggccccctaataggctttatattttctaatctttctgctctcagatcctttctgtgtgctacagccagaaagatctttctgaactgcaaacctaatcattatgaggtttaaaaccaatcagtctgttccattgcttttaggatagaatccagtctccttaacaggtctaatcagatccttgatgatctggtcctgcttagctcacagccattatcatcttcaccttcaattacagccctaaaaacattctttcagtgccttaaaggtagcttgcactctctcctctgggccttcacacaggacattccctttatcaaaaaaccttttctacctttcccaattccatctt

SEQ ID NO: 535116 - DNA, 621 bp, Homo sapiens
tcttccatggcaaacacttcaagcacaacatctcctggcctatattcatctcctccccacacccagtcttgcccagtattccctatctcagcagaacctagagtcactcttgattcctcatcaccttcacctttcacattcatttagacatcaagttctagctgttctccctcataaatatatctcaaaacaccatttttctccatcttaactgccactaccttgaataatcctattaacccaccatccrttcttgcccgaaatcacaccatggccccctaataggctttatattttctaatctttctgctctcagatcctttctgtgtgctacagccagaaagatctttctgaactgcaaacctaatcattatgaggtttaaaaccaatcagtctgttccattgcttttaggatagaatccagtctccttaacaggtctaatcagatccttgatgatctggtcctgcttagctcacagccattatcatcttcaccttcaattacagccctaaaaacattctttcagtgccttaaaggtagcttgcactctctcctctgggccttcacacaggacattccctttatcaaaaaaccttttctacctttcccaattccatctt

SEQ ID NO: 535117 - DNA, 619 bp, Homo sapiens
ttccatggcaaacacttcaagcacaacatctcctggcctatattcatctcctccccacacccagtcttgcccagtattccctatctcagcagaacctagagtcactcttgattcctcatcaccttcacctttcacattcatttagacatcaagttctagctgttctccctcataaatatatctcaaaacaccatttttctccatcttaactgccactaccttgaataatcctattaacccaccatccattcttgcccgaaatcacaccatggccccctaataggctttatwttttctaatctttctgctctcagatcctttctgtgtgctacagccagaaagatctttctgaactgcaaacctaatcattatgaggtttaaaaccaatcagtctgttccattgcttttaggatagaatccagtctccttaacaggtctaatcagatccttgatgatctggtcctgcttagctcacagccattatcatcttcaccttcaattacagccctaaaaacattctttcagtgccttaaaggtagcttgcactctctcctctgggccttcacacaggacattccctttatcaaaaaaccttttctacctttcccaattccatctt

SEQ ID NO: 535118 - DNA, 587 bp, Homo sapiens
ttccaattcaatttggacaaagctaaactaacacattcttccactcctkcctgcactctccagtagctaaagtggggcttatagccttaaccccctccccatcacctgagccagcattccatgtgttatgaaattaaatggggatatatgacctaagcacttaggaccggaacatctgtgagggatcctctctctgtgtctattagtcacagaaactttccagcattcaggcaagcctatgcagagcatctttctgaatgtttcatggttctcaaccggacgtggtggctcacacctgtaatcctagcacttagggaggctgaagcgggtggatcacctgatgtcaggaatctgagaccagcctgggcaacatggcgaaaccctgtctctactaaaaatacaaaaattagccaggtatggtggcaggcacctgtaatcccagctatttgggaggctgaggcacaagaatcgcttgaacccaggaggcagaggttgcagtgagctgagattgcaccactgcactccagcctggacaatagagcgagactccatctcaaaaacaaaaacaaaaacaaaaataaaataaa

SEQ ID NO: 535119 - DNA, 397 bp, Homo sapiens
acctagtttttaaatcctggtgcagccatttacaacttaaatggctttgagtaactggcaactctcagtggggatgctaatacctactgcattagtaagggttctctagagagacgaactaataggatagatgtatatatgaaagggagtttgttaaggagaaatgactcacacaatcacaaggtagagtcccgcrataggtcgtctgcaagttgaggagcaaggaagccactggtggatgagtccgagtcccaaagcctcaaagataggaaagccgacagtacagcctttattctgtggccaaaggcctaaagagccctggcaaaccactggtccaagagttcaaaagttgaagaacttaaagtctaatgtttgagggcaggaagcatccagcatg

SEQ ID NO: 535120 - DNA, 529 bp, Homo sapiens
tgcctctctatcagcccaagtgagctgaatgtgcagttgagcttgaggactactgccaggttatacttcttgtgctaggtcacagacatgtgtttgcaatttaaaacctctcaccttagatagatgccacatagctggtggaaggccccaatctcagggtttgcaggacatcacctggtgacgaaaaccaccagaccctgctagggtcggggaagattgaggaagaggacagcacagactattcccttcaaacaggcagggacagcccaatacctgctccccaggggcctctgagccagtccccattgcccctgtggctggcatttgcaggggcggtggtcagggtctctaggttcttcattcgcttcctgaaaggcaggtcctgtaaatggctccactttaaacggcttttctaatcatggaaactccctgttttaytgtaacaatagctgaatgctttttaaatagcagcatctaatgagccatgcaacaactcttcgttgtaggtatttttatccccatttcacag

SEQ ID NO: 535121 - DNA, 242 bp, Homo sapiens
ctccactctaattagtcctctctagctcccccttgaaatttgaggttgcagaagatcagggaaagtgactgggtaatctcttcattaaattagagaatctartgcttggctgggacagggactacttattttggcttgggtttgtcctgctcagggctggcgccctgtgcaggaaccatgcaggtcttctgggcttgggatttgatctatcctgcagctctgcttggcttcataccctataa

SEQ ID NO: 535122 - DNA, 660 bp, Homo sapiens
gagcactgtgcaagtttatcattgtttayttgtaattgagtcctagaagtggtatgactgggtcaaatgatgaacacattttcagtctattgacaagtgttgcaattttttccaaggaacttaccactagctgggcagaatgccacatcatccactatggaattgtttgagtggaattagtgttgaaagatgtattgttgctgtaaaaaattaccacaaacttagcagcttcaatcaacacaaatgtattaccttacactttggatgtcagaagtcctaaaatcaagatgttagcagggctgcattccttctggattctttaggggagaattgtttccttgttttttccagtatctggaaactacttgcattccttggctggtggtcccttccttcatctgcaaagtcagcagtatagcatcttcaaatctctctcttactctttaatttctccttccatcggcacatcttcttgtctttctaacctgcctgtctctatcttttaaagagccttgcgattacattggttttacctggataattcaggatactcttcctatctcaatatccttaatctaatgacatctacaaagtctcttttgccatgtaaggtaatatatttacaggatctgggaattaggaaatggacatacttgggaa

SEQ ID NO: 535123 - DNA, 660 bp, Homo sapiens
gagcactgtgcaagtttatcattgtttacttgtaattgagtcctagaagtggtatgactgggtcaaatgatgaacacattttcagtctattgacaagtgttgcaattttttccaaggaacttaccactagctgggcagaatgccacatcatccactatggaattgtttgagtggaattagtgttgaaagatgtattgttgctgtaaaaaattaccacaaacttagcagcttcaatcaacacaaatgtattaccttacactttggatgtcagaagtcctaaaatcaagatgttagcagggctgcattccttctggattctttaggggagaattgtttccttgttttttccagtatctggaaactacttgcattccttggctggtggtcccttccttcatctgcaaagtcagcagtatagcatcttcaaatctctctcttactctttaatttctccttccatcggcacatcttcttgtctttctaacctgcctgtctctatcttttaaagagccttgcgattacattggttttacctggataattcagratactcttcctatctcaatatccttaatctaatgacatctacaaagtctcttttgccatgtaaggtaatatatttacaggatctgggaattaggaaatggacatacttgggaa

SEQ ID NO: 535124 - DNA, 582 bp, Homo sapiens
ggactccaaccttcatcttatgattctgaagctaaggtggaggacaggactggacagccagttgggygggggcaatctttggggaggagagagtttaccagaacaagaggcagtcaaaggggaatcaggagtttgaaaggtaaagataaactttcacctggggtaggtcttgggatgtggtgcatctggcagccaaagatttctcctacagctttctaaccatctcagggagaaggatttggaatgaacattagcacatgactgtcctcaaactgtgtgtaggagactgtagtttcagccaactggccactgaaagggtcactagccttcctctgtaagctgtaagttggcagttagaaaggggttaaattcatgtcttttgcgaaggtgaattacatggttagatatgtgccgatcaccctgtcaccgcctgtggggcacacaactctgtgttccacttgctgtctcatataatgcccgaaattgttgcctagagagctgaacagtgacatctgttggttcgatttgaaataggcaagttcaaaagagaaacagccacactagtatttcttcccctttcaa

SEQ ID NO: 535125 - DNA, 489 bp, Homo sapiens
ctgtcctatctgccagacactcagtgtccatgtctcccaaagaggcggaagtcctggggcgtctctgggagatgtccattttcttgaagggagttatgccagtcatacctggcctctgcctctcctgaacactggtgctcccttaggagttgacagtgatactgaaggcaccttctttggttggcttcatcttcagaatttatcaagagctaagggtttaaccctactgatcagagggagggagttctataaagccaataatctataaaaatggctgaggaaagtactccacyctgggggccaggacaagaactgaccattgggattcccacactttcctgagcctcgcggggaagttagcgatgcctttttctgggtaagttcagtcttataatccctgactcctgccccattggcctgtcactcacaactcatgctttttatttcatcttcttaatttagatttttttatttagagtcctctcacta

SEQ ID NO: 535126 - DNA, 628 bp, Homo sapiens
tggggtcctaacacgaggcttccagaacgagcattcagccatcaaatgcaatgactctacccaacttaaaaggctcctaggtctaagaaatgatgctgggaactacagaggcaagatcatggctaccagaatttgcagaaatccacggacctttaaaattgccttataaaggtaaccattaaacctcttaaaatagaaagggtctacctgcagggcccaggaaagaaggctctactccactggcactgctggagaaggaagccgatgttagacaaaaggccaattgcaggaaaaaygacggcaaagaaagaaggcaaaaggcactggccctgtatgtgggtgcaaacacacacagatatacacacacacacgcacacacacacacagagctgtcaagaggaccagacatgacagtttctgtctgtggcccccagacagaaacacacacaaatacttccagaaagtttgtgtaaagagaactcctaacaatttctgaggagaaacttaattgaatctaagagaatgtcttgtaaaacacctggaatacttaaggcagctccgtttttacccccataaaggaactagattgccagagctcctggccttctcagtgtcacagattaggtga

SEQ ID NO: 535127 - DNA, 511 bp, Homo sapiens
gaaacctgatctaaaacttgaaaatgtggacacgaagtgagagggacatctggcttctaagcaggaacctttgtaatgggagcaacaaaaaagastattaaataggggtggtgtggagaacagtaagaagactttgtaatcccagcactttgggaggccgaggcaaacggatcacctgaggtcaggagttcgagatcagcctggccaacatggtaaaaccctgtctttactaaaaatacaaaaattagctgggtgtggtgacatgtgcctataatcctagctactcaggaggctgaggcaggagaattgcttgaacctgggaggcggaggttgcagtgaaccgagatcacacattgcactctagcctgcgcgacaagagagactccatctcaaaaaaaaaaaaaaaacaaacaaacaaaaaacggtgcaccccttgccacaccatggaaaatggaggcaagcacataactgggccaaatccccatggtctctttgggcagaagacaagtca

SEQ ID NO: 535128 - DNA, 596 bp, Homo sapiens
ggatcgctctttcgcatatccatgagaagcttttaaaattgtactgaggctacactctactgactaaatatatgcactttttagtcttgactttggaatattaaaacaattccacttatacgattttttattacagtggctatatctaacaaccctggaaaaagagatcagactttcagaattcaaatggctcaatttgatgaaaatctatcgtaacagtttccataagcactaatgctagcactttcaggacttgaaaaactgacaaatcaagtcaagcacagttcttttttaaagacttaattgtatttttaattgacaaataataattgtaaaattccacttctggatatatgtccaaagaaattgaaatcagtatgccaagatatatctgtactcccacattcrctgtagcattatttacaatggcaaacagttctcttatggcctgatttctttgcggttgtatagatatggacaaacattaatttagctgtagcgtaacttttaaatttaattatcctatgttcctcccataacgaggttgaaagaaaaacataaagaagtgggaatcatgaaaatgaataaacatgatt

SEQ ID NO: 535129 - DNA, 609 bp, Homo sapiens
aaatgttatttttccttttccaaaatcctggaaagtccttccagagtgcacataccatttaatcaattagacaaatctttttatcacatctccttaacttgttcaatgaaaaatacactgaaatattttcttcttgactccttgtattgagaaacgaamgaacttgacagagagagggagttttaaaagtcctttttgaatgagaatgggagaaatatatggtgtgtggagaggtggggagcatcccacataatgaatcatatgcagaatgtacaacagagaattcaatactgtgcttctaaaacctcaatagtgcttacagtaagtgatatttttgtggccttttctttgcccagatatttgtcattctgtagttgatttagaaagagattcatggaaagtcataattatttaaagaagggaacaggcaaagtgttcttttgccatgtctataaatctttccttgtgctctgctgagaactctgctctgactgtctgctttaaccatgtaataggagtatatcataatgtcaggagttgtcagaccctcagaactctccataatgtgagatcacaagcagagacaatttcattgtaacatttctgact

SEQ ID NO: 535130 - DNA, 636 bp, Homo sapiens
tgacttgctttccctagaggtgggtagaggtcattcatagttaacttctttcatagattcttcacgagtccttgattagaacaaagagcatttttaacagtgataatatggcacattcctaaaagaataaaaaatattttaataagaaatttaataaaaattttaacccagatactgatctgaagcaaggagttgtgatcaggagaagaaggtatggaatacagtactatggattgaattcagtcaaaggaagtagtaccccaatggtcatttagaaatcatcacgactaccaatttcaccacaagccagagtatacagaccccaggagcaaggcttcatcctccatcttggttttaaaagagcaggaccaatgctgtggatggagctctcccaccaaggctaaggkgtgggtctgcctcagaagagccaaggggataaggatgccaccctatttggcctgcagtgcacagcatctaaccaaagaagggtattatgcaaccttaagagctaatgaaacttgccttactaaattttgggtttgcttgagacctgtcacctctcccttcttccatatttctcccatttggaatggaaatgtctactctatgcctctcctaccattgaagttggggagc

SEQ ID NO: 535131 - DNA, 633 bp, Homo sapiens
ctgttggcgacaccaactcctaatcatgtatgagaaagagagttgcaaaacatggagcactattgatttatttatttcagtggttatctacccatccctgacactcatccacatcygttgcctccagaaaccagtgtgctttcgtaagaatttcaacacctgctaaggaaatcatgggaaggttgtgtatgaaccagtgtgatgcagggattgcagaaaaggaggcagtttaggctccctgtgttggtgtgtgagtggcagtctgcttgcataggctccacctacgccctttcaccttggggttgttatcctggtccctgtagcatcataaaacacattcttattaaaattatcatgggtcttctttaattaccctaattggcaatagagattctaattttagattcctctgttagtgtcaaaaataaacacatatgcacatatgtaaaagcaaagaataaacgtaaccaacaataaccaaaagcgagcgcaacccaacttctgaggaatttctcttgcaaacagctaattgaaacattccttcaatttgcgctgctcagttttgacagtggctctgccccttgtcataaaatcaatggtcttttttatcccttctcttctttcagcgtctcg

SEQ ID NO: 535132 - DNA, 633 bp, Homo sapiens
ctgttggcgacaccaactcctaatcatgtatgagaaagagagttgcaaaacatggagcactattgatttatttatttcagtggttatctacccatccctgacactcatccacatctgttgcctccagaaaccagtgtgctttcgtaagaatttcaacacctgctaaggaaatcatgggaaggttgtgtatgaaccagtgtgaygcagggattgcagaaaaggaggcagtttaggctccctgtgttggtgtgtgagtggcagtctgcttgcataggctccacctacgccctttcaccttggggttgttatcctggtccctgtagcatcataaaacacattcttattaaaattatcatgggtcttctttaattaccctaattggcaatagagattctaattttagattcctctgttagtgtcaaaaataaacacatatgcacatatgtaaaagcaaagaataaacgtaaccaacaataaccaaaagcgagcgcaacccaacttctgaggaatttctcttgcaaacagctaattgaaacattccttcaatttgcgctgctcagttttgacagtggctctgccccttgtcataaaatcaatggtcttttttatcccttctcttctttcagcgtctcg

SEQ ID NO: 535133 - DNA, 461 bp, Homo sapiens
catccatggttctggaaatcccttttggttttacaccttcattaaaaagtcatctcttcaktaaagtttttttatttgaacctcctggggtgagttctgttttgctgtgaccctgacttctatattcctgtacatcatgagtagctaagacagtcaaatttttccaagatataaagttttaagacaaaatttctcaagagacctggaagagttcaagaaaaagagctatcattagaatcaaatcaaagatagaacatgtaagaatgaggtgaaaatcttgaaataaatctatgagttaagagaacagcattaaaaagtaaatgaaaagagcccctggagctagaaataatgttagagaattaaggagatggaggtttggggaaggagctacaccactgataaaagtaacagaaagatatatgttagcatgcttaatagaatagacacttcatggttttata

SEQ ID NO: 535134 - DNA, 461 bp, Homo sapiens
catccatggttctggaaatcccttttggttttacaccttcattaaaaagtcatctcttcagtaaagttyttttatttgaacctcctggggtgagttctgttttgctgtgaccctgacttctatattcctgtacatcatgagtagctaagacagtcaaatttttccaagatataaagttttaagacaaaatttctcaagagacctggaagagttcaagaaaaagagctatcattagaatcaaatcaaagatagaacatgtaagaatgaggtgaaaatcttgaaataaatctatgagttaagagaacagcattaaaaagtaaatgaaaagagcccctggagctagaaataatgttagagaattaaggagatggaggtttggggaaggagctacaccactgataaaagtaacagaaagatatatgttagcatgcttaatagaatagacacttcatggttttata

SEQ ID NO: 535135 - DNA, 544 bp, Homo sapiens
ttttgcatctatcttctacttgtgataacatttgtgatagagagtacattttttacttcttgttgtatcatttatacattttacaggaaaaagggggaaaataggctatctcaaacagcatctttatacaggaaactgcctgcttgttatttttaattttgtattaactgagttttcatcttttcgtaaattttttaatgtgctttcttgacatttttaggaggctgcatcttgggctacaatcctttaactttctccagtcagtttattttaattaactgaagttaaagaagtgatctttatctcttaatataaaaagggcatatgcttcttcactcccagcactctgtcaccaagtgtacttacagttccatataccatatatatatatatccatatgtgtgtgtatatatatccatatatgtgtgtatatatccatatatgtgtgtatatatatccatacatatgtgtrtatatatccatacatatgtgtatatatatccatacatatatgtgtgtatatatatccatacatgtgtatata

SEQ ID NO: 535136 - DNA, 355 bp, Homo sapiens
agtgcagtaggcaacagagcgagactccgtctcaaaaaaaaaaagaaagtgttcgataatcgtagttatttttactttcttatctgtctgacccaatgtttgtgccattacactgaattaaactcacttgctgtyatgtgccttacacaattctttctcaattttatgaaagaaaatgtctattaagttgcaattctgaaaaacctaaagctttatacagctctgaattatttaaacaactaatttttttttttttttttttttagacaaggtcttgctctgttgctgactggagtgtagctgcacaatcacagctcactgtagcctcaacctcctgggctcaagcaaaccttcc

SEQ ID NO: 535137 - DNA, 591 bp, Homo sapiens
tgaaacttttgaccagaatataccttaaaayacaacagtgatcacctagatgagtcagggaaactaactggaaagaagagttggctgaataactggttctctagtccctgcaggttaggaaagcagttccccaaaaaacaagatgacataacacagccaattccccactcagccagagcccttttccatagttttttcctggagaattgtggtccatgtcctgacacaatcaacatacaagacttccatggacagatagattcatctaaaggccatatcaaatgatgagctattgtttcactggctgactcccattctaacatatgtgaaagaaactcccacgatgatgaactcaagattcgagttcagagctctgaaaggaataaaccagcaggcactgatgatgtttttaaggtagttgtatggaatcaaggtctgaaaaaaagaagcaaagaaaaaaagacagagaatgtatgggtaaatatggcaggagaaatgggcagtgagacaggtaacaaacctgcttgctgtgtgcagttagtcacagttctctgctgctatatgcctttcttcaggaaggaaaaaagaaga

SEQ ID NO: 535138 - DNA, 591 bp, Homo sapiens
tgaaacttttgaccagaatataccttaaaacacaacagtgatcacctagatgagtcagggaaactaactggaaagaagagttggctgaataactggttctctagtccctgyaggttaggaaagcagttccccaaaaaacaagatgacataacacagccaattccccactcagccagagcccttttccatagttttttcctggagaattgtggtccatgtcctgacacaatcaacatacaagacttccatggacagatagattcatctaaaggccatatcaaatgatgagctattgtttcactggctgactcccattctaacatatgtgaaagaaactcccacgatgatgaactcaagattcgagttcagagctctgaaaggaataaaccagcaggcactgatgatgtttttaaggtagttgtatggaatcaaggtctgaaaaaaagaagcaaagaaaaaaagacagagaatgtatgggtaaatatggcaggagaaatgggcagtgagacaggtaacaaacctgcttgctgtgtgcagttagtcacagttctctgctgctatatgcctttcttcaggaaggaaaaaagaaga

SEQ ID NO: 535139 - DNA, 565 bp, Homo sapiens
gttctcattctcttctggggccaggcctgctgctggtttcatttaattgaatattttgattgtttgatttctgtagccagaagcctgtaggcagtaaatgcccttttccatcagttcaagaaagaaaatgtacctgccgaggtagtatytgcttcgctgagctgctgacttattttaagaactaaatctttcctgttactatatttttcactctggggtgtgcgcgctccaagactgacagtaactcaggtctaggacaggagcgtcctctcggcgatgacttagcgccacctactgaccacttgctcaacagcggccacgttcagcaaccacggtgatctcgacagacacgaaaatgttctgtgctctcaacgagaagttctgcatgtattcttcccttctcacatagcagagcttgcctagcagaattgtgctccttttattttttaatataagtaagttaagacacagggctccagcaagaaagctgagcaagttctccatttggcaactgtttcatacttcccgactttggcggctgtcatttataaatgatgagctcatg

SEQ ID NO: 535140 - DNA, 565 bp, Homo sapiens
gttctcattctcttctggggccaggcctgctgctggtttcatttaattgaatattttgattgtttgatttctgtagccagaagcctgtaggcagtaaatgcccttttccatcagttcaagaaagaaaatgtacctgccgaggtagtatctgcttcgctgagctgctgacttattttaagaactaaatctttcctgttactatatttttcactctggggtgtgcgcgctccaagactgacagtaactcaggtctaggacaggagcgtcctctcggcgatgacttagcgccacctactgaccacttgctcwacagcggccacgttcagcaaccacggtgatctcgacagacacgaaaatgttctgtgctctcaacgagaagttctgcatgtattcttcccttctcacatagcagagcttgcctagcagaattgtgctccttttattttttaatataagtaagttaagacacagggctccagcaagaaagctgagcaagttctccatttggcaactgtttcatacttcccgactttggcggctgtcatttataaatgatgagctcatg

SEQ ID NO: 535141 - DNA, 594 bp, Homo sapiens
acaaacctagtatctccactctcttcatatttctaggatattccttccttattataatccaataaaaaagagttagacttctcttctcacaggatcaataggaaatctagtctctttcaaggtctccctccccaagtctttgggaggaggggatgtcttaaaagtgcctatgtgatccacaaatttatctaatttatttctcatcacagtaaatctgtctactacttcagatcttctactgtcacattttgcagtgtcataaccatcttttttggctgtgtgtggtttctatgtttgtataacttctcactaagtgtaggcygctcttcttccatacattatttaattaagtaacatctcagatgtaatatttcaatacacttcattgaaggtttttgacaaaagtaaataattaaaagctagggtgaaaagtacattgtacatactagatgatgtggctcctgaatttcacagcatacgttcttccactaaacattccccactctcttcactcttcttaagtctaaaaagtgccaccatattacaagaactagtccacatgtctagaaaagagattgatagaacagagatatc

SEQ ID NO: 535142 - DNA, 396 bp, Homo sapiens
ctggttctcaatttcttctaactcaaaataatcaacatgccaacatggtgtattttaaggtgcatgttctgaactccaggatgcattagccctgcgtggacaactcttcaggaagagtacacaccactgaggcagcaggatttgttgtatttaaaacacagatgaaccgggcgcggtggctcacacctgtaatcccagcactttgggaggctgaagtgggtggatcacctgaggtcaggagttcaagaccagcctggctaacatggtgaaaccccatctctactaaaaatacaaaaacttagctgggcgtggtggcatgtgcctgtaatcccagctacttgggaarctgaggcaggagaattgcttgaacctgggaggtggaagttgcagtgaact

SEQ ID NO: 535143 - DNA, 639 bp, Homo sapiens
tgtactatcacacagggacatgccrctcagccttttctaacccccatcgtaacatgctaaagagaaactgatgaaatcgtttgctcaaggacatgtcttttagcagatggggccagagttaaaccttggtaatggctgattctaaaatctaagatatgatttctcatgtgcaaattctaaaatcaggaaaagtctgaaaacaaagtcatatttgtagaactgacaccaaaatacatatggcagcaaaaagtgagcagatttatacaatattgatgacaagctttctaagtcctttattctgaatatgtatacaattagtacagaagtattaacgtattttacaaatagatgactgctctagccctgcttagggtcctgtggaaaaatatggtgaatataccatattttgaagattgaaaaagaaaagaagaactctgaagcctgtatctcctcaagggtttttcttggggacagtggaccatgatgtaattcctcccaaggaaagtgtagagagcaataactcttgccgtagaatacaatattttgtaaaacatgcatcaaaatatcagaactgaatgtaacctttaagtgaatgtaatttaacttcctcctcaattaaaaaccttctttctgctgctg

SEQ ID NO: 535144 - DNA, 486 bp, Homo sapiens
tgggtttgaattttctccttgctcccttctttcgtattcttgagaaaaacattgatggtgtacatatttatttttctgtgaatattttaaccaggaattttggcttcatgtttcccttttcctcctgaacagagtcacctcttccttggaatttttataattttcttgaattattctctttccctctctcactctaagtccccaggggatagagagcccttagattcttggttttagtgatctttgcacccagcataccttaggtgttcaataaagaatrctttgaattgcttcacttatagaaatgctggtaaatttggtgacttagctaaagttgttcccatgtcagaaaatgaatatttttggtgacaaatcattttcatttcttctttcctgaaagtcgtttgagttttagaagggcgccttttcttagagcttcaggactgtttgagctgcaactgttgtcctccacctttatgaaaccac

SEQ ID NO: 535145 - DNA, 663 bp, Homo sapiens
ttttacaacctattacaggaatcccttttcccagggacaggcaacacgttagtccggaatgtcaagatgtaggtggacattgagaaggaggttgttccttgaagtgaagctaagatttatattacaagagtcctaggtgtcagtgggagagggtctgccaagaagaaccagagctgggagactgagtattgtgagggcttgggggttgaaagagatatgacaggcagagcaaacttgattggatatcagatgggtcttcaaagttagaaggtaggtactagaggttaggtagacaataaattcagtgcaaccacaatcatttttggtgcccttgaatttttaaatatttgaaagatattgtcatatgaaaaatgtggagctgttggttgcaaaaagaacactaracctagtttctaatctcagggtaccattagcttatcactaaatatttctgtatcccatttcccatatctgtacaatgtgaatattaaaagactgtactggcctatcttacaggattattttgaaactcaagtataaatgagcacataagggatttgaaattcaaaaattagttttatggtttttcaaagtgtttttttttttttacagttgcaaggaattgctgtctttattaataaagaataggctaataccctgcct

SEQ ID NO: 535146 - DNA, 493 bp, Homo sapiens
cctatttcagtgagaaaattaaagccatcagacatgatctcattcagctttctgccactatgaacaaacaaatcaaaatgcatgcttatgtcacacttctcctttttcagcggatgagctacccctccttctaatcagtcctarcctcttcactatgctcttgatctccttccttcctacaccccacgagacatcaaaagtgcccaaaagagaaataatcagctttaaccatctaccatcaattatccttcttccttcctggctcttcaaataagccctcactatgcctgttttccctcagcctgtgaacattgctggcttctccaattctaaaaactctatattgaccccacatctcctgtatctaatatctaatatttctcctctttcatccacacttctcaaaaacccttgccatttccctttctctaactggatttccttgcaaggatagcaattgatctcatagcaaaatctaatattttcctatcct

SEQ ID NO: 535147 - DNA, 593 bp, Homo sapiens
gcttagttgaatatgctatgttaacatcataacttggatgctgtttctgtttaacaaaacatataatgaaaacttttcctttaaacaatagaaacagaaaacattgtattgacagcaagaaaggttacaagggtgtccatcgccttaaaattccccaatttataaaaatcatggactaaaaatgaataaattaaggaagataatttaacaaatgtttataactcctttacatttctactccatgctgagcagaaggttaatgaagtaaaataagttttggtatcaaacaactccaatttcgtactccatgtaactggacttaatgagcaagtatattctaayttctaaggtttattggcctgatcttgcagaatatgaaaataataaaaaaggtgagttccttgaggacagggtcattcttatttatttttgtatctatgtgagttccttgaggacaagggccatttcttatttatttttgtatctctagggccttccccaattcataacagagattaacactcacttatgtttgaattttactgaaaggttgctcgtgagaattaaatgagattatatatgtgaaaatattt

SEQ ID NO: 535148 - DNA, 460 bp, Homo sapiens
ctggaatgcacttttcctcacagcacagtctctcatggcttcccttggctaggggagggagttccccaacccctygcacttcccgtgtgaggcgatgccccaccatgatttggcttgccctccgtggactgcacccactgtctaactagtcccaatgagatgagctgggtacctcagttggaaatgcagtgccttctgcattgatctctctgggagctgcagaccggagctgttcctattcggccatcttcccagttaccaaagtgatcttataacaagaaaatttgtttatatcattcttaatttcttcagtgatttcacagtgggcagggtaagtatttacctaactcacagaatactccagcttcctcaccctcagaggtaaggcccaggcagtaatgttcatacattaaagtaaatctatgcccctggctgcagttgattataccaagggttaaaa

SEQ ID NO: 535149 - DNA, 605 bp, Homo sapiens
tatttctcagataaacatatgttccagtttctagtaattggctgactcaaaaaatgttgcaaggtattttgcaatctactattatttttgagatttctaattttcttttatttttaaatcttagatgctacagtggaaaacttgtcattttgccactatgactcatagttgtacaatgtctataatggaatggataaacactgtcttttagttgtccatatatgaacattttacttttgcagtttatatagatttattttttgtgaaacactatgcctggagaaaaaaaagataaatctttgacatgagtcactttttatcaaccctggccatggagaaattacttgttatcctttgcatttgaagacgacaatactgactcactcaaagtagtgcatatgctttgaattcttttttctaaaagtgagcatggactctaactactcattctttctgtctcacctactccaggcatgactaagcacaactttctataagatgtctggtatcagaatgcaatttctaaatatgatgyttttaaaatgggcagatgtatccctgataagaaggattggacccttaaaaggactggcagtaaaaatgac

SEQ ID NO: 535150 - DNA, 555 bp, Homo sapiens
atcatctgttttcagattttactttgccaccattacttccctccagtgagctgttatctggcagagggggccttaatcgcctcctatgctggcagaaaaccttcatgcatttagcacagctattcatataatgtgcaatcacctccacacaaaaattccaaataaaatatatgttttcccagcacagcagtgccattagtgcatctaactgcccactgaactccaaagtcctaatgttattatattccagcttgttgaaggctcattattttatctgagcctatttgatggttcacagatacttagttaattttccctttttttctttctcccattgggtgttagtcccttggtgtaagacatacagagacataagtaaatgacataaaatcaaatattaccwctaagtcatgtatatagtttggctagcagtgaaagtatattttgttaacaactcctctgctctagctgctgtatagttaatggtgagagaatatgaaagcaaaacagcaaccaatgggcctgcagaaaatgtgcttgctactttccccaaac

SEQ ID NO: 535151 - DNA, 577 bp, Homo sapiens
aaaaggaatcataccagaacttggaagagaagccttttcctctgctatactgyacattgctctccaatgccctttattgacaaaacctaacactgagttacctgacaaaggagaaatgtttgtagggcccagcttcagtatcacaaagcaggaaaaaagaagagtagatttggagctgagaggccataagcagataactggtacagtccatcacagaattaactttggtaaatgatattataaacaacaataacaaattgaggaaaaacaagcctgagtttccttcaaatatactatgtttttaaaataaagaaatatgcctaaatgtatcctgagtatattccatagacaggaaaatacagttttatatacagtatgtagtatgaagcaaagacaaaaatcactctaccttttgtagtacatcaaatattaaaatgttattttatccaggttattattagtttccccttcaagtaggtaaacaagttgaattagtaaataaataatccagttacccacaattcttgagtcccaaatctttgtttccaaactacttctctccatggctccagatatc

SEQ ID NO: 535152 - DNA, 577 bp, Homo sapiens
aaaaggaatcataccagaacttggaagagaagccttttcctctgctatactgcacattgctctccaatgccctttattgacaaaacctaacactgagttacctgacaaaggagaaatgtttgtagggcccagcttcagtatcacaaagcaggaaaaaagaagagtagatttggagctgagakgccataagcagataactggtacagtccatcacagaattaactttggtaaatgatattataaacaacaataacaaattgaggaaaaacaagcctgagtttccttcaaatatactatgtttttaaaataaagaaatatgcctaaatgtatcctgagtatattccatagacaggaaaatacagttttatatacagtatgtagtatgaagcaaagacaaaaatcactctaccttttgtagtacatcaaatattaaaatgttattttatccaggttattattagtttccccttcaagtaggtaaacaagttgaattagtaaataaataatccagttacccacaattcttgagtcccaaatctttgtttccaaactacttctctccatggctccagatatc

SEQ ID NO: 535153 - DNA, 577 bp, Homo sapiens
aaaaggaatcataccagaacttggaagagaagccttttcctctgctatactgcacattgctctccaatgccctttattgacaaaacctaacactgagttacctgacaaaggagaaatgtttgtagggcccagcttcagtatcacaaagcaggaaaaaagaagagtagatttggagctgagaggccataagcagataactggtacagtccatcacagaattaactttggtaaatgatattataaacaacaataacaaattgaggaaaaacaagcctgagtttccttcaaatatactatgtttttaaaataaagaaatatgcctaaatgtatcctgagtatattccatagacaggaaaatacagttttatatacagtatgtagtatraagcaaagacaaaaatcactctaccttttgtagtacatcaaatattaaaatgttattttatccaggttattattagtttccccttcaagtaggtaaacaagttgaattagtaaataaataatccagttacccacaattcttgagtcccaaatctttgtttccaaactacttctctccatggctccagatatc

SEQ ID NO: 535154 - DNA, 536 bp, Homo sapiens
tcgctcctctgcactccagcctgggcaagtgagtgactgtcttaaaaaagaaaaaaaattgtttaaaagaattttgatttctgaatggagacggaatttaacacatttttttcaatgcttaattttatagtatatatcaatgaagaggattgattattctggaactgtttacaaattttggggggggataaatttcagtacttaagtcaagacctctctatacctaggccctaaaataagtaataactaaagaaaaaaagtccaaatcatatttgtatcatgttaaattttggcagmaatactaaggcaattttaccagtatggctgtggctaaaagagaatatcccaaagttcataaagtaagcacacaccccatgtacttaaatctctccctctctctctttctctctctcacacacacacacgcaaatgcacttgcacatatataaaagtacagaaaacttctgatattttctttatcttgtgaaaattatgtttattcttgtaaaatttatgatttttctctttctttttgc

SEQ ID NO: 535155 - DNA, 614 bp, Homo sapiens
ctgccaccacgcccagcgtattttttgtatttttagtagagacaggctttcaccatcttggccaggctggtcttgaaatcctgacctcrtgatccacctgccttggccttccaaagtgctgggattacaggcatgagccaccgcgcctggcctcccagcgttttctacgtcatatatcacagcacattaactgatccttgttttcaaaatcaaaagctgagagaaggtcaatgaaagccagaaacagactccaattaccctcatagatttcttctcaaggtgatgaagaaaaacctgtagccattggaaatacatatgtcagaacaaatcatcttcttctccaccatctcctcaacaacttcccctacaccaaagcagaatttgatgcacttgcctgagacgtccatgttttcaaattttcaaggaaggaacaggcaaaaattttagaatgcatggagtcaaaaattgttctacaactttgagaatatgaaatataccactttagaaaatgacatagattccaaactccacattagagacctggagtccatgtttactcactgtctcactttgttggacagtttattcattcttttcatgtcctagtttcctta

SEQ ID NO: 535156 - DNA, 521 bp, Homo sapiens
taaaatccatacctgccacttattaaagtaattttcaatttgcttaagtctctgtgcctcattttcctgtacgaagaaaaaaaaccacttcctcgtagtaagttgtcataaatattatcaaatatcattctcaaaaatcctgagttgcattaaagcaamaataaatcatgaatggtatatttttattttctttttaaaatgtagaataaaacacaatggaccatagacatgtacttagggtaccaaccagtggacatgacaagataacataatgttgatagggaataggagtagggaacaatgtataactatctaaatgtgcatgggaaggggtgctaactagccctagtttttaggagttccctacagaattacaaggaccactgcttaatatcagttatgagagaggctgtggtatgcatcagcttattgtttgggaagagcttagtatgagatggacccttctctcatcttattaggactgaaaaattaagttagttgatttacgggaaagtggtgaa

SEQ ID NO: 535157 - DNA, 546 bp, Homo sapiens
ggttctctctgacctgagaatcatttggaaaactttattatgacactttactatttgaccacagaggtgacatggtctctctttcctgtgttaattttgtgagtattttgtctcctcactcaaggtgaaataattggtccagmtcctgctcactctatcccagtttgttctcattaagttagatcatcccaggggctctttttttacattctcacactggcattatctccatgctataaaagttagtacacctggccaaatatcattttacttactaggataccaaggtatcttttaccttattcctgctcctggacctgatctgttgatagacaaatcaatctaagaaatttgattatcaactgtaaagggcaggaaaaaaaaactgtccatgggacagtttatgactttgttgcaaagtcaatactagttactagactttacacaattagaagacttattcaaggagtgtgatatggtttggctgtgtccccacccaaatctcatcttgaattgtagctctcataattccctcctgttgtggga

SEQ ID NO: 535158 - DNA, 546 bp, Homo sapiens
ggttctctctgacctgagaatcatttggaaaactttattatgacactttactatttgaccacagaggtgacatggtctctctttcctgtgttaattttgtgagtattttgtctcctcactcaaggtgaaataattggtccagatcctgctcactctatcccagtttgttctcattaagttagatcatcccaggggctctttttttacattctcacactggcattatctccatgctataaaagttagtacacctggccaaatatcattttayttactaggataccaaggtatcttttaccttattcctgctcctggacctgatctgttgatagacaaatcaatctaagaaatttgattatcaactgtaaagggcaggaaaaaaaaactgtccatgggacagtttatgactttgttgcaaagtcaatactagttactagactttacacaattagaagacttattcaaggagtgtgatatggtttggctgtgtccccacccaaatctcatcttgaattgtagctctcataattccctcctgttgtggga

SEQ ID NO: 535159 - DNA, 648 bp, Homo sapiens
atatagtataaagaaaatattcataggaaaatagagaggaggaacaagagggaaaatgagatggatagagtagcagcttgggttcccaagacttccagatcctggttgaagttcattaggcccatgaaagaccagcccttgggttcaagragatacccttgggatcctctaggatgtcttcttcatttgctaagctagtctgagaagtgtctgctagttttaccgaaaaaggtacagactaaatatcttgccaagcagtacagttcaaggcaaacagtcatagaaagaggtctccacagccttccacatcagtcaggggcagcttcacagaggagaaaagaaattagttagggcaaatagcaataagtaacaagaaatattcacataggatctctgcctatgtggagaaggcatcacagatggtgaaaacagcatgattaaaggcagagaggcaggatcagatgtgatatacatcggatactaagggaccaacttggttaacacagagggttcatgctatgagggtattaacacatctgctaattacctcacaaatattcatttttgtggatggacatgattgtttgccttttgtggtgtcagcttcaaaagatcatgacacctataaatggataaagaactcaaaca

SEQ ID NO: 535160 - DNA, 655 bp, Homo sapiens
attaaaaaagcaacgaaatgataagagcattcagaagtagggggagttgggtggaggatgtattaccttcaagaaaacaataatagccttcgggctgatttaatcatgtgagtaattaaaaacaaaaagcaaagtaaaggatctgtttaaagtgctaaaagaagaaaaaaaaagtgcagttctagaattttatccctgagagactgtgtctcacaatttacagcaacgtataggcattttcagattaattaattgggaacaatctattgcccatatatctgcctacaaaacatactaaagctgaggaataattatcccaggtgttaagtactaaactacagcaaagcatgaaaggcacgggacagagaaaaggtcacagtttagcttctaggatgtatacaggaggaacacagagggttactgtcggaatcaacacctttggggattaaaggaagcaggatgggcataggaatcaatttggctgctgtacagtgacaacaaagtcctccgctgatcctccaagccgttctacctttttatctcccgctcactgatgaggcctgcctaatytaggacaaatggctctcttcacccaagtgcgaatgctaagaagggcaacgaggttttgagttattggctatctacctaccagcag

SEQ ID NO: 535161 - DNA, 655 bp, Homo sapiens
attaaaaaagcaacgaaatgataagagcattcagaagtagggggagttgggtggaggatgtattaccttcaagaaaacaataatagccttcgggctgatttaatcatgtgagtaattaaaaacaaaaagcaaagtaaaggatctgtttaaagtgctaaaagaagaaaaaaaaagtgcagttctagaattttatccctgagagactgtgtctcacaatttacagcaacgtataggcattttcagattaattaattgggaacaatctattgcccatatatctgcctacaaaacatactaaagctgaggaataattatcccaggtgttaagtactaaactacagcaaagcatgaaaggcacgggacagagaaaaggtcacagtttagcttctaggatgtatacaggaggaacacagagggttactgtcggaatcaacacctttggggattaaaggaagcaggatgggcataggaatcaatttggctgctgtacagtgacaacaaagtcctccgctgatcctccaagccgttctacctttttatctcccgctcactgatgaggcctgcctaatttagsacaaatggctctcttcacccaagtgcgaatgctaagaagggcaacgaggttttgagttattggctatctacctaccagcag

SEQ ID NO: 535162 - DNA, 435 bp, Homo sapiens
ctgctgggaggactgtcagtagacagyattcagccatcatctcactttagggattgcctttggggcagtgagtcagttttttcaaggcagtgtttttccagagacagctatgaccagaaactgattgagagacaggtataaatttctgccattttcgcccagtgcaggacaattctaagagggtatatatgctccagagctttctttgcatagctgagactaatgggcctgcatcattgcccaacttctccctttctcatttcttcttgtgagtcttgatcccaaggtggtctctataaccattaggatcaccagactctctaaaatacctcttgtctggagagtccaaactgcattagaagtcattcaaattaagaacttatgttcttcaacatattaagagagtaaaaaggcaaattactgcctgggaggtta

SEQ ID NO: 535163 - DNA, 545 bp, Homo sapiens
gctttacagataggaaagtaagatgtaccaaaattaaataactttccctaggaaaaatggaaggttcaaaagcagatctgtccatagcccatgcccttttaatcattctttgtctggactggataagttgatggatgccctctgagagctgatataagacaggcacggtggctcacacctgtaatcccagcactttgggaggctgaggcgggyggatcacaaggtcaagagattgagaccatcctgaccaacatggtgaaaccccgtctctactaaaaatacaaaaattagctgggcgtggtggcacatgcctgtaatcccagctactcctaaggctgaggtaggagaatcacttgaacccaggaggcagaggttgcagtgagcgccgagagagtgccattgcactccagcctgggagatgagcaaaactctgtcagaaaaaaaagagagactggcacaagcctggggatatatcctatccctcaagtagcagctcgctgaaacaccctgcaatgtggctctttgacagccgtacatggcacctc

SEQ ID NO: 535164 - DNA, 520 bp, Homo sapiens
ctttttcaaaactcacatataataaaattcacatttttggtatgttatattatgagatatgattttccattaattgttaagagttttttaaaattagtgatgatagccttttatctgaggtaaatgttgcaaataattttattccaattttttaatggtcttggcttagtttaaggtatttgccatgcataaaatttttatttttctatagtcaaatttatcaattttttttctttaattgtgtctagattttgggtaatagaaaacctttttctacacctaggttttagaggaattaccagtattgtctctttttttwaaaaaaaaaaagtctcgctctctcatgcaggctggagtgcagtgacgcagtcagggttcactgtgtgtatccttgacctcttaggctcaagtgaccctcccaccttagcctcccaagtagctgggactacaggtgcgtgtcaccacacccaactaatttttatgttttttgtagagatggggtttcatcatgttgccccag

SEQ ID NO: 535165 - DNA, 520 bp, Homo sapiens
ctttttcaaaactcacatataataaaattcacatttttggtatgttatattatgagatatgattttccattaattgttaagagttttttaaaattagtgatgatagccttttatctgaggtaaatgttgcaaataattttattccaattttttaatggtcttggcttagtttaaggtatttgccatgcataaaatttttatttttctatagtcaaatttatcaattttttttctttaattgtgtctagattttgggtaatagaaaacctttttctacacctaggttttagaggaattaccagtattgtctctttttttaaaaaaaaaaaagtctcgctctctcatgcaggctggagtgcagtgacrcagtcagggttcactgtgtgtatccttgacctcttaggctcaagtgaccctcccaccttagcctcccaagtagctgggactacaggtgcgtgtcaccacacccaactaatttttatgttttttgtagagatggggtttcatcatgttgccccag

SEQ ID NO: 535166 - DNA, 587 bp, Homo sapiens
acttcctagatggagtttggtctctagactagctatgggatatcataacagctatgaaggaatagaatcattttgtgactttaacctattagccctctagtactggccttaaacagagagacaggtttaaaaaacaaagcccatgactcaagttaaggactccagagcctggaaactctctctcaggattgatacctctgttgttttttcaggacttaatgttaggaacatgggttctctatattgggggagtattatggaatgaattgtgtctccacaaaattcatgtgctgaagtcctaacctcagaatgtgattgtatttggaatgagggcctttaaaagatagttaaggtaaaatgaggtcatatggatgggccctaatccaatatgactggtgtcttttaaggagaagagattaggacacagatataccaaaggtagatcatgtaaagrtaccagaagagaatggccatctacaagccaaaaaaaaagcggtcttcaaagaaaccaaccctgccaacaccttaatctcagacttcagcctccagaattatgagaaaattaatttctgttgtttaagccaccc

SEQ ID NO: 535167 - DNA, 582 bp, Homo sapiens
tgagcctagggataaaaatggacaggcagattcataacatgcttaaaaagaaacagcaaatgattgagaagtttttttttaaaagtggaactatttcaaaagtaagaaattagtaaagggacaaagttgttaatgcaccataaacaagtgatcaaaagcagaaaaaaaaaatgaactgctgtggaaatggacacagtgtgatcctattttkagtggactacttgagttttttaaaaaattaggaggaaggtaaaaggttcagaaaatagaaacagaagtgtaaataatactatgaaatgggcctagctgaaacagctgacttttcaaaagaatacattaaatgaagaatacagaatgagatccttaaaaaaagaagtcaggaaagtattacatagagtaattgcaaaggccttctctccttataacacggaaattgatggatttgagaataaggatattaaaaaagatctttaagagtctacaggaaatagaagagctaggacaaagcatggatgtcatgtagaatattttatgacaaactgctgacctgagccaataattcttgggctggggaaaaaaact

SEQ ID NO: 535168 - DNA, 649 bp, Homo sapiens
aggtgatggatgcaccaaaatctcacaaagcaccactaaagaatttactcatgtaaccaaataccacctgtaccccaataaattatggaaaaataaaacaataaaaatttctaaaaaattaaagataaaaaaagagatgatttttttttttttaaaaaaaaagaatccttggacatttcagttaaggtaaaacaattcctggggttttcacatctgagtcattgagtygtcaaagcaaaaagaggcctcctcagtaaacaatgtattaatatttaggtaactctgtctttgagaacctaaagtttccaaacttcatgtatgtaaacttactgagtgacaccaagtcagtgtagtttcctttatgtaggtgactagtattttctttaatattgtaattatcagaagagacaaaaggaattgctctgttaaatctgtatctaaagatggtggtatggaggcatggctttttaacataatggcttagtcttgttgattcattttagaaaagagattgccataaaatatgtggtaaattggagattctcaataacgactactttaaatattttctaaataagtattcacacaactcttttccattgaagctgttagtacctgttcattagtacctgtataaatgttctaacac

SEQ ID NO: 535169 - DNA, 649 bp, Homo sapiens
aggtgatggatgcaccaaaatctcacaaagcaccactaaagaatttactcatgtaaccaaataccacctgtaccccaataaattatggaaaaataaaacaataaaaatttctaaaaaattaaagataaaaaaagagatgatttttttttttttaaaaaaaaagaatccttggacatttcagttaaggtaaaacaattcctggggttttcacatctgagtcattgagttgtcaaagcaaaaagaggcctcctcagtaaacaatgtattaatatttaggtaactctgtctttgagaacctaaagtttccaaacttcatgtatgtaaacttactgagtgacaccaagtcagtgtagtttcctttatgtaggtgactagtattttctttaatattgtaattatcagaagagacaaaaggaattgctctgttaaatctgtatctaaagatggtggtatggaggcatggctttttaacataatggcttagtcttgttgattcattttagaaaagagattrccataaaatatgtggtaaattggagattctcaataacgactactttaaatattttctaaataagtattcacacaactcttttccattgaagctgttagtacctgttcattagtacctgtataaatgttctaacac

SEQ ID NO: 535170 - DNA, 550 bp, Homo sapiens
catgaagaaatgcctttcccccaatgtgcttccctggctctcctgtcccctttcttgtcaatagccagtcaacatgtattgattgtgcagaggctaagggcttattcttctgtgcatgcttatccatctgccccttttcttttgrcttacattgtctctccagggttttattttgtttttataaacatctttctatctgcctgcttcttctcaccatatggcaattctgatatgtattttttgttggggggaatgtgagacagaaggagaggagaaagagtccctaacaacacaagatttagaatacttatcataagagtggatggtttaataaatactgctttcttcagcatgattttaatcagatgactactaaacttcttttcaaaaaaaaagactaatattcataaaaacaaatgttgtctacaaccaatgtttctaactcttacctgtcaacattagacaattcaatctgacttcttgccttcctactccaataaaaccattttttccaagtcacaaatgacttccacataaatctaaagagcat

SEQ ID NO: 535171 - DNA, 302 bp, Homo sapiens
gcctttcccccaatgtgcttccctggctctcctgtcccctttcttgtcaatagccagtcaacatgtattgattgtgcagaggctaagggcttattcttctgtgcatgcttatccatctgccccttttcttttggcttacattgtctctccagggttttatttygtttttataaacatctttctatctgcctgcttcttctcaccatatggcaattctgatatgtattttttgttggggggaatgtgagacagaaggagaggagaaagagtccctaacaacacaagatttagaatacttatca

SEQ ID NO: 535172 - DNA, 550 bp, Homo sapiens
catgaagaaatgcctttcccccaatgtgcttccctggctctcctgtcccctttcttgtcaatagccagtcaacatgtattgattgtgcagaggctaagggcttattcttctgtgcatgcttatccatctgccccttttcttttggcttacattgtctctccagggttttattttgtttttataaacatctttctatctgcctgcttcttctcaccatatggcaattctgatatgtattttttgttggggggaatgtgagacagaaggagaggagaaagagtccctaacracacaagatttagaatacttatcataagagtggatggtttaataaatactgctttcttcagcatgattttaatcagatgactactaaacttcttttcaaaaaaaaagactaatattcataaaaacaaatgttgtctacaaccaatgtttctaactcttacctgtcaacattagacaattcaatctgacttcttgccttcctactccaataaaaccattttttccaagtcacaaatgacttccacataaatctaaagagcat

SEQ ID NO: 535173 - DNA, 550 bp, Homo sapiens
catgaagaaatgcctttcccccaatgtgcttccctggctctcctgtcccctttcttgtcaatagccagtcaacatgtattgattgtgcagaggctaagggcttattcttctgtgcatgcttatccatctgccccttttcttttggcttacattgtctctccagggttttattttgtttttataaacatctttctatctgcctgcttcttctcaccatatggcaattctgatatgtattttttgttggggggaatgtgagacagaaggagaggagaaagagtccctaacaacacaagatttagaatacttatcataagagtggatggtttaataaatactgctttcttcagcatgattttaatcagatgactactaaacttcttttcaaaaaaaaagactaatattcataaaaacaaatgttgtctacarccaatgtttctaactcttacctgtcaacattagacaattcaatctgacttcttgccttcctactccaataaaaccattttttccaagtcacaaatgacttccacataaatctaaagagcat

SEQ ID NO: 535174 - DNA, 522 bp, Homo sapiens
atgacaagtatttattaatattgtgagctttttccagaggtctttcttctcaaagcatcagcttggaatcctgccatctagcaggactctatttattcaaagagggtgcttactgtcaggactgagtgctctacatactctcctgggaattcagagccttacagttcttgtatgaatccttttctctatttcttacctaagatgtatctactcctaaaaccattcrtttgtacctctctttaatcccaaaactgaccttttttgtgggaaaagcccctgttgcctgagaaacattttctacttgggaaggggtcaggcaaaacctaaacttcatttggagttgagagtcacactgattcagaaggatgctcctggtcatatttgggaattttattttgtaggtgcagtatccttagaacatcttcctcctaattaagccaattttcacataaatttgaaaaagaagtgcacttttcaatgggaatatatatatacatacatatatgtatatatacatatatg

SEQ ID NO: 535175 - DNA, 521 bp, Homo sapiens
tacttaatattactgtgtgggtcaactgactaccctatactaaacgatgtattggtatgatagctgctcattttttagttgactaactttctaatgttgagaaaaaaataaaatatattttattctaaattttcccgtgacatactttatactttttcagttttattttgatatgtttgaaaatgaggaaagaaagacaggaaggggaaatcaagaagaattgagaaatatcaagtatatgttctatgctaatgattctgcatgcattgtgccatcaaatccttaaattaatctcataaaaatatattattttacccatattacagacaataaaacagactcagggcaagatcatttgttgaagcttacacatctagtatgcacagatgctactctactaggaaayacagttaataagagttaaagcccaagttctctccaggaagccacccactctcctgtcatctgttcttatccacgtagtcagacaaaaggtttggggtagcaggttgaggtttcct

SEQ ID NO: 535176 - DNA, 586 bp, Homo sapiens
tggacattgtagttgctattaataatttctcaaaccttatgcctttgtagtgttccattaaaatataaagtcttctgctggattattcaaatgaccatgcttaggtcacaaggccatggcccggctgtcctgaataaataaaaggcaagtgtttgttcttttaagatcgatggaaccatgtagtctcctaattttcaatctgtctgttattgttttctcctgcaattcctaattagcactgaaattcattatcctacactgataactaatatcctaatgatttctatcttctgacatcttgatattcactcacacttggttttacatatttaattaaccttyacctgaggtaggtctagggcacataatcataaatcataattacataaattatgtcctggccggagagaagatcacaatcaataggggagctcagacaatgagccattctcattagacacactatgtctaatcagagacatagtgtgatatcaatgcagatgaagaatgattcaatgaaggatatattaaaaggcatcgtaattatttctacattattgaccccctccttgacctcactgcctct

SEQ ID NO: 535177 - DNA, 636 bp, Homo sapiens
ctgcacgtggcacctgtactaggccgcaggatggccttcttgctgcaggcatttcaatgagaaaatatgctgcatggatcatgagtgattctgtctccctcgtgcttaaccttggaagcaccaggccctgctggcctcacctcaaggtctcaccttgccatactcatgcgaccttgtccaccatctctccactaccaggtgccatctggtaaatggcctaacttgggttcttcctcccacgcctcctgtgtaggttcagggcaaggagaccaaggtaaatcctgtcagttctatctgaaggcagagcctggatccaatcacttcccacccctccaatgctatcacctagaacacagccacagcctcccatctggactccctgcttcgatctctgccctcccccstccccttccaaaagctcccagaggcttcccatctcactcaaaataaaagccaatgtctctgagcagtgaaagccacccaccatggtcatccaggtcctatcactgacctgctgagccccaactggcccgcatggccacctggctggcctcagtgcctcctctttcccctagctgatactaactccagccacactggcctccttcctaccctgcttttcctcttagccatgaa

SEQ ID NO: 535178 - DNA, 598 bp, Homo sapiens
ccatccaagtcctgtttgttggaaattgagagagatagtattggagaactagatgctttcactttatttctccaaaagagagctggtctccaggtggtgaagcctataattctataaaaactggagattggagagataggagggtacaactctggcccaagacagaaataagcaaaaacaaaacaaaacaaaacaaaaaaataggcatccataagagaaaaaagtgagtggttctgggcatctagtaagtggaagaggaaagagaccatctctaatcctaactcactctgttccaggtttggaataaaagctgtatcgggagaaataacctgttaaagtagaattgycaatgtgtagaactgaaaatcggccaaaaatccatcagctttctcaatttactaagaaagaataattaactccctagtacctgatatacttttgcatttaaaggctaaactacctatatctactcaatatcattcacttctagtaagactcttattggcaggtttaaagcacccctacccaacccactagcaccaacttgtcttttatcttagcctggaaagaacatgtatgggttacattactaagaaca

SEQ ID NO: 535179 - DNA, 487 bp, Homo sapiens
tgaaaggcaaagcttaaacgtttagaagaccatacaagaactgtccttaaggatgtcctttaaaagacacaaaatgttcaatgataaaggaaagattgataaattttattacattgaaattaagaatttctgccactgtaagatactaaaaaagatggtggagaaaaaatacacaaattaagagaaggtattttggccacacagagaaatagtctcctgcatatataaagaactcctacaataaataagagagatgtaaactacccaatttcaaataaatgggcaaaaggcttaaagagtacttcacaaaaaagaaaatccaaaaggtcacggcgtatgaaaagatactgacctctttagtatcaaatgtatataattgaaagcagattagatactgttacacatccacaagatgggcaaaagtttttgacaatatcctacaaartataaagtttttgcaagattagagagcagtaggagaaattgc

SEQ ID NO: 535180 - DNA, 600 bp, Homo sapiens
ctggttatcccttaatccaagttgacaagtaaagttaaccatcacattaggacgggggacaaggaagggaaacctaagcagagcctggtagactccttaaattgaagaggtagggagaagagttcagaaaaacaaaggcagctaaagtttgcagggcagagtaatgcaacagaactctaaagatccacagaatttcccccttgggtattcagtagaagagtgatgagtgcatggctatgaggaaactctctgaggcaggcaaggaggctcackgctgtaatcccagcaatttgggaggccaaggcaggtggctcacttaaggtcaggagttcgagacaagtcaggccaacatggtgaaacccagtctctactaaaaataaaaaggtgggacgtggtggcaggcacctgtaatcccagctacttgggaggctgaagcaggagaatagcttgaatctgggaggtggaggttgcagtgaaccaagattgcgccactacactccagcctgggtgatagagcaagactccagctcaaaaaacaaacaaacaaaggaaactatctgagaccaagataaggctacctataagaattagaggaagtag

SEQ ID NO: 535181 - DNA, 614 bp, Homo sapiens
tctgtagtacaaataactcttgtcttctaagcatggagggttgcagttggatgraagcagagtaaacagagagaagccgggaccttggcttgggaaccacctgtgtccagggagaggggcctcttgtggaatgggggaggagggctggatggccagtttggaggagaggaattggatcaggaaggggaggactgagttgggcagaactcagcagattccttggcatgcactgcagaaggattccctgaagggctgcacagaaaagaaatgtgctgtgtgcttggcaggccagaaaccacagagaacctggcaatgctttttgaggatttgggagcagaaaagcagactccctaggtggttatttatagagccgcagcagtaatgatcagttagaaaaaataaattataactcagttgaacctgaaataacttttcttttgcaaccccaggcatcccacacgggctgtgttcctgccgatagtgttcctggaggctgagggtcagtcccacaccaggctcacttatgcctcccccaagcttcagcgccgtcaacaaagcaaggagagggagtttctgggtagagatggggagaattctggctggatgactccttt

SEQ ID NO: 535182 - DNA, 512 bp, Homo sapiens
ccccacattgataggttacagccctccagctcctgtggggtgccctgcctctccccactacccagcmctcatccgggcaaggcttcccggaaagaaggctgggtggctcagggtgaacagagaggagtaaaaaggagctgggttagaggctcccttttccattttgtgccaccctatctcagtgccccgggagacacaatgggatgggctgagctctgccagcttcaggcagcgactcaccttcaacctcatccacattcccccttctccccaaaggaggtacatttatgcaaaccggcaaccaaaacatacacagagatttggccacccctccatggccctgccagggaaggaaaaagccctgggtcccacgtggaagcctcttagatccagaaaggaagtgagccaagctcccagtaagtaggcagctatggtagaagtcctgaggctgctcctgagatgtctccaaagtccagcactgtcccatccagcacccttgctgcagagcgaca

SEQ ID NO: 535183 - DNA, 631 bp, Homo sapiens
ggtcgctatgtatcaaacacctcaaaggaactatgcactgccctagttctgagaacactgcactgagcaagacagagagcgctcctgagtagaactgcagccctgaaatggggacagacaacagagttatgaaaaggaaagtgaggtggccatgggagcatgcagcaaggggaactggccttatctaggtgacaagaaaggtcttccctgaggaaatgagagaacagtgacacttggaggatgagtaagagttcaccagaccacaggggatgaagaaagtgctctctccacatggaaagaactacatggggaagaacctgcgtctgcaaaggaacagaacagtgtgactggcacccagagagtgagggttgagggatatgggatgaagctggaaaagcagacaaggacaggatggtgggtggcttatatgccatgcaaagaatctggggcattccaaagggcaaagtggggatccactgaatgattttattttttttttattccacgaactttttgctaaccactgaaggatttgaaagagaagagtgacatggccaagtctgsactttttaaaaagactacactggcttgaagtggagtagagtggccaaaacctgaggcagagagacca

SEQ ID NO: 535184 - DNA, 617 bp, Homo sapiens
ctctgttcaattatttgaatcttaacttggctgcttggtttctgcattgcccatgcattgttcagagaacaactagagatttggacagagcttatgtataggattcagtgtttctccactgtgactctcctttccagcataacccctttgcattccagctattacggtaaccccaacctcttccttctagctattcatgttggcaagatggcaggtttctatcccagatatggcactgattggggttgcccttaggcctaaagctatacaattgagaaactcgcctactgtcatttccttcttccaagtgtcaataaccctccattttctatctgctcttggttaatctccagtgctttcaatggttgtcgtcgatattttgtcaaaagcttatagttgtaatctggggaaggatggtctttcgggtgccactcttgcagttatcggaattggaatttctatatgtttcraatataatatgttgtatgtcaatccaatgaagaaaggatgggttatttaataaagatgctgagaaaggtggttaacttattggaaagaattaactctttgttttctgtcatatagcaaaaaatattctagatggaaaatgatagtaa

SEQ ID NO: 535185 - DNA, 619 bp, Homo sapiens
agtttaattcttgggctcagccaggactctctgagaatggaggtggagttttgctgcccctatattgtacattagatctctaggcttatttattttacataactgaaactttgtgccctttgaccgctgtctccccatcatccctgtaccccaaccacctttctactctctgtttctatatattcaagtttttcttttttttttttaagtgagataatgcaatatttttctttctgtatctgacttactggagctcaccctaagccaagggaaggtttgtcccataactcacgtcccaaaggactaattaaaagcataacatatgctgacttctttctctaatacaactttagagccatagcctccaaaaggggacgtgcaggagaactgctaggatgggcagaatattggaatttctatttaattaatttaatttaatttttaaaatgttttatttttatttcacctaatatgtacacatagttatataattttrcttagtgaaaagttcatgttttaggttccaagaacttggccaaacttgaacgctggagagaagcgaaattcactccctagctctggaaaggggaatttggtagaagacggatctcatccttcc

SEQ ID NO: 535186 - DNA, 637 bp, Homo sapiens
tgttgttattaatattccaaatggaggcaacttcattaaagatggtagatcagcagatgcaaagcatattcaaggaagacaaatttattatggttgaagggtagcaaaatggtagaagatatggttggaaaagtaggctagggccagagaggggccttctaactggtctctctctgcctgacctttttctaccttctagcttaagcacagcagccagattaattgtgcaaaacaagttacctacgtcactcctctgctcaaaagcctccagtgrctcccgcttactctcagagtaaaagttgttacctctcagacctcatatgccccacctccaactctccccttgccccagccacactggcctccctgctggtcctttagtggggcaagtatattcctgccctggggctttttacttgccgggccctctttctggaataatcttccctctgatacccacttgactccatcacattcttagcgctctactcaaatgtcatcttctccctggttagtccacgtaaaatttggatccactccaccccctcctaatctttttcagttgcccccttgtccttcttagaacttgccatggacttacatactttacttgtttattgcctgtctccccagctag

SEQ ID NO: 535187 - DNA, 567 bp, Homo sapiens
ctggcgatttttttttttaaatcgttaacagccagtgcagaacaggtcagaatagactttggctgcggagctgagcaggggtccaagtggatagagccccgggtttgtgttctagtcttggtttgtggctaatatgcyatgtgaccttgagtaaatcacttgacctcgctgggccgcagttttctcatctatgaaaagggagaatttagactagaagttgcaatcagatgcctacagggtcaggcaattaaagtaaattagtgagctcaatagagtgagtttgtattggctgtaacgtgtagactccctctaaatgggcaactgttgccaggtagaactgctggtagagcatccagggcacttgactctttaagagatgctgagaattttgatgtttatgtgatacctcctgatatttaaaatactgtgtgggtaaaaactggctaagtcagttttagtcttgatctagatagtccagaagaaccctcccagcttgagttttctgattccaaaatatatgtcttctaaagaaggtccttaagacatccccttagtcatgggaatttc

SEQ ID NO: 535188 - DNA, 577 bp, Homo sapiens
ggctgtagggcgcaccaggtacagtcctggtcttgtctgccttgtatttttaacattttatggtgacacattgggagttatttccctaagtgagacccttttctgaatatatctgtgccctcatagcctagcagagtattcagacttttgaatgatggaaacaaagctgtgrgaaaagagcagaatacaaaataacaataccaatttgagctagcagacattgctgtcaggggtcgggctagaaagatgagaaaaactgaagcctgcttagagaggtgttgacaaccaccagatccagaagaatgacctagataacagggcttcaagttctgacatgattttattagagatgtttcagaaatctctactggagaagttgtgggaacacaggggaataaagtcacggggatgggggaggagtcatgatggtaagtgttgatttccccagcatggatcacctgatagcatcatcagttaaattaggataatagcgatttgagcatacttaagttagtagatgcaagaatgggaggagagggcagaaatacacatggaagcaaaatagagcagaaatata

SEQ ID NO: 535189 - DNA, 643 bp, Homo sapiens
cctctttccttctaggatcaacccagtgtctgtctgtggtccttccctgggccyctctgtctagggtcagtgtctacaatctgtgcttgccacacactctatgcttacctctatcctgatgtttgtcacagtggtatataattaactgtttacatgccagtcttccccagggtagtctctatcttgtgcatctctgtgtctaccacctaactcagaggaggcactcaatgaagttattgaattaatagatccatgactgaaaaagttccctaagggccaggcatggtgggccacacctgtaataccaatactttgagaggctgaggtgggaggattgcttgacaccagagttctagaccagcctgggcagcatagcaagaccggtctctacaagaaattttaaaattagctgggcgtggtggtgtgcaactgtagttccagctacttgggaggctgaggcaggaggatctcttgagcccagaagctggaggctgcagtaggctatgattgcaccactgcactccaacctggacaacagagtgagaccctgtctcaaaaaatagcaacaacaaaagtatcctaaattagctctgaaaagctataaacgtctaataatgtcaaacttgagtttgtggattgagta

SEQ ID NO: 535190 - DNA, 289 bp, Homo sapiens
actgcttttctcaggtcatgtttgggtgcaacaattagatacttactcaagctagtacatataaaagggaactttattaaaaagatatggatcttacagcatccaaagagcagatgaacaactgcatccattcttggtaacatttatgggaaactgagacttaggtaagttaagtctcttaactactaaaccttatgggaraggaaatccataaatgtactgagaactgcttaggaatgaatcaattatgtgttttgtacttacatgaatctactatttttctaatgta

SEQ ID NO: 535191 - DNA, 489 bp, Homo sapiens
agaaagaaatacaccaggattgtgttggtggtatctgagagcagcaaactgtggtgtttatctttttcatttttatattttccaaattattttatatttttgagacaggctctcgctttgtcacccgaggtggggtgcagtggcatgatcacagctcactgtgccttgacctcttgggctcaagcaatcctctggcctcagcctcctgagtagctgagactacaggtgtgcaccaccatgcctggctaattttattttcatttttgtagagaccgggtcttaattatgttgcccaagatgatcgcgaactcytgacctcaagtgatccacccgcctcagcctcccaaagtgctgagattacaggcatgagccacagtgcctgacctccaaattttctttaatgacaatttatactggaagaaatacttctgtaaaagagaaagcaacatagggtataacccagagcagggctagatttgtaggcattca

SEQ ID NO: 535192 - DNA, 544 bp, Homo sapiens
atgtggtaggagacacagatgaaatcatcatctggggaatgcagagggatggggaagatgcgtgcactgtagaccctgtgatggccagggaatagaagagttcacttagtctccatgcgggggagcaacggtgggaaagtcccctggacagaagcatgagactgcccatcaagggtctcaccacccaagggcctgggggctggggtggrgacgatgatttgggaatgggacagttctttctcacaggtaccactgcacggtgcagaggtgaaacagttgtggggaagggaagggcagaggggagtctgttttagaacaaaccattgtgtgtgaatggagacattaatgcttgaaacacaacggacttgaaacagcagccccaggtggaggcaggattggagctgttttgaccattcataccccatcaccttggcctcctggttctccccagccttggaaggagaacactatgatcattatgcctatatgatagatgagagatagagtcccagacagatggtaggtgtcttgtcacaggtcctac

SEQ ID NO: 535193 - DNA, 226 bp, Homo sapiens
agctggtccttcctgttgggagagtgggtgtctcaacggaagcaccaggaggccctatggggtgaagccctagtgagcaacatctgaacttcataaatacatgcaaacgtgaatgagctttaaatggcttggagctctggattagactaccactgccactgcgcctcaggaaaattctgtaacayctctataccacgatagcctcattttattattatgctgctga

SEQ ID NO: 535194 - DNA, 428 bp, Homo sapiens
cttaccattcttgagaaagggagctttcctgctgccactggcacttctgaaacacaaagaagcaagaattagattatgcyggctctagaccccaggtctaggggtctgaggactgcttctgcttcagggagcttggtccagcaactacccaacctggaattcctcaaggaaaggtgatgagccaccagacaatggggctgccagaaagctgatgtgatcttgggttccataaacagagacagaaattcaaaaattaggaaggtgacagtccagcctattccttgttagttagatcccactggaattgttatgtcccatataataattataaaatagcaattcagcagttattatgtgccgggcattgaaaacacatgattttaactcctctccacccctctcttactgctgtgtaacagagggaagaa

SEQ ID NO: 535195 - DNA, 470 bp, Homo sapiens
cttaccattcttgagaaagggagctttcctgctgccactggcacttctgaaacacaaagaagcaagaattagattatgctggctctagaccccaggtctaggggtctgaggactgcttctgcttcagggagcttggtccagcaactacccaacctggaattcctcaaggaaaggtgatgagccaccagacaatggggctgccagaaagctratgtgatcttgggttccataaacagagacagaaattcaaaaattaggaaggtgacagtccagcctattccttgttagttagatcccactggaattgttatgtcccatataataattataaaatagcaattcagcagttattatgtgccgggcattgaaaacacatgattttaactcctctccacccctctcttactgctgtgtaacagagggaagaaaggagatagtagtggatgctgtgttctgccatcaagagccct

SEQ ID NO: 535196 - DNA, 470 bp, Homo sapiens
cttaccattcttgagaaagggagctttcctgctgccactggcacttctgaaacacaaagaagcaagaattagattatgctggctctagaccccaggtctaggggtctgaggactgcttctgcttcagggagcttggtccagcaactacccaacctggaattcctcaaggaaaggtgatgagccaccagacaatggggctgccagaaagctgatgtgatcttgggttccataaacagagacagaaattcaaaaattaggaaggtgacagtccagcctattccttgttagttagatcccactggaattgttatgtcccatataataattataaaatagcaattcagcagttattatgtgccgggcattgaraacacatgattttaactcctctccacccctctcttactgctgtgtaacagagggaagaaaggagatagtagtggatgctgtgttctgccatcaagagccct

SEQ ID NO: 535197 - DNA, 470 bp, Homo sapiens
cttaccattcttgagaaagggagctttcctgctgccactggcacttctgaaacacaaagaagcaagaattagattatgctggctctagaccccaggtctaggggtctgaggactgcttctgcttcagggagcttggtccagcaactacccaacctggaattcctcaaggaaaggtgatgagccaccagacaatggggctgccagaaagctgatgtgatcttgggttccataaacagagacagaaattcaaaaattaggaaggtgacagtccagcctattccttgttagttagatcccactggaattgttatgtcccatataataattataaaatagcaattcagcagttattatgtgccgggcattgaaaacacatgattttaactcctctccacccctmtcttactgctgtgtaacagagggaagaaaggagatagtagtggatgctgtgttctgccatcaagagccct

SEQ ID NO: 535198 - DNA, 557 bp, Homo sapiens
aggaaatgctttctgaaaagactaggcaataaaccattacagataggcagaggccaggtcattggcagctttttatgccccggtggaagtattagaggacattaaagaattcaagtcagatttatattttagaaaggtaagagtagctatatgtgatcagtgtactcaaggaagtgaaactatgcgagaagagaagacattccaaaagactatgtgagagacatctaggccagsgagagttgagagaaggagaggaggagttagatttgagaaacagggattagggtttaaggataattgactgtgtaggcaaaatgtaggcatcaaggacaactcaagcgctttctgttttaaatgataggagaataataattccattagcctcacagcctcccatcatgagacaatggtttccctgtctcacatctcccatcatgagacagggaaaacagaagcaggagattcaggtctgaggaaaggtgataggctgtttcagctatttgaatgtgaggtgcttgtgggcttctggaacatccaaatatttgttaggcaaacag

SEQ ID NO: 535199 - DNA, 231 bp, Homo sapiens
ttattaaaatattctactattattgtgtttctgtctatcttggaaactcacgtartttctgccctatgaaagctgtgtctttctcactgggtgaataaatacatatcaataattatactttttgtgaaatttagcactagaaagtatcaatttttgccttttaaatattctgattgctatgtcttcagatattaaaatttccaaatttactttctttatatttctatgctt

SEQ ID NO: 535200 - DNA, 231 bp, Homo sapiens
ttattaaaatattctactattattgtgtttctgtctatcttggaaactcacgtaatttctgccctatgaaagctgtgtctttctcaytgggtgaataaatacatatcaataattatactttttgtgaaatttagcactagaaagtatcaatttttgccttttaaatattctgattgctatgtcttcagatattaaaatttccaaatttactttctttatatttctatgctt

SEQ ID NO: 535201 - DNA, 231 bp, Homo sapiens
ttattaaaatattctactattattgtgtttctgtctatcttggaaactcacgtaatttctgccctatgaaagctgtgtctttctcactgggtgaataaatacatatcaataattatactttttrtgaaatttagcactagaaagtatcaatttttgccttttaaatattctgattgctatgtcttcagatattaaaatttccaaatttactttctttatatttctatgctt

SEQ ID NO: 535202 - DNA, 231 bp, Homo sapiens
ttattaaaatattctactattattgtgtttctgtctatcttggaaactcacgtaatttctgccctatgaaagctgtgtctttctcactgggtgaataaatacatatcaataattatactttttgtraaatttagcactagaaagtatcaatttttgccttttaaatattctgattgctatgtcttcagatattaaaatttccaaatttactttctttatatttctatgctt

SEQ ID NO: 535203 - DNA, 529 bp, Homo sapiens
aataaatagttgagccagaatctgaacgcaagcctatcaaaagcctgagtgaattgaggcagttcaactggatcttgttctgtcacagttataaatccatacactttttctatggtaggcagaaagcttaatttttgcttgtctccagaattctattgaagagatatgaatggactctgtaaaaattctggacatagagaagttcagcaaaaggcattgtcagccttcagcatcactttgattattttcccaattccttggtctttaaggactttatctaaggacatcactgccagtggcttccaccaccaagrcctaaaggcaaaggaagccaaagtgtcttatatagctagaggtaataaaaagcacaagttcgtctgagtgtttcaattacctaatgctgtaaaataaattactcaaaaaactttgtgacttacatcaaaatcagtttactatttctcacagtgtctgtgagtcaagaaattggactgagcttagctatgtggttttggattgaggttcatcaaac

SEQ ID NO: 535204 - DNA, 621 bp, Homo sapiens
tctcactgatggcagcattgtgggaagcaagtacatgcttcacagatggggttgaacaaataatagcatgtgacaaagtgaagaaacactaaggctaagaaggaatcaaagaaagaaaaattcttggcacctcacttttatctttggcatacacaggagcacacatttagaaacgaaggaaatattgccttatgttgtcatataccttaatgggttcaggaatcstgtggcaagaaagtatattctaactgatatattcttcgctagaggtagtatttctcacaaacttaagtgctttatcaaaacagaactttaggttttttggtcaaattgttatgggatccttggggctgttgcttttctagccagaaacctctgtggccggtggcgccttttcctgagttttgctcgggcctgctgggcccacttggcctagcaggctgcatttggcttgcactaccggcctggatcccacgtctctgaggagactggagcatagtggcaaggggtgtgtgagtgagcaatcctgtagtctggccacggcacacagtcaggcacgctggctgctgcagcggggtgggcagctccacatgccaacacaggtgccagttccctgtgagg

SEQ ID NO: 535205 - DNA, 646 bp, Homo sapiens
tttcttttgacaacacctttaatattgagtcccacagacactgaaatatattttaaaaaacacaaataattttattcctttggttagaagtttaaagatactcattttggccaggtgtggtggctcatacctgtaaacccagcacttggggaggccaaggctggcggatcatgaggtcaggagatcgagaccatcctggctaacacggwgaaaccccatctctactaaaaacacagaaaattagccgagtgtggtggtgcatgcctgtagttccagctactcaggaggcggaggcaggagaatcgcttgaacctgagaggcggaggttgcagggagccgagatcgtgccactgcactctagcctgggtgacagagctagactccatctcaaaaaacaaacaaaaaaaagatactcgtttcatgaaaagttttacatattaagtggaatgggttatatttagaatgttatttatagtagatatatggaaatatgatatatgcatatgaatagaataaaacaattgcatgtgtggattaaggtatcttattgccattcagcaagatatcaagcttctccaattttggttaagtaaacactgtggggaacatgatatattaacttaaaaaaattcaagtatttagttca

SEQ ID NO: 535206 - DNA, 529 bp, Homo sapiens
cccaggacaggtggtttgcaaaccactgatttaaattattgctaagtggtttcccataaggaagtaatttttgagcctatgaaaatttttatgtttggttgggagtgggaggtgaaggaagaatatatgagaaattctttgcttaccaggctctgaaactatttcagttatatactggaataaagatttgttactaaatatgttaagtttatgcttcaaaaggaaaatcaaatggaataaaacaaagtaayaattacagtcaactttgaagtattgctgtgtggaatatataaattgtacagaaaactattttgatattgttttgatacctgtaagatttgataactgaaaataatacatttattttctttaaatgcttaaaatgtgtaaggtatttcctaagtgctttacatattttagtttatttaagagtcaaaaaaaccctatatgttaagtactgttattatctccattttatagctgaggcatctgagactagagaaattcaataattgcccaagacacaaag

SEQ ID NO: 535207 - DNA, 586 bp, Homo sapiens
gctgtcttaatttccctgcatctcagtgtcttaatctagaccatggagataatagtctttgacacatggagtagctgaaagcaatagatggataatgtgcagggcccctagccaagttcacactgggtgctcatcgtcctttctgccgttgaagtgtcataacaaggtgttatgcttcccctctcatttcagcgcggtccactgcagaatgtctcctgtagcagtcagtcccttggggcaatctcccatatctcagcctttgcctaatattaacctttatctgccttatcttgttctttaaaggctttggccacatctaagagatagggctgtttggacaaaactaatataatttaccagttgtttggatgcataactttcctagaaaagaatttttttttttacactcaacttcagtgggcaatgtctgtcttactctaacgaaataaatttgatgtgaaatattacagatgacctggcaggtgtgagaaagataattttggtttatagggtcttcccaagcccrttaaatgctgtcaggtataaactatatacgtgcattgtaaattctggtcaactatatggt

SEQ ID NO: 535208 - DNA, 578 bp, Homo sapiens
gaagccattactctaagcaaattaacatagaaacagaaaactgaatatttcatgtactcacttacaagagggagctaaatcttggttatcttgggtacacatggccataaagatgggaaaaatagacactagggactacaaaagaagggaaagagttgaagcaagggctgaaaaactaactattgggtgctatgttcactatctgtgtgatgagatcaataaaaccccaacttcaacatcatacaatatacccttgtaacaaacctgcacgtgtatccactgaatctaaaataaaaagtgtgaaattttacctagttcgtttggttagaggcaaaaataacgcttttctcctcaccatggtcctacaaatactttctctgtatccactttcccctttctgtagatcaagtctcagtcttttatcattttttttggaataaataaattgcttcctcctagatatatctaaaaagatccagtccagcatagcatcaaatcttcagacttttcttcaacttaatccttcyctgggccccagttctagtcctctttagcactgcatgcttgcaggtggggta

SEQ ID NO: 535209 - DNA, 634 bp, Homo sapiens
tgttgtgaagagtaaattagataagggatgtaataaatagcaattcataaactgcctggaactcactaaatatatttcaataattgccatcatcattattggtccatctatctcatattgtacatagatctgaaaccatttagagcagcagccccgaacctttttggcaccaggtactggttgtgtggaagaatttttccatacatgggggaggagagacgattttgggatgaaactgttccacctcagatcatcaagcattagttagatcctcataaggagcacacaacatagatccctagcatgcagagttcacaatagggtttgtgctcctataagaatctaatgccgctgctcatgcaacaggaggtggagcttaggcagtaaggtttgctggcctgctactcacctcctgctgtgtggccaagttcccaacaggccatggacaggtactggcctgggagttggggacccctgatttagagaataccatttaaaataatacaatyagaataaagattgtgtatgtcactgaagtcagcattgtttctactcctttccagcagtttcatttaaaactctactggactgttcatgtccccaaaacaaattcttttgagcagttgcacttgtt

SEQ ID NO: 535210 - DNA, 561 bp, Homo sapiens
ctgcagaatatcattttggaatttgcatccctgctataatccaaaactcatgtatggcttcattaagcttcttatctttattttttttctakcctttgagagaatacacagagcatcatatctcagagtttccccatgtcagcattcaaatccttcactccattatcacaaccatagatggaaacattgtcctttggcttgatgaaagtagcattctctttcttagaatggggttattcacagagtgcagggggttaaggctgattatagtacatgagcctgctagattcctgcagcctttgtcttctccaccatcagttgagtgcagagcagcccattacacagagattcagtcaaattgggtttcatctgctccccactctcttgatggtagacctctcctctaggttgacctcatggagttttctcacatcttgctcacctctgaggtctggcttcaggcctgtgcttgaaacttgtcactgcttctctttcaggatctttctccacatgtattttgggattgtcttgctattgcatttggagtaaaaaggagagact

SEQ ID NO: 535211 - DNA, 561 bp, Homo sapiens
ctgcagaatatcattttggaatttgcatccctgctataatccaaaactcatgtatggcttcattaagcttcttatctttattttttttctatcctttgagagaatacacagagcatcatatctcagagtttccccatgtcagcattcaaatccttcactccattatcacaaccatagatggaaacattgtcctttggcttgatgaaagtagcattctctttcttagaatggggttattcacagagtgcagggggttaaggctgattatagtacatgagcctgctagattcctgcagcctttgtcttctccaccatcagttgagtgcagagcagcccattacacagagattcagtcaaattgggtttcatctgctccccactcycttgatggtagacctctcctctaggttgacctcatggagttttctcacatcttgctcacctctgaggtctggcttcaggcctgtgcttgaaacttgtcactgcttctctttcaggatctttctccacatgtattttgggattgtcttgctattgcatttggagtaaaaaggagagact

SEQ ID NO: 535212 - DNA, 559 bp, Homo sapiens
cctttgaatttgggaaattatttttattgctaaaaattttgttattatctttcacattaattttggccattatatataagatgttttgatttttttgttccctgtctgcatgaaagcaaaaacattacaggcctctttttctgttttccacaaaagaaataattttgaaggaaattacaaaaatgaatagtcaagtactgcaggctgggagtaattatccatcccatgtaccctggttggtcrcctgtgctcaccagatacagactaaagaatctctcactgtggtgcttgggcattaccatagcaccaactgtcatggcctccctcctggtctctctgctttcattcttgctcaatgcaacttattctccactcaacagccagagtgagtttttaaaacaagttttatccaaaacacttgaagaaaatattccaggtgtttaacaggtgaatgtttacacaaatgtggtacatatgctggatgtttccaaaaaggaagctaattctgctactctagccatcgaccattggaccagggacaggagcatgaacaaaaaga

SEQ ID NO: 535213 - DNA, 601 bp, Homo sapiens
caaaatgtttgtgatatgtgttaattgaggcatagttcacattttaatagcctggctactaaatgatggtcaaaactcaataatgtgtttctgacataagtgtgttcaattacctttttccatacttttatccatcattttccttctccttaaaatatgtttctcaggatcctaagaggagtttacrgaaacaaatttctattgggaaaaatactgttttaaccagttgccttattctgtgagcccccagttttctggcatcaagtaaatcactatagtttcccacagcatagaaatctaccaagtgcagggggaggttgcaatgtcaagttcattcttctgggtctcctcaacaatcccaaaaccctcctccacagaagaggtgcctctcagcatcatccataattttgaaatctttaggcttcaaaattccatttagacagaaacctttatgttgggcaattcatgttcaccaatgttccaggctctcctacctgtccttactcccatgagcatgaccatgaccatgtcttgtttggcatggctgagggaaccaggcatctctgtgtagcaggctcttggagcggcatagccactgcag

SEQ ID NO: 535214 - DNA, 455 bp, Homo sapiens
ctttgggaaagggaatgccattatgtgcagtcattagccccataaaagaagtcaccaaacagtgtcacctcatttcttcttcccaccacccttgcttcacctccctgacaatggtttctaggcacacacctccattctgttcttgcttctattggtttctccttcatcactcgtcaataagaaacaacaacaaaacccaggcatttggccaaatgacctttccacctgtcttatctttctgtctgatttcattctrtgatgacagaatggaaaatccttgaaggcaggtgctatacttattcataatttatattcaagaccaggcatcttttagatgtttattaaattttatataaaagcattaaaaaactttgatggaatgaccctggaaatactttatcttctctttttattttcttcttctcttttagtggctggtagaaaaaggaaaaggt

SEQ ID NO: 535215 - DNA, 549 bp, Homo sapiens
tggaggtggttaaagtgtgctcacttttattggagttgttgattcgtgttttcccagtcaatcatgactcctttagaggcaagaatctggcctcattccaccttgcattctccctgggacctagtggcttttgtggtgtagggcagtcttttggcttcttggggggttgcctagcatcctggcagtgggtgttggtatataagaacctcaaagttgcaatgccttcctcctcacttccccctcctctccatcttcattttcctaccaccgccattggagttyaccctgtctgtctcccatggaaagtgggtggaggaaactttattatttacatggggataaaaaaatcaggtcttcctaattcttgctgtgtgggtgtctaggtgtgtgcacacttttgtacatagaaaagacgagggagatataaagccttattcagatttatgtatccttttatgtagacagattttaatactcaggaacttgtctatttcttccaaaccacccatatttactgagaggacaaaaaatttattgccctgttgccta

SEQ ID NO: 535216 - DNA, 621 bp, Homo sapiens
tgacagctcctttgctttcttcatgcttctctgttccctcagatgtcctggtcagtaagaagggcatgakgaggagaagtgccaggtgaggaaagagagaaagttgaccatggcctccttttgcttttaaattgctgcaagtctcagccaagagacgtgagaaactgcaactctaaattgagtttggagcattgaatactagacgatatgggatattttaattttagatatgactgagtttttctatgtaagtgactttgtgactttttgttatctgagagaaacaagagaatatggacagtccctcttattggttcaacttaatgttattttggctttacaatggtgtaaaagcgatatgcattcagtaaaagctgtactttgagtacccatataaccattctgtttttcatgttcagtattcaataaattacatgagatagtcaatactttatgataaaataggctttgtgttagatgattatgcctgactgtaggctaatataaatggcttgggcatgtttaaactaagctaggctatgatgtctggcaggttaggcatctaaatacattttcaaattataatatcctcaacttatgatgggtttatcagaatgtaac

SEQ ID NO: 535217 - DNA, 605 bp, Homo sapiens
acagctcctttgctttcttcatgcttctctgttccctcagatgtcctggtcagtaagaagggcatgaggaggagaagtgccaggtgaggaaagagagaaagttgaccatggcctccttttgcttttaaattgctgcaagtctcagccaagagacgtgagaaactgcaactctaaattgagtttggagcattgaatactagacgatatgggatattttaattttagatatgactgagtttttctatgtaagtgactttgtgactttttgttatctgagagaaacaagagaatatggacagtccctcttattggttcaacttaatgttattttggctktacaatggtgtaaaagcgatatgcattcagtaaaagctgtactttgagtacccatataaccattctgtttttcatgttcagtattcaataaattacatgagatagtcaatactttatgataaaataggctttgtgttagatgattatgcctgactgtaggctaatataaatggcttgggcatgtttaaactaagctaggctatgatgtctggcaggttaggcatctaaatacattttcaaattataatatcctcaacttatgatgggtt

SEQ ID NO: 535218 - DNA, 577 bp, Homo sapiens
ctctgtcacccaggctggcgtgcagggctgcaatcatgactcactgcagccttgaattcttgggctcaagcgatcctccccgctcattttccggagtagctgggaccacgggcataagcaactgcacctgcctacaaccaaattttaatcacctggtcttggccgggcgcggtggctcacacctgtaacaccaacactttgggaggcagagttaggtgggtcacttgaggccaggagctcaagaccagcctggccaacacggtgaaaccccatctccactaaaaataccaaaaaaaaaaaaaaaattagccaggtactttggtgggtgactgtaatcccagctactaaggaggcygaggcaggagaatcacttgaacccaggaggcggaggttgccatgagccaagattgcgccagtgcactccagtctgagtgacagggtgagactctgtctccaaagaaaccgtaatcacctggtctctagtctttggctttgacgctgaactgtctgagctgaccctggtagaaggcaccagaacaggcccactggaggtccggggcacttgctttaagaataa

SEQ ID NO: 535219 - DNA, 588 bp, Homo sapiens
aagtgagaattctgaagttcaaaaaagcctgagatggattgtaaagttgctattcttgaaagatgcgcttgagctcctcagcatcctttgtaactaacatgcatctggagcagctatgattcttgtttctttccctcactatggacccatttccaactgagctggatgtgtgccctcgcagctctgtgcagggatttcggtgggctgtctgcaggttttattgaacatcygtaaatcctcggcttgggtatgcttccagctaccactttaatctgttcctggtatacagtgctctaggtttttagcactgggggctggggaggcatctgttttgctgctgcaagcagaggatggaatagtaaccttggtttcccatgcgctgtggaacatgatgaggagttcttaggagaccacggttaccgtctttagcacaatctgctctcttttcccagagaagtaccatctctgagaagcatatttttcaacttattgtaaatgaagcctatagggctgcatggggcagggaaattatacataatttatccaaatatttgttctttctgagagaggagtatgagagtagggatg

SEQ ID NO: 535220 - DNA, 656 bp, Homo sapiens
tgtatttccagactcataaatatttcacaataccatttttttttttttacaatcagatacattagtttgccaagtatgctgctggatgttcattcagcactagtgtttaacaaaagcccrgttttaaaatcagaggatatgagttgggggggccttgaggtaagcatcacttgttattgtacctggctttcaaatgcatgtcctaatttgagagagggagttggtatttgacctctagaaactgctgctgtctaccttgaaaaatatattgttatgttctatgggcaaaaaagcatcaatcttagctacactctcatattctttctcattctctagctccgccagtgcccttgtgtttctttgtacttcacaccatggacagtagaatcaggcaccaaagggtgaatttaatttggaacaaacctctgtcttgatagaactgcctttgcccgggctcaaacacagcaacctgcaatttcctgaggctgtgcctcacctagcactatcacaggctctaaaaattaagtccagcctcagcatttctcatagctaacccaactacagcaaaaaaggggtatagacacacaagtcagccaagtagcaatggttttctccctgatgtaatcaaatggagtgcagggatatcacttgattaa

SEQ ID NO: 535221 - DNA, 497 bp, Homo sapiens
ggctgacacttatggaaaatagaaagaacctatgttgaaatattgggggtgggttcccccaatggatttccttgtttatattttctatgtcattcataaccattcaatttagtaagcatttctacttagcttttaattttagcagatgcatttaatttcctttttttttttttttttttttttttgagacagagtttcgctcttgttgcccagactggagtgcaatggcacgatctctgcccagcgcaacctctgcctcctgggttcaagcggttctcctgcctcagcctcctgagtagctgggattacaggcatgtaccaccatgcccagctaattttgtattatagtagagacagggtttctccatgttggtgaggctgatctcaaactcccawcctcaggtgatctgcccgccttggcatcccaaagtgctgggattacaggcatgagccaccacacctggccacaaatgtacttaatttctaagcactctttc

SEQ ID NO: 535222 - DNA, 510 bp, Homo sapiens
ctggtttgaacgcctctgacggaaaccttccaaatgtcagagacaaggcaaagtagcttgggtcaccaggtgggcagtggtgttatgtacagagttggggaaggctggagtacattcgcaaagtggaaaggcaatggtttagattcatctactccctgcatacacagcaaaaagaaacctctaagataccatctctgccagcccaayatgtggccagaggatcatttctttggatagtgtttcctccaaggggttggttcatggacttccatacttccccactgctcactcccattgccatttactcccactacccaaaaaacacctcttaaatcccctgactgatatatgaaattttgtccttaaagctaggttcaatcacaattaaaatgttaacaagagtatcatcttgaatgtttttattatgtgtatatctaaaacaaatacagcaaaatattggcattgtttattatctctgaatggtagtatcataagtgattgtgatttaaa

SEQ ID NO: 535223 - DNA, 510 bp, Homo sapiens
ctggtttgaacgcctctgacggaaaccttccaaatgtcagagacaaggcaaagtagcttgggtcaccaggtgggcagtggtgttatgtacagagttggggaaggctggagtacattcgcaaagtggaaaggcaatggtttagattcatctactccctgcatacacagcaaaaagaaacctctaagataccatctctgccagcccaatatgtggccagaggatcatttctttggatagtgtttcctccaaggggttggttcatggacttccatacttccccactgctcactcccattkccatttactcccactacccaaaaaacacctcttaaatcccctgactgatatatgaaattttgtccttaaagctaggttcaatcacaattaaaatgttaacaagagtatcatcttgaatgtttttattatgtgtatatctaaaacaaatacagcaaaatattggcattgtttattatctctgaatggtagtatcataagtgattgtgatttaaa

SEQ ID NO: 535224 - DNA, 550 bp, Homo sapiens
cagctgcaggggtacatcaaacttgaagtctagaaaaaatcactttatttttcttggctttctttataaaattcacgccacttaggtcctaacctttctaccaagcaactcttagaaaattttctgaagcttaacatgtttagtacaaggaaatgagttgttttcatgctgctaagattcatatgtttttctgacagttactttattattattctcatggttaagcattacagtatagtttagttgtagcatattattttctactgtagaaaayagaataacttttaatcctacctagaaaaatttaaaaaagggatatctaccctcgtattgcactatgtcttcaaatactattttaaaaagcaaataatcaaagtaatactttgtagaaagtgtttttttctaaggcaagcactatagtttatcctccatatatgtttgaatggaatagagacattgtttcaattctagaacaacaacaacaaaaattaaactagaaggtagttgaaatctaaacagacttcctatcatccttcaggaacagagaata

SEQ ID NO: 535225 - DNA, 240 bp, Homo sapiens
ctgctgcattccagccggggtgacagtaagaccttggaaaaaaaaaaaaaagaaaaaagaaaaaagaaagaaaaagaggaataattcaatcatattaagaacttgagctttatcctaaggtcactgagaaagctttgacagattttaacagggaaacgatcttttgataccattgaatatcataggtattataatgatcaacccctaagacygttgtgtccaaagagagagaagactgat

SEQ ID NO: 535226 - DNA, 415 bp, Homo sapiens
ttccaaaattttcttgtaaagaaattttccaaggaaggcatagttacacatggaacaataacgacactgcacacgagctcctgaaagagatggcagtctccaggattcgagtgtatggtgctgttmtgcctcctatcacaggagtcactgcatttctaaaatcctttacctgctacagaaattaaatcacatttgggaacagccctttatgataagaaaatctccatcataatatcgcaaaggttccatctgagcaagtccccctgcttgggcccagcttgctgatttgatcctgccaatccagagagacagttcagcaaggccctgctgaaattaaccaacctaaaaggccctctttgtcaccccagtgaagtagaacgagtcaattctataccaagtgctttggtcaggcaat

SEQ ID NO: 535227 - DNA, 529 bp, Homo sapiens
aactagtgggatccctgcatagcccacggaggactgattacaaaggcaggccagccttgaacacacttgtccattcttagtgtagattcagcagtgacaggacatgggggactattcctgagatccacttttcaggatctgcagttgacccccaactttggatgaaggcaggtaagaaaaagcagaaaaaattctaacccagggaaccaaaagacatacttaaaacagctctccccatgtgcacctcttcatcatattgcttgacaggcttacactgcagcctgtgacataccagatttctccaattattagatgactacaaaacacactgccaagaccaaagcatatcagagaatcagtyactaggctgatggtttgccataagaactgcttcacacttgtccaggatgaagcaaaaatcctcctttccagtctctccatcaaggtccctggataacagttaacacactttgagggtccctttgagtaattattggcccagttactaaaaaaggcttattgttaattt

SEQ ID NO: 535228 - DNA, 627 bp, Homo sapiens
cacttctccaggaaggtggtctcttagaaaggcaatcttcagatctgatcaggcacagacagtgccttcctaccaccaatgagaactgcttgaatccctacagagctggggcactagctagaaactctgacatcagccatctccttctgtttacctgctaggtggatgtggggcagcactcttgacaggtttcattcctaactcttagcctactcacccttttctttctgtcttgggatagacgacaggataaaggaaagaactcccagatgtttccagggtaacacarttttataccttttattatacattgtagaacaatagctggaagggaccagcaggcttatctgttctgcttccttagtgaactcaaaaacctctctataggctgtaattttgaagttcgaagagacttgagagcacgtcgtttttcctgacatttttagtcactttaggaaattgaggcatggagagggaaggtggctagtgtgaggtcacatgttgctgacaaattcagaagctttttggcgttaatctgtatctgtttccttctgtgttccttaattagttagaggataaaatggcatattctttgttttcggtttttgttttgttttgtcacccagg

SEQ ID NO: 535229 - DNA, 467 bp, Homo sapiens
aaagccctcatcaatgcagatgagcttgccagtgatgtggctggggctgaagccctgctagatagacaccaagagcacaaggtaatggtatctctagaatcttccagaagtgaagattttagcttataatgcaccagtttatcagtgttgggtgaggcctatagtcggcgttggtaccatgttattcacaggtgtytctcatcatgaggattatggttggttttgcctttggagacctggtctacctgcttctgatagaggcttaactgggttcagtgtcaagaggttcactgtggtccataaaagcaaacagacaagctctggcgagatagaagtgctactacttggcacattgatcctttgtgatgtaaaaagtatttgttgggccaggcacggtggcttatgtctgtaatcccagcactttggaaggctgaggcgggtggatcatgaggtcaagagatcaagac

SEQ ID NO: 535230 - DNA, 467 bp, Homo sapiens
aaagccctcatcaatgcagatgagcttgccagtgatgtggctggggctgaagccctgctagatagacaccaagagcacaaggtaatggtatctctagaatcttccagaagtgaagattttagcttataatgcaccagtttatcagtgttgggtgaggcctatagtcggcgttggtaccatgttattcacaggtgtttctcatcatgaggattatggttggttttgcctttggagacctggtctacctgcttctgatagaggcttaactgggttcagtgtcaagaggttcactgtggtccataaaagcaaacagacaagctctggcgagatagaagtgctactacttggcacattgatcctttgtgawgtaaaaagtatttgttgggccaggcacggtggcttatgtctgtaatcccagcactttggaaggctgaggcgggtggatcatgaggtcaagagatcaagac

SEQ ID NO: 535231 - DNA, 467 bp, Homo sapiens
aaagccctcatcaatgcagatgagcttgccagtgatgtggctggggctgaagccctgctagatagacaccaagagcacaaggtaatggtatctctagaatcttccagaagtgaagattttagcttataatgcaccagtttatcagtgttgggtgaggcctatagtcggcgttggtaccatgttattcacaggtgtttctcatcatgaggattatggttggttttgcctttggagacctggtctacctgcttctgatagaggcttaactgggttcagtgtcaagaggttcactgtggtccataaaagcaaacagacaagctctggcgagatagaagtgctactacttggcacattgatcctttgtgatgtaaaaagtatttgttgggccaggcacggtggcttatgtctgtaatcccagcactttggaaggytgaggcgggtggatcatgaggtcaagagatcaagac

SEQ ID NO: 535232 - DNA, 596 bp, Homo sapiens
ctgagcctcataccatgaagcagggatggcttctgaatgttccctgctttattcccagcatctagcatagtccctggcccgttacatgggttcaataaagtctgtagagtgaatgaatgaatagatgaatgagtgaagtacatcccttatataggtaaacaagaaaactcttgtttacaccccgtgcctctctctctctctaattcaacccctgccacttgtacttcattaaccaaaaaaaaaaaaaaatgagrttataactctttgagcaccaggatttcctatgcagactcagacatgcagcaaacaggtacactttgggccaggagaccccactgaagagtcccaactgtgattggcaggcatctatgtattctatgagagttagttcccacctaaaggtgtcccttcagtcctgcacggagatgtctttgtgctcagggggctggggccatgctaaggggtgaccctgagcaccaggtcatggggagcagagcctgagagcctctggaagcctgttaaatgctcaaggccagcctgactctgtggcccatggtgcaaacagttgatttatttcagagggatgcatttgcatt

SEQ ID NO: 535233 - DNA, 603 bp, Homo sapiens
cgttaagaaaaaaatttgcatcttatccagcattttgaggtgttcataatcagagtttttcacattctctaagcttactttcttgccagatctggaaattgcttcataatcacttgacttcttaaccaagggctttgcactagggttgagctctgcaggtatacgtcttgagaaacagaagtgtaaccccttcccaactccttgctgccctctttagcaatttttttgtggaagayggctatctctgggagagaaagtgttcccccttaagtttgaaattttattagaggtgacacaaacaatgtagaaattcttaatcacaaattttatattcctaaattgatagcttccttttatagtttcaccaaatcacagtagcaaccaccatcctaaaaccagaagcaagacaaaattcaaaacaagcaggccaacaccgacgcaggaattacatgaatactgcagatgaattctcttgcagtgtgctttcgtgagcgtgaaatgagaacattgtggctgttatatctctgcactttatttcagtttttgaaagatcaatatattttggcgtattggaaaggtttgataagaatactttataactga

SEQ ID NO: 535234 - DNA, 430 bp, Homo sapiens
tgctttgtttaatatttcatagcaggcaataatcaaccacttaataatagctttgacatttgcaactgttgyatacaaagtatttttgctagaagatgactagctctcacttttattttacagtgcttaatgtgataaacttctagtcatgtttcctatcaaagagatcagttaatatatgtacatcaaccacagaaacagtataacaaaatattttaaaattatcatttttctacttcaaatatgtttagcttaagacttcttagcacatttataaaagcaggttaaatttaataagatttctgattttttttgtaactgaagatagtttttactagtgaaataacatttcagctaaataaaactttgctaaatattgatatttgataaaaagttatcttgtataatttctgcaaattatccttgttct

SEQ ID NO: 535235 - DNA, 455 bp, Homo sapiens
gacaaggaactgcaactttctactatacttgtttgtctctatgtctgtctcccacttcaggctctgagtcactccagagcagggaacaggtttcatttgtctttgtatccttatcatcttcaattgtgatgaagcgaatagaaaaggaaataaaagcaaaccctcttttcaaattgtgaaagcagcattgctgatcccaaaaggaaaggtagtcttgttaaacctgtcaccatatactttacaggtagttmactataatttggtactgtggctcagcttctaatttgtttaccacctggactaacctgatacagtggtcaaaacagtattaaataacactttctcaggagaaagattcagcctaaaactaaaggcactgtcttaatctcttttccgttgctataacagaatacggcagactgagtaatttataatgaacaaaaatttatttagct

SEQ ID NO: 535236 - DNA, 464 bp, Homo sapiens
gtttctttgtgaggagagatgcttgatggaataggaatctggtattccattatccttactcaatataccatgtaaaacatcctaatgttccttcttacagcaaccattcttcgacaactgcctatcatttttagtcaacacacacccaaacccacgcacatcttcttgttatcgcttatgtttttttctctctccttgtccaaarctgctgaaggagaggaaactaaggattaaacaatatactcaagacatctttgagatataggaacccaatggctgtgtattgttgttttattggaattaaaaattccagttaaagttctgattagaactttggccctgcctacacgtctttttcttgcttcttcagatggaagtggagtgaccttctgtttaggtgttgtttttgttatggatgccccagttttcacaaaatgattttaatcctgtccctcagctcatgt

SEQ ID NO: 535237 - DNA, 587 bp, Homo sapiens
tggtaagctttgcaaggcaggctctgccccttgtgccagaggcttgtgactgtccagccttaccaataactaaaaacaataagtgagagaaaaacatcaaaaatctgatgggaattcttacaggcatggacaaggaaaaatctcatcaatatctctcactggctactacaacaaggccagtttcctgctacagagtctttagcctgagcttttgggctagggaagcctttgtttcctccccactcccagttatattttgttgctccaacctccctccccccgacccccgctctycataggcaatccaagaccaggggcttgccatgtagccagccctcacagaacagtgcatatacaagtacacactcacatttcagcatttccttctgttcctccaaaacaatgacggcaacttcaacaaatcaagattatgggccactttacaaaaccaagagtcaaggtagtattctctggatattaccatagggatactggtggctcccagaaggacctcaatattgtggcaccatctgaaataggttgttagctgatgaaagacacccacaggctctaaatgatggtcacag

SEQ ID NO: 535238 - DNA, 232 bp, Homo sapiens
ttagactccttgtccataaaattatgccatgtgtatttgagatcatgatattacaaaaatagtttccttggaggaactcacagtctattaggggcaagacatgaaacaaaaaccatgtaaagctgaaaaaacaaatagaataaaagagaaaacacttagaccctgttcaacaagtcatttatcttttggtcccaatttcctcgtctgtatracaatgaggttggattaaatg

SEQ ID NO: 535239 - DNA, 566 bp, Homo sapiens
agtttctcaatataactggagcagatatctgggtaacatgcagccataatttactaaaagtacagtcaccttattgtgttgtttttcttgagaaatttaaaaatatagacaagtacaaataacatagcaaatatccaggaacctaccaccyatcattgaaagctgttaacattttgacacatttgatttaaatctttttttagaaagaaaatacaataagcgttatggacaaaatcaaagtcccttttgctctctattcccagttcgaattctacccttccttccccaaaggtagcctttatcatgaatttaatatatattttttagtctcttaaaaatacatatatgtttgttttcaggaacataaaagaatatttatttgtatgaatttttattaatgtaaatgatatatattctgtatattttatatattttgggatctttccatctataaatatatatgtttccttttagtgactaaatggtattctatcaaatcagtattccacaattctattactaattcacttaatggactattagattgttctaatttttaaccattg

SEQ ID NO: 535240 - DNA, 472 bp, Homo sapiens
cacttgtatctaaaacctagattggttgcataaacaccatggcattctgaagttttggttttgattgacattggcragattactgtgtgtttaattttcttaaagctgagcactgtggtgatgggttttgtaattcagcataattcttactgataagaaaaatagacctgaatgttatgtaactctttggaaagtttaatccaatattaaaatagtcactgaaatacaatttcattgtaaagttgtacagaaagttacagaggttatgtcgtgatgctgggatgtggagtgagacaccatcatttggcattcaagtttaatggtaattcacagtgatgctgcctgttcagagcttatagacactggacctgtttgggctattgccactcaaaagttcatgaccacaaatgtccacagcgtcttcctctgaggaaatgcaaatcctgaagctgaaattccttgtgacagataa

SEQ ID NO: 535241 - DNA, 537 bp, Homo sapiens
tgtaatgctcccctggtggaacattctgatcctaaacgtatagagatgaggaatttgtagaaatggaacctgccaagaacagaaactggcagaatctgtcacaagaaaaaggtcccaatcagactccaagagagggttcttggatcttgtgcaagaaagaatttatgaggagtctgagtaaagtgaaagcaagtttattaagaaagtagaggaataagagaatggctactccaaagacagagcatccctgagggctgctggttgcctattattatggttatttcttgatcatatgctaaacaaggggtgcattatttatgcagggttacatcctgatgttgctatggtatttgtgaactattatggcgctggtgggagtgtagcagtgaggatgaccagaggtcactctcgtggccatattggttttggtgggttttggctggtttcttyactgcaaactgttttatcagcaaggttttaaggacctgtatcttgtgctaacctcctatctcatcctgtgacttagaatgccttaac

SEQ ID NO: 535242 - DNA, 627 bp, Homo sapiens
tgtgagccacagcaaaggatatgcctttgattctaagtgcactgagcaccttccctgtgctggacactgggctgggtggtgggaataccgcgatgagcaaaatgggctcagccckgggactcacagggttctagtctggttggggagaaaaatgataaccaaattctcacactaatagccacagcaaccctccataatggcaacatgcaggagttctgaaaacacgtcacaatggagccacgctaatctagcagcaaggggtcccccttttgtaagtgatccccgtctttgaacaaagccaatgaactccaccattcacataggtttgctctttattttttattttttagagacaaggtcttgctctgtcaccgaggctagaatgcagtggcaccatcagggctcactgtactcttgaacttctaggctcaagggatcctcccacctcagccaaccaagtagctgggaccacaggcaccaccataccctggtaatttttattttcattcttattttgtagagacagacttgctgtgttgcccaggctggtctgagctcctggccccaagtgatcctccccgctcagcctcccaaagtgttaggcttgcaggcatgagccaccatgcc

SEQ ID NO: 535243 - DNA, 627 bp, Homo sapiens
tgtgagccacagcaaaggatatgcctttgattctaagtgcactgagcaccttccctgtgctggacactgggctgggtggtgggaataccgcgatgagcaaaatgggctcagccctgggactcacagggttctagtctggttggggagaaaaatgataaccaaattctcacactaatagccacagcaaccctccataatggcaacatgcaggagttctgaaaacacktcacaatggagccacgctaatctagcagcaaggggtcccccttttgtaagtgatccccgtctttgaacaaagccaatgaactccaccattcacataggtttgctctttattttttattttttagagacaaggtcttgctctgtcaccgaggctagaatgcagtggcaccatcagggctcactgtactcttgaacttctaggctcaagggatcctcccacctcagccaaccaagtagctgggaccacaggcaccaccataccctggtaatttttattttcattcttattttgtagagacagacttgctgtgttgcccaggctggtctgagctcctggccccaagtgatcctccccgctcagcctcccaaagtgttaggcttgcaggcatgagccaccatgcc

SEQ ID NO: 535244 - DNA, 627 bp, Homo sapiens
tgtgagccacagcaaaggatatgcctttgattctaagtgcactgagcaccttccctgtgctggacactgggctgggtggtgggaataccgcgatgagcaaaatgggctcagccctgggactcacagggttctagtctggttggggagaaaaatgataaccaaattctcacactaatagccacagcaaccctccataatggcaacatgcaggagttctgaaaacacgtcacaatggagccacgctaatctagcagcaaggggtcccccttttgtaagtgatccccgtctttgaacaaagccaatgaactccaccattcacataggtttgctctttattttttattttttagagacaaggtcttgctctgtcaccgaggctagaatgcagtggcaccatcagggctcactgtactcttgaacttctaggctcaagggatcctcccacctcagccaaccaagtagctgggaccacaggcaccaccataccctggtaatttttattttcattcttattttgtagagacagacttgctgtgttgcccagkctggtctgagctcctggccccaagtgatcctccccgctcagcctcccaaagtgttaggcttgcaggcatgagccaccatgcc

SEQ ID NO: 535245 - DNA, 627 bp, Homo sapiens
tgtgagccacagcaaaggatatgcctttgattctaagtgcactgagcaccttccctgtgctggacactgggctgggtggtgggaataccgcgatgagcaaaatgggctcagccctgggactcacagggttctagtctggttggggagaaaaatgataaccaaattctcacactaatagccacagcaaccctccataatggcaacatgcaggagttctgaaaacacgtcacaatggagccacgctaatctagcagcaaggggtcccccttttgtaagtgatccccgtctttgaacaaagccaatgaactccaccattcacataggtttgctctttattttttattttttagagacaaggtcttgctctgtcaccgaggctagaatgcagtggcaccatcagggctcactgtactcttgaacttctaggctcaagggatcctcccacctcagccaaccaagtagctgggaccacaggcaccaccataccctggtaatttttattttcattcttattttgtagagacagacttgctgtgttgcccaggctggtctgagctcctggccccaagtgatcctccccsctcagcctcccaaagtgttaggcttgcaggcatgagccaccatgcc

SEQ ID NO: 535246 - DNA, 555 bp, Homo sapiens
aaagcaatcatgaaaaaagtatttttcataaaataggaacgacttgaacatttcaacagttgatggacaggataggatatgttggtcaaagcatattaaaagaaaagaagttgatggctagaagccagtggaaaaagaaagcttgagataaagaaaaaaaaggtgtaactgagatcccagagaagatggaaggtaatgaaattcatatcatatgtcaaaggatgtactataggaagagtagacacccttcttccatttgcttcagaagaaaagaagagtatgggaaatgtgtgatcttaatggcaggaatgtgagaattttcatccagtggtttctgttttcttactgaagtaggaggcaaaaggtaaaatcacatcctaagagtgaggaagaaaattgaaggactgaggatatacaaatagggagggttgtttgagagagatagaagatttgaggaaggaaakttggaaacagttgctagaaagatccaaagatagagaacacattaggaaatagaagattgccaggtgcattgagggtgcatttaagatcgtg

SEQ ID NO: 535247 - DNA, 599 bp, Homo sapiens
tgatgtttggtgaggcctgcagacttgggctgggcttagggacttggagtaaagcccctcaaaagacctcagaggtgagcatcactatcaccagcaatgaattgaagggccagcaattcccattagaaccctatgcggatgttatattttgtgctgtattcttacactgtatgcagtattttatactgtatttttactgtatccttytatgtttagacacacaaatacctaccattgtgtttcaattgcctacaatattcagtacagtaatgtactgtacaggtttgtagcctacaagcaataagttacaccatacagcttaggtgtgtagtgggctacccaacctaggtttgtgaattacgctctatcatgtccacagaatgatgaaatcgcctaatgatgcatttctgagaatgtattcctgtagcaagcatgcatgacggtgaaagtgtagtagaaagaggaaagtaggataggcggtgttaagtcaagttaagcttgtttaaaaaaggaagaagtatcaaatgctgaagagaggtcaattaaggtgatgtctgaatgtcctttggatctaagaaggtagaggttaattatggtag

SEQ ID NO: 535248 - DNA, 599 bp, Homo sapiens
tgatgtttggtgaggcctgcagacttgggctgggcttagggacttggagtaaagcccctcaaaagacctcagaggtgagcatcactatcaccagcaatgaattgaagggccagcaattcccattagaaccctatgcggatgttatattttgtgctgtattcttacactgtatgcagtattttatactgtatttttactgtatccttctatgtttagacacacaaatacctaccattgtgtttcaattgcctacaatattcagtacagtaatgtactgtacaggtttgtagcctacaagcaataagttacaccatacagcttaggtgtgtagtgggctacccaacctaggtttgtgaattacgctctatcatgtccacasaatgatgaaatcgcctaatgatgcatttctgagaatgtattcctgtagcaagcatgcatgacggtgaaagtgtagtagaaagaggaaagtaggataggcggtgttaagtcaagttaagcttgtttaaaaaaggaagaagtatcaaatgctgaagagaggtcaattaaggtgatgtctgaatgtcctttggatctaagaaggtagaggttaattatggtag

SEQ ID NO: 535249 - DNA, 597 bp, Homo sapiens
ctcagattgccaaaccacgtgcactattgactcttccagatactctcagggatttgccatattatgttaaaaacagctctttgcaatttttattgcacacttgttatgtgttgataagcatgcattccaaaatagcatttcttctgcccataccttttacatgttgcatataaaaccatattgcaatcagataaaactatattctaaaatgggatggcaatgcctttccattgatagcaatgcgaagctgggtttgaggtgggattatacttcaggaagagacaaaattctcactagaaagttagtgtagataactctaggactgaggagggtgggcagcatatgacttaatttaaacactaacccagratcctcaaaatgtatacgattgactctatgcactgaccttggaactgcaaggttcagactcacagtgtgctgggataatcatcacttggctgcttatgtcctcactaatttgtatttcttaaaatgcagaatgtttcaggtggagagtgaatcttcctgcatagcactctttgggaaactgtcagaatagaaaatactttgacagtttccatttttatgaaattgatg

SEQ ID NO: 535250 - DNA, 621 bp, Homo sapiens
gtttttagttcttaccttatttgattacctgtagcatttgccccattctgaccagataatctcatcttctgaatccatgactccactctctcccacttcttctcttcctactctgatctttcctgagtaatattcttactaactcctgaaacatttaatccctttccactctaacatttattgagtactttgtaaatgccagasactatgctaagtgttttatgtgcattctcttcctttacgtttaaaaccacacattagacagatagggttatttaaaaaccattcaatatctatgatattgaatagatttcatatctatttcattcaatagatatgaaaactgatgctcaaagaaataaagtattttgcttaagtttattagagtaattagtgatagagttagcatttaaatacaggaaactgattccagagtttatgttcttaagactatcctatctactttaatgacattaacaactaagttaagctaatgcagacttgcatcaataagttatttaattgaattatatagttgcaagcaatgaaaaccagctttgacaacttaagctgaaaaggaatttgtggtaaggatatgaggtaactcacataattgaaggg

SEQ ID NO: 535251 - DNA, 399 bp, Homo sapiens
tttggaaccactttagctgtgcattacctagaggcagcattstcttcctcgatgctgaatttaaaccattcctgtcatttcagactctctaatgaaatctgtttctcacaggatgtctctgtcttggaaatggcatgtggtctccttgcaaaatgaaaaggaatttaaagcatataaatcacctgtttttcttcctctctcaccctacacacacacacacacacacacacacatacacacagacacacacacacacacacccctttctgttaaaaaaatttcagaacagaagaagaaaagcatggaagtgataaaggtatgcttctcagaacagggaatggtgagggaggagtggctactgcctgtcaatagctcacaagcagcaatgctgactgccaa

SEQ ID NO: 535252 - DNA, 555 bp, Homo sapiens
atggtatgctgacaagcatattgcagtacagttgaacaataatttgataaatatcataagtcaaaaatgtatttaatacacctaacctactgaacaccctaacttaacctagcataccttaaaggtgttcagaaattacattagcctacagttggacaaaatcatctggtacagagtacactgtagagtactggttagttaccctcgtgatattatggctgcctcggagctgcaactcactgmtactgcccagcatcacaagaaagaagatcatgaagcatactgctagccccagaaaagatcaaaattcaaaattttgactacagtttcgattgaatgtgtatcacttttatatcatcacaaagccaataaattgtaagtcgactgacatacagtcataagtctgggacaatctgtatagtactttgtagttttgtttttatttttttgagacaggatctctgtcatccaggttggagtccagtgaaacaatcatggctcactaaagccttaacctccccaggctcaggtgatcctcccgcctcagcctcctga

SEQ ID NO: 535253 - DNA, 541 bp, Homo sapiens
atggtatgctgacaagcatattgcagtacagttgaacaataatttgataaatatcataagtcaaaaatgtatttaatacacctaacctactgaacaccctaacttaacctagcataccttaaaggtgttcagaaattacattagcctacagttggacaaaatcatctggtacagagtacactgtagagtactggttagttaccctcgtgatattatggctgcctcggagctgcaactcactgatactgcccagcatcacaagaaagaagatcatgaagcatactgctagccccagaaaagatcaaaattcaaaattttgactacagtttygattgaatgtgtatcacttttatatcatcacaaagccaataaattgtaagtcgactgacatacagtcataagtctgggacaatctgtatagtactttgtagttttgtttttatttttttgagacaggatctctgtcatccaggttggagtccagtgaaacaatcatggctcactaaagccttaacctccccaggctcaggtgatcctcccg

SEQ ID NO: 535254 - DNA, 625 bp, Homo sapiens
ggtcaagcctcactcccttgctgagaccaatagcaayccctgatgatctcgccacaggtccagcaggtgccccatccacactttgtccccagcccctacctggaagctccaaacacctacctgaggggccaactctgattcccaaggaggtgacacctcctgccccttgttgatagaacattgataaggaaataggactgagttttaagcttctttccatgtcaaatatttaaaggcaatataatgttcaagtttaaataatatttcatgtgtaattaaacaatcccttattgttaaatagatgggttccaattttgaactgctataatctgtgtatgtgtccttgattaaatccttaagagaaatccctagaaacattatcttagggtcaaatggcttggatattctgtaaactgctgataattatgggaaattgccttccaggaaggttataacaatttgcctgatccccagcagcaacagactttacaaagtactcagtatctaatatttaactatgataaagataagcttctcccttctttttcacttaaaatgctgtgtcccacctcacttttcagtgtctcttcacactgacaagacggttggctaatacttcagagct

SEQ ID NO: 535255 - DNA, 625 bp, Homo sapiens
ggtcaagcctcactcccttgctgagaccaatagcaatccctgatgatctcgccacaggtccagcaggtgccccatccacactttgtccccagcccctacctggaagctccaaacacctacctgaggggccaactctgattcccaaggaggtgacacctcctgccccttgttgatagaacattgataaggaaataggactgagttttaagcttctttccatgtcaaatatttaaaggcaatataatgttcawgtttaaataatatttcatgtgtaattaaacaatcccttattgttaaatagatgggttccaattttgaactgctataatctgtgtatgtgtccttgattaaatccttaagagaaatccctagaaacattatcttagggtcaaatggcttggatattctgtaaactgctgataattatgggaaattgccttccaggaaggttataacaatttgcctgatccccagcagcaacagactttacaaagtactcagtatctaatatttaactatgataaagataagcttctcccttctttttcacttaaaatgctgtgtcccacctcacttttcagtgtctcttcacactgacaagacggttggctaatacttcagagct

SEQ ID NO: 535256 - DNA, 625 bp, Homo sapiens
ggtcaagcctcactcccttgctgagaccaatagcaatccctgatgatctcgccacaggtccagcaggtgccccatccacactttgtccccagcccctacctggaagctccaaacacctacctgaggggccaactctgattcccaaggaggtgacacctcctgccccttgttgatagaacattgataaggaaataggactgagttttaagcttctttccatgtcaaatatttaaaggcaatataatgttcaagtttaaataatatttcatgtgtaattaaacaatcccttattgttaaatagatgggttccaattttgaactgctataatctgtgtatgtgtccttgattaaatccttaagagaaatccctagaaacattatcttagggtcaaatggcttggatattctgyaaactgctgataattatgggaaattgccttccaggaaggttataacaatttgcctgatccccagcagcaacagactttacaaagtactcagtatctaatatttaactatgataaagataagcttctcccttctttttcacttaaaatgctgtgtcccacctcacttttcagtgtctcttcacactgacaagacggttggctaatacttcagagct

SEQ ID NO: 535257 - DNA, 460 bp, Homo sapiens
acagctgagggactgaggtatggagaggttaggtaacttgttcaaggacaccaagccagtcagggtgccactggacctaagacaaggtaacctggctctgagaccaaccccacagagaagtatgtggatgctgacaacactgtaggaagttacaaggagcaaaagaatagcagcctcagccctgaattccacygtaagcttccctctaatcttccctgcctcactctcaatcaaataaagagctgatcgggaagcaactatgcacggtcttcccctccacacctccagccccagctcccttccccagactcagtgccagcctgtgccagcccccaagatggcagtgtggagccatgcactaggtctgctgcgcacccagcagtcggctgtgggttctttgtatctgtcagagtcctggcaggaaatggtttcattctcaaagggttaactaggtagaatt

SEQ ID NO: 535258 - DNA, 460 bp, Homo sapiens
acagctgagggactgaggtatggagaggttaggtaacttgttcaaggacaccaagccagtcagggtgccactggacctaagacaaggtaacctggctctgagaccaaccccacagagaagtatgtggatgctgacaacactgtaggaagttacaaggagcaaaagaatagcagcctcagccctgaattccaccgtaagcttccctctaatcttccctgcctcactctcaatcaaataaagagctgatcrggaagcaactatgcacggtcttcccctccacacctccagccccagctcccttccccagactcagtgccagcctgtgccagcccccaagatggcagtgtggagccatgcactaggtctgctgcgcacccagcagtcggctgtgggttctttgtatctgtcagagtcctggcaggaaatggtttcattctcaaagggttaactaggtagaatt

SEQ ID NO: 535259 - DNA, 460 bp, Homo sapiens
acagctgagggactgaggtatggagaggttaggtaacttgttcaaggacaccaagccagtcagggtgccactggacctaagacaaggtaacctggctctgagaccaaccccacagagaagtatgtggatgctgacaacactgtaggaagttacaaggagcaaaagaatagcagcctcagccctgaattccaccgtaagcttccctctaatcttccctgcctcactctcaatcaaataaagagctgatcgggaagcaactatgcacggtcttcccctccacacctccagccccagctcccttccccagactcagtgccagcctgtgccagcccccaagatggcagtgtggagccatgcacyaggtctgctgcgcacccagcagtcggctgtgggttctttgtatctgtcagagtcctggcaggaaatggtttcattctcaaagggttaactaggtagaatt

SEQ ID NO: 535260 - DNA, 460 bp, Homo sapiens
acagctgagggactgaggtatggagaggttaggtaacttgttcaaggacaccaagccagtcagggtgccactggacctaagacaaggtaacctggctctgagaccaaccccacagagaagtatgtggatgctgacaacactgtaggaagttacaaggagcaaaagaatagcagcctcagccctgaattccaccgtaagcttccctctaatcttccctgcctcactctcaatcaaataaagagctgatcgggaagcaactatgcacggtcttcccctccacacctccagccccagctcccttccccagactcagtgccagcctgtgccagcccccaagatggcagtgtggagccatgcactaggtctgcygcgcacccagcagtcggctgtgggttctttgtatctgtcagagtcctggcaggaaatggtttcattctcaaagggttaactaggtagaatt

SEQ ID NO: 535261 - DNA, 649 bp, Homo sapiens
tcacttcctgaccatccaatctaaagtagccatcgcagtcacattacccttcttaaatcccatttaactctcatgtttttcttttttgtttattttctctctctcccacccaaatctcccattaagcactatgaaagaaagctaagctccctgaaaacttcctttcctgtctccatggcatttacaacagtgcctggaatacagaagatgttaactaaatatytgttgagcagatgttatccccaaaaggccatccaaaaacaattaaatggttaatgagggagaatgaaaagcaatgatttaatgtgatttcattcaaaatcagcccctaatctatttccaacaaaggtatctgactacattgaattactgctccctactacacgggcagccctgaagctgcaagtggagacactcactccactcccatctggacacttcaaagtcactgctgcaccattcgagcaactggaaatggctgaatgtcactggtcatctcacagcagacattctatgcgtccctgtcctccacttctcccaacatgcctatcctactctgctcctttcctattagggtgatccaaaagtaattgtggttttgccatcaaaggtgatggtaagaaccgcaattacttttgcaccaacctaa

SEQ ID NO: 535262 - DNA, 649 bp, Homo sapiens
tcacttcctgaccatccaatctaaagtagccatcgcagtcacattacccttcttaaatcccatttaactctcatgtttttcttttttgtttattttctctctctcccacccaaatctcccattaagcactatgaaagaaagctaagctccctgaaaacttcctttcctgtctccatggcatttacaacagtgcctggaatacagaagatgttaactaaatatttgttgagcagatgttatccccaaaaggccatccaaaaacaattaaatggttaatgagggagaatgaaaagcaatgatttaatgtgatttcattcaaaatcagcccctaatctatttccaacaaaggtatctgactacaytgaattactgctccctactacacgggcagccctgaagctgcaagtggagacactcactccactcccatctggacacttcaaagtcactgctgcaccattcgagcaactggaaatggctgaatgtcactggtcatctcacagcagacattctatgcgtccctgtcctccacttctcccaacatgcctatcctactctgctcctttcctattagggtgatccaaaagtaattgtggttttgccatcaaaggtgatggtaagaaccgcaattacttttgcaccaacctaa

SEQ ID NO: 535263 - DNA, 597 bp, Homo sapiens
tggcttattctgtgtaatcatagcaaaacacatgggcccactttttgcaatatgaaaagattggataatagatgttagaaagcttcaaggtcaataagcctttaatagccactctatgctactgattccttttattagaaataaaatcacttatggataggaatttraaatgtatcaaatggcctgaaatcagcaatgattcatttttttttttgagtaaggctgaatagtttataattagcagttactaagttaacaactcattacatttaaggacctcaggggaaattaactatttcaaactgggaaagagccataaactcctggagagagagaaaaaataaaattaaagttaagcaattacaaaaagagtttttcattttcaatcttatgtttctggactatgcaatctgtttacattattggatttgcattaattaaattcacagataagtcaccctgagaagctcactgaattatttttactgtaaaatgcatagaaaccttgaagtcttattgccaagaaaaaccaccattttctgttaaatgtgaccttaataattattttcattcccccttaaacactaaacatttaaa

SEQ ID NO: 535264 - DNA, 597 bp, Homo sapiens
tggcttattctgtgtaatcatagcaaaacacatgggcccactttttgcaatatgaaaagattggataatagatgttagaaagcttcaaggtcaataagcctttaatagccactctatgctactgattccttttattagaaataaaatcacttatggataggaatttgaaatgtatcaaatggcctgaaatcagcaatgattcatttttttttttgagtaaggctgaatagtttataattagcagttactaagttaacaactcattacatttaaggacctcaggggaaattaactatttcaaactgggaaagagccataaactcctggagagagagaaaaaataaaattaaagttaagcaattacaaaaagagtttttcattttcaatcttatgtttctggactatgcaatctgtttrcattattggatttgcattaattaaattcacagataagtcaccctgagaagctcactgaattatttttactgtaaaatgcatagaaaccttgaagtcttattgccaagaaaaaccaccattttctgttaaatgtgaccttaataattattttcattcccccttaaacactaaacatttaaa

SEQ ID NO: 535265 - DNA, 597 bp, Homo sapiens
tgtttttaaaagattgctggtacctttttactgtcgatactctatgcattacctatccctctgagttgagaggtgtaggtaaaaggtggagtattctctgtagtttgaaaagttattttgccaagaagccccttccctgaatcacctgactgtgggctcagtgcatgctgggctgtgtgtggccaggcgcgtgggcagcacagagtgacatgggcagactgcctgtaagcagacactgtggtcaaaataaaaaggactgaaattcagacatgaacactttatgcatcttggacacaaatacacactctgcaaaaagagaaggaatattttatrtttcgaaaagtcacaaagaacaaagtaatccccttttctctttcaaatcagcagttttttccaactaacatttcctctgggaaatggtagggggccttttaattcataactattttatttcaagttcattacttatttttaaattcatttataattaattatttttcttttatcttttatattttttccaaaattctcaagtttttttctgtattcactcatattgattttttatacatttttaactcttatatttgatttcat

SEQ ID NO: 535266 - DNA, 575 bp, Homo sapiens
cttaagaatattaactggtcctagaggttatttgagggaaagaggtgcccttcataaaaatctccagggattctaattcacaaaaactatgggaacaaagaaagaaggaataaaaatcatatgtagtaagatttcattgaaatttcamccacttctaatcaaaagatgcgtacatttttaaactcttctctctcctgtcctctcctgaaccaggatgacgtgactccaggatgtattggtttatctgtgcactttcaaaatatacttgtttacttgaaacacagggggcaaagcagagggcatatttcttgtaatgtaagaatattgtatggtgcgttagaaagttctgtatttgggtcttgcaggcaaattgagcttttgggaagaagccaaaatccactgcagatctgttatatttctgagaaaaaaagaaaagaatagctatctccaagaggctgatcccaggttccactaggaggccaaggtgacaggtgaagctcttcatcgtgtgacaggagcaggcaaaggccctgcagaaagtgcagagagccagagaggttgtggagatgtggcag

SEQ ID NO: 535267 - DNA, 579 bp, Homo sapiens
acagcgtctaggaaaatatagcatccttacwcttttcgttccatttctcatccttatttatcaatgtctggtttcaaaaagctctatgacctgaatatttccctctaaaaatttatatgctgaaatcttaaccctgaaagtgatggtattaggagatgaggcctttggaaagttattgggtcatgaggggtctacccttatgtgattagtgccattacaaaagttccctagagagctacctgctcctttcaccatgtgggaacacagcaagaaggtgccatctatgaactagaaagttgggcctcaccagacttgccgctaccttaatcttgaacttcccagctttcatagctatgagataaaaattttgtgccttataagccactcagtctatagtacctatttcaatacaacagctacagaaacaaagataggaagaatcaccaactctttctttttctttttaagaatatttgaattgtgtttattctaagatctgcccccgatttatacttttccttttcctttttttttttttttttttttttttttggctagacgctatcattaattgctaga

SEQ ID NO: 535268 - DNA, 579 bp, Homo sapiens
acagcgtctaggaaaatatagcatccttactcttttygttccatttctcatccttatttatcaatgtctggtttcaaaaagctctatgacctgaatatttccctctaaaaatttatatgctgaaatcttaaccctgaaagtgatggtattaggagatgaggcctttggaaagttattgggtcatgaggggtctacccttatgtgattagtgccattacaaaagttccctagagagctacctgctcctttcaccatgtgggaacacagcaagaaggtgccatctatgaactagaaagttgggcctcaccagacttgccgctaccttaatcttgaacttcccagctttcatagctatgagataaaaattttgtgccttataagccactcagtctatagtacctatttcaatacaacagctacagaaacaaagataggaagaatcaccaactctttctttttctttttaagaatatttgaattgtgtttattctaagatctgcccccgatttatacttttccttttcctttttttttttttttttttttttttttggctagacgctatcattaattgctaga

SEQ ID NO: 535269 - DNA, 579 bp, Homo sapiens
acagcgtctaggaaaatatagcatccttactcttttcgttccatttctcatccttatttatcaatgtctggtttcaaaaagctctatgacctgaatatttccctctaaaaatttatatgctgaaatcttaaccctgaaagtgatggtattaggagrtgaggcctttggaaagttattgggtcatgaggggtctacccttatgtgattagtgccattacaaaagttccctagagagctacctgctcctttcaccatgtgggaacacagcaagaaggtgccatctatgaactagaaagttgggcctcaccagacttgccgctaccttaatcttgaacttcccagctttcatagctatgagataaaaattttgtgccttataagccactcagtctatagtacctatttcaatacaacagctacagaaacaaagataggaagaatcaccaactctttctttttctttttaagaatatttgaattgtgtttattctaagatctgcccccgatttatacttttccttttcctttttttttttttttttttttttttttggctagacgctatcattaattgctaga

SEQ ID NO: 535270 - DNA, 621 bp, Homo sapiens
ctgtgaatgaaaacctgaggacctccttgtgcataaatttaaacattcctttttttttttcttactttctacttcttggtcaatttttagaagggcaacgctacagaaaagggatctccctcaagaaagaattcagggcgagtccataaagtaaagtgaaagcaagtttatcaggaaagcaaaggaataaaagaatggctactccatagacagagcagccccaagggctgctggttccccatttttatggttatttcttgatgatatgctaaacaaaggtggatcatatagggtaactttctgatrttgccatggcatttgtaaagtgtcatggcactggtggggagtgtagcagtgaggacaaccagaggtcactttcgtggctgtcttggctttggtggattttagctggcttctttactgcaacctgttttatcagcaaggtttttatgacttgtattttgtgccgacctcctatctcatcctgtgacttagagtatcttaactacctgggaatgcagcccagtaggtttcagcctgattttacccagctcctactcaaggtggagttgttctggttcacatgcctctgacagcaatatcgttaataaaattttctct

SEQ ID NO: 535271 - DNA, 542 bp, Homo sapiens
cccctttgccacgtgaggtcacaggttcagtggatttgggtgtgggcatcttttgggagcacattattctgtcttagcaggtggaagggggttttctgatgtgcccatttcagcatattttattagaaaaatagctgggcctgggcacgatgrctcaagcctgtagttttggctacttaggatgctaaagtaggaggattgcttaagccaggggttcgagaccagcctgggcaacacagtgagacccctgtttctttaaaaacaaaacaaaacaaaacacacacaaaaaaagcaggctggtcacagtggctcacgcttgtaattccaacactttgtgaggctgaggcaggaagatcacttgagccctggagtttgagaccagcctgggcaacatggtgaggccccatctctacaaaaatttaaaaattatctgggctactcaggaagctaagggaggaggatcacatgagcccaggaggcagaggctgcagtgtgagccgtgattgtgccgccgcactcagcctgggtgacagagtgagacc

SEQ ID NO: 535272 - DNA, 542 bp, Homo sapiens
cccctttgccacgtgaggtcacaggttcagtggatttgggtgtgggcatcttttgggagcacattattctgtcttagcaggtggaagggggttttctgatgtgcccatttcagcatattttattagaaaaatagctgggcctgggcacgatggctcaagcctgtagttttggctacttaggatgctaaagtaggaggattgcttaagccaggggttcgagaccagcctgggcaacacagtgagacccctgtttctttaaaaacaaaacaaaacaaaacacacacaaaaaaagcaggctggtcacagtggctcacgcttgtaattccaacactttgtgaggctgaggcaggaagatcacttgagccctggagtttgagaccagcctgggcaacatggtgagrccccatctctacaaaaatttaaaaattatctgggctactcaggaagctaagggaggaggatcacatgagcccaggaggcagaggctgcagtgtgagccgtgattgtgccgccgcactcagcctgggtgacagagtgagacc

SEQ ID NO: 535273 - DNA, 622 bp, Homo sapiens
cttaaacaacacatgcaagatttgtgaagatccctatatggctagagacttattttttcttatattttgtggcttaggaagtttctataaattttcctgtttcagaaaatttgaagtttctaggtgaaataaatggccttattttttgcagtctgacaattttataaacttattgaaaaaaggagctaacaagttacagagttgcatagattgtctttgagaatctgaaagaaaaaaatagaattgtttctttttaaatttattgcaaatgtttattaactagatatcttatcagcattgttttctcttgggcttttgttttcttatctcatgtataaaacagagatacattgcaaaggtttttttgtggaaattaaatatgtaatgtttgtaaagttcttggcatggtgtctgagacatagcaagcacttgatgaatgctttctattctattattaatatcattattatcattacactgtctaaaaactgtgggagacataaagagctaccaayaaataatttatatttagttggtaaggtagggcttatgcttatgaagtttcccatatgatttggtgacaccatatgagccatatgtgggctacatttctagttctatg

SEQ ID NO: 535274 - DNA, 642 bp, Homo sapiens
tgtgaacaggagttactaatcttcattttagagttgaaaaagaatatacagttgattctcattattcttggtagttatgttctataaagttaccacaagtactgaattagtgaatactgaattaatgggaagtatgtgagtctctggacatcaactgattgatacataatcttggctttatgtgtcttagagttctgtttaaagatatctatttaatattaatatatattgttgrttcattaacattgaactcatagccatcagcactatatcccaggcctaaatgaagtatatgtaatacctgtattttctttgtaatggacatcacagcctttttgtgctcagtaacactaaataacacttcagtgtctgtgatagctgaacaggaaggctgtgtttccttgtttgatctccactgagaatgtgcacattgggtcattcaaatgttttgctattctgggaatgttgaccaacaactgggaaagcaccatgaatattaattttgatattacaaattaattgtatcaagtaaatgaatttgcaaatacagaatccactaatgatgaaggtgaactgcaaaacatttattaggcacttactatgagccaggtactgggttaagaaattgatctcatataaacc

SEQ ID NO: 535275 - DNA, 579 bp, Homo sapiens
tagtaagtatttattaagaaattttaaataaacatagttctggttttcaggaaatgtaacatctggttgagaggcaaagggaccaagattcaggaagcagttagtgaagactatgaggaactgggaaattgtgttgagtagaccaaaagtgctgatcggagaaaagttaggacagttttgttgggagaaataaaagaaggtttcatggaggcagtgaaatcaacctcatggttgaacggtggtttggattgggatgctgtaggttgttgggrtgggttttgttggtgagaggattggtgtgagtaaaagtacagaggagagaatgccctctgccctgagcatggtgtaggtggttttatctggtagggcagagggcatctttgaggaatagtgaagggtagggtgggtccagttatagggggccctgatactcagaccaaggaatatagtcaggagattgtaggcctagggcaagatatgaattgacagaagcgttgttgaagaagtctggtctggaaatgatattcaggagagagcagaggagctgggggctggatacagggagcccagctccaaggc

SEQ ID NO: 535276 - DNA, 522 bp, Homo sapiens
cagggcagggtatttagggtgtccatcacctgaatacaatacatttttgttaagtatactcaccctgctctatcaaacattgaatttattccttctatcttactgtatgtttgtaccctttcacccaagaagtataacatttttaagtgctgaaatgtatttacctttttcttgttttcttttttttttgttttccctcattagagagtctttctctattcagaggtcatctatatttttctttagtttttaaaagatttgatgcaaaaacagttatctcttaatmtacaggaattcacgttaatgtgtgtggtgtgaggtgtggatttaaatagctgtttttcattaaaacaatttttattagttagcattgtagttgtaaagaacagaatccactatggctaatttaagcagacatagcacatactgaggatctcatgtggccacaaaatcactgagctggggggggcgaccttccagcaattacgtctagagctgtgtcagagcactggccaggtgagt

SEQ ID NO: 535277 - DNA, 528 bp, Homo sapiens
attcaaacttaactgggtgtcctgcattttggctggcaaccctgaacctatgaccactgtttcagggtattttcaggcatagacttgtacagtgaatgtgcctgtgaaaagatattatagacctggattgacaaggaggctaggaaagaaccccaagttcaaagggartgcaaggttggagaattctttgggcgactaacttggggagagatgatttggttctcattgcccagagcattgcctctgtcttctgttctgctgtgccactgtgctatggccacaatgagaaagacttgtgctgcatcatcaggattgtatcaatctccattctcttcctatttgctgacacctaaaagtaaaaacattcaaggtagggttgagccatgatctctaacaggaaatagttattgaacttgactgtgtgcagaacatgatacctgtgctggtggtggtcagagggctgagtgtactctccaactgtcctctgttgtgggggcaaagtgggcattaagcacccccctgtataca

SEQ ID NO: 535278 - DNA, 528 bp, Homo sapiens
attcaaacttaactgggtgtcctgcattttggctggcaaccctgaacctatgaccactgtttcagggtattttcaggcatagacttgtacagtgaatgtgcctgtgaaaagatattatagacctggattgacaaggaggctaggaaagaaccccaagttcaaagggaatgcaaggttggagaattctttgggcgactaacttggggagagatgatttggttctcattgcccagagcattgcctctgtcttctgttctgctgtgccactgtgctatggccacratgagaaagacttgtgctgcatcatcaggattgtatcaatctccattctcttcctatttgctgacacctaaaagtaaaaacattcaaggtagggttgagccatgatctctaacaggaaatagttattgaacttgactgtgtgcagaacatgatacctgtgctggtggtggtcagagggctgagtgtactctccaactgtcctctgttgtgggggcaaagtgggcattaagcacccccctgtataca

SEQ ID NO: 535279 - DNA, 601 bp, Homo sapiens
accagcagagatccagtgagaattggtaacagtgactcagaaaaatggttaatattcttctttcccaaatatgttgctggagaactttgtgaaatgataatataaaactcaataggcaatggacttctacccagtgtaaaaccaagagcagatctcagcagatgggagaatagatggatgcttaggcaagcactcatctcagaatggttgctgggctcttcagtagccctaagaaaggcaaactatccagactctgccctgagaggtagctctttgagaacaattgagtactcctgggaaggaggaagcagctcaaataaaaagatctttagatccctttcttttagaattctytattggagctaagagaccagggaattttatttgattattctgataatagttttcccaagcttttcagggtgtagggctgagagtacagagaggtttctagccctggttctagaaaaatctcattcctttcctggtctcagcatctacatctgtaaaatgagtgtgttggaatagttactaagactctaaggtgcctttcagttcccactgtagagactctgggattctagtttccatcattgttatt

SEQ ID NO: 535280 - DNA, 625 bp, Homo sapiens
ctggctcccctgggtctcccttgccctgtgcactcctgagtcacagacagcctgcaagggtcccttagcacccttgcttcccacctacacatgggcaggcccagcacagacatccaggaagggccaggctgtgcttttgcctgtgtctcataaagcacagtcctcttctcactggtgcttctgctyctcatccccacaggagaagacagacccttatttcattgggatcttttgctttgaagctgggatcaaaatgtggccctggggttcatcttccataagggctcttacctccgcatggctggaatgtcatggacttcatcgtggtcctcagtgggtaagtccattttctctctctgtctgtgtgtgtgtatgaagggggttggtatcatgaggtggctgggggcagggaacctggggtggaaagacagcaatctgtagagtaggggcagaagaaaaagttcaaggctaagattccccagggtgctggaccataggtcagccacctcaagaggaggatgagtactgtgtggagatgcgtgtggtgttaggcagaggccatgggactctcagccaggtctggaagctgccacttctggttttccattctgtgcttggctcagtg

SEQ ID NO: 535281 - DNA, 593 bp, Homo sapiens
tatatatttggtgtttactcagcaaatatttattgagcacctaccctgtactactcactgaattaggtgctgggaatacaacagtgatcaacgtcaatatagtctttgacctttgaaattcacaggctaccagaatcagattccaacttcttcttcaaataatgaaacatctctggatttcaattgtattgtctataaaatatggatgaggacacttcrtctactgaaggacaaaagactcaaccagatgggttcttttttctttctttatgagatggagtcttgctctgtcacccacgctggagtgcagtggcacgatcttggctcactgaaacctacaccttccaggttcaagcaattctcatgcctcagcctcccgagtgaccaggattacaggcatgcaccaccatgcccagctaattttgtattttttagtagagacaagctttcaccatgttggccaggctggtctcacactcctgacctcaagtgatccacctgccttggcctcccaaagtgctgggattataggcatgagtcaccacgcccagcccagatgatctcttgaagtcccctctaccactgtgactctc

SEQ ID NO: 535282 - DNA, 593 bp, Homo sapiens
tatatatttggtgtttactcagcaaatatttattgagcacctaccctgtactactcactgaattaggtgctgggaatacaacagtgatcaacgtcaatatagtctttgacctttgaaattcacaggctaccagaatcagattccaacttcttcttcaaataatgaaacatctctggatttcaattgtattgtctataaaatatggatgaggacacttcgtctactgaaggacaaaagactcaaccagatgggttcttttttctttctttatgagatggagtcttgctctgtcacccacgctggagtgcagtggcacgatcttggctcactgaaacctacacctyccaggttcaagcaattctcatgcctcagcctcccgagtgaccaggattacaggcatgcaccaccatgcccagctaattttgtattttttagtagagacaagctttcaccatgttggccaggctggtctcacactcctgacctcaagtgatccacctgccttggcctcccaaagtgctgggattataggcatgagtcaccacgcccagcccagatgatctcttgaagtcccctctaccactgtgactctc

SEQ ID NO: 535283 - DNA, 620 bp, Homo sapiens
cacattcaaggaggggcattgtataagggcatgaatactatgaggtggggatcattgggagacatcttagagatactcactcagggtcagctataaccrctcactcactgcttatatcatactatgttaattctacatgtagtaatttttatgtgatagttttgatgttccattaatgtctgcactcattgtcacaaattagaagcataagacacggcttccaaaacaaacaagagcaaattaatgtaaaacttataaagtatgtcaagggaaatgacatgatcagatctgcattttggactcagaaaagaagcgctaagatatgtgccaacttagcctggcaccaaagggctctcatcaaagataagggtggtttggcataaaagatagaaattaggccacactttataaatgtggatatctagattttagaagacacggtggtaggcgaaaattttcgtgaaggaaataatatgacagaggtttggaaaggagaaagtctcttcctgggtttgtaaagagtttgacagaaggaagaatattgggagacaagatcttaaatacaaaattgatacattaggttttaatttaataagcaattggtatgaatatttggcaaa

SEQ ID NO: 535284 - DNA, 620 bp, Homo sapiens
cacattcaaggaggggcattgtataagggcatgaatactatgaggtggggatcattgggagacatcttagagatactcactcagggtcagctataaccgctcactcactgcttatatcatactatgttaattctacatgtagtaatttttatgtgatagttttgatgttccattaatgtctgcactcattgtcacaaattagaagcataagacacggcttccaaaacaaacaagagcaaattaatgtaaaacttataaagtatgtcaagggaaatgacatgatcagatctgcattttggactcagaaaagaagcgctaagatatgtgccaacttagcctggcaccaaagggmtctcatcaaagataagggtggtttggcataaaagatagaaattaggccacactttataaatgtggatatctagattttagaagacacggtggtaggcgaaaattttcgtgaaggaaataatatgacagaggtttggaaaggagaaagtctcttcctgggtttgtaaagagtttgacagaaggaagaatattgggagacaagatcttaaatacaaaattgatacattaggttttaatttaataagcaattggtatgaatatttggcaaa

SEQ ID NO: 535285 - DNA, 620 bp, Homo sapiens
cacattcaaggaggggcattgtataagggcatgaatactatgaggtggggatcattgggagacatcttagagatactcactcagggtcagctataaccgctcactcactgcttatatcatactatgttaattctacatgtagtaatttttatgtgatagttttgatgttccattaatgtctgcactcattgtcacaaattagaagcataagacacggcttccaaaacaaacaagagcaaattaatgtaaaacttataaagtatgtcaagggaaatgacatgatcagatctgcattttggactcagaaaagaagcgctaagatatgtgccaacttagcctggcaccaaagggckctcatcaaagataagggtggtttggcataaaagatagaaattaggccacactttataaatgtggatatctagattttagaagacacggtggtaggcgaaaattttcgtgaaggaaataatatgacagaggtttggaaaggagaaagtctcttcctgggtttgtaaagagtttgacagaaggaagaatattgggagacaagatcttaaatacaaaattgatacattaggttttaatttaataagcaattggtatgaatatttggcaaa

SEQ ID NO: 535286 - DNA, 472 bp, Homo sapiens
gagcattttataaacatttgttacttaaagtcagggaaagagtttatggatatgagaataatggaatggagtggacacacaactattattttatctgcatagaagagaatccactccccttctggccatgccccactcatacggctgagactggaagctgccatcctcctacagattctgctgtggtgattgatgtagaaatggaaacctaaattaaaatcatcctagygccttcctccacggtaattggcccaaagaaggacacttcacacgagctgagccgactggaggacttctcccaatttttcaagttgcaaccatggaaagtgataaaactggaataatgtaagcttgaaaactgctgtcgctgagtgtcccatactccatactcaggaggaaatgagtctgagatggtgaagtcaacccgtggatggagacaagaggggaaagagtcctgaccacatgtgacctg

SEQ ID NO: 535287 - DNA, 568 bp, Homo sapiens
ctttccaatacacacacacacacacacacacacacacatgcacacrcacacatactttagagcaccaagagtaacaatgtgttgaaataaaaaatcagttctggggatataaggtacagcatgatgactatagttcataatactgtattatttacttgaaatttgatgacagcagagttttaagtgtactcaccaccctcctcacacacacacacacacacacacacacaaacacacacacaaatggtaactatgagtggtgatggatgcattaatttgatatagtcagtacacaatgtatacatatatcaaatcatcatattttacactttgaatacatacaagtttcatttgtcaattaaatatttaaaaattttaagaagaatgtaaaaaagaaataaaatatcaagaccatgacaatgatttcagttttaaagaatccaaaatatagtttggtatttacaaaataccaaatcactaattgatttcattaatttatacaaacaactgcttgcttaacagccagtttagttgcctaactgaattgactgttattttagtccaaatg

SEQ ID NO: 535288 - DNA, 277 bp, Homo sapiens
ctatttcaagccacatacaaattatcatgtccttatcaccagagtttaaatgttcaaagttgactttgtggtcacattcttgtaattcaagttttcaaaagaagcaaaatctcaagtttgtaattttattcaatgttaaaatgaggtttataaagaacaagtggtatttaggcyataaattaagaaatgtactttttttttgcagaaaaagtatcatgggacagagactcattctttgaacttgttttgtatgcatgtgtttgtggtctgtttaaag

SEQ ID NO: 535289 - DNA, 277 bp, Homo sapiens
ctatttcaagccacatacaaattatcatgtccttatcaccagagtttaaatgttcaaagttgactttgtggtcacattcttgtaattcaagttttcaaaagaagcaaaatctcaagtttgtaattttattcaatgttaaaatgaggtttataaagaacaagtggtatttaggctataaattaagaaatgtactttttttttgcagaaaaastatcatgggacagagactcattctttgaacttgttttgtatgcatgtgtttgtggtctgtttaaag

SEQ ID NO: 535290 - DNA, 547 bp, Homo sapiens
aaaacatttcttgtattttgasataaatatcttttcaagaaaaagaaatatttccttggtaggcctgcaaagggaacaaagtcatagatctacatgataatttgctgaatgtgaatatcacaattttcagctatagaaaatttctagtgaagttctgtgtaacacttaacacctagtaggtgaccatctcatcctagtttgcttaggactggccacgatggacttaacattctcctcggtttgactgaactttagacagggtttctccagacccttggccctaagacccttggctctttcttagagcacttattttggaaagttttccattgtaaattctttctctgccccttagagatgaaaagttgttttacaacccagaaatgtctttctcaaagacctgggagttatccctttgataggtaatcatcaagaaagatggcatctctatattccagtttctgtggaaggataggagcctaatattttaaaagtagcaaacagagatgacttaacattgactatctatcccctaacattttactat

SEQ ID NO: 535291 - DNA, 582 bp, Homo sapiens
ttaatttatgaaactttataccacttttgtaatgttctaaagtaaaatttcatccaattgtgattttaaaagtaatataaatagtggatgttcttttgaattgagaggaatacattataaaaatcatcctgaatggtgctgtatataactctgtaacatatttctcatagatggggagaaggtaggcttgagttggaatcgaactctaaagtcttaataagagagtggtggaaaggcaatgggtaaatagccaagaaagatttagtaacatgcctgtartaacagtacacatataatcaggttctctgtttagaatgtctaaagaattagcctatagttcatgtttttggtaatcatagcaacaataattttgcagccatttgtggaccaaaaaagtgcctttgggcaagccttaggattaaggcaggaggttgtgaaactctagtggagcccaaaaactaggagggctgttttgagaggagaaacccatgcttaagtgtcagacttactgctgcagggtcctcgctccagaccaagaaatggactcatctccttgtggatttggctatagccccatgtgat

SEQ ID NO: 535292 - DNA, 508 bp, Homo sapiens
ctgacctatggagacagcaggtccaacatcagattcaagaagcaacagccctgcatagattcctccaccagcacccacgactgcatcagggctaacccgtggaataaaccactcttaatggttccgcttctctgatcaaaccctgattatgcccagccacctcatttccctcttaatctcttcataggcatctctctggtactccaagcagtttaattacccaggcatgttatgwgagctccacctggacgccattgctatggccttgtcttccactgactcacctctccagtcacccaaatctcacgcacaacctacaaactccaactcaagtcctctctgcagcttccctcgaccacttcagcccctggtgacctcctcccagtgactggaatggggattctcaatttttctcatgaggatacacatgggaagtgagccccagggttctggctgctcccaacaccaagtccctccaaggatcgaaaggattaatatctcagcatcg

SEQ ID NO: 535293 - DNA, 605 bp, Homo sapiens
tgcaagtcaccttgggtgactgatgttatctaggcctaacggtttcctctgggtaagcacttccgccctcctgtttgtgaagccagaaacctgtgctggggcagccccattctgagcacaaaggaggactaggtagagggagaaaggaaaaggccctgtggagcagagttagaagacctgatagtagactatgcagtcatcactacgtcctgcacctttaaaaagaaaggaaagaagcacgagcaaaagtgtgccttgcaggttaccagtaaatacccttccttactgccgactctgctctcgagtcttcacctgagcagccatgtggctggactgggaggggcctcactattaattcctgggagtgagggctcttttcactgggtccccgagtgcctgtctctaaataaaakaaatatcaggctcttattcatctgaagcttgtacatggggctaagcatgataaaaacagccactttttgcagagtgcctactacattgtataggtgaggaaaatgagaatcagagcagttaagtgacttgtctaaaaaatacaactagaaagtagcagagctggaattcagccctcaatctgtctgttccta

SEQ ID NO: 535294 - DNA, 304 bp, Homo sapiens
cccgggcccgacacacgcccatcgcggcggtcgcaggccaggcgcgcgcactgagagccgaggtggggagggggcgcggcctgcgctctctggggccgaggggacccagcccatggggaacgcgggcctccgcgactggccgggaaggcgcagagcctctttcttctcyttcctggatcctggagtgcggaggaggaggggagagtgctttaccttgctccttcccggggggcggtccaggggagcggacccggcgggcggctgcggtgagccctcgcggcgcaccctgccctctcctcgtggt

SEQ ID NO: 535295 - DNA, 506 bp, Homo sapiens
agggtcttgctctgttgcccaggctggaatgcagtggcacaatcatggctcactgcagcctcaaccttccagggcttaagtgatcctctcacctcatcctcctgagtagctggactataggcgtgcaccaccacacccagrtaatgtttgtatttttagtagagacgaggtctcactatgttgcccagactggtcttgaactcttgggctcaagtgatcctcccaccacagcctcctgaagcgctgggattacaggcattaaacactgtgcctgtctaggaagttatcataacttttagggggtcaccattcaccccactatcgcagtcaacctgctatccatataaaggtaaagaacttggggattggaggagtgaatcctgggttattattaagctatattataactaccccccgagcccccactagtgccttgggtgcaaattaccaaggaatatttattgacacctgttgtgtgactaatttcctgcctcttaggtagcccg

SEQ ID NO: 535296 - DNA, 584 bp, Homo sapiens
cacataaggtaacattcacaggttccagggattaggaagtgagcatatctttttttttcctcctcaagacagggtcttgctctgttgcccaggctggaatgcagtggcacaatcatggctcactgcagcctcaaccttccagggcttaagtgatcctctcacctcatcctcctgagtagctggactataggcgtgcaccaccacacccaggtaatgtttgtatttttagtagagacgaggtctcactatgttgcccagactggtcttgaactcttgggctcaagtgatcctcccaccacagcctcctgaagcgctgggattacaggcattaaacactgtgcctgtctaggaagttatcataacttttagggggtcaccattcaccccactatcgcagtcaacctgctatccatataaaggtaaagaacttggggattggaggagtgaatcctgggttattrttaagctatattataactaccccccgagcccccactagtgccttgggtgcaaattaccaaggaatatttattgacacctgttgtgtgactaatttcctgcctcttaggtagcccgtatataca

SEQ ID NO: 535297 - DNA, 584 bp, Homo sapiens
cacataaggtaacattcacaggttccagggattaggaagtgagcatatctttttttttcctcctcaagacagggtcttgctctgttgcccaggctggaatgcagtggcacaatcatggctcactgcagcctcaaccttccagggcttaagtgatcctctcacctcatcctcctgagtagctggactataggcgtgcaccaccacacccaggtaatgtttgtatttttagtagagacgaggtctcactatgttgcccagactggtcttgaactcttgggctcaagtgatcctcccaccacagcctcctgaagcgctgggattacaggcattaaacactgtgcctgtctaggaagttatcataacttttagggggtcaccattcaccccactatcgcagtcaacctgctatccatataaaggtaaagaacttggggattggaggagtgaatcctgggttattattaagctatattataacyaccccccgagcccccactagtgccttgggtgcaaattaccaaggaatatttattgacacctgttgtgtgactaatttcctgcctcttaggtagcccgtatataca

SEQ ID NO: 535298 - DNA, 568 bp, Homo sapiens
cctccttttcccctttcccacccaccgctcctccttgaccctcctcagccccgagcatgaccagcgctttgtgggagctcaatcaataatggaattgtgaccaggcacagtgcctcacacctgtgatcccagtattttaggaggccgaggcatgaggatcgctggagcccaggagctggagaccagcctgggcaacatggcacaaccccatctctatgatgataccagtgctagcctttcttttctatctctacaatcacaactcattcctaacagaattcctggtttccagactcacyctacacatcagtgacaaatgcctcttcctataaataccataggttgtctgctctcctatcccaaaccctttgatactgcccactggaaaatggagttcatgctcctccatgggctgggctttgccacatgcctaaccttcactgtctccatgctccccaatagtggggccggggctccagccagcctgcaccctccaccattctgcattaggcaaggcatctcctcacccactcccacagcctctttgcccaaatgcctgcactgccag

SEQ ID NO: 535299 - DNA, 568 bp, Homo sapiens
cctccttttcccctttcccacccaccgctcctccttgaccctcctcagccccgagcatgaccagcgctttgtgggagctcaatcaataatggaattgtgaccaggcacagtgcctcacacctgtgatcccagtattttaggaggccgaggcatgaggatcgctggagcccaggagctggagaccagcctgggcaacatggcacaaccccatctctatgatgataccagtgctagcctttcttttctatctctacaatcacaactcattcctaacagaattcctggtttccagactcaccctacacatcagtgacaaatgcctcttcctataaataccataggttgtctgctctcctatcccaaaccctttgatactgcccactggaaaatggagttcatgctcctccatgggctgggctttgccacatgcctaaccttcactgtctccatgctccccartagtggggccggggctccagccagcctgcaccctccaccattctgcattaggcaaggcatctcctcacccactcccacagcctctttgcccaaatgcctgcactgccag

SEQ ID NO: 535300 - DNA, 619 bp, Homo sapiens
tgcaagtcaccttgggtgaytgatgttatctaggcctaacggtttcctctgggtaagcacttccgccctcctgtttgtgaagccagaaacctgtgctggggcagccccattctgagcacaaaggaggactaggtagagggagaaaggaaaaggccctgtggagcagagttagaagacctgatagtagactatgcagtcatcactacgtcctgcacctttaaaaagaaaggaaagaagcacgagcaaaagtgtgccttgcaggttaccagtaaatacccttccttactgccgactctgctctcgagtcttcacctgagcagccatgtggctggactgggaggggcctcactattaattcctgggagtgagggctcttttcactgggtccccgagtgcctgtctctaaataaaagaaatatcaggctcttattcatctgaagcttgtacatggggctaagcatgataaaaacagccactttttgcagagtgcctactacattgtataggtgaggaaaatgagaatcagagcagttaagtgacttgtctaaaaaatacaactagaaagtagcagagctggaattcagccctcaatctgtctgttcctaaaaccaggcgtctt

SEQ ID NO: 535301 - DNA, 607 bp, Homo sapiens
tagaattgtgttggtcttataaattaaaggtatattcttggcaacagaaaccagtgagttggctggtggaaagaaataataaattcttcattcccttgttttgtcttaattccttccttcctctatcaaaaatcacaatgcattctaaaaaaaaaaaaaaaaaaaaaaaaaaraaaaaaaaaaaggactctgagtcagagagaccctgactctccagctttcattctgtgtacaccagtattgggaaatgactcagttcaatgccagggccctgcctgcttgtctattaacctaattgacagtgcctgtgacacgtgtcaggctgacttctctcagaacagcttacagatttgagcaaattggaaagagtgaaggcaggaaaacctaaccactattgctccttcatctccaggagaacaaagtgccagcttgactgtttgagattatgtaaaaaaaactcaagaaaaaataatttgaaagaaacatatatgcaaggaggacgtgcttcccaggacagacaatagaagcatgttactaagggcctccaatgtggtctcagtatcaggatacagctgtgtgactgtaaacaaaggaatttcaaagggtt

SEQ ID NO: 535302 - DNA, 607 bp, Homo sapiens
tagaattgtgttggtcttataaattaaaggtatattcttggcaacagaaaccagtgagttggctggtggaaagaaataataaattcttcattcccttgttttgtcttaattccttccttcctctatcaaaaatcacaatgcattctaaaaaaaaaaaaaaaaaaaaaaaaaaaaaaaaaaaaaaggactctgagtcagagagaccctgactctccagctttcattctgtgtacaccagtattgggaaatgactcagttcaatgccagggccctgcctgcttgtctattaacctaattgacagtgcctgtgacacgtgtcaggctgacttctctcaraacagcttacagatttgagcaaattggaaagagtgaaggcaggaaaacctaaccactattgctccttcatctccaggagaacaaagtgccagcttgactgtttgagattatgtaaaaaaaactcaagaaaaaataatttgaaagaaacatatatgcaaggaggacgtgcttcccaggacagacaatagaagcatgttactaagggcctccaatgtggtctcagtatcaggatacagctgtgtgactgtaaacaaaggaatttcaaagggtt

SEQ ID NO: 535303 - DNA, 558 bp, Homo sapiens
aaatacataactctttatggaagattggctataaaaagagtgggaaaataaggtgcagtgaaacatggatttgggcagaaaaagtgataattataacttttaattttgaaatgacactagccttacaagatgttgcaaaagtattacagagatcccacatgcccttcactcagcctcatggtaatgtgaaagatttaacaataagatatattacatttttgttttcttatgagaactactcagtgtattagagaaaatggatagtatagaatagactacaaccatgaggacattttgtaggtgaaggaataaggtcctgtcaggctatttctatttcttcacatgctcagcttcttatttagtagagaaatgagggcctatctggtgagaactcatacattttcccaccaatagacaccatatacagcatatctttccactaggaacagtcatgytcatatttcagtcaaactcttccacttctgcaccaaatcttatccctcagtttggaaattattgttgcatgtaactttgtgtccctgcacgatcataggtggc

SEQ ID NO: 535304 - DNA, 596 bp, Homo sapiens
tgagccttagatgacagtgtgggctggtgacattttttagaatctggaagagtggcaaatgtaaaaataaatcatgtggcccagtaagtctctttccctaaccaaacactgaattttgccatgaaaggaacaataaagggtattctttaaagtagaragaaatagcaatggtcccagacatcctcaaaattcttctattatagaaacctgctggagttgaaaccagggtgaacaaaaaaagggaaaaaaaagctaatatttggttgtctcttaggtcaaatattgtcttggttaacggaagatgcaggtgaagctacaaaagtttagcttggacaaatcacttacttctatctaaattaaagctcagactcaaacttactctagtagccccttaccccaacccctagacagaggaaataacttgcattattttacaagtaaataaagcaataaaaactaaattatatagcaatctccatcatcattttatacacaacctccataatgtaataaaaaattataagacatacaaagaaaatgtgactcacaatcaagaaaaaacatagcaattagaagaaaacccacagttaacccag

SEQ ID NO: 535305 - DNA, 602 bp, Homo sapiens
ctcttgcagtttaaagaatccagactatcatttcatattatcattgagataatgaaacacttttatatatagtagtgaaaaaaaatcaagaaaactttgatcaaggtgttttaacagcttgaaaacatttttaaaaatttagtataacctctattagaatctattaatctctacttcttttgctctgtttgaaaagaatttatttagcattctattataaaatagcaatggatattaatgtcaagcccaataacaagtcattttcaatgtcttcctttcaaacaactgggaattctgagaaaacggcagtgacagcgttattttttaatgttgccaaatcactcatcaaaacagacagattaatgagagtaacagggccaaaaattaaataaataacttccacaactaaactggcatgttatctcaacaaaccccaaatatgagttgggtggggtatgggcagggcatgacccatataaatactatatgggtatgcataaagaaaagggaagtaatgaggtatctgacatatttgaaaacgggaaaacmtgaaaatagccaaagctacacactagaaatcgtgacaggccaattttagaaca

SEQ ID NO: 535306 - DNA, 641 bp, Homo sapiens
ctggtcagtttggagactgtttctctagtgtacactgcacaactatttcatctctttaaagatataaaccctaatctgtgccaatctgtgaaacacaaacccattaaaatggcagaaggcgcagtgtacataattcaaagagcaataaaaattgactaatgcaactgatgaccattaaattccaagcaaggagactgatatagttaaatagtactgggcatgtttaatagtgcactttactatatgagttatagatcagtcactgctagtttggtgmgaggatggaacatggcagcagattgacaacatttccctcacagagatattctccctccatttatacacatggggagtttgtgttataactgaaagacagtaaatagtctgactgaggtagatgttacaagtgggaaagaaagtagcctttgtttcctacctgaccatatgggttagatttgagctcttactgtcaaatgacagaaggccaagtgaaaattaattagatcgtctgcatatctaaaaagataaaattgtacagaatggtttgaaataactcctactaatcttgaaactcactccgaaggataattccttttacctgttataatattctatatttcaaaagaatacatttatactct

SEQ ID NO: 535307 - DNA, 638 bp, Homo sapiens
gttgatgtgatagaagcggtattttaggaggctttgcttagcaggtaccttgtatggagtgagtagattgccccagcacagagggtacgtggaggccgaaatcaggctgaagcacaaagcatggaggcgcccgaagattgttctgacaattgtagctcttaggattacttakgttaaaagagactgcagactagttgaccagctacaacttaaaatttttctatatacattttattatgtgttcaactcataactcacttactctatataaagagagcatttgattattgttaagctgtactgaactatcaatagctgttcagtaacagctaccttagatactgatggcagtcgcccaggctggagtgcagtagtgtgatctcggctcactgcaacctccacctcccgggttcaagtgattctcctgcctcagcctcccaagtagctgagactacaggcatgcgccaccatgcacgactgatttttgtatttttagtagagatggggtttcaccactttggccagcgtggtcttgaactcctgacctcaagtaaaccgcctgcctcagcctcccaaagtgctgggattacaggtgtgagccatagtgcccggcccaatagctgttttgttctgcctgc

SEQ ID NO: 535308 - DNA, 532 bp, Homo sapiens
aggctggatttgatgggcaactgggacagctggagatgacaaaatctctttagactgatttttcctgaggtcaaaagacttgggagggtggggtagagcaaggagtgttcaagaataactgtaaacatgagccttgcacacatataaaacacgggtcagaaaatgctaggcctatttcattaattttcacaaaagattccctcagacttttcagtctcttttttaagtaatcgatgcatgccctaaatcccattcattcattcttcttttatttgtttatttttcattatctgccctacccgatttattatgcacttaattgtcatattcccttttgttactggtttctttgccacttttctgactggtcactcttgtcctcattacagatctttcaaggccatttatttgatataatgaaaagaatgaagtttggaatctgatggttcagccactaggagttgcacaaccttcaacaagtgacaataggcctrtttcacaatgacctcccagaactgttagagctctaaag

SEQ ID NO: 535309 - DNA, 467 bp, Homo sapiens
tacgtctactaagtattcctaattttcagagacatattccaagttctaggagcatatacattaaaggaaaaccctttctctttaccagaagtgaggggacaataccccacttcctccttggtggtaaatggggtatagagatactcattgcactgcttgttcatttattcaacactgcataccaaagcagcacaaaacccagaggtttgagatcacaatttatgatctcatatggctctggagcattgattgggttgaggtggtcrtttcttatttgaggtgtcttatgggatcttagtcaaatagtcattgaaactagagtcacctgaagccttcttcaaacacttaaagtatctggagttgggggaggatgggcatttttctctctccacattgcctttccaactggcttgcttagccttctgcattacataatggtctcagggtagttggactttcttacatgg

SEQ ID NO: 535310 - DNA, 488 bp, Homo sapiens
atttgcgtgtaactttagactcccccaaaacttaactgcttatagtctgctgttgactggaatccttactgataacatcataaattaacacatattttgtatgttatatgtattatataatgtattcttataataaagtaagctagagaaaagaaaatcttattaagaaaatcataaggaagagaaaatgtatttactaagtgaaagttatcatcataaaggtctttatcctcaacatcttcacatggagtacgctgaagaggaggaggaagaggaggtattgatcttgctgtcttggaggtagtagagctggaagaaaatctgcctataagtgcacctgcacagttmaaacctgtgttgttcaaggatcatttgtacacacatgtaggaggaaaaaagtttatatctgttaagattactagactgtgaggataaggtgttgatatctgtatcaacacatactgcaatttttcagagaggaggaagaa

SEQ ID NO: 535311 - DNA, 633 bp, Homo sapiens
cgttaagttacatgggaaccagaacaatcttacctaggttcaaagacctatattgacctccactaattgaaagacttaaaaggcaaatgagagtctttccatattatagaaaaactttggarctgttagaaggaattacaactctcactactaagcactgagtagggtgagctcaggagaggcgagtagacttacctgaactccagaggagagcaggcaatgtttgagaagaggtgtgtcttggtccttggtatgcaagtagccactacaatctctgcctgtgatcagccttccaggaagaacagcgtgtgctgcagggcagggggcatggtacaccccacaccagcacacagatgatggtaggacgccactaaggatcacactttaaaatctagacagactagacaagtgatttttttcctgacagggaaggaatgtttatttccaagctgactctgcttcgtttacttgcacttgtccaacacattctcagcatcccgaggaaacaggaaaggggcacccaagaaaaaagacagcacagaaactttaaaaaaaaagaaagtgtcccctcaggccaccttcagagataactgaaaagtagcatccttagaggacagatgctaggagagcaca

SEQ ID NO: 535312 - DNA, 610 bp, Homo sapiens
agctccagcaatttgtctggatgtccatgatttgtcgtgatttgcatttcctactggggtgggcacaggtatgtgattcagtgatgagaccaaccacagaaaatgattctaaatgaactagattaattcagctatgagataaatttctcaaatactacttacatctcaatggaactcaagttttctcctaaataattttaactcttcaaaatgcctacaagagaacttcagcctcaaggaccctttcctaagtcaccttttcattcatctgtcaccgctcctccgttcttgtttgaacctagttgtcatcttaactctcctggtcatactccctgcccacttggtgcatatttgctgagtgttttcattatgcccagtgtcagcatayggtcatgaatagagcaaaagtgaaccttgctttcatggagtttgcagtctaatagaaacagcaaattgatcaaataattaacaaaaatatcttggtctcttccaccttcacacctttttgcctacattacctctcacatttgctttggcttttaaattaactcaccctccatggcccagtcaaaatctctttatccgtgacacaaaccttcactgaccaacc

SEQ ID NO: 535313 - DNA, 425 bp, Homo sapiens
tggggaaaaattttggctctgtggtacttttattcatgattactattctgcttctgcttattttccagtaccagggaatgtgtaattggacctcttctttttctcacagtttaaaaaactcatctagccctagtcttactcgataaccacttaaaacaataactgatgctwtttactccagaaattgctaataatgaatgacctaacttttacataatttctttttatttttatatgagatactatgcaaagagaattaatagttttctccaaaaaaatcaagaattgtatagaaaaacaattaaataggtattttattgccatggacttcaagtaatgggtcaaatctgtaaaattatatttaataacttgagtcactgcatttgtttaaattagtgaattcaaatgaaatatgctagataggt

SEQ ID NO: 535314 - DNA, 590 bp, Homo sapiens
ctggaaattgttggaaaacaaatgtataataaagatgagtgtttatgataatctgctttgtctcttagagctctttaaggtttaaaatagctcatatcatgtccagaatgcaagatacaactcatgagcatcaggatgataaactgaaaaaattaaaaaaaaaaamaaaccctctagcatagaggttctcaaccctggcttccggtgagaagcctatagggaaggtttcaaaggacgtcattgtcaggaccctgctcagaagcttctgatctgattggtacagaaattgcttagactctggaggtttccaaaagctttccaggtaatccttaaatgctgataaggtggagaatgattgcttcagcatatcatgaatcagagagatccttctaagctaggaagaattccgatgccagcactgggcagttacttacggatggaagtggtgggagaagatggtgctaaaaacaaaactaagcctcacatagctgttcagcccagatcctctccccctcgcttcagtaaccatgatcatcaaagaaaactgcatgcccaacacacacacaaacacacacacacacacacacacg

SEQ ID NO: 535315 - DNA, 590 bp, Homo sapiens
ctggaaattgttggaaaacaaatgtataataaagatgagtgtttatgataatctgctttgtctcttagagctctttaaggtttaaaatagctcatatcatgtccagaatgcaagatacaactcatgagcatcaggatgataaactgaaaaaattaaaaaaaaaaacaaaccctctagcatagaggttctcaaccctggcttccggtgagaagcctatagggaaggtttcaaaggacgtcattgtcaggaccctgctcagaagcttctgatctgattggtmcagaaattgcttagactctggaggtttccaaaagctttccaggtaatccttaaatgctgataaggtggagaatgattgcttcagcatatcatgaatcagagagatccttctaagctaggaagaattccgatgccagcactgggcagttacttacggatggaagtggtgggagaagatggtgctaaaaacaaaactaagcctcacatagctgttcagcccagatcctctccccctcgcttcagtaaccatgatcatcaaagaaaactgcatgcccaacacacacacaaacacacacacacacacacacacg

SEQ ID NO: 535316 - DNA, 497 bp, Homo sapiens
ggggctggtgtaggtcggcgagaagcttgcttaccagactaccaaaagatatgtacagaaactgaaagtaataaactttatagaaattaaaactttctgtgccatcggaatggcatttttcttttttagaaatttatttttaccattttacaaaagtactggcccacagtagtttgggaacaagaaaaataaacaattgatctctcagcacggagggtttgagaactattgatttagagcaagtgaatggaaaagaggggacaaggacatttaggcaaaagaaagtggaattaaatagctgtctactgccttgattaaatgtgctctctcaattatgagtactgaggtccttctctctgcctgaatttaaagtgggttttattgctggaaaatagtttactaaagggttttggagagaggtgctgtcttcccctgactgcattctgccytaagcagtggcatggaattttttcgagcttgtacttttttgtggggtg

SEQ ID NO: 535317 - DNA, 535 bp, Homo sapiens
aactgtaacctcacttcctgaaataccactagtaatgttaagaatccaaacctgtcaaagggcaaggtattacagcatttgcctcatgaatgaaaaagtccaataatttcaacttaatttttctaactagaacaagatccaaacatgggaagttttttttttcttctttgcttttgcggctttaatgcccttttgtttttctgagcaagctgaatacattccctgataaacaccatcactggacaaaggatctaaacattgagatttttactaaatcaatgtttcaagttggcacaatgttcctactaagtttcaattagcacatctttccaatgtcagggaaaaaaagacaaaggctactatgtcctataaagaatggtgaaatattcctaaagctgtgaatttatgaagaaaaggtgattgtccctcaaaaaagagaatatttgwagagcctcttggagatgtttgaggcaaattttcagctttcatccaactcccatatggtcattctttttccccaaggtgaatcctgaga

SEQ ID NO: 535318 - DNA, 517 bp, Homo sapiens
tttgccataatttattgtgggcagcataacaactgcctcttctactctgtaggaaagagagcccaaaagagagtgttcttcaagaagctttgagttcaaatgggatgagagaagatttagaggaagagatcagagcctggagagggagcgtcactagcatagagggtaatggtcagccagagatcccaagtgaggatatggagtctgaggaacaggcaggacatagacctgtcttttgcagatgtctccaaggctgtggtttttgcaagtgatttttccaccttatccagagtgagttggaagagctcccgataacctccaaattcaaaacgtatggacatacacccatctctggagccagaaaggasgttttcaaactttaggcccaattcaggcatgaactatccctaaatatgtggggtaggaaaatgttcatcaaggcataagcactgcagggaaagttaaaggtttttgcaccagaactggtattccaaatctgctcggaggattgttttaa

SEQ ID NO: 535319 - DNA, 628 bp, Homo sapiens
caaaatactcacctttttagcattaagtttttacagtgctccttaacatccaacatttaactagttacataaagatgcagtgttttctatatattaacatattatttcacattttgttcattaggcttttgaaagtattttagtatgaaggttccatttattgtatccaaaaataaaaatagcatcaaagtctttttgcaactccccaaacacagttagtgaataatgatcgtatgctaaaaaatgtaaaatgcaatttgtgccgtgccccatttactacaaaatcactacgaacaatgcattttgtacagtatattgctccagggaaactggatcggcatcaggaatgaataaagaacactgcatttgaaatcagctaattctgcttcagcgcttttaaaaactatttgttatgatattacttcctgtcaagcacataatgtgatattttcctcaataaaactaaacagttgctataatttcagcttccctcattttccactttttaaacactaaatatttaaacaatgcagacctggaagtctctagccagtcrtctgatccatgcatctccttgcctaaggtatagtaactatccatacgggggcctgttatgtcacactgacat

SEQ ID NO: 535320 - DNA, 615 bp, Homo sapiens
ccactgagcagcagcaggaacaagcagcaaaggaagcaatcccaagtggggtgagtgactggctatagccagagtgccagagccagcaaaacaatgcctcgacttgctaagtagggcaagtcaggtatcaagtgggtaacttggataaattgatgcttgaaattgagcaaaaacacaattttgagatctgacatttttctctggtttttgtggacttcaataaatttagcacaaaaaaaggatggcacagtgagttcatatttcaaaagctctctctacttcaaatgtacaacaatgacaataaaacccagaaaggaaaactaagaaaacaggtaagcagaaataaatggtaaacatttcacaaactcaaaacaggagaaaaacgcataacaatgctaaccactggctggttcctcagaagcaggaagtgccaaatgcaaagtacagatggcragaatgttctcacaagactgagaagagagccagagccactggtgaagaccaggccaaagaggaactgcccttggcctgaagaggaggccaccaagtattgtctgcaactacagctcactacaactcctggagactgtggacctagggaggcagaaccacagc

SEQ ID NO: 535321 - DNA, 541 bp, Homo sapiens
ccccagcactgctggaccgcctgtgtcacgcttgaattctcaccaggcctctgccacctccctgccgggcagggcttgggacatgcagccacccgtgggcttctgtgtggcctgagcctccctgataggtgccgccccctgcttcatggtgcccggtcccatcaacaggagtgcaggcatgcagtgtgggactggcaggcagctccgcccatggcccctgcaggggatccactaggtgaagatagctgggctcctgagtctggtgaggtcttggagaacttttatgtctagctggagkattgtatatgcaccaatcagcactctgtctatctcggggttcgtggatgcagcaatcagcactctgtatctagctaatctggtagggacttggagaactttcatgtctagctaaaggattgtaaaatacaccaatcagcattctatgtctagctcaaggtttgtaaaggcaccaatcagcaccctctgtctagctcaaggtttgtaaacgcaccaatcagcaccctgtcaaaacagaccaatc

SEQ ID NO: 535322 - DNA, 610 bp, Homo sapiens
gctgccacaagatgcaaggactcagctgctctttcttgggggaaacctgctgagagaagcattgtaggggagagggaacctctttccccacctgctactgctccctcatccaactcccaccaaacatctctctctctctctctctctcacacacacacacatactctctctctcatacacacacacacacacactctctctctctctttctcaatctctctggtgaatttcagaatatctcttaagaaagctagaaaatcagagggctaagaagtgtaaaaaggcattgttacataggattccagaaagggcacggaagtgggagtcaggagttgggagttacaagctgagaattgctgttagtcacctcatcattctgggcctgcttagtatcaagtgaaaaggcctgccttagttgmcttgggtaagtgttggaagaactaaatcaaataggacagatgtgaaatatttacatagtctgcataattatggagcaatgtgtataatcacaggaggtggtagagtccagtggacaaaaggaaactgagagacaatggccaatgaaggttggctctgtgaatatgtgagcttcctgatgttgtggcactgc

SEQ ID NO: 535323 - DNA, 648 bp, Homo sapiens
ttgaaggcattttaagcagtatttaaattccagcaatgcacataatttaattgtgtttatagttataaacagttatatctaagttcacatagaaaaatgactggtgtgcttgtaagatgccagtgactataagatgtattcccttttccagagatctaaaaatgtgaaaagatgcgtgtctttgaatcaattaaaaatagtatgtgtttattgttttatctcccacaagaatgtatgtaaagcactaggagggcagaatattcgtttgttttctgtgttagctatttgtcatcttctagaagagtatttggaaaatagttgagacttaataagtgtttgttgaataaataagtggatgactttctgcctgcattagtaaccgttgactctttagtacttcatacttgaaatccctattcaaaggatctargtggctaagtcagtcaccatcaaggataatgtgcccctgctgaggggaaatacagctccaggcacctcacagactattgactagctgcctagtcatttacacaaaaaggccatctgcaacatcatcacctacctcggaaccttgccttgggtaaccatggcttctggggaagcctagaaaaagacagacagagagccctcagaaatctgtgagatttt

SEQ ID NO: 535324 - DNA, 574 bp, Homo sapiens
accaattatagacttacagatctgtaattggttaacaatgcacattcaaaattagtgaaagaaagaatatatatagtgaatgactgaaaattaggaagggactttagacattttttagtatataaggttttagaattgaaaggaatcgtagttcagatgtcttgttttatagatacaaaaattattgtttgttaacttgcttgtccaatatgacattagtcttgttagagctggcatagaacctagagtcttgttacaagatagtatattgtgtatagatttattatacttaatttgtgtgtatatgtctgtatatttgtgtgtatgtatgtgtatatatatgtgtgtgtgtatatatatatattcatacaatgaattcatacaatgattatctgtatcactaactgaaaacatcttagttatttcctacctactccccaacagtayccccagagcccaaagaagtacctgacacataatggatggtcaataaatattgttgactgagtgacctgcagacttttaaatcttagtaacaactgaaataaaccctaagcttgtttctttataaatg

SEQ ID NO: 535325 - DNA, 526 bp, Homo sapiens
agaatattgttgacgtgagagagacatgtcagaaatttaattgagccttactatgcagtccagatttaagaccaagggatcatacaggtggaccaaatagtcaccttctcagtgtctttaaggcatagatgagaaaacttgaggtgtttcactgaagatgcaggtgaactctcagacatgagcagatgtattgcttggaatgactgatggccttttctgagatgagtgagtgtagtaagctgatttcatgactgtgcttctgccaaaggctccagcctagttctcctctcatctctaagccccttccctcttagactaccactctatccgtgaaggtaaaaataataggttgagtttttctcaaaagcrgggcaaaggagttcattttccccttacctagcaatacaaattgttaaaagaaaaagaataaactggaataaggctgtattcaaatgtctcatcaaaatgtccctgccttgggaaatgctttgccaaagtgaccatttccaagtctctgaagtcaaaa

SEQ ID NO: 535326 - DNA, 606 bp, Homo sapiens
gctttgtctcatgttgagggttgactgtggtggccctgctctatatagctctcttcctctcctggttccagcatgttggccaaggcctgttctataatcttggggggaaaatgtgttatctttcctcctgcctaggcagaacctgctagccctctctggatgacctgtccttcccttgattcttgctggtactctgtgagttctgggtttctgcattagtgtccacctggctcctggtaaaggaggccaccccaagcctctggtgttgattatttttcccttcagtgtggcaggccctatgattctttgaatttagctgcctcctgagtctcccctggggactatgggaatgtctcggttctgcttatgttattgggagccacaaatagcctgagcaagcaaaatactagggtgctcatcaggtgaaccattggcttagttacggttcttcaaagaaacagaaccaataggggttatctctgtctctacccctactctatctctctgtctgtctrtctatctatctatctatctatctatctatctatctatctatctattcatccgttcacccatccatccatccatccatcacctatttatcta

SEQ ID NO: 535327 - DNA, 624 bp, Homo sapiens
ctgagacagctttgtctcatgttgagggttgactgtggtggccctgctctatatagctctcttcctctcctggttccagcatgttggccaaggcctgttctataatcttggggggaaaatgtgttatctttcctcctgcctaggcagaacctgctagccctctctggatgacctgtccttcccttgattcttgctggtactctgtgagttctgggtttctgcattagtgtccacctggctcctggtaaaggaggccaccccaagcctctggtgttgattatttttcccttcagtgtggcaggccctatgattctttgaatttagctgcctcctgagtctcccctggggactatgggaatgtctcggttctgcttatgttattgggagccacaaatagcctgagcaagcaaaatactagggtgctcatcaggtgaaccattggcttagttacggttcttcaaagaaacagaaccaataggggttatctctgtctctacccctactctatctctctgtctgtctgtctatctatctatctatctatctatctatctatctatctatctatycatccgttcacccatccatccatccatccatcacctatttatctatctaaaagga

SEQ ID NO: 535328 - DNA, 629 bp, Homo sapiens
ctggtctcttgccttgttgaggtgttgaattctgtctccatttctctgtctctaaaatggttatatcaattaatagcagcctcctgtctgttttcaaggatcccaggaaagtgattccaattcacagatgaatcattataccaggctggagagaaataatgaaactaatatgaaaacaaatgtggatacagaaatttcctttcaacttagacaagccaacattttcctggatgtcaatttttgtagtaaatcttggcttagtgactaataatggatttatcctatttttttggattgaaaaaagaaattgctagtgtagtggcccacaggaggttctttcaaagcaaatgagcccctgttttccaggtaggggtgatgttgattctgcctcaggccctgtgggatgatcttcctggaaaatggtctcagttcaagcttctcctttaagctccaaagtgatgaatgaatcctgtacaagcttgtgatcctgaaagccacgctaaagcctgcaggttgctgtgtttgkctcctgacacctgtttccattaactacgagactcaactgggcacatgatctaactgtgggttgggctgcagaaaaatcttgttttcaaggatctacatgcaga

SEQ ID NO: 535329 - DNA, 629 bp, Homo sapiens
ctggtctcttgccttgttgaggtgttgaattctgtctccatttctctgtctctaaaatggttatatcaattaatagcagcctcctgtctgttttcaaggatcccaggaaagtgattccaattcacagatgaatcattataccaggctggagagaaataatgaaactaatatgaaaacaaatgtggatacagaaatttcctttcaacttagacaagccaacattttcctggatgtcaatttttgtagtaaatcttggcttagtgactaataatggatttatcctatttttttggattgaaaaaagaaattgctagtgtagtggcccacaggaggttctttcaaagcaaatgagcccctgttttccaggtaggggtgatgttgattctgcctcaggccctgtgggatgatcttcctggaaaatggtctcagttcaagcttctcctttaagctccaaagtgatgaatgaatcctgtacaagcttgtgatcctgaaagccacgctaaagcctgcaggttgctgtgtttgtctcctgacacctgtttccattaactacgagactcaactgggcacaygatctaactgtgggttgggctgcagaaaaatcttgttttcaaggatctacatgcaga

SEQ ID NO: 535330 - DNA, 593 bp, Homo sapiens
tgtagatgccaaagcaatgtctaagcatttgctctgcaggggcattaaagatgagcttggactttttgtagagtcccacagcagtgtcatgaggaagggcatcttttctggaggggaagttttccatttcatgggatgacctcttctgtccatcagctcctgcatctgatgggctttggggcagatttggtgattcctcaaggtaccggacaagggcttttgggaagagaacattgagaaaacaaagtgtgaggatgatttctacctcctactgggtaaaaatgccatactcatttggatctggatttcctgagtgaatgtacatgtgttactgaaaaggggtcccaatccagatcccaagagagggttcttggagctcatgtaaaaaaggattctgggtgagtccataaagtaaagtgaaagcaagtttattaagaaagaaaataaacgaaagaatggctactccataggcagagcagtggcatgggtttctcaactttcttgatcatgtgttaaacaaggggtggattattcacayatttttctgggaaaggggcaatttccagaactgaggattcctcccctttttagac

SEQ ID NO: 535331 - DNA, 689 bp, Homo sapiens
ggtcacctgagtgagcagaagtggggaaaatgaaggcagagatgttgatgtcaagctgtataaggcctggagggccattgtgaggactttggctcttattctgactcacatgggagccattggaggtctttgagggaggagtgatgtgatctgacctacgcttttgtaaggtttactctagctgctctgtygtgaatagactatagggatgccatagatggaggcaggcacgccagttaggaggataatgcctttcagtaagatggcacagtttagcaggaatatggtatgagccacaaaatggatctgcacagataagtttaaatttttcagtagccatgtattaggaaaagtaaaaagaaacaggtgaaattaattataataatatattttggttgattcagtatatccgcaacttatttctacatataatcactataaaacaattattattgagatagtttagtttttttatactaaatgttggaaattcagtgtgtattttatacttggcatcccagttcgcaccaataatatttcaagtgctcagtagccacatgtggctagtggctactgtattagagaatgcagaagtaaagaagtcatcactcattttgaaatcattgagtctagccttcttttcacctacttccaaatgttttgctaaataccagtggattatgagacag

SEQ ID NO: 535332 - DNA, 689 bp, Homo sapiens
ggtcacctgagtgagcagaagtggggaaaatgaaggcagagatgttgatgtcaagctgtataaggcctggagggccattgtgaggactttggctcttattctgactcacatgggagccattggaggtctttgagggaggagtgatgtgatctgacctacgcttttgtaaggtttactctagctgctctgttrtgaatagactatagggatgccatagatggaggcaggcacgccagttaggaggataatgcctttcagtaagatggcacagtttagcaggaatatggtatgagccacaaaatggatctgcacagataagtttaaatttttcagtagccatgtattaggaaaagtaaaaagaaacaggtgaaattaattataataatatattttggttgattcagtatatccgcaacttatttctacatataatcactataaaacaattattattgagatagtttagtttttttatactaaatgttggaaattcagtgtgtattttatacttggcatcccagttcgcaccaataatatttcaagtgctcagtagccacatgtggctagtggctactgtattagagaatgcagaagtaaagaagtcatcactcattttgaaatcattgagtctagccttcttttcacctacttccaaatgttttgctaaataccagtggattatgagacag

SEQ ID NO: 535333 - DNA, 689 bp, Homo sapiens
ggtcacctgagtgagcagaagtggggaaaatgaaggcagagatgttgatgtcaagctgtataaggcctggagggccattgtgaggactttggctcttattctgactcacatgggagccattggaggtctttgagggaggagtgatgtgatctgacctacgcttttgtaaggtttactctagctgctctgttgtgaatagactatarggatgccatagatggaggcaggcacgccagttaggaggataatgcctttcagtaagatggcacagtttagcaggaatatggtatgagccacaaaatggatctgcacagataagtttaaatttttcagtagccatgtattaggaaaagtaaaaagaaacaggtgaaattaattataataatatattttggttgattcagtatatccgcaacttatttctacatataatcactataaaacaattattattgagatagtttagtttttttatactaaatgttggaaattcagtgtgtattttatacttggcatcccagttcgcaccaataatatttcaagtgctcagtagccacatgtggctagtggctactgtattagagaatgcagaagtaaagaagtcatcactcattttgaaatcattgagtctagccttcttttcacctacttccaaatgttttgctaaataccagtggattatgagacag

SEQ ID NO: 535334 - DNA, 515 bp, Homo sapiens
ctaaactccctataggcataaagaaaggatttgaaactgggttttaaaaattcagaaatccagtgtattattaaaaagttctccctttgacagtaaaatactatgaacaccttttcttacatcaaaaaatggcagtcttgagtgtgtacctatgaggattattttctactgaaagaaacatgcttgtttgtaaaaaatttttatcctgcagcaattagacagatacatccttttatcaggaaatctacatcctggaaatctacatctagacataatcctcagcaggtggctgactgttgcaaacgtgcaatgactaaatgtcctatccttgtaaaatttgacatttgaacaggggaacatttattatctctaggtacaaacatttgcaatccaataatacttttttttctaattaaggaaaagtatgtactgatgcttgtatgtgtatgtttcakgtagtatgcagaagagttagaatttaaaaggaagtagactaacatttggtagtcacatgt

SEQ ID NO: 535335 - DNA, 561 bp, Homo sapiens
gatcaggtggcctctgaagccaygtccataggccagccacctggtagaccccacagcaggcccgaggccctcaatgaacagaccaggcccagagaagagctgggttctgccccaggtcacacagtcgattgcaggagagctggacctagaacccaggccaggccccacacagaggggtgaccaaaccaggctggaccctgggggagtgagtgtcccactggtgggggtggacagttgggattccaaaggcagcatctggacctggagagcgtggatgggagttcaagtcccaactctcctgcttactggctctgagactggacaagcatttcccctcttgggcctcagtttcccatccgtgtcattaggattactctacagggctgctgggagggagaaatgggatggaggaagtgagtgtgcttcccacaaagcctgcacacctgtgtgggctgaacctgagtgtgagtgggatgctgggggtggcccaggcagcccagccctaagcctgtgtccatggatctggccggtaccccatcccaccctgccccatctcagggg

SEQ ID NO: 535336 - DNA, 573 bp, Homo sapiens
ggagcgcgggtgctgggtggaccctggtgggctaaaygctgattgggcccagtgtcacaaggctgggactggttctccaactgtgaaaggggccaagacaaggatcaggacagtccgaggccacccccatgcagtgatgaccatggcccgttgtgaaccccgtggactttactcaagtctgtcacagcacttctcatgccttttggcagtgacttgctttccggatggagctcctggagtgctgggataatgttttcttcatatctgtatccacagcacacagcacagcgccaatcaagtctacagaggagctcttaggaaacgttttctcagtggtcaaaaagagaaggggtggaaccctccactcatctcccctcacattctgtgccatcgattctctcagaatcccctgtattccccattttactgaatcttcagcatggctcctcccctaaacaggatcccaataacccatctgaggtccaggaacagacacctgtgatgagctgtgaccaaaaaaaaaaaaaaaaatggcattgataaggaagggatgtcattacatactacttgtct

SEQ ID NO: 535337 - DNA, 573 bp, Homo sapiens
ggagcgcgggtgctgggtggaccctggtgggctaaatgctgattgggcccagtgtcacaaggctgggactggttctccaactgtgaaaggggccaagacaaggatcaggacagtccgaggccacccccatgcagtgatgaccayggcccgttgtgaaccccgtggactttactcaagtctgtcacagcacttctcatgccttttggcagtgacttgctttccggatggagctcctggagtgctgggataatgttttcttcatatctgtatccacagcacacagcacagcgccaatcaagtctacagaggagctcttaggaaacgttttctcagtggtcaaaaagagaaggggtggaaccctccactcatctcccctcacattctgtgccatcgattctctcagaatcccctgtattccccattttactgaatcttcagcatggctcctcccctaaacaggatcccaataacccatctgaggtccaggaacagacacctgtgatgagctgtgaccaaaaaaaaaaaaaaaaatggcattgataaggaagggatgtcattacatactacttgtct

SEQ ID NO: 535338 - DNA, 573 bp, Homo sapiens
ggagcgcgggtgctgggtggaccctggtgggctaaatgctgattgggcccagtgtcacaaggctgggactggttctccaactgtgaaaggggccaagacaaggatcaggacagtccgaggccacccccatgcagtgatgaccatggcccgttgtgaaccccgtggactttactcaagtctgtcacagcacttctcatgccttttggcagtgacttgctttccrgatggagctcctggagtgctgggataatgttttcttcatatctgtatccacagcacacagcacagcgccaatcaagtctacagaggagctcttaggaaacgttttctcagtggtcaaaaagagaaggggtggaaccctccactcatctcccctcacattctgtgccatcgattctctcagaatcccctgtattccccattttactgaatcttcagcatggctcctcccctaaacaggatcccaataacccatctgaggtccaggaacagacacctgtgatgagctgtgaccaaaaaaaaaaaaaaaaatggcattgataaggaagggatgtcattacatactacttgtct

SEQ ID NO: 535339 - DNA, 573 bp, Homo sapiens
ggagcgcgggtgctgggtggaccctggtgggctaaatgctgattgggcccagtgtcacaaggctgggactggttctccaactgtgaaaggggccaagacaaggatcaggacagtccgaggccacccccatgcagtgatgaccatggcccgttgtgaaccccgtggactttactcaagtctgtcacagcacttctcatgccttttggcagtgacttgctttccggatggagctcctggagtgctgggataatgttttcttcatatctgtatccacagcacacagcacagcgccaatcaagtctacagaggagctcttaggaaacgttttctcagtggtcaaaaagagaaggggtggaaccctccactcatctcccctcacattctgtgccatcgwttctctcagaatcccctgtattccccattttactgaatcttcagcatggctcctcccctaaacaggatcccaataacccatctgaggtccaggaacagacacctgtgatgagctgtgaccaaaaaaaaaaaaaaaaatggcattgataaggaagggatgtcattacatactacttgtct

SEQ ID NO: 535340 - DNA, 427 bp, Homo sapiens
agcggcaggcggagcaggaggccacagtggcgccggcagagcaggagtggctggaggagctgtggttggagcaggaggtggcacggcagggcctggagggctccctatgagtggcggagcaggcccaggaggcgctggagcaacagctccccacactgcaccatgagctcagttggctgcaggagcagctagcacaggtaggccaaactgtgtgtggggtggtctggagagcatgtggggcaggccaggctcgcagcctcctgcatccagtcctgggttaagtcacaggcactggagcctgcttctgggttaaatccagtcccacttctcctagctggggaccttggacaagctgcccaacctcccatacctcagttgccccatttataacatggggmtagccgggcgcagtggctcacgcctataa

SEQ ID NO: 535341 - DNA, 464 bp, Homo sapiens
ggaagccgaggcgggtggatcacctgaggtccggagatcaagaccatcctggctaacacggtgaaaccctatctctacaaaaaattagctgggtgtggtggcacgcgmctgtagtcccagctactcaggaggctgaggcaggagaatcgcttgaacccaggaggcagaggttgcagtgagccaagatcgtgccactgcactgcagcctgggcaacagagcaagactccgtctcaataataataataataatgatacagattaataataggtggagactttttagaattggaatcttagacttttgggaacatcacatctcgaagagaccttaatgtttcagggatccagggaccttcatgcaaggtccatcctggagggcctgggtttctgggaggtgcctctagaggatggggtagggagtgcaggaagcagggtgcaagtctccaccttgaggcctgctgag

SEQ ID NO: 535342 - DNA, 595 bp, Homo sapiens
caagtagtgcattttcatggccaccgcagggccctcagtttagcattcttcagagccagcatccaacaagccacagaagctctgagtatttccctttcttcagtcacccacataaatggcttcagggccttctggggaaggcctgaaggaagatttacagcatacacttgtggcagcattgaaggcttcactcttcctcaagggatccaatctcccctcagtcaagaagctccaggtatctgaactggatgccaggtcataaattcccactatggtgactccatcaggtctctgtcctcagaactagagcttttctaagtgtaacgtaagttgatttcttagtagatttcccatccattacattcccagacacctcacaatgattcgaatgattagtaaccaccacatatccctgcctctcagggaaatccctcccgccttgtctctagatggccaagtcccacggcctgtcctctactcttccagaaccctgttgttctcactgacagcagggagggcaaatccatgcagcagctcccrccatgacctccagcctgcagaggatgggcgccacaggacttttaaacgcatgccg

SEQ ID NO: 535343 - DNA, 515 bp, Homo sapiens
cagttggggacctcagcccctgggtctgatgtcatccatttgcctttctcaatggacttctctccttgcactggctcctactcccccaggacctgtgggtgaccacatgagaagaacacaaacaggccatgcccctttctttctccccctctcaaygcctgcagtagtgggttccatggggtagtgacctgagatttactcattgtggggcctctagcccagagcagggcctactacctcatagtcaccccatgaatgctcagtgaaagaagacgtccaccacaaggtcctggggaaccaagaattccactgtggcccataaattctaagtctacaggattctggaatgggagatgggaaaggccttcaaaagtggccacttttaacccattatactggcaactgagccatgtttccccatcctggacacatccagagggcactgcctaaaaccagacacatctccccacccaggacagtgtaggagccttagcctgggggatgcaggtggacag

SEQ ID NO: 535344 - DNA, 479 bp, Homo sapiens
taggaattaagaggcatgtaaggaaagctagcatctggtttcatgttggatttggcttggccctcaatctatcaatatcattgatgggatgaattcagaggatggaagattcttggaaaacaagtttctrgatagggctgggatggaatcttttctgtttttgtatccccggtgcttaacctaatacctggcatgtggaaagcccctgaagacagatatggcaggcacttttcttggattggcagttgaaaagaactgaaaacaatgacaacaacaacaacaaaaacacaaagaacacatagcatagtctgtacaaacatctcctgtattctatgaaagaaaaaactagaggtagaacataggctaatgggaatattgaaactatggtgccttttccaggtttttaatcatagatttggagaatttgacaatgccgagatgaagctcttgaatgttttagctggaggattctggaaatc

SEQ ID NO: 535345 - DNA, 479 bp, Homo sapiens
taggaattaagaggcatgtaaggaaagctagcatctggtttcatgttggatttggcttggccctcaatctatcaatatcattgatgggatgaattcagaggatggaagattcttggaaaacaagtttctggatagggctgggatggaatcttttctgtttttgtatccccggtgcttaacctaatacctggcatgtggaaagcccctgaagacagatatggcaggcacttttcttggattggcagttgaaaagaactgaaaacaatgacaacaacaacaacaaaaacacaaagaacacatagcatagtctgtacraacatctcctgtattctatgaaagaaaaaactagaggtagaacataggctaatgggaatattgaaactatggtgccttttccaggtttttaatcatagatttggagaatttgacaatgccgagatgaagctcttgaatgttttagctggaggattctggaaatc

SEQ ID NO: 535346 - DNA, 477 bp, Homo sapiens
cttcttgagatgtaggaattaagaggcatgtaaggaaagctagcatctggtttcatgttggatttggcttggccctcaatctatcaatatcattgatgggatgaattcagaggatggaagattcttggaaaacaagtttctggatagggctgggatggaatcttttctgtttttgtatccccggtgcttaacctaatacctggcatgtggaaagcccctgaagacagatatggcaggcacttttcttggattggcagttgaaaagaactgaaaacaatgacaacaacaacaacaaaaacacaaagaacacatagcatagtctgtacaaacatctcctgtattctatgaaagaaaaaactagaggtagaamataggctaatgggaatattgaaactatggtgccttttccaggtttttaatcatagatttggagaatttgacaatgccgagatgaagctcttgaatgttttagctgga

SEQ ID NO: 535347 - DNA, 587 bp, Homo sapiens
cggcggctcacacttataattccaacactttgggaggctgatgcaagaggatcacttgaggccaggtgttcaagcccagcctgggcaatacagtgagacccccccccacatctctacaaaaaaaawtttttttaaatagctgggggtggtggttcgtgcctgtagtcccagctatttgggctgaggtggaaagattgcttgagcccaggagtccaaagctgtagtgggctaggatcacaccactgcagtccagcctgggcaacagagcaacactctgtctcaaaataataataaaaataataataaagatcatgggctctgagtgcagacagaattagctacataatttgagcaagatataacttctctgaacttcacttttcttatctgtaaaacaggaataatataaagagagacctcagaagattttgcaagactaaatgagataatgcacactaaagcccatggactcattcctgacagaaagcaagtattccttaagtgttgaccatcatcctcctctatactgagtaaaatgtatcattactgcttacttatcagtcacatataatatcccaggctttacg

SEQ ID NO: 535348 - DNA, 587 bp, Homo sapiens
cggcggctcacacttataattccaacactttgggaggctgatgcaagaggatcacttgaggccaggtgttcaagcccagcctgggcaatacagtgagacccccccccacatctctacaaaaaaaattttttttaaatagctgggggtggtggttcgtgcctgtagtcccagctatttgggctgaggtggaaagattgcttgagcccaggagtccaaagctgtagtgggctagsatcacaccactgcagtccagcctgggcaacagagcaacactctgtctcaaaataataataaaaataataataaagatcatgggctctgagtgcagacagaattagctacataatttgagcaagatataacttctctgaacttcacttttcttatctgtaaaacaggaataatataaagagagacctcagaagattttgcaagactaaatgagataatgcacactaaagcccatggactcattcctgacagaaagcaagtattccttaagtgttgaccatcatcctcctctatactgagtaaaatgtatcattactgcttacttatcagtcacatataatatcccaggctttacg

SEQ ID NO: 535349 - DNA, 570 bp, Homo sapiens
tgttccaccaggccaataagctcctccacctccttcacagtggtatgagagcatttcagaatcccctggtaccacaaactcaactatctagccacttccttctaccactgctgtgctataggcccgtgttggcctatcactaacctgcataacatctcctctcaagattccacataaggagcagagcaaaaggccttctactgctgaccgtcccctcaacccatttaacatccccaccctaaccctagaactttagccagccaagaaagatcagaacacatatttctcacaatctgttttccctacctctgtccccccgctkcccacaatccaccaggactgaaagggatgacacgtctacttccaagtcatcctccttcctcctgggaggcactaagcctcattctcagccttaatgccagatgagctattctctttaccctacagaagaaactatcattagagtttgccagaagtaactcttgatatggaagctgcaggcaacttggaacttgagaaaaccaaagacaaacatacagcgacttcaagttccccaaaatattaatcctt

SEQ ID NO: 535350 - DNA, 529 bp, Homo sapiens
ctgccccaaggctggaccaggtgccccctcaccctgtggccacaacccttggatctcactaggatagtgtccaagtggacagggccagaccctcaagctgcctgcctcctcttctgctaacttggagacagaactgctgagagcccaggggcctgacctagtcccctctccattcccacctgctccctagatgagcaacactccctagatgaaccacactccctagatgggccacgctccctagatgggccaygctccctagattaaccacattccctagatgagccacactccctagatgaaccacattccctagatgggccacgctccctagatgaaccacactccctagatgggccacgctccttagatgaaccacactccctagatgagccacgctccctagatgaaccacattccctagatgggccacgctccctagatgggccatgctccctagatgaaccacgttccctagatgggccacgctccctagatgaaccatgctccctagatgagccacgctccc

SEQ ID NO: 535351 - DNA, 463 bp, Homo sapiens
agctctgccagggccaagctctgccccattgggatctggaaccctggacacatttgggatttagggcagggaggtcacagggttcaggacttaagtccagcacggcacagggcaggggtgagagcayaacccagggtcacatctggattcttggggttacccagttaccgcctctctgaccccagatgtctcacctgtctaatgggcacatttgggagcagcacccaccctatggagccaccatgaggacgaaggaaacatatcattaaaagatcagaaatacaaaaagagataccattaagagttcctacagatactgaaacggtcattaggtaatagtattaacatttttattctgatattcaacagcagcagtcacttccctccacccatatgtgtatcgtctgcctgggcagcacagaacaggcacctggtgagtgcccagggatgaccctcctcggca

SEQ ID NO: 535352 - DNA, 463 bp, Homo sapiens
agctctgccagggccaagctctgccccattgggatctggaaccctggacacatttgggatttagggcagggaggtcacagggttcaggacttaagtccagcacggcacagggcaggggtgagagcacaacccagggtcacatctggattcttggggttacccagttaccgcctctctgaccccagatgtctcacctgtctaatgggcacatttgggagcagcacccaccctatggagccaccatgaggacgaaggaaacatatcattaaaagatcagaaatacaaaaagrgataccattaagagttcctacagatactgaaacggtcattaggtaatagtattaacatttttattctgatattcaacagcagcagtcacttccctccacccatatgtgtatcgtctgcctgggcagcacagaacaggcacctggtgagtgcccagggatgaccctcctcggca

SEQ ID NO: 535353 - DNA, 463 bp, Homo sapiens
agctctgccagggccaagctctgccccattgggatctggaaccctggacacatttgggatttagggcagggaggtcacagggttcaggacttaagtccagcacggcacagggcaggggtgagagcacaacccagggtcacatctggattcttggggttacccagttaccgcctctctgaccccagatgtctcacctgtctaatgggcacatttgggagcagcacccaccctatggagccaccatgaggacgaaggaaacatatcattaaaagatcagaaatacaaaaagagataccattaagagttcctacagatactgaaacrgtcattaggtaatagtattaacatttttattctgatattcaacagcagcagtcacttccctccacccatatgtgtatcgtctgcctgggcagcacagaacaggcacctggtgagtgcccagggatgaccctcctcggca

SEQ ID NO: 535354 - DNA, 485 bp, Homo sapiens
tgggaaaacaggtgtgcagagaatgtgtgaatccttgggataaatgtggtgcatcttcctaaagagacattttcatgttgagyaatttattatttttgatacattaattaataaataaaactcaggggacaggcttgcctgggaggacttagcgagtctcacagtgtcctcagggtgccgggaatgttggctttgtttcaaacccatttcctttcacagagaacctagccatcacatggggctggatgaggtccaggggcaactgagggttcctggccaaggccacaccctagtgttacctgtaggcttctgaactaaccccagcctctgacagcccaatgggtgatggcaaccgggtctccaagcttcttctatcgcaattttcctcttctccttttcatgaccaccatatctcctatccactctctgtatgcaatgctgcaggaatttttacagttcagggaagtaatcctgttaggcgagat

SEQ ID NO: 535355 - DNA, 600 bp, Homo sapiens
aaagcaagtagtgttacttacaagctattatttttacaaagctttgggtaaaaacaaaatttgatccagagcaagggaaccagggtggtataattatctatccctactctggttaaggaacagaaccactgaagacaagcaatgagaggtaagtgtgggcacgcctccagtaatgctgatttctctccaccccactagtggtaggcagctagtgcttcctgtaagataaagctaagccyatactctcaaaaagattaaacaatctgggcatttttttaaagaaggaaaaataaatgaaactcaatgagagattatgggaaaaatatattttcctcaaaatgtacaccagggagaacaaattattttgaagaaatatgagggaaaacatggtacctcactctgtcaatcaagatataaaaatagatctctagcatgaaagaataatttgtgcatcgttgctactttatacttgcttttattctttttactcaccgtaagtggtctattacagtggcgctgcgcctcccaaaacagtgctttaacaagtgaaaaaatatattatagttcataggtgttaagttcttggtaaataaattttga

SEQ ID NO: 535356 - DNA, 598 bp, Homo sapiens
ctcttccaaaatacttttgattcattaaaagtagtaagatatgtttaaagaatgtttctagatattttaaaattaaaaagttaaatacagactaccaaatagtcctaaaaaaataaaataaaaaatacgtcacgtagggagaaaaaggaaaaggtattattttattcttaccctacgctttgggttttccagcggccctttccgggtgtatatatcaaatgatgaccaaggctcctggggaagaaaaacaaagcaaaacaacatcttttatttctctttggtcaaagtgccccagttattacttccttaaaaaacaccttgcctaaataagagaatggtcagtctaattggatttaaragaaacatgttatagctaaataatacacatctctctccttaatttttttaaagaggaggaggatcaaaagtctacccaaatactagtacctcttttccttattaaacatgacttcgcctgttatgcaattacgcaaataagtatttgttataatttttaccactcaatatttccatatcacagtcagaatcagcagtttaagggatattagattaatgctgaggatttctttttgcccta

SEQ ID NO: 535357 - DNA, 598 bp, Homo sapiens
ctcttccaaaatacttttgattcattaaaagtagtaagatatgtttaaagaatgtttctagatattttaaaattaaaaagttaaatacagactaccaaatagtcctaaaaaaataaaataaaaaatacgtcacgtagggagaaaaaggaaaaggtattattttattcttaccctacgctttgggttttccagcggccctttccgggtgtatatatcaaatgatgaccaaggctcctggggaagaaaaacaaagcaaaacaacatcttttatttctctttggtcaaagtgccccagttattacttccttaaaaaacaccttgcctaaataagagaatggtcagtctaattggatttaaaagaaacatgttatagctaaataatacacatctctctccttaatttttttaaagaggaggaggatcaaaagtctacccaaatactagtacctmttttccttattaaacatgacttcgcctgttatgcaattacgcaaataagtatttgttataatttttaccactcaatatttccatatcacagtcagaatcagcagtttaagggatattagattaatgctgaggatttctttttgcccta

SEQ ID NO: 535358 - DNA, 652 bp, Homo sapiens
tgttaagacagtcttttgcaaaccaagagattaggaatttaatttgtacaagtatggaggggacttccagccacttgtctgagagagcttagtacagataagaaattaatgtgcctgaatgacttagacttaattcttataaacactctcacttctgaaatgggaccggagctttgcctttgagtggacatccaaaaaggaaaaaaaaaacaaaaaaaaaacctgggaataagagaattaacttaaaaactcataaaaagcaaggcattactgtacatctgataagactgaaaaccatatgaatgcataactaatgaatttcccacacaccaagttcatgcaaaatcacacagttaattccatttcatacttttaaaccttcactagaattggttgttyttttaatctttactttcccatctactaaggtaagtcagaagaccctggatgtaaacatatcaattgcctctaaaataaagaccaagtattgaaatagtgaagaggatactgcattgtctcctagtgcttttgaggaagcagagcccaaaatcatggctcattttactactggccaaactgtgaagcagaatatatcactacatgtagcaaataacaagtaagcagagaatcaaagacatcacaatgatatatc

SEQ ID NO: 535359 - DNA, 644 bp, Homo sapiens
acaggtggtagcacctaagttgaatcgtgaaggataggtagaggtttgacagaaagaatcaagaaggacaatataaacaaatatgaaagcaatttccaacagacataaataagggcagtacatttgggaagctcaggatgtttttatgtggctggtatgaaaggaagaaatrggggaacagcaaaagacaaggctggaaaggatggctgaggagaaactaggaagagcttacttactgtcactgatgaggacttctttggaaagtcatattctcagaagtgttaggaaatcataaaagaaacaaaattttcaactgaaagcatttgattgaaaaaagaccttgcttgagggcgtttatctttatctttgtgaggtcaaattttgctaaggatggttaagatggtaaagtcagcacctgatacagaagatgcttgactacaaattcataatatatctatggtctccctggaccattcagttttaatgcctacagaaccagtgtggaacaaaaggtacgtagacctggtgaaaggtcacacttgtttattgtaagcttgcctttgttgttgctatttctaatttcaagtaagaaacaagtttccagacctcaaataaggagatataactggtagatataactagta

SEQ ID NO: 535360 - DNA, 685 bp, Homo sapiens
agctgccaagggagttgcaagcagggtgacacatgaggctcattatttagtggtattttgtgttcttgtcttgtccccaggttgtgtagctcacagactttttttttttttaacatttctataggggtcatttgaagttcataacaccatcaaacatcagtacagggtcttcccattatttaccrgctttgggatatgtgctgaggagtggccgcgcactgaaggaatgtgaccggttgtcccaagtgttcctccaactcaaaatccgcaaccagttcaaaagcatttgggcttttatgagcctttcacataaagactatgacaccgctaagctattcatgtactaatacctgccctgagctgtgtgaccacagacaccaccctataatgtggccagtgtgtaggaactctacaggctcagatcattccagacatacatgcagatgttgggactcccttgcacagtgactcatgatcccaaggctgagtgctgagggcaggtcagtagttcagagcctcagcattggggctgtatgcttgggttcccatcttggctcttttgctgaggggctaataagcttgggcacattcatctctgtctttttctgcccagtaaaaggtgatagtaaatcaatcatgccatttgtctgtggtgatggccgaatgatttgatgtaggtaaagtg

SEQ ID NO: 535361 - DNA, 391 bp, Homo sapiens
tcctgtcccgtcttccctgctctatcctcggrtgagtggatccacccatctgcctctgtgctgggcagatgccactgctctctgctttctggctggacaaggcaagggggcaggtgtgtgtgtagaagtccccctaaaccttggcctttgcctcatgcctggcgcattcaacctttgctgacacctccacagaaataccaacctcaccaacatctgcagaatgggccgccagggtctgtctggagcttgggtgggattttcacttgactacaaatacacacacatacaccctaggcttccaggtctgcattccttggctggctcttcacacttgagtccaagacaggtcaatggttagtggctggatttgcaagcatgtgtgtttctgggc

SEQ ID NO: 535362 - DNA, 391 bp, Homo sapiens
tcctgtcccgtcttccctgctctatcctcgggtgagtggatccacccatctgcctctgtgctgggcagatgccactgctctctgctttctggctggacaaggcaagggggcaggtgtgtgtgtagaagtccccctaaaccttggcctttgcctcatgcctggcrcattcaacctttgctgacacctccacagaaataccaacctcaccaacatctgcagaatgggccgccagggtctgtctggagcttgggtgggattttcacttgactacaaatacacacacatacaccctaggcttccaggtctgcattccttggctggctcttcacacttgagtccaagacaggtcaatggttagtggctggatttgcaagcatgtgtgtttctgggc

SEQ ID NO: 535363 - DNA, 391 bp, Homo sapiens
tcctgtcccgtcttccctgctctatcctcgggtgagtggatccacccatctgcctctgtgctgggcagatgccactgctctctgctttctggctggacaaggcaagggggcaggtgtgtgtgtagaagtccccctaaaccttggcctttgcctcatgcctggcgcattcaacctttgctgacacctccrcagaaataccaacctcaccaacatctgcagaatgggccgccagggtctgtctggagcttgggtgggattttcacttgactacaaatacacacacatacaccctaggcttccaggtctgcattccttggctggctcttcacacttgagtccaagacaggtcaatggttagtggctggatttgcaagcatgtgtgtttctgggc

SEQ ID NO: 535364 - DNA, 391 bp, Homo sapiens
tcctgtcccgtcttccctgctctatcctcgggtgagtggatccacccatctgcctctgtgctgggcagatgccactgctctctgctttctggctggacaaggcaagggggcaggtgtgtgtgtagaagtccccctaaaccttggcctttgcctcatgcctggcgcattcaacctttgctgacacctccacagaaataccaacctcaccaacatctgcagaatgggccgccagggtctgtctggagcttgggtgggattttcacttgactacaaatacacacacatacaccctaggcttccrggtctgcattccttggctggctcttcacacttgagtccaagacaggtcaatggttagtggctggatttgcaagcatgtgtgtttctgggc

SEQ ID NO: 535365 - DNA, 509 bp, Homo sapiens
acacttcactataccattccggcccttcaataaatgtctggcattttctttctttctttctttttttgagatggagtctcactctgtcacccaggctagagtgtggtggtgtgatctcggctcactgcaacctytgcctcccaggttcaagcaattttcctgcctcaagcctcctgagtagctgggattacaggcatgcaccaccacgcccggctaatttttgtatttttagtagagaaaggttgtctccaagttgctcaggctggtctccaacccctgacctcaagtgatctgcccaccttagcctcccaaagtgctgggattacaggtgtgaaccactgcgccaggccaatattatttttttaagaaaatactaataaaaagaaacaattgatattaaataaaatttaactattgactataaatatatgtttcaagagatttgagtgaaaataccattctatgttaaaataaaaaatatgacattcgataaatatagtaataacatg

SEQ ID NO: 535366 - DNA, 550 bp, Homo sapiens
cagccagaactcccactttgcggtgctctggtacgtccacaagccctcagatgccaacggcaagcttatcctgaagaccacccacaactccgccttcgaatacggtacttacgtggaggaggagggcctgagagccaggctccagtttgagaggcatgtgtcgggggrcctgttcagcctcaccgtccagagagccgaggtcagcgacagcggcagctactactgccacatggagtagtggctgctgagccccaactacgcctggtacaagctggcagaggaggtttctgggcgcacagaagtcactgtgaaacagccaggtaaggccgcagggcacggctgtcctgggccagtgggtttagtgcagagactgcctgggggtgggtggggctctgtggggctggtgtggagagactgtctgcaaggtgcatgctgagtgtgggtgcaggtacacagaccatcaccctagcacactgcaatcccatccattttacctgcagtgggtcctgctgctgatggcagactcatggaagcatccttgactctgctt

SEQ ID NO: 535367 - DNA, 550 bp, Homo sapiens
cagccagaactcccactttgcggtgctctggtacgtccacaagccctcagatgccaacggcaagcttatcctgaagaccacccacaactccgccttcgaatacggtacttacgtggaggaggagggcctgagagccaggctccagtttgagaggcatgtgtcgggggacctgttcagcctcaccgtccagagagccgaggtcagcgacagcggcagctactactgccacrtggagtagtggctgctgagccccaactacgcctggtacaagctggcagaggaggtttctgggcgcacagaagtcactgtgaaacagccaggtaaggccgcagggcacggctgtcctgggccagtgggtttagtgcagagactgcctgggggtgggtggggctctgtggggctggtgtggagagactgtctgcaaggtgcatgctgagtgtgggtgcaggtacacagaccatcaccctagcacactgcaatcccatccattttacctgcagtgggtcctgctgctgatggcagactcatggaagcatccttgactctgctt

SEQ ID NO: 535368 - DNA, 550 bp, Homo sapiens
cagccagaactcccactttgcggtgctctggtacgtccacaagccctcagatgccaacggcaagcttatcctgaagaccacccacaactccgccttcgaatacggtacttacgtggaggaggagggcctgagagccaggctccagtttgagaggcatgtgtcgggggacctgttcagcctcaccgtccagagagccgaggtcagcgacagcggcagctactactgccacatggagtagtggctgctgagccccaactaygcctggtacaagctggcagaggaggtttctgggcgcacagaagtcactgtgaaacagccaggtaaggccgcagggcacggctgtcctgggccagtgggtttagtgcagagactgcctgggggtgggtggggctctgtggggctggtgtggagagactgtctgcaaggtgcatgctgagtgtgggtgcaggtacacagaccatcaccctagcacactgcaatcccatccattttacctgcagtgggtcctgctgctgatggcagactcatggaagcatccttgactctgctt

SEQ ID NO: 535369 - DNA, 550 bp, Homo sapiens
cagccagaactcccactttgcggtgctctggtacgtccacaagccctcagatgccaacggcaagcttatcctgaagaccacccacaactccgccttcgaatacggtacttacgtggaggaggagggcctgagagccaggctccagtttgagaggcatgtgtcgggggacctgttcagcctcaccgtccagagagccgaggtcagcgacagcggcagctactactgccacatggagtagtggctgctgagccccaactacgcctggtacaagctggcagaggaggtttctgggcgcacagaagtcactgtgaaacagccaggtaaggccgcagggcacggctgtcctgggccagtgggtttagtgcagagactgcctgggggtgggtggggctctgtggggctggtgtggagagactgtctgcaaggtgcatgctgagtgtgggtgcaggtacacagaccatcaccctagcacactgcaatcccatccattttacctgcagtgggtcctgmtgctgatggcagactcatggaagcatccttgactctgctt

SEQ ID NO: 535370 - DNA, 459 bp, Homo sapiens
ttcctggctcagacttcttggtgggctggtcagaaacatgcagtaacttggggcagttaccaggtggccaagtctgcactgctgggctctgtgagcttgggccagctcaggccctctctgggccctgcctttctgggctgttcaggtggttccttgggcctggggtgctaatgtttctggatgggcagcagaaccagtctgcactcagggccccaggccatgttcctggaacacacctttagcattgacagcagcgtgtggtgaggccccttagtctgggttctggtctagtgccaggggcaccactactccaccgcctccagagccatctctgggacactggctgtgagttcagatgttctgaacagggacagggagagccagagggacccagcctggggctcwctggaggggctcgtgggcagacagtgccctttggagggaactgagtctgaaagg

SEQ ID NO: 535371 - DNA, 465 bp, Homo sapiens
caggtagtactgccatgaacataattttacatatctccttacacacatgtatgagaaattgtccaggatagacattgttaaagcaaactaaatatggcttgagaagaacttcgtacttctatatttgagtctttgtggatgaactgtaacctggcttaacagtcagacaacattgacaacctaacttaggagtatgcacctgtaacaatagctaagtcttggccaatcccagtggccatacttcaaccgttcatacactgctgagtgttcaaactgtgttccaataagtcatatgctgagctgtagccaaccctgtcattctgtatttcacttccaatttctgtatgtcatttccctwtttttgtctataaatcttctgcactggagtctatgttaatctgctgtgattatgggggctacctaattcgctaattgttcactgcttaattaaactcctttaaattt

SEQ ID NO: 535372 - DNA, 585 bp, Homo sapiens
gcatgggaaagactggcccccatgattcaattaccactccttgggtccctcccacaacacatgggaattctgggagatagaattcaagttgagatttgggtggggacactgtcaaaccatataagctgtaaatcaccccaacctgtaataaaatgtaaaagttaatactattaacataattcatgaatacactctttgaatttattttttaattaaatgaaaacttttatttggtgagcagcttctattcattatttaccccaagttaattttactttattcatatgtaaacatataaaatcaatgtcagagcttcctataaaaacaaaggtagataaacattgcagtgcatgatttacwgttttatttattttagaaaatatcttttaggcagctttaaaatttggtttattgtactatgattaaacattattgctcatatctatgcaaaacagaatagcaactcctggacagataattaaagttaagatattctttcttgaaggtggcaccctaaattattattataatgatttaattgagcatcaaatatactcatgatgctcataaagcatgaagcaggca

SEQ ID NO: 535373 - DNA, 636 bp, Homo sapiens
ccagtctctgcatacctgatctatgaggaagcctgggaccataggaggtgggagagcagatgtttcttccagaagctctgtgctcatgctatggtcctttctccctagttgatttgccttctctgtcttctgggctgcatttgataatgcatgctacaggagaatagccaaatcaggtttaacatagaaatataaaaattttaatagaaaactgtttaaattttcaaatataatagtatgaggctagtctttcaatgtaaggtttcaggaccaagagacaaatctaaatgtcaggcaccatgttttcttcaaagtcacttggccctgcttaagactaaaactttgacattaagtcaagctcatctgagttttttttwattattattaaaacaggttgagttatctcccccaaaatcctaagtaatttatgcaaagagatttcagttgggcaggtgccaattatctccagatatgtccagattgagctgcaaataaagcttagaccataggagaaacatctgctacatttatgttgtgtaaatactctgcatttattaatgtagtttagtttatacatccacaattttaatgcatttcagttagtcatttctctatttagcttttgggtattattta

SEQ ID NO: 535374 - DNA, 634 bp, Homo sapiens
gtctaaattagtctcccctggtgctaaggtccctgggtgggggattaagagagtagcaggattgctactctccagactgggaagatatggagaccccgctgtagattggagatggggtcttagtgcccataaagctccctatccagtgtccctctttgtcatcccaggcaggggaagctgaggcctcaaactgttcccctcctaagttctccctggacctgaaataaagcccgatagactggcacctctaccctcacctccctagctggtaggaagacaccagaggaagggactgtatgacctgtccaatctccaatctacrgttatcttggccgtgccctgctgccagcccagcttctcataacccagtgcctcaggaccccaaggaatgctattgcaccccacccccaactcttcctttgtagatctggccagcctgaaggacatttaccagccaactgccaccagcaactcaccctgagagtgccaggtaacatctacagtgggtctgtgtctggcactgagtgtacatctagcccattagcctgagtgtgtgtatgtatgtgctgctgagctagggagggcctggatctgtttatatgtgcaggtaagggagtatatacatgtgtttgta

SEQ ID NO: 535375 - DNA, 559 bp, Homo sapiens
tggtaattgatatattgctctctgttatgagaactgtgatctacagtactatgggggttcctttgaggcttccatactgtctgtgaaactgagcttgtcttacctgaaaacaaataaatattctgaataattcattagaattttctgatactgtcagggttggtgatgtatttaatggttgactggattaagggttgggggcaaggcttttaggaggctgaatccctccctttcctgatgcttcatacatattctagaactttgaggtattttatatcttccattgactgagctgttttggaacaccacactgaattagccaatgaggccaatctagtatctgggccagtggtgataaaccgtggataaaaatataccaagtgatttccctagaggtgaggtaaatactccattggatctatctctsaatcactccctccactgcaatacatctccaaacacacacccaccccccgccacacacacattgtattagttctcatgctgctaataaagatatatctgagactagataatttataaaggaaagaggtttaat

SEQ ID NO: 535376 - DNA, 644 bp, Homo sapiens
ccagggcggctaggataaaagcaggcagaggaacatggaaggactaaactggctgagtcttccggccttcatctttctcccattctggatgctttctgccctcaaacatcggactctaacttctttagcttctggactsttagacttacaccagtcatttgccaggggctcgcaggcctttggccacagactgaaggctacactgtcgacttcgctacttttgaggttctggggctcagactggcttctttgctcctcagcttgctgacagcctattgtgggactttaccttgtgattgtgtgagtcaatactccttaataaactccctttcatatatatatatatatcctattattactgtccctctagaaaaccctaatacatatgcattaaaaatgtttggtgaactattttcaaatagtttcctaaaattcataaaatttatgtatatatgatatgcatatatgatatgtatttgtcatattaggatatattatatatagcatatatttataaggtatattcataatatgtatgtagtattatattatgggcacatatatatttaatataaatttatccaatacatacacataatcacataaagagaaaaatattaaaagagagaaaattgtatagcaaa

SEQ ID NO: 535377 - DNA, 644 bp, Homo sapiens
ccagggcggctaggataaaagcaggcagaggaacatggaaggactaaactggctgagtcttccggccttcatctttctcccattctggatgctttctgccctcaaacatcggactctaacttctttagcttctggactgttagacttacaccagtcatttgccaggggctcgcaggcctttggccacagactgaaggctacactgtcgacttcgctacttttgaggttctggggctcagactggcttctttgctcctcagcttgctgacagcctattgtgggactttaccttgtgattgtgtgagtcaatactccttaataaactccctttcatatatatatatatatcctattattactgtccctctagaaaaccctaatacatatgcattaaaaatgtttggtgaactattytcaaatagtttcctaaaattcataaaatttatgtatatatgatatgcatatatgatatgtatttgtcatattaggatatattatatatagcatatatttataaggtatattcataatatgtatgtagtattatattatgggcacatatatatttaatataaatttatccaatacatacacataatcacataaagagaaaaatattaaaagagagaaaattgtatagcaaa

SEQ ID NO: 535378 - DNA, 614 bp, Homo sapiens
ggtaactgtccaaagaagactcaaagtttagcacttaaaaagtaattttatttgcaaaattttataaggggttgtatctgttagacaaagtgggttctcaataaagggtataccaaatatttaaatttaaaaacctctggccagctgcagtggctcacacctgtaatcccagcactttgggaggcagaggtgggtggatcacctgaggtcaagagttcgagactagcctggccaacatggagaaacctctactaaaaatacacacaaaaaattagctggttgtggtggygcacacctgtagttccagctactctcggaggctgaggcaggagaatcacttgaacccaggaggcagagattgcagtgagccaagatcgcaccactgcactgcagcctgggcaacagagggagactctgtcaaaaaacaaacaaacaaacaaaaaaaaaccttcaaattttcagtctgtttataattctctttggtggaaaataacaactactacacataattaccctgtttgcaaggatcttatgtatctatcagtatcagcattttatttaaggaatcatcaacttacaggaaatgaaattaagccttcatctacattagagac

SEQ ID NO: 535379 - DNA, 463 bp, Homo sapiens
ataatgggaacaatccagagactgaaacaaatattcctgagaaaaatcaatacttattggagataatgaatcaaaatrgttacaaacatgattttactggcaacaactaaaataaatatttatccagtacatcctaaatatctgtcaaagttctaagactacagcagtgaacaaaacaaaatcactgcccttgtggtgtttaccttacaggggctctccaaaagacctgggcttgtatcccagttcttctctgtgaccttgagcaattaacttcctgcaaacttagttttcttttctaatggcattgatgattcctacctcagatttctgattgaacatggtggagcaaactcaaggttcgcctctacactctcctgaaactctatactaaaattacactaaaggaagcaaaaggaataaatccacaaagacaaaaagattgaaagaaaataaaatgataatg

SEQ ID NO: 535380 - DNA, 576 bp, Homo sapiens
tttttatacttcctctgattccactgtcagccctgacagtgtctactgctgtatctctgtcctttctattttcaattatttttattactgtgtctagaattctgaaagaatcataagaaggcctattgaaaacttaaaatgagtagtgtgtgtgtgtgtgtgtgtgtgtgtgygcgcgcgcgcgtgtgttattttttatttatttatttattttgagatggagtctcgctctgttgcacagtccggagtgcactggcgtgatctcagctcactgcaacctccacctcccgggttcaagcaattctcctgcctcagcctccggagaagctggggccacaggtgtgtgccaccatgcccagctaatttttgtatttttactagagacagtgtctcaccatgttggccaggccggtctcgaacacctgacctcaggtgatccactcacctcggcctccaaaagtgctaagattacaggtgtgagccaccatacccagccatgtataattttttttactatatgataggttatcaataaagatgtcttttgtttattcctgggattaaatcttgttccaa

SEQ ID NO: 535381 - DNA, 576 bp, Homo sapiens
tttttatacttcctctgattccactgtcagccctgacagtgtctactgctgtatctctgtcctttctattttcaattatttttattactgtgtctagaattctgaaagaatcataagaaggcctattgaaaacttaaaatgagtagtgtgtgtgtgtgtgtgtgtgtgtgtgtgcgcgcgcgcgtgtgttattttttatttatttatttattttgagatggagtytcgctctgttgcacagtccggagtgcactggcgtgatctcagctcactgcaacctccacctcccgggttcaagcaattctcctgcctcagcctccggagaagctggggccacaggtgtgtgccaccatgcccagctaatttttgtatttttactagagacagtgtctcaccatgttggccaggccggtctcgaacacctgacctcaggtgatccactcacctcggcctccaaaagtgctaagattacaggtgtgagccaccatacccagccatgtataattttttttactatatgataggttatcaataaagatgtcttttgtttattcctgggattaaatcttgttccaa

SEQ ID NO: 535382 - DNA, 600 bp, Homo sapiens
gttctcccaagcataaacggtcagcatgagaactatgcagggatcaataggaattgttgaaaaattctgaaaagagagcccggaggaagacaaagagccccggaagtatgttgtcagcacaatttggtgctaatactcaastttgtttttcttttcatcaaagtctgaaaggcagttggaaatccactgcccttgtttttttgttgttgtttttgtttttaatgactggataaagcacaattgcattttctcccccaataactttgaattctgggaatagaccatgtagggataactgctgctgtctaatccctccaatggctgcgcaaatatttaggacccggaggagaggagtcaccctggctccctgccttccttctagcacgcagggcatggctcccagataatgctcctcttgaaatagcacttgcccagaaatgcatctggagattgttttgcaacaagaaactgacagtgcttggggacatggagaatttatttgaataatttcttcagtttctgcaagtttgtcctgaggaccttctctctaccaggctgggagctgggagcagagttgggcagaggatgtgaaaatgagca

SEQ ID NO: 535383 - DNA, 600 bp, Homo sapiens
gttctcccaagcataaacggtcagcatgagaactatgcagggatcaataggaattgttgaaaaattctgaaaagagagcccggaggaagacaaagagccccggaagtatgttgtcagcacaatttggtgctaatactcaagtttgtttttcttttcatcaaagtctgaaaggcagttggaaatccactgcccttgtttttttgttgttgtttttgtttttaatgactggataaagcacaattgcattttctcccccaataactttgaattctgggaatagaccatgtagggataactgctgctgtctaatccctccaatggctgcgcaaatatttaggacccggaggagaggagtcaccctggctccctgccttccttctagcacgcagggcatggctcccagataatgctcctcttgaaatagcacttgcccagaaatgcatctggagattgttttgcaacaagaaactgacagtgcttggggacatggagaatttatttgartaatttcttcagtttctgcaagtttgtcctgaggaccttctctctaccaggctgggagctgggagcagagttgggcagaggatgtgaaaatgagca

SEQ ID NO: 535384 - DNA, 634 bp, Homo sapiens
tgttcccacaagctgggaggctggtaagtgtccctactttcccagaaaccacatccagccccaagaatggagtttagagagaacagcagtatcaggggatccccagccctatcccaggaaaagcagcacccctcaagtggcaaacagtgacctccacacccccacgcctgccttcctaagtcctgtccgtggagatggaggggcagacaggggccagttcctgggagggcagtgtgaccaggagcaaggaagcagagtgcccctggcagagccagtygctcaacctgctccacactaactacacctcagagcgtctacaaatgggaggaggtcacaccaccctgctctgccccacctctgtccaccacagccttcctgcagaccctgtgcccttggttgtcctaaatatcccacaggaaagataatcatgatacatatgaggaaactgaggcacggggggggcagcttgcccagaaccacccccattctgcaccttcttttcctctttattcccacaaaagcccaggaaggaggaggcatgaacctaggagatggaggcatcgccttcactgtgtcttacggatgcaggcacggaggcatgcgaggattaagtggtttgcccgagggctccagc

SEQ ID NO: 535385 - DNA, 582 bp, Homo sapiens
tgcagcctccgtaaggacagaggtcaggcctgatgcatcctagaatcttcctcaccactgtccccaccagcaccaaggccaaggtctgggtggtgatttcctctcagataaatcccttaccctttgagaaccagaaagagaaattcctcagattatggtctgtcataatcccctccctgcttccctgtcagtttttgacagttaccctgaaaccgttttaaaatgatctcagaggcagagactggccttctccacgcatgattaagcacgatggctttttaatgatttgagctgtgccttctgtgaattgacaaaaatggattaccatatatttctgaaagccacactgccaaaatcagatttttttttttttttagttttctcagccatcctcgaaaaccttagctgagaatgacaaatactaggggctttaattgttcagtcacatgagggtggtgcctcctgagttctgagaactgctctcgccaggaaagccttgaaatgctyctgggcttcgatctttaggaaattgaactgtgtgttttctctgaagcggagagctgtctcctgggccgtggcacg

SEQ ID NO: 535386 - DNA, 554 bp, Homo sapiens
agtcctatttcttaaagagttcctctcacacaggcagtygcagcacggcagctcctgcccaggtctagatggccctggtgccctggaccccgccagggagggtgggtgcagagcaggaactgcctcccgggcctcagtgggctctccggaccttccagtttcaggtctgggacctgcctgagttttacccaggaagaagcaagaccatgctcgcccccacctgtaccccgtcctccgtgttcgtgttaggctgtcgctaaaggagccctcgtcccagccctctgcgctgctgaaggggtccacgcagagggccagtgctggggagggcactggcctgaagccagagttcgaagattcccatcaccaataaaccagtgggatcttccacggcagccttcatgcttaactttaaacatcaaactacagaggacgggaattctaatggctgtgcttaaggggctgtttactttgtgaactggtgataaacagttctccagaaactgccactttctcctgagagtcagtaaagagcttcaccaacctccaggcagctg

SEQ ID NO: 535387 - DNA, 619 bp, Homo sapiens
acgctagaggttaattaaattggttgtccattgtattcatccactttacaaagctaatgatattctgttcctgaattaaagagcattttataaagcgtgccccgtggaagccggcattctgcacgcgggktgctgaaccctgtcacggctcttggatgtagtgtccccaattaggagcccaggaaggaccgggccttcatctgccagggtggaacaccagtcatgctgacacgagggtaaacacgccacataccagccgcttaatcgccctcgctggccacgataaattccaccagacgagtgcgcccgttaacatttccgattaccacggtgaggagcaactgaaatggaacgagatggcctgtaaaacagcctgcggcaggcttctccaaagggggtacatctgagggcggcaaggtgaccagcagtcctggcttctcgcctgctaccagcactgggctctctgtcacactgcgggggcaaagtcattggccggtctaaggacacccacccttgctgagagaattcagtcaccactcacattccacaaatatgcacccggcactttctccttcctctgtgccacatatgttctcagacatgtgagatacatgagtga

SEQ ID NO: 535388 - DNA, 472 bp, Homo sapiens
gaaatgctcaggagcagacactgcaacagaacgtgatgcaccacgggcggcgtgcsgggggggagcaacccacctgcactcagggcaccacgacccagtctttgccttccagcttctctccaggtgcagcggccctgcctgggggtccctctgccccctccactcctggccccttcattctgctgagcctcagccaaaaccccttccccacagtcctgccacctttcagaggtccctcagagttttctggagcccagcacaagccctctccccatgggtcagaggcaccacaggtgcgttcaaaccgtggcactcagcccaccactgggctcacagcaattcagcgggtgtgaccagcattctgggaacagggcagacaccggcagagcacatcctggtggccctcgtcagtctcactctaaaacccgggttctggggtgtgagtctgggtgcgaccctcggctccccatcc

SEQ ID NO: 535389 - DNA, 680 bp, Homo sapiens
tcaataaatatttttgagtggatgaataaatgaatgaaaaggcaatggtgtgagaatttcaaaaagcaattggaaattccagcctcagaaggatagtcaaggaatgacctgcagagagatgataaataatggccatgtgcactggcttttgcctgtaattctaacactttggaaggcaaaggcaggagggtcagttgaggccaggagttcaggaccagcctgggcaacatagtgagagcctgtctccacagaaaaataaataaactagccagtcatggtggcgtgtgtttgtagttccagctacttgggatgctgagggtagagaatcatttgaacccaggaggtcgaggctgtagtgaaccttcatcgggccactgcactctagcctgggcaacagggtgagactctgtctcaaaaacaacaacaataacaacgaaatgataaatcatgggcttgaaggtttacatgaggttgttcagtacagtgtgagaaactgaacaagccaagtctagaatccctggagatacttacaggaacaacctgagcaaagmaaaagaagactataaagaaaccatcagaaaagagaaaacaatctgtcaatagaggtaacacagaatcacaagaaactagaatagaataagatggagaaaaactttcttctttggtggccatcaaaccag

SEQ ID NO: 535390 - DNA, 680 bp, Homo sapiens
tcaataaatatttttgagtggatgaataaatgaatgaaaaggcaatggtgtgagaatttcaaaaagcaattggaaattccagcctcagaaggatagtcaaggaatgacctgcagagagatgataaataatggccatgtgcactggcttttgcctgtaattctaacactttggaaggcaaaggcaggagggtcagttgaggccaggagttcaggaccagcctgggcaacatagtgagagcctgtctccacagaaaaataaataaactagccagtcatggtggcgtgtgtttgtagttccagctacttgggatgctgagggtagagaatcatttgaacccaggaggtcgaggctgtagtgaaccttcatcgggccactgcactctagcctgggcaacagggtgagactctgtctcaaaaacaacaacaataacaacgaaatgataaatcatgggcttgaaggtttacatgaggttgttcagtacagtgtgagaaactgaacaagccaagtctagaatccctggagatacttacaggaacaacctgagcaaagaaaaagaagactataaagaaaccatcagaaaagagaaaacaatctgtcaatagaggtaacacagaatcacaaraaactagaatagaataagatggagaaaaactttcttctttggtggccatcaaaccag

SEQ ID NO: 535391 - DNA, 247 bp, Homo sapiens
gcatattttcttagttatagatatkcaatttagattaaaggcttagatgttgtattatcattaataaagagaaatagttggtttcaacctaaaatttttacctcttcaaaataaaagatattcaaggtaatatatgctcatgtgatcagattttttagtattttctaaagatttaaatataagaattctgtataattcagatttttaataaataatattaaagtgcagatggaaagttatgcttttg

SEQ ID NO: 535392 - DNA, 636 bp, Homo sapiens
actcaattaagcatatgttattttaaaacagacagtcaaagaagtagcatgaagagctctgaagcagcagaggaaagcctagagagaatgtagacttcaccaaattgagggacccacaaatcctccacacatactgttggtgaccattatgttttttgagagattgataatgatgacaacaaagagaaggttatcatgactatggcgaccttgatgatcacaatgataatgattgtaggatctctggagcgttaagttcccgaaarcaagaaccacatttggtttttccattggtctgttccagtacctagtacctaggaggatatccacttgttttaattgaattgaatgataattaataataataatactcaacaaatgtctaaacatcttatgagtctttacttcactttattattacaacaagcctatgaggcctaggtaatattattatctctatcttacagatgaagaaatgagccttaggcaggtccttagccaagattactcctaataaatgagaaagttctagttcaaatccaagcctatctgattaaagggctcttcattgctgttattatatattgaattaaaataagcgacatttccttctggctgaaatatgattctatgtca

SEQ ID NO: 535393 - DNA, 636 bp, Homo sapiens
actcaattaagcatatgttattttaaaacagacagtcaaagaagtagcatgaagagctctgaagcagcagaggaaagcctagagagaatgtagacttcaccaaattgagggacccacaaatcctccacacatactgttggtgaccattatgttttttgagagattgataatgatgacaacaaagagaaggttatcatgactatggcgaccttgatgatcacaatgataatgattgtaggatctctggagcgttaagttcccgaaaacaagaaccacatttggtttttccattggtctgttccagtacctagtacctaggaggatatccacttgttttaattgaattgaatgataattaataataataatactcaacaawtgtctaaacatcttatgagtctttacttcactttattattacaacaagcctatgaggcctaggtaatattattatctctatcttacagatgaagaaatgagccttaggcaggtccttagccaagattactcctaataaatgagaaagttctagttcaaatccaagcctatctgattaaagggctcttcattgctgttattatatattgaattaaaataagcgacatttccttctggctgaaatatgattctatgtca

SEQ ID NO: 535394 - DNA, 588 bp, Homo sapiens
ggaactccagcctgctcctctggagctttaagacatgggccagttgccatatacttcctttgggcttacagaaggtcccgtttttcttcaaacccctgcgaagcctgtaactgagttcctgttatgaagaactcttgccagtgttctcttcatgactgacagtcacctaagacttggatttcttctctgacttatttctcactctctcctactcacctggaaatgccaccatgatgcttgccacagatgtgggtgactgtgcctggggcctcaaggccactggcccttacagcaaagcaaagggcagtatccatcggctctcatgttccygtttcaacgccacatccccttgtctttgagatctcagtatgtttcctgataaagtcagctctgaaatgagggtgtggtagtatctgcattttgtatatttctttcaagctatgagaatgcaagattgtggaattttagtaagtagtctatataggatgcatttcaagattcttaatgcacttgacacatcattcatccaaagtacaagttcctggcaattccggttcattacaacacagacctgacactagatgtgag

SEQ ID NO: 535395 - DNA, 659 bp, Homo sapiens
cagaatgtatcgatgcttgttacctagattttcatttcaaagaaatgaattgatgagtaagaatttttttaaaacagtttgtarttaggacaaattgctttacaaataatttaataagcatttaacactgaaaagaagaggaaaactattgataaacctgtaacatttagccacatatagtaagaactcaatgtggaggaagaggtgaagctataagcaataccaaggggatttaaccaaacccataggccgtttacctagacacagccagatccaagtaccaatgacaagcacccatggcactggctcactccataaaaagagcattttcatgggtcctggtggataaaagatcatgatgtgttagtataatctctatttttccagtacccatgaaaatgctcaaatcactatgtgatttgagtttggacaaatcaaaatctttgctaaagccaaacaggaaaataggagacattggtttttaattagtactcggaactctaaaaataagtcccaaaaaaacaaagaccttgatgactctattatataaagaagtggttcttactatcactatcttattgccaatagttacatataattcagagagaaacatgctgatttgatgagttttctaaaatattttttaaaaagaaaactca

SEQ ID NO: 535396 - DNA, 443 bp, Homo sapiens
gatgatgacattcatagcacacctttttccaaagaagttctacttgcaatctccaaattccctggccatttcaactcaacctttccatatgttcaatgtgagtgtgtggctccacgtcacaaacgatgacttaagacgttatctgtacagggtctgcctagtccatcagaacctcactttggagtgagtagttggcacctattatcttgtggccrtaactatcactgaaactgatagagtgcaatttcccataactgacctttttttcttagaacttatcttccttcatgacttgctgaataataaaatgcttttgatgcatttcctttagccgttctttccctggaagacaacatttgcccatgtgccattgatagctccaagttggcataggtgattgcaagctctctgagtgcaaaattctacttttattccatttacag

SEQ ID NO: 535397 - DNA, 619 bp, Homo sapiens
caatatataaagtaactaaccttacccaggaagtcagggaagactttatcaatatgagctggatcttatgggatggataagaatctttctgataaggaaacaagaaggaggaataggatagtattttagaacaggaaaagcatgttcacatttcagaattcccaaagggcagggaatggaatgcctggggctggatgttaggtatttgggggttagggtggtttgctattgttattggcatttccctatttacttactcggtgtccagatgtagtaagcactcaatgaattctagttaagtgactgaatggctgaactaatgaatgaggctgcagagatagacggcaaacattgtgtaaagactctgtgtcagactaaggaacttatgctttcatcctcttggctagaagaaacccattacaatgattaaatttgtcagattttaatgggtttttatatgttttatgagacttctctctattcactcccctaaycccagcaaatgttttagaataatatgtagtataaattgtttactaacatttttcttttgctaaggtagtggacatcaaagtttaatttgcatcagaattatctggagaagttgtttaaaaatatt

SEQ ID NO: 535398 - DNA, 603 bp, Homo sapiens
ggccacccactttggacacctcctgtctgtcaatgctgcatttctttgggttcctgcagcccctcaaggccgtttctggtctctagctatgagattcctcaccttcctcagtcttctctcactaactcctctccatcatcaccccttctaggaagctaccccttccgactccctcccagccatgacacttcttaggcggggcctgtaagaaaagaaagatgcaatgttccagcagcccggagccatgctggctgctccccaagtgtcctaactctgcacttaccacgtggcttctgtacccaccccccccaccagactgggagggacttgagggcaagggctgygtcttagtcatctttacatccccaccaccaagtctagacacacgaatgtacggtgaaggccaaagaaatgctggacaggtagatgagtggataaacaaacaggtggatggataaggaaatgaaaaatgaatgaactgactgttaatgagatggaatgaaccctggagtcaggaggtcgctgtctaaaagtgtaagttttacttttcccttctggcagtttgggatgggagcttggatactcacatttaatgaatgacta

SEQ ID NO: 535399 - DNA, 481 bp, Homo sapiens
tttaaagagcttttctgtcagtgaagttacagataatgtagcctcaattgaatactgaggtcatttttaacactaaaaatgtccttttttaatgttaattgaaccatwtatatttgttttgaacatggcccatcatacatatatgcatacacacacataaaacctgcacacttatatatatatgccaacatatttcctttaggaattctctctgctaggctgatgtgtaaatttgtttacactgaaggtcagtagcctgatggacagtctcctgaaaccatcctcatattggtccccttgccttctcccatacaaagctagagctctctggttcacagactgggtcctgaatgactcagagttgctaatcacttgaggcagaatgaaaagcgcaagtgattttgagtagggaagactaagactgcatctacacgcacaactggtttgaccattccagcttcatccaccttaaggcggaata

SEQ ID NO: 535400 - DNA, 627 bp, Homo sapiens
tgcctatgggtaaccccactcaagcagcactcaagcagcctatgggaaaccccaggaaagcagagtctctgcccaaccaatccatcagattacggcagccccagccaacatcttgactacaacctcatgagagactcggagccagaaccacccaattaaacaacttctagattcctgaccctaagaaactgtgtgaaaaaataaatgtttattgtcttaagccactaagttttgggggtaatttgttaccacaaaatagatgactaataggtaatagtactagataacatctagaggtatggtacgggaaaacggggagctggcgtaacacatgcctaaaaatgtgggagaggctttgcagccaagcagtactggcccttccgtaggctctaggttagagcttaagggaaagtgaggaaaatcacattggaaactgcaaagagagatcctttttatgcaatagcagaaattttgcaacattgtcacctgtatcaacatggaaagtagamaataaactgggtaatctagataaggggatttccaggaaaagcactgaaggtgcttcctggttccttccagttgcgcataataaaatacaagagatgggtgggctcggtgtctcatgcc

SEQ ID NO: 535401 - DNA, 344 bp, Homo sapiens
tcctttttcacctaaatatctgggattgtagacaaccttggatgcgtataccacccatttctttgtttcctcgccctctctctcatccgtcctcctcctcctcccctcttattcctctcctttctatcctcctcccatctatccctcagcccccatcaccacgctgcctgtcttrgtaaaggacacctgatgctctaattcccagccatggtaccatggggaagacactctgccacctgcttaggactgagactccctgctgtgcaaagttacacaactgaactgggcaggtgatttttttttttaaacaatggtggctgcttccagttgtttgcctgaattca

SEQ ID NO: 535402 - DNA, 144 bp, Homo sapiens
tctatccacctgtctgttcctccatccagatayactgcatttccaactcatgagttgaatgggccccatgtgagtagatcagaactgttgattttctagtgaacctttagaattgagaggatggagacgtgatggcagattctg

SEQ ID NO: 535403 - DNA, 615 bp, Homo sapiens
ctgccctagagcatccagggacctcagctcatcatttgctaactttaccaaatgatgggttaaaattctcttccttggtaaaattctgcccacmccctatcttttgggcacttaattatacctaaaaatagcattgagaaaagcagctatttcatccacaattagagaatattcttgagtccagcatcaaagccattatggtgctttgatcaataagtttgttctccacggaagtgaggcttaatggcttaggtgaccgactaactttctccttagttgctctagaagtcacctgtgaatgagccctttcaaagggaatgattttgacttctgaaaacttaagcagattagaagccttgagtataggatttagaataagaagtactcagtagtaaccctggttgtctaactacacaggcttgtatgatttgaacttttgttgttgttgctcttctggtttccttaaacaccagacagatccgattacaattctaaatatttagttctgtgcaaacaggaacagctcaacagttcaccttcactgagtaacgtatgtctatttagataagcaaactactgttgcaaaaaccctggcaaaatgtcaggatgagcagg

SEQ ID NO: 535404 - DNA, 615 bp, Homo sapiens
ctgccctagagcatccagggacctcagctcatcatttgctaactttaccaaatgatgggttaaaattctcttccttggtaaaattctgcccacaccctatcttttgggcacttaattatacctaaaaatagcattgagaaaagcagctatttcatccacaattagagaatattcttgagtccagcatcaaagccattatggtgctttgatcaataagtttgttctccacggaagtgaggcttaatggcttaggtgaccgactaactttctccttagttgctctagaagtcacctgtgaatgagccctttcaaagggaatgattttgacttctgaaaacttaagcagattagargccttgagtataggatttagaataagaagtactcagtagtaaccctggttgtctaactacacaggcttgtatgatttgaacttttgttgttgttgctcttctggtttccttaaacaccagacagatccgattacaattctaaatatttagttctgtgcaaacaggaacagctcaacagttcaccttcactgagtaacgtatgtctatttagataagcaaactactgttgcaaaaaccctggcaaaatgtcaggatgagcagg

SEQ ID NO: 535405 - DNA, 671 bp, Homo sapiens
ctggggggacaacagcatcatttgtgttgacaatggggacaatgttcattctaaggagttcatgaagtgttccattgaggttccggcgcttctgctcatcatggaaatccaaattggtcaccaaaatctaaaaggattaaatagatggaaaatgcatgagggagaaaaacgctaaacttcccagtatacaaaagacgctaagagcaggggagttaaactttaggtttctggggccccacacagattagaagattagaatgaaatacacatatctgggtgctatccaattcttttttttttttttttttttttgagacagggtctcattctgtcgctcaggccgtaatgcagtggcataatstctgctcactgcaacctccacctcctgggttcaagcagttctcatgcctcagctttccaagtagctaggattacaggcacacgcagctaatttttgtatttttagtagagacagggtttcgccatgttggccaggctggtctcaaactcctggcctcaagtgatgggattacaggtgtgatccactgcacctggccccaatttttgtagagataaaaaaaattacaataatctgaaagatttatttaagaatgttcaagacttcttgcaaaagtactttaatcctcaaagagctaccaaattccaaaatc

SEQ ID NO: 535406 - DNA, 671 bp, Homo sapiens
ctggggggacaacagcatcatttgtgttgacaatggggacaatgttcattctaaggagttcatgaagtgttccattgaggttccggcgcttctgctcatcatggaaatccaaattggtcaccaaaatctaaaaggattaaatagatggaaaatgcatgagggagaaaaacgctaaacttcccagtatacaaaagacgctaagagcaggggagttaaactttaggtttctggggccccacacagattagaagattagaatgaaatacacatatctgggtgctatccaattcttttttttttttttttttttttgagacagggtctcattctgtcgctcaggccgtaatgcagtggcataatgtctgctcactgcaacctccacctcctgggttcaagcarttctcatgcctcagctttccaagtagctaggattacaggcacacgcagctaatttttgtatttttagtagagacagggtttcgccatgttggccaggctggtctcaaactcctggcctcaagtgatgggattacaggtgtgatccactgcacctggccccaatttttgtagagataaaaaaaattacaataatctgaaagatttatttaagaatgttcaagacttcttgcaaaagtactttaatcctcaaagagctaccaaattccaaaatc

SEQ ID NO: 535407 - DNA, 587 bp, Homo sapiens
aaggacacttttcagacaaaaaaaactccacaaccaatgtcactgggctgaaatgtttcagtggaattctttatggagaatacaaagattaagtgcctaaaatagagtcaggactttattttgggatttccatgcaccctcaggcactgtgatttgcttctctgggtgtctgttgcatgagtatcaggcttgtagaaactcagacatgtttaatatttacaaaaaattgtaattgggcaaatttgataattcaaagatgagagtattaatgcattaatacattgagtaagagttaaaaagaaagactaaataatgatagatcaaaatgtgcttgggttatgtatgtatgtttctgtgtctgtgcttgtgtacacacttacaatcctctgcggtcttcttgaatcacaagaatagtcagagagcctaaaaaaaggagattttagcttggtttttgaatattaagaagtcagtggtctgtctccatttttgttatctcctctagttttcagagaattggacaatagagcaataaaaagcttatctgttttgcytactctacttttttcagcctctgtgaaagcagttac

SEQ ID NO: 535408 - DNA, 518 bp, Homo sapiens
gtgacaaagattctgatggctttctagttatagtagttaaccttaattggagaagctaaatccagaataaagtggtattacaaggtttttggtgtctgcaagttggaagttgaaactatcttttgtatacttcttttagctattatatacttgtgcctatttatttctcagtaccagaaaatgtgttcctgaagacatattcttcattgcacagttcagagaaaatcttgtatcctcattgttgaacattcaaaataatagtgygattattctattactgtacttgatagctatggctaaacaactaatcccagtgggaaatttctagaagtattagaaaatttgaactacatagtgcaactccgtgaccacttccactgccatagaattttagtaagatttttatatagcttcaaaaattaaaaaaaaaaaccattgaattaacttttttaattgaaagattgataaaacatctcatggcagatatttttgttatcaacttcagtatatacatttat

SEQ ID NO: 535409 - DNA, 518 bp, Homo sapiens
gtgacaaagattctgatggctttctagttatagtagttaaccttaattggagaagctaaatccagaataaagtggtattacaaggtttttggtgtctgcaagttggaagttgaaactatcttttgtatacttcttttagctattatatacttgtgcctatttatttctcagtaccagaaaatgtgttcctgaagacatattcttcattgcacagttcagagaaaatcttgtatcctcattgttgaacattcaaaataatagtgtgattattctattactgtacttgatagctatggctaarcaactaatcccagtgggaaatttctagaagtattagaaaatttgaactacatagtgcaactccgtgaccacttccactgccatagaattttagtaagatttttatatagcttcaaaaattaaaaaaaaaaaccattgaattaacttttttaattgaaagattgataaaacatctcatggcagatatttttgttatcaacttcagtatatacatttat

SEQ ID NO: 535410 - DNA, 518 bp, Homo sapiens
gtgacaaagattctgatggctttctagttatagtagttaaccttaattggagaagctaaatccagaataaagtggtattacaaggtttttggtgtctgcaagttggaagttgaaactatcttttgtatacttcttttagctattatatacttgtgcctatttatttctcagtaccagaaaatgtgttcctgaagacatattcttcattgcacagttcagagaaaatcttgtatcctcattgttgaacattcaaaataatagtgtgattattctattactgtacttgatagctatggctaaacaactaatcccagtgggaaatttctagaagtattagaaaatttgaactacatagtgcaactccgtgaccacttccactgccatagaattttagtaagatttttatatagcttcaaaaattaaaaaaaaaaaccattgaattaacttttttaattgaaagattgataaaacatctcatggcagatatwtttgttatcaacttcagtatatacatttat

SEQ ID NO: 535411 - DNA, 425 bp, Homo sapiens
gacatacctttcctcaagggtttccagaaacaaatttagttactaatataagaatagcatatgaaccagcaaggcagagtgaatgagcatggaatttcaaaccagatayatccaggtttgtaaacatcacccaacagtacctgagaaaagtttggcacattacgttatctatccattctcaagttttcacatctagacatatgaagaacatacctcaggaagctgttgtaagggttaaaggcaaaaatataaaccaatatatttgtcattagatattaaattttttaaattaaaatattttaaaatattgaaatattgaggcctgccattatatttatttcctctcttcttcctaaaaatgatagtaaattatttttttagttggaaacccccaagagcaaatagaatgggagtagagtcatcag

SEQ ID NO: 535412 - DNA, 425 bp, Homo sapiens
gacatacctttcctcaagggtttccagaaacaaatttagttactaatataagaatagcatatgaaccagcaaggcagagtgaatgagcatggaatttcaaaccagatatatccaggtttgtaaacatcacccaacagtacctgagaaaagtttggcacattacgttatctatccattctcaagttttcacatctagacatatgaagaacatacctcaggragctgttgtaagggttaaaggcaaaaatataaaccaatatatttgtcattagatattaaattttttaaattaaaatattttaaaatattgaaatattgaggcctgccattatatttatttcctctcttcttcctaaaaatgatagtaaattatttttttagttggaaacccccaagagcaaatagaatgggagtagagtcatcag

SEQ ID NO: 535413 - DNA, 425 bp, Homo sapiens
gacatacctttcctcaagggtttccagaaacaaatttagttactaatataagaatagcatatgaaccagcaaggcagagtgaatgagcatggaatttcaaaccagatatatccaggtttgtaaacatcacccaacagtacctgagaaaagtttggcacattacgttatctatccattctcaagttttcacatctagacatatgaagaacatacctcaggaagctgttgtaagggttaaaggcaaaaatataaaccaatatatttgtcattagatattaaattttttaaattaaaatattttaaaatattgaaatattgaggcctgccattatatttatttcctctcttcttccyaaaaatgatagtaaattatttttttagttggaaacccccaagagcaaatagaatgggagtagagtcatcag

SEQ ID NO: 535414 - DNA, 425 bp, Homo sapiens
gacatacctttcctcaagggtttccagaaacaaatttagttactaatataagaatagcatatgaaccagcaaggcagagtgaatgagcatggaatttcaaaccagatatatccaggtttgtaaacatcacccaacagtacctgagaaaagtttggcacattacgttatctatccattctcaagttttcacatctagacatatgaagaacatacctcaggaagctgttgtaagggttaaaggcaaaaatataaaccaatatatttgtcattagatattaaattttttaaattaaaatattttaaaatattgaaatattgaggcctgccattatatttatttcctctcttcttcctaaaaatgatagtaaattattttttkagttggaaacccccaagagcaaatagaatgggagtagagtcatcag

SEQ ID NO: 535415 - DNA, 636 bp, Homo sapiens
cttcttggttgtgagattgggcaagttaattccttaatgccttcgtttacacatttgtaaattgggggtaataatggcatctattttataggactgttatggatattaaatgtaaagcacttggaaaagcatctggattatagtaaatgctcagtaaatactatagcacctgtcctaaagccttgcacctagtggctacccaattaacatttgagtcagctaatagaggggattcctgaattggtctaaagattaaactagttcatctctaactgcctttataactttcaccctaagtttctgttttatgtcatggcttagggcctggtrgattgaagttacacagcaaatatgatgcttatttagaagagctaatacacttttaagaactggcttttgatctgtctggtactaatatatgccattgtgtatattcgtggttaattagataagggatgccagtttttatgctagattgcctttggtttgaatggaaactgcaactcattatttcacagcaggaaggtaagctcagcagtattgcttttatttttaattagatagtcatcctgaaacgtgtctgtattagctgtgttgctccatagaaagaataacagctgagcagacttgtcatgt

SEQ ID NO: 535416 - DNA, 636 bp, Homo sapiens
cttcttggttgtgagattgggcaagttaattccttaatgccttcgtttacacatttgtaaattgggggtaataatggcatctattttataggactgttatggatattaaatgtaaagcacttggaaaagcatctggattatagtaaatgctcagtaaatactatagcacctgtcctaaagccttgcacctagtggctacccaattaacatttgagtcagctaatagaggggattcctgaattggtctaaagattaaactagttcatctctaactgcctttataactttcaccctaagtttctgttttatgtcatggcttagggcctggtagattgaagttacacagcaaatatgatgcttatttagaagagctaatacacttttaagaactggcttttgatctgtctggtactaatatatgccattgtgtatattcgtggttaattagataagggatgccagtttttatgctagattgcctttggtttgaatggaaactgcaactcattatttcacagcaggaaggtaagctcagcagtattgcttttatttttaattagatagtcatcctgaaacgtgtctgtattagctgtgttgstccatagaaagaataacagctgagcagacttgtcatgt

SEQ ID NO: 535417 - DNA, 565 bp, Homo sapiens
gtataataaataacacccagaattaacaaatattaattaatgaaaaatgataaaattaacagatatatcattttgtgttrtttgccacaggtttgtttttcaatagaaggaaacaaaaatattattggcagtccatcaccttaaccacttggccacttcatcacgttaaggaaacaaaattttattagtatagtggatgtctcttttgtttccctttcttgtcatttctctttctttcccctgaggcaaatactattatgaatttagtgtcttcatttttagttcatgcttttagatgttcactataaatatgtaatatctttaataattataataacaaacaggagttgaatgcttattgtttattaggtactatccatttaatcaataactttgtggttattgtaaggattaaatgagttaataaatataaaatgtaggcactgtttttattttcatttttcagatagggaactagagatgtagagaggttaaataacatatctaagttcatataactagaagttacggagcaaggatttgaacccagattgtttggctgtag

SEQ ID NO: 535418 - DNA, 565 bp, Homo sapiens
gtataataaataacacccagaattaacaaatattaattaatgaaaaatgataaaattaacagatatatcattttgtgttgtttgccacaggtttgtttttcaatagaaggaaacaaaaatattattggcagtccatcaccttaaccacttggccacttcatcacgttaaggaaacaaaattttattagtatagtggatgtctcttttgtttccctttcttgtcatttcwctttctttcccctgaggcaaatactattatgaatttagtgtcttcatttttagttcatgcttttagatgttcactataaatatgtaatatctttaataattataataacaaacaggagttgaatgcttattgtttattaggtactatccatttaatcaataactttgtggttattgtaaggattaaatgagttaataaatataaaatgtaggcactgtttttattttcatttttcagatagggaactagagatgtagagaggttaaataacatatctaagttcatataactagaagttacggagcaaggatttgaacccagattgtttggctgtag

SEQ ID NO: 535419 - DNA, 644 bp, Homo sapiens
cttgggcagtgatcttggttgcggcgtaggatgggctcggctgggagcttgggcagtgatcttggttgtggagtaggacgggttcggcwgggagcttgggcagtgatcttggttgtcgagtaggacgggtttggctgggagcttgggcagttatcttggtcgtggagtaggacgggggctcggctgggagcttgggcagtgatcttggttgtggagtaggacgggggctcggctgggagcttgggcagtgatcttggttgtggagtaggacgggggctcggctgggagcttgggcagtgatcttggttgtggagtaggacgggggctcggctgggagcttgggcagtgatcttggttgtggattaggacgggggctcggctgggagcttgggcagtgatcttggttgtcgagtaggacgggggttcggctgggagcttgtgtgttacttgtgttctgtgacctttcctgggggaggcaggcgtcaggacagatggccccacaggctaagcgtctgtgttctcacaggacatcctaggagaactgggtggtgatgggttctgacagatggccaggctgtggggtcacacggttggcggtggcgggctttggtccagctgcagggctgcatcgggagccctgtgtg

SEQ ID NO: 535420 - DNA, 644 bp, Homo sapiens
cttgggcagtgatcttggttgcggcgtaggatgggctcggctgggagcttgggcagtgatcttggttgtggagtaggacgggttcggctgggagcttgggcagtgatcttggttgtcgagtaggacgggtttggctgggagcttgggcagttatcttggtygtggagtaggacgggggctcggctgggagcttgggcagtgatcttggttgtggagtaggacgggggctcggctgggagcttgggcagtgatcttggttgtggagtaggacgggggctcggctgggagcttgggcagtgatcttggttgtggagtaggacgggggctcggctgggagcttgggcagtgatcttggttgtggattaggacgggggctcggctgggagcttgggcagtgatcttggttgtcgagtaggacgggggttcggctgggagcttgtgtgttacttgtgttctgtgacctttcctgggggaggcaggcgtcaggacagatggccccacaggctaagcgtctgtgttctcacaggacatcctaggagaactgggtggtgatgggttctgacagatggccaggctgtggggtcacacggttggcggtggcgggctttggtccagctgcagggctgcatcgggagccctgtgtg

SEQ ID NO: 535421 - DNA, 335 bp, Homo sapiens
tcttaggcctgtcctggaattgtcagttacacgagccaaaaatgtcccctggcacgctcgagcaagtttgggttgtgtttccagccaactaagaagagtccttaagccagcctgtataaaatcactgtcatttggaggaaagagccttgggaygttgagagaattacccttcgtgttccaaagcggcctccacagcttctgttcttgctctggggctggtgttcctgcccagcctggtgaccgtctaggcagggttagagggggagcctagagatcagggtgtcggtgaggcctggttcagggcaggtaggttccatggcacctgcagttggtgc

SEQ ID NO: 535422 - DNA, 405 bp, Homo sapiens
atcctgagagagttggttaagtggtggctggcgtcaacctctgtggctactgcttggagctcgatttgtcctctgcttcttggagtttctctgatctgttgcatccttctgtggtttgacaacgggatatgagattctgctacttgcattgggttgagtacatctgagtctcttcaggggcagaggatagmatgttgcctgattttcagtcctagtctgtcactcctgaacgtatggcattgggcaagatacttcctttctatgcctaatttttcttctgtaaaatggttgtaattatattacacactttacaggactattatgaggattaaagtaggtaatgcttataaagcctctagcacattatctggtgcagaataagcatttaataaatgttgatttttg

SEQ ID NO: 535423 - DNA, 589 bp, Homo sapiens
tgacttgaaagcagcacacagctagtcccaagatcagtatccaccaggcgacatctcacagctagtcccaagatcagtatccaccaggtgacatctcacagctagtcccaagatcagtatccaccaggtgacatctcacagctagtcctgaagatcagtatctaayaggcaacatctcacagctagtcccaagattagtatcaaccgggtgacatctgaaagctagttctgaagatcagtatcaactaggcagcagcacacagctagttccaagatcaatatcaaccaggcggcaactcacagttagtcctgatgatcagtatcaagcaggcgacatctcacagcggcgcctacagggccctccctggccagcagaacaggggccagaaggacaagccacggaccaggtctcagagccagacacaggttttcatgttctctttgctcaactcaacagcagtgacaatgaggccttccctctgtctccttcttcctttcagaggattgcaggcagattacagggtaagacaccccgaagtgggcgtggagagcacttatagctcagtgagcaggacagacccagactgcg

SEQ ID NO: 535424 - DNA, 595 bp, Homo sapiens
  misc_feature (1)...(595): n = A,T,C or G
aagttggtttggcttgtgaatcccatatccaggaaccttgtagctcaagagctcaagcttaaatttgtttttaagtttttttagtctgaagattacttttttcgtttaaactcatgaattacgattgaaatatacgtagagaacccaaagaaaggaatcctaagtagggaaatgggagttaaattatctaaatctgtttttattgcttcctctttcacgatccctaaatctatgatcactgaatggaactcaacccttagattttcaagctgtaagttcctgcagaaagttctcrgtagattggtcggggtcgcttgcagagaacagatttcattctagacattttgcagaaaggagtttatgataggacattaaatggcttgtaaactattgggagggtgaaacaaactccagtctgagcttctaggaatggtcagaaagtcgtttctgttaaacaggggaaggccccgctacagccgcaggctctggaaccacagatgcctctgctctgagcaaagtggatttccctcttctcctcccgctttcctcgggcctcnnnnnnnnnnnnnnnnnnnnnnnnnnnnnnnnnnnnnnn

SEQ ID NO: 535425 - DNA, 595 bp, Homo sapiens
  misc_feature (1)...(595): n = A,T,C or G
aagttggtttggcttgtgaatcccatatccaggaaccttgtagctcaagagctcaagcttaaatttgtttttaagtttttttagtctgaagattacttttttcgtttaaactcatgaattacgattgaaatatacgtagagaacccaaagaaaggaatcctaagtagggaaatgggagttaaattatctaaatctgtttttattgcttcctctttcacgatccctaaatctatgatcactgaatggaactcaacccttagattttcaagctgtaagttcctgcagaaagttctcggtagattggtcggggtcgcttgcagagaacagatttcattctagacattttgcagaaaggagtttatgataggacattaaatggcttgtaaactattgggagggtgaaacaaactccagtctgagcttctaggaatggtcagaaagtcgtttctgttaaacaggggaargccccgctacagccgcaggctctggaaccacagatgcctctgctctgagcaaagtggatttccctcttctcctcccgctttcctcgggcctcnnnnnnnnnnnnnnnnnnnnnnnnnnnnnnnnnnnnnnn

SEQ ID NO: 535426 - DNA, 634 bp, Homo sapiens
tgtgaatacagaaaagaaaacagttcttgtttcttccaagttagcctcttccagactgttcctgccagatgatatcccatcctgttatatcctaataaaaatttagaatcggcatcttgtttcacattaatctcttttcccatcacaatcggacttcaaaccatccacttctgcagagccctttgctgcagctaaattccagatcatgggccaggttactgccacattcacgcccccgtcacagggtgagcggggatttgggtggtccctggcaattcaatgagaaaacacccacaccatggaaggacatagaatcagaaaagtaagaaatggaagcatatgactctaagccacactttcaacatttgccaaatacaaaaacaatgtcttcctgttccccrtccagttagctgacaacagattataaaacagtgctgagcaactatagcataccaacgacatggtgattataactccactgctttttaaaaatcaaattacagccaggcacggtggctcacgcctgtaatcccagcactttgggaggtcgaggcgggtggatcacctgaggtcaggagttcaagaccaccctggctgacatggtgaaaccccatctttagtaaaaatacaaaaa

SEQ ID NO: 535427 - DNA, 626 bp, Homo sapiens
gagggtgaggaatggggcgcacaggagggggacttcggaggctgtattggccagggggcacgagagaaggcacccacactgatgccctggagtggggagagagggggtgccatctgaaacagagagaagggctggtctagaaagggagaggggaaattccgtctctcatccctgtctgccactctgaaatcataccctttcactctgcattaatatttctttcyctcgcattcttcttgatttatcttccaggagcagaccctcctttccaagtcatcatctggcataattcttagatcactatggcttaattggtgtttgatcatttttagtctcagctcttcaacatcaagggagaatttacaggggaacgaaaaagatctcattgcgatgacgcccagtgtcacagagctgggtgtgttaagtcttcttttacagctttttgaatgccatggccttgcatttagataacacctaatgccaacaaagcagtgagctgtgaggattgagctgtgtaacggtagcatttaacagtagggctgagtttattgtacattttaaaaattaactctgtccttcatgatcctaagatgtactgatgattctatagaagcagaatgggtgaa

SEQ ID NO: 535428 - DNA, 655 bp, Homo sapiens
atggaatgtttgtcaacaactgtggctgtcaaaatcagtataacctagtcttaagagtataaggtagggtgagaggctagaaacagtggcagggaagggtagtaagggaagacctgagactggtgcagagacctgaagaagtgagggatatatactgccttggggaaaaaggttacaggcagagaggacattaagtgcagacacctcagtgtatttgacctttttgggatgtaggaggccagtgtggctggagtacagtaagcaagaggaaaagtaaaggggcttgagattagggmaatagctgggcagctgtaaggcttgtaggccatggtaagaactttggattctactgtgaatgagatgggaaaacactggagggttttgaatagaagagagacttgttctgaagtttgtgagcatcattgtagctgctgtgtggaaatcaacttggggtggaggggcaagagtggaagctggaagatcaattaggagattaataatcttcacttctaacctttttcagtgattgcaaaattgtgtatctttctgctgttgggcaagtagtttccttttcttcccatctattaaaataattaaacgaacatgtgcatatacaacattttctttcttttggaatatttccttgggattcatt

SEQ ID NO: 535429 - DNA, 552 bp, Homo sapiens
gcagctattattaacatgtgacacagaagcagattgtgtatgtattgggggaaggagggaggaagggaggaggaaatacagactgagatacagaggtcatagtctccacatcaaggccacatggtcaggtcaaacacagagcagaaggtcacagaattttattcaatcataggccattactcttctctcctactgctcactactatagaattttttgtaatttttccttctcatttatggaagtgtctcttaatggagtctttctctcatatgtgtgtgtatttgtgtgtatgtgtgtgtacgtataattggaagagggccctgtgttgggtscattctgtcagaagtatgtctgaatttaatcccctttctccattcccacggctatagtcctaactcagggccaagcatttttggcccggactttttcaacactcctccccatctcctccttgcccctggcctctccctactgcatttaccctccctactgacaccaggtcatccctagtttaaatttctgcttacgatagaattcaaaccctccacact

SEQ ID NO: 535430 - DNA, 373 bp, Homo sapiens
tttcagtttatggagataacgaagactatgggagaagaggcattggggtgtgtgtgcgtaaagtatgaggtcagagatgctgatttttttacttttatttttttgagatggagtcttgctctgtcgccctggatggagtgctgtggcacaatctcggctcactscaacctccgcctgctgggttcaagcgattctcctgcctcagcctcctgagttgctgggattacaggcacctgccaccacgcccagctaattttgtacttttagaagagatggggtttcaccatgttggccaggctcatctggaactgctagcctcaagtgatcctcccgccccagcctccaaaagtgctgggattacaggcatgagcca

SEQ ID NO: 535431 - DNA, 373 bp, Homo sapiens
tttcagtttatggagataacgaagactatgggagaagaggcattggggtgtgtgtgcgtaaagtatgaggtcagagatgctgatttttttacttttatttttttgagatggagtcttgctctgtcgccctggatggagtgctgtggcacaatctcggctcactccaacctccgcctgctgggttcaagcgattctcctgcctcagcctcctgagttgctgggattacaggcacctgccaccacgcccagctaattttgtacttttagaagagatggggtttcaccatgttggccaggctcrtctggaactgctagcctcaagtgatcctcccgccccagcctccaaaagtgctgggattacaggcatgagcca

SEQ ID NO: 535432 - DNA, 634 bp, Homo sapiens
ttggtctggccccaacatatctaaaaaatagacagtgtggggaggtaacatagtgggccttttgatcttttgctctcctaccatagactctgtatgtattcaattcactgaattgacggcagtatcagaaggaaaagatgacttatcaaatatctataagttccagtcgcatcagaaaccagctccccagtgacacatgagcatctctacagcatgtgcctgctcaaagctccracaacagaaagatcatcagatcatcagacccccaaatagcttcaagctgaaaagcattctctctccaccaaatgcatatcttgcaatattttccatgactcctttttttaagatgcaaatcgtgatcccaagagtcatgcaaaaccatgaaaaacattttcagagcagtctccaaaatagcagaagagacaaaatggattttgtatataccctaccccccagggagatagaacctaataaaaagccagaatgtgggtaccgactagcctagtgctgctgaatgtggaaagccaaataatctgaaatctatatacagtgtgaccagccccattgctgaatcacaaataatatcaggaattaaaccaaataacattcctcagtcttataaccatggtatgtc

SEQ ID NO: 535433 - DNA, 564 bp, Homo sapiens
atctgagccccaaaggtactggtcacctctcctagtcccttttacacatgtgggactgtggggaaggaaagtctggttagagctcagagggacctcagacaaggaygaccaggcacaatattgaccctttcctttctcaggacccagtctgggtgccctgatctgcactgaacagaggggtccctgcctccctccctcctgcctcatccgtgccctgggagaaggctgagccctacccatctaccatagcctcagcatctggttcccgatgtggatcccaggcctccaggtccatctgggccccacctttaagcctccctgctcctcaaagtgggtaaagctttagctataaccagtcgaacagcgctgcctctgccacctccctcaccttttctgggcccctgattatttttgctagtggactggagaaatagaaaggtcctattttcttaaaaacctccagagaacccaagaactttctagatgttacaattgcttcacaaatatagggtgagagaaagcagcagacccagggagcggagggaaagatccagaggacctggt

SEQ ID NO: 535434 - DNA, 564 bp, Homo sapiens
atctgagccccaaaggtactggtcacctctcctagtcccttttacacatgtgggactgtggggaaggaaagtctggttagagctcagagggacctcagacaaggacgaccaggcacaatattgaccctttcctttctcaggacccagtctgggtgccctgatctgcactgaacagaggggtccctgcctccctccctcctgcctcatccgtgccctgggagaaggctgagccctacccatctaccatagcctcagcatctggttccmgatgtggatcccaggcctccaggtccatctgggccccacctttaagcctccctgctcctcaaagtgggtaaagctttagctataaccagtcgaacagcgctgcctctgccacctccctcaccttttctgggcccctgattatttttgctagtggactggagaaatagaaaggtcctattttcttaaaaacctccagagaacccaagaactttctagatgttacaattgcttcacaaatatagggtgagagaaagcagcagacccagggagcggagggaaagatccagaggacctggt

SEQ ID NO: 535435 - DNA, 564 bp, Homo sapiens
atctgagccccaaaggtactggtcacctctcctagtcccttttacacatgtgggactgtggggaaggaaagtctggttagagctcagagggacctcagacaaggacgaccaggcacaatattgaccctttcctttctcaggacccagtctgggtgccctgatctgcactgaacagaggggtccctgcctccctccctcctgcctcatccgtgccctgggagaaggctgagccctacccatctaccatagcctcagcatctggttcccgatgtggatcccaggcctccaggtccatctgggccccasctttaagcctccctgctcctcaaagtgggtaaagctttagctataaccagtcgaacagcgctgcctctgccacctccctcaccttttctgggcccctgattatttttgctagtggactggagaaatagaaaggtcctattttcttaaaaacctccagagaacccaagaactttctagatgttacaattgcttcacaaatatagggtgagagaaagcagcagacccagggagcggagggaaagatccagaggacctggt

SEQ ID NO: 535436 - DNA, 146 bp, Homo sapiens
tcttaagacttgcagcagtctttytgaattttacttatagatgaggcagaggatactaaacatcatataactggattatgctgattctctctagcaactttcaagttacattaaatattagtactgaaaattactttaaaatgccc

SEQ ID NO: 535437 - DNA, 616 bp, Homo sapiens
tctaatataacattcctgccatatttaaaagacatttttatacatttatacagaaattctagcaagaccacatggtttttaaaaattattatatgaataatcttatgtctgtggtgtgcaaatacttgaagcagaaaagagaatcaacagaactgtgattccaagtaactggaatcacttggccacagacgcatatttcaaagaatagttgctttgtttatccccgaaatattcatacacttcaagataaacaggggttaaattcaatatcctgtatgtcatgcttaaaaagccacaaaaccactggaggtaacttcctccatttttttttcacactcttcaaaaatgtgcagacaagaattgaggtgtttttaataaaactcatttcaagccagacttacacataccttccttcctttcttcatcttcaattttgcaatgctgcctcaacacgaagattctctgacttactctctagtgtgtccgaaacaaccccttgcctcctctgtttgcttccagaagagcacttcttccaaggaagccttttctgargagacagaaccctcccattctcattccctgcctctaataaaggaaaaagtccaaccacttccca

SEQ ID NO: 535438 - DNA, 611 bp, Homo sapiens
aaaagggataatgttactggctaagaaaattgacacatgaaacamaatagcctataaactgagctccctatgtgtaagattttaatgtggactagaggctttgtagtaagtgatttttgaaaggaaggctgaataaatattgatctaatgtggagctatttattaattattagagaaaaatagttgcccctttcatatgtcacttaaattgaaattgattaaagatagaaatgaattacaagaaagtatatgagaccatctgatctcaagatagagacagatttttcgaagcatgaaaagaaggaacagtatagagtaaaaaatcttttctccatgaaatttaaaatctttatatcaaaactcactgtaagcaagttaaaggaaataatacatgtggaaaatatttgccacatgtatgaatcatgattattggccttgtataatagatgtctcaaaaatcaataagggttgattttgattgttaaatcaagaagaaaaagaaaacatgccaggtccggtggcttgtgcctttaatcccagctattcaaaaagctggagtgggaagattgcttcaggccaggcgttagggaccagcttgagcaacatagcaa

SEQ ID NO: 535439 - DNA, 569 bp, Homo sapiens
ttcctcctacacaagtctcttcacacctctcattgctgcctcttggttaaactccttaggcctaagggtgtgtatgcctgcagcacatcccaggaagaggcttgtgtggccrggaagtgggttcaaagccatttggacagagaatgtgggggtccagcagatgcaaaatgtagtttagagaggggagcaaagctgctcccttggcccggccaactccttacttccttgggtggagggcagcagaaggaaggccaggctaaggccctctgattacagcacagggcccagcaaatggatgcatcttatgctaagggcggcactgctgtaatcatatcattacattttaggcaaaagtggcatgaatattcctttcaaggactgagcgcctgtctaccctctctcttacagagttctaagatgaatccattggccagtaagatctatttcctgtcagttctgcaggagctggcattttccatagttattgattatttagttaaatacaaaatggttcacccctcattagggcaatcagcctgtcatgatcaccatccagtgtcatgcagcct

SEQ ID NO: 535440 - DNA, 569 bp, Homo sapiens
ttcctcctacacaagtctcttcacacctctcattgctgcctcttggttaaactccttaggcctaagggtgtgtatgcctgcagcacatcccaggaagaggcttgtgtggccgggaagtgggttcaaagccatttggacagagaatgtgggggtccagcagatgcaaaatgtagtttagagaggggagcaaagctgctcccttggcccggccaactccttacttccttgggtggagggcagcagaaggaaggccaggctaaggccctctgattacagcacagggcccagcaaatggatgcatcttatgctaagggcggcactgctgtaatcatatcattacattttaggcaaaagtggcatgaatattcctttcaaggactgagcgcctgtctaccctctctcttacagagttctaagatraatccattggccagtaagatctatttcctgtcagttctgcaggagctggcattttccatagttattgattatttagttaaatacaaaatggttcacccctcattagggcaatcagcctgtcatgatcaccatccagtgtcatgcagcct

SEQ ID NO: 535441 - DNA, 623 bp, Homo sapiens
tgaaaagtaaatgagtaaaaaataataatgtgctaataagaatagtttgcattttgcttttctcatgtaggtgtacattatcttttaaagataggaaacaaacttgcaattatatattattttaatattttattatattgccaattctttctgttccattttctgccttggtattattaccacatctgttacttccctgtgctttcaggttaaatacattcatacattcacgattacgtagaacagtccattgcctataataattgctcattaaatgttgggtgtgatagtagtactgactgtcatattttatcaaatcaatctttctcattctataggagtcaaatacattctgttttctactttaagtgtataaattcctgcccttttggtcttcctttcttcaaatatcaaataaaaatggaatatctcctgaaggttctccactagaatagtcaacatctcytgctcctgttgctatcaaatgcactcttttatcggtgtttttcctcaaggcttcctttaggacctgtcatcaagtattttgaagataatcagaatcaacagaattacagaaaaatcgctaacctctgcattatattgtcaatatttgtcaagaatga

SEQ ID NO: 535442 - DNA, 586 bp, Homo sapiens
catgcctttgttcagaactttctacatcccacattttattaaaatctcttgtatttatttctactactggattacagtttccttaatgtaaagagccgtggcttagcaatataaagattttgtgtgatcattataggtaaactggccaaattaatcgacatttgagatgagctctacactttccaatttgtaccccaattcaggattacaacatccatcagtggaaaacatktactatccatattttgacaagggttgatttttgagtaattgacaaagtacaaactataataacaacaaaagctaatatttacgtgtaacttctcatgtgccagcattggtataaacacttaacatataagaactcatttaatccacacaacaatcccataaggcaggcactatgagcaccttcatcttagaaaggaaaaaacggaggcacagaatattgtactgcacagagaagtgctgtccaaatttacacagtaaattgcagacctggacttacacagaagcagtctgtgtcttgagtctagtctcttagccaccatatcctagacgctgtcctggatacatagcacctttt

SEQ ID NO: 535443 - DNA, 654 bp, Homo sapiens
ttacagtcagaaaggcttcctctttccacattctttaggattcagtataaatctcagtgactcagacaggccttcttccagtgctgtgccactatccagtcccttgttctcatgatcatatccctctacgttctcctagaacttggcacgggctgcagtgaccttgtttgcctatgtgtattcttattctgaaaaagaagccccataagggcatgggttatttgccttaattatataatgtacatgacattattatataacaggacacaagaaggagatttggtaaggctttatggaagaatgtaaagwagaaaggggataaaaaactggttcaaaattatcctaaggagatgaatggtggtgatttatgatttctttccttcctttccctccttgcctctctctgtccttatttcccttccctcccttccccccactccttctttcctttctccctccccttcccgttcccttccccttcacttcccttcccttcctttcctttccttccacttattaataggccatgggccagaatgccattcacaatatattaaatccatattattattcttgaaaattggtgtggaaattaacttttgtgcacattattgataattattttggcaattaccttgctctgcagcgtcacag

SEQ ID NO: 535444 - DNA, 616 bp, Homo sapiens
ttctctaataacatctcttctccccaaccttacgtattgtctctaataacatctcttctccccaaccttacgtattgctccacaactttttctaaccctactatcaaactttcactctctgacttttctttataacacatttagcattactgataaattagagctgtatttcttataaacactatcaggaaaagtcaaagacttttgacttatccattgaagtatgtcttttcttatggtgtttatatctgcagtagaatagagaatcacttctattgccaaagattactatcataaaatatattttaagcaccctagtacrgttgttactctatttgaggcagtaagagggtatgtagttgagaagaggcaaataaaaaggagaagaattctgatcatcattggaacctttgagtataacttaaagtacactgctgtaccaaaaactatgagcactgataaatccaagtatcatgggaaaatttctattgacttggaaaaagctatggattgcaaatagtttactcttgattcacctaatggtcaagttcttcaaaatttgtcttatatctttggatttgaagttagttgaaaaataaaacaaccatgagaatat

SEQ ID NO: 535445 - DNA, 620 bp, Homo sapiens
caaagttggaatatagaacctcactagaaataataaattatttaccttactacactaaattcaaaacttatttgaatgaatagctaaataaaaattcctygaagttagttttaaattattaggtggagcttgttggcaagacaaaaaaatgaccactagagatatgtcacttaatttcacatgctttcaatttaatcagagtaacacaatcactaaactttttgccataatattaattctagtacatccatatttgcagtcccatgagcactgttcttaacaaagaccctacacatcgagatcattaaagatcttacttagaacatagtatttagacacatacatgtattcaagtatatatatatccatataagtgtatatatatatactcatatatatacacacattgagtatatatatatacactcatatatttacacactaagagtgtgtgtgtatatatatgtaagtatatatatgtgtgtgtgtatatgtatatatatatactcttaagcaaaatattcaaatatacagaactcttattatctgcatatgcccgatgatgcaaaattgacttcttagtattaaaaaatgcataggtaaattcttccataagtgga

SEQ ID NO: 535446 - DNA, 620 bp, Homo sapiens
caaagttggaatatagaacctcactagaaataataaattatttaccttactacactaaattcaaaacttatttgaatgaatagctaaataaaaattcctcgaagttagttttaaattattaggtggagcttgttggcaagacaaaaaaatgaccactagagatatgtcacttaatttcacatgctttcaatttaatcagagtaacacaatcactaaactttttgccataatattaattctagtacatccatatttgcagtcccatgagcactgttcttaacaaagaccctacacatcgagatcattaaagatcttacttagaacatagtatttagacacatacatgtattcaagtatatatatatccatataagtgtatatatatatactcatatatatacacacattgagtatatatatatacactcatatatttacacactaagagtgtgtgtgtatatatatgtaagtatatatatgtgtgtgtgtatatgtatayatatatactcttaagcaaaatattcaaatatacagaactcttattatctgcatatgcccgatgatgcaaaattgacttcttagtattaaaaaatgcataggtaaattcttccataagtgga

SEQ ID NO: 535447 - DNA, 634 bp, Homo sapiens
aaccttgtaaagtcttctagaaaacaatactctgagacaatggacacctggatcatgacactctcccatacacttcagctatactcactcatattaccactgcctacttccacttctttgttcaacctattctttctgcctgtaatgccaaacttcttctatccgctatacatctactatttgaaatcttctttatcattcagtacttgaaagcttcctttgctaaattaattattccgttctttgagttcccatggtgctttgtgcttccctctctgtgtctgtgtttatctggagcacgctttctcactctgttaactctctgtctatttttaaatcttatyattaaacttaaatatcagttctctggtaagtcatccttgaaatctccagactgagttagccacttctccaatactaatcacagttgggtttgttgactgaataaacaaataaatgaataaaaggatggctgaataaatataagaagccagttgaggcttaacaacacaagtttatagaggtctgcaccaggtctgcacagttctgtgtctttctatgatgatgaaaatgttagaactatgctttcttctatgagagaccaacagtatacaaaagatggctatgttgcaaa

SEQ ID NO: 535448 - DNA, 563 bp, Homo sapiens
aaccttgtaaagtcttctagaaaacaatactctgagacaatggacacctggatcatgacactctcccatacacttcagctatactcactcatattaccactgcctacttccacttctttgttcaacctattctttctgcctgtaatgccaaacttcttctatccgctatacatctactatttgaaatcttctttatcattcagtacttgaaagcttcctttgctaaattaattattccgttctttgagttcccatggtgctttgtgcttccctctctgtgtctgtgtttatctggagcacgctttctcactctgttaactctctgtctatttttaaatcttattattaaacttaartatcagttctctggtaagtcatccttgaaatctccagactgagttagccacttctccaatactaatcacagttgggtttgttgactgaataaacaaataaatgaataaaaggatggctgaataaatataagaagccagttgaggcttaacaacacaagtttatagaggtctgcaccaggtctgcacagttctgtgtctttctatgat

SEQ ID NO: 535449 - DNA, 622 bp, Homo sapiens
tggcagcactccccaggaactactctcccctaaagagagttgctttccccacctgccctgaggtagcctgcagccaatgccagatcaatgaggggttataaagtccaacctccttgccccaactgaccacaactctgcaggctgatccagtttagagcctactgtgaagttagcttatgcctttattgacaccgaatcttagaccacattttccctttgccaatccttcttccttccatgcccccacaggtgttgatcccatgattatcactaaaaaataaccctgtgtctcagaggctgctttcccagaaatccaacttacaacagccatcttgttaaagcaaagtcagtccctttgttgatattgttaatagtcccttgttgttatcgtttacgtttttgtaagctacgtttaactgaaagaagaaaaactagggacttgcaattttcccttattaacttgatagctaggagtcatttttgactacttacytaagatctcatacaaatacaaagtaaaataatctcaagactctcccctctcacttttttttttcaggccagatactaagaggaggaagaaaatggacaaagacaaacatacagaaaggaccaatgctat

SEQ ID NO: 535450 - DNA, 597 bp, Homo sapiens
tctagtcagataaaaaaattcaggtcaataaaccacagactttccagctttagtagtaaatattctcttgaactcattttataattgacgtcaattcagaaataattttattcttatattattcttaggctgcttaattctattctattcagcatctaacctttgttctcatgatgctccataaattaatccttttggrtcatgaattagcaagcctccaaaataaagtgacaggttaattaaattatgcaaggaaaatggctttccttttttgttgttgttgtttttgtttgttggttggttttgttttgtttttgagacagagttttgctcttgttgtccaggatgcagtatgatggcgcgatctcggctcactgcaacctccgcctcccgggttcaagcgattctcctgcctcagcctcctgagtagctgggattacaggaacccaccactatgcccagctaatgttttgtattttcagtacagacggggtttcaccaagttggccaggctggtcttgaactcctaacctcaggtgatccacccacctcggcctcccaaattgctggaattacaggcgtgagccaccgcaccca

SEQ ID NO: 535451 - DNA, 446 bp, Homo sapiens
taatttaaattgtgctcactggaaattgaatgcccaagaccccattttttaaatgtgtgagagtaattaactggtgcatcaaatatttgtatgtatattgatggacatgtctgaatcactgacagtatttataaagtttactttcaatcttgtgacaamccagactaccttccattttatgcacctatctaatgcttagccagctacatgcaatgttgctcctatttttcccatctggagtttattttccccatcccgtataattccttgccatccagcttgaagtctccatagccctatgtcaatattttagttgtgtagcattcaaacaacttttttatttggaaagaatccctcttgatataaatcttgatgagaaacaatgtcctgctttctattaagacatcaacaaagtcagtcaacggtttgattctgtatccagaaac

SEQ ID NO: 535452 - DNA, 609 bp, Homo sapiens
gtttaaaatttagatttttatttgaaagctcctgatttttacctgttgagcatttattcatggaaaaaaaatacattgtacaaatctctcagaccagtctcacccctgggccccagttttctgtctctgaaagtttgtggaacagagaataagacaatgtggcatgtgggcaaccccacggcagcatctagggttgagtgttaacagctcccgaagccccagtgggcatgtgttatagtgcagcatgctctttcagcttagctgtcctcaggcctcttgtgttaatcagctcaattagaccctctgccttattgcaaggacagagggctttctgtatcycagggttcttgccttagtgtaccggaaaaatcgaatcactcaggggcttggaggataggtgcgaggtttttattgagtggtaatagctcccagggaggtggatgaggaagacagaagctggatggagtgggaaagtggtcttcccctggagtcaggccacccagtagtggcgctctcctctggctgaacttcacatggcaccactgtatatgacctgctggtgtctgctggtgtgtgccggtgtgttctgctagtgtgttctgcccgtgt

SEQ ID NO: 535453 - DNA, 657 bp, Homo sapiens
gcatggcctgggcttctgttgggcagtctgtgtccagtgctgatgccatctgcaggtactgacctcctcctgagctctgcccactagtaaatagaaatcaaaattctcattttgctcatttcataaaacttcatccagccttttgcccattcatttatttgctcactgggttcctggctttaaaggtataaggaaaccatgttttaaccctatttcccaccaggggccaggatctggccattcacttgtgcatccacctccctggcagggaccctggcggcagatgcatggaagccccctgctygccacaggaatgtgactgtcaccatatgcagcatgcccctgagggccccagcagcctgcagggcacacgtccttcccactgtagcaacaggaagcatggtccacagcggggaggctcagcgctgtctctagagggacctgccctgagccaggcatgtggtctgcacatctttatccagtgcctgtcacgggattgccacggggccagagaaggggccagcagggtgagctagaacagtgccttaaactgcactgtgcctcaggaccctcaaggcttgtgcaactcagacccctgggccccacatccagagtctctgattcaagaggtctgatgtgggctccaagagtgtgcag

SEQ ID NO: 535454 - DNA, 346 bp, Homo sapiens
cgccacacgtaaacaaaagacatgtatgaaaaaccacacaggagccaggacgtgtaacaagttctgaacagtagcagcaaagggatgagttgaacactgaggggtgagtgtttgtggggtggtctcgaaggcctgtgccctgatgaacaccaaggggtgagtgtgtttgtggggtgggagtcaaggctgtggagcttgtgtgttgggggaagaggggcgggtggagaagcacagcctctgctgtgaggggcatgggtgtggccctggtgtccccagagtgtttgggacctggactgtgggttggcgatggrtatcaccctgtcctgggcaggcttcgtccttcagg

SEQ ID NO: 535455 - DNA, 654 bp, Homo sapiens
tgcccctgcctgggcgtctggaattggctgtaccccgaggtgagagctgggcaggcctggggtgtgagtggcctctccaagctcagcctgacctcctgatccaggccagacaatgcttctctctccagcccctgcctgtctgaatgttctgcatgtattttctaacctgagcaaggggctgagttctctgttcctagttttgcctgcatttaattatttgttgccatttcttcccaaattgattccaaaatttgtcactagacaaacccagtgtgggcactcaccactgagggcaggcgtggatttgatggccgggtgctggcctggcattgcaaaatccatcctctggctggacaggacgtgcaggcttccagcaccaatggggtggccactgagctgagaagggattttgataattctgctgcctgctctaaatctggtgcttttctgggccttgtcctgagctggcatttgcgctgattagtggagtcttgggagttgctgggtcaaggcatcattctgagactttcgcattcagagtccatcctgtccccatcccacggctgctgccctgagggctggtgcccrggaattccctcctgtttcgtgtcttcaggtgagaactgccctggccctgtcttcagagctcagctc

SEQ ID NO: 535456 - DNA, 600 bp, Homo sapiens
cctttaagcttcctagtagcgcgtgcaaaaaggaaaacgtgtggatctaagactgtgcacaaacaaaagctgttcttctgggaggaaccaatccctcagcaatcacacttgactccctcgarggaaagctggaaggggagagggcgtcaggatgcaggtcccggtgtctctgtgcagctcatcctccttcagaggccgctctgcttctgtccatccctccaattgccagtggtgtcagcatttggggccgtgatcagatggaggaagactggcaagcagtcacccccgacaggactctctggctcagcctccccaggaatatgctgctccccaggcacagcggaagacctgctgcgtttcatcttccggctgcctgtttaaagcaagggaggccatgcccccagcggggtcccttgtgcctggacccaaggcaagaatagctcaggcttgttcctttttcctcaagttcctctcgggcgggcacggtgtgtcgcctggacctgcatgtaaacatcagggcggagcaggaatcggcctccaggagggtaattgcctggcgtactctgtcccaggtagtgggtgaaatgaaagtaaaaagcc

SEQ ID NO: 535457 - DNA, 600 bp, Homo sapiens
cctttaagcttcctagtagcgcgtgcaaaaaggaaaacgtgtggatctaagactgtgcacaaacaaaagctgttcttctgggaggaaccaatccctcagcaatcacacttgactccctcgaaggaaagctggaaggggagagggcgtcaggatgcaggtcccggtgtctctgtgcagctcatcctccttcagaggccsctctgcttctgtccatccctccaattgccagtggtgtcagcatttggggccgtgatcagatggaggaagactggcaagcagtcacccccgacaggactctctggctcagcctccccaggaatatgctgctccccaggcacagcggaagacctgctgcgtttcatcttccggctgcctgtttaaagcaagggaggccatgcccccagcggggtcccttgtgcctggacccaaggcaagaatagctcaggcttgttcctttttcctcaagttcctctcgggcgggcacggtgtgtcgcctggacctgcatgtaaacatcagggcggagcaggaatcggcctccaggagggtaattgcctggcgtactctgtcccaggtagtgggtgaaatgaaagtaaaaagcc

SEQ ID NO: 535458 - DNA, 592 bp, Homo sapiens
gggtcttgcgtttggtttagtttctcgtcaccccccggctctctgtcctgcccatcacgatcattctcactgctcagatgacaccgttaactgcccttttttttttccttttagcttgcattggacacacactactggacttggatcaaccattttgtcatctgggggtcgctgctgttctacgttgtcttttcrcttctctggggaggagtgatctggtaaatatctgataagtagctgataatctgataaatatcatgtggttgttatttttttatcaagggttgaagacacattttccgtgcggccctgttggttggggcaagtgtttgttgaatggctgctgtgtgctgggtgtcgtggggtcctgggatacagtcgggggcaagacaccggggggttcctgctccggtgacttgcatcttccgggggagaaagacgctaactgataacagcttgtgacgagttatacggaggaacagaccaggattccgcaccaggggacccatgtcagattgaaaggccagaggtgacttttcagaaacagtcatttgaaacctggaagaagagcgccatcatcacagcaagtccc

SEQ ID NO: 535459 - DNA, 572 bp, Homo sapiens
tgtgctgcaggatttgcaggtgaatggggaaggcgtggccagcatcagctccctgtggcttctggcgctcaccctctgcagggcctgtctcactgagaatggcaggtgcccacaggaacatgcacacaygcatatgtacacacacgcacacacggtgcagttccatggggtgcgtgtggagcttgtctggctctcctctccctggcagtgctttcctatcaaaacaccagtgcccgctctgccgtgagtgcgtggtcttgcttttcagtggtgcgtaatgcgttctggctctggtgggccaggtgagagcagaggcctgggaacatgttgttcagcctctttggaaggaccgctatcatcttagaattgagcgtgagagagcaagagggttcgcccacaacttccttgcgcagcagaggtgaggtgcccccggcacaggcgagcacctctagctctagggtggcttgtggggcctcctgttagaaactccatctatccccattggtcagtggtgtctttaaagatgccagtgattttcgtcccagcaaacctttgagcatcacactgttcag

SEQ ID NO: 535460 - DNA, 663 bp, Homo sapiens
tgtcagtaaaagtcttcaaatatttttagttttcrtcagcaatgttcacttctaagaatttaaaagaagaaaatgataaaaatattgtcacaaacattcatgaacaaaggtgatcatcacagccgttatttataattatgaacacttgcaggaaagcaaaattacagcagtaagggtttggaaatgatttagttgttgagatcataattctccctggcacatcttacactataataagtgaaattgccagttataaaaacgatacacagtcttcaattttgtaaacaccaaatatgtgcagttttgtaaaagacttaagatatgcacctaaatataaatgtttttaatcatacatgtgccatttgttgttctttttgtttttctgcatgaggaaaccttcttatctatgtcagaataaatgcttcttagaaaaggaaattagactgaaaacaggcacgaggggggctcgggcttcctgccccccggtcccctggtttgccgctgacgctagtggagagctcttctcgccttcaccttcctggtggctgtctcgccgggactgtgccgctggtgacctggggggtgttaattacctaacacttttcaaggggaaaatatttcgtgggagaattcgtctgaaattctgctggaggcaccttggag

SEQ ID NO: 535461 - DNA, 521 bp, Homo sapiens
cctgccacctgccgctcctggtgatggtgtttgcttggttccccctcccagctttgggggtgactggctgttgctggagataaaacgaagccaggcaaaatgytttgacatcttgaaaggtttggcaattcacctggctattttacttcttgtgtgactttacacattcttgaatatttacttattcttgaacatttattttcaacctaccataaaccttgtaattttatgcacattattaatcttactgtaaaccattcaaccaagatttgtagtaggttttgccaaatagtacaaaggaaacatcggtttaataaatgaaaaggcagaaaataatgagtgtgcaattcttcaaatattgctcacttttttgtaaagcttgcttgatttttagtcatagtaaaatttatgctatgtacctcttcaatttctttattttgtctggaagtgccttatcagaggggattaaaactaaaagctaaaaaatgaggtttaaatactgatgccatggaagtttgagg

SEQ ID NO: 535462 - DNA, 635 bp, Homo sapiens
caggaaacagaccagcagccactgaggagtctataaggaatgagggcagcggagatgggaatggagaagctgcgtccggccagcatggtgggggatggtttaaacraggatggaactgactaggagggaagaattcagcatgtctcccacattcctgcactggatgtcacccagctcagaaacggcacccacatgaaagggaaggcttacagatgggtgtgggagggtggttagctgagcttgaactcggggcactgggggagtccctcagtaggaatacctgatgagaagtagggctaactgaggacctggagccaagagagggcctaggaaaagggcttgactagaaagctaccactgttccggggtgagctgaagctctgaaaggaacatggtgacccagggagaatgcgccagagtgggcagaaggtggacagaaatgcacccatttgccaacaggataggcgaggatatgtgaggggaatttggcaaaaaagaatgagcaggagaagtggcctccagatgacaccgtggaaccaggtgcagaaaaaaatatttttttaattactgaaaaatgtattctgtgaccacaggagcgagaaagagaggaagagaggtgaatgaagaagggaggg

SEQ ID NO: 535463 - DNA, 635 bp, Homo sapiens
caggaaacagaccagcagccactgaggagtctataaggaatgagggcagcggagatgggaatggagaagctgcgtccggccagcatggtgggggatggtttaaacgaggatggaactgactaggagggaagaattcagcatgtctcccacattcctgcactggatgtcacccagctcagaaacggcacccacatgaaagggaaggcttacagatgggtgtgggagggtggttagctgagcttgaactcggggcactgggrgagtccctcagtaggaatacctgatgagaagtagggctaactgaggacctggagccaagagagggcctaggaaaagggcttgactagaaagctaccactgttccggggtgagctgaagctctgaaaggaacatggtgacccagggagaatgcgccagagtgggcagaaggtggacagaaatgcacccatttgccaacaggataggcgaggatatgtgaggggaatttggcaaaaaagaatgagcaggagaagtggcctccagatgacaccgtggaaccaggtgcagaaaaaaatatttttttaattactgaaaaatgtattctgtgaccacaggagcgagaaagagaggaagagaggtgaatgaagaagggaggg

SEQ ID NO: 535464 - DNA, 635 bp, Homo sapiens
caggaaacagaccagcagccactgaggagtctataaggaatgagggcagcggagatgggaatggagaagctgcgtccggccagcatggtgggggatggtttaaacgaggatggaactgactaggagggaagaattcagcatgtctcccacattcctgcactggatgtcacccagctcagaaacggcacccacatgaaagggaaggcttacagatgggtgtgggagggtggttagctgagcttgaactcggggcactgggggagtccctcagtaggaatacctgatgagaagtagggctaactgaggacctggagccaagagagggcctaggaaaagggcttgactagaaagctaccactgttccggggtgagctgaagctctgaraggaacatggtgacccagggagaatgcgccagagtgggcagaaggtggacagaaatgcacccatttgccaacaggataggcgaggatatgtgaggggaatttggcaaaaaagaatgagcaggagaagtggcctccagatgacaccgtggaaccaggtgcagaaaaaaatatttttttaattactgaaaaatgtattctgtgaccacaggagcgagaaagagaggaagagaggtgaatgaagaagggaggg

SEQ ID NO: 535465 - DNA, 592 bp, Homo sapiens
ccaaggctagctgggttcctgataaaaattatagggcgtcagggtcccggttacccctttgtgcgctcagaagaatttcttggcctctctgaacctcacagtagaaaaggaagtacttaaagctacaaaatccctaggagcctttcttatgatccagagtccacaaataactggggctgggtgaccttcagaggttgarctggggagtgagctgtggcccagtctgtagagatgacaatggaccttttcacagactgagggcgtgtgtacttgcagctcacagccaggacacctggcagcatgcatgcctgctcctgagcttagacaagcctgggccctgccacgtgagcttttaaggacacgataagataaaatgtcttcacatggcatttgagggaccttggttgtctccttactttctccacccttacagagagaggcaatttacagtgcagaaaacagaaaaaacttaagctttttttccaaatgagtcctggtggtcacaactcatagactatgaaagctgtcccagctctctccagcccagttctgaagacagtgatgatggtcttcgttaacgggtgagtttagc

SEQ ID NO: 535466 - DNA, 592 bp, Homo sapiens
ccaaggctagctgggttcctgataaaaattatagggcgtcagggtcccggttacccctttgtgcgctcagaagaatttcttggcctctctgaacctcacagtagaaaaggaagtacttaaagctacaaaatccctaggagcctttcttatgatccagagtccacaaataactggggctgggtgaccttcagaggttgagctggggagtgagctgtggcccagtctgtagagatgacaatggaccttttcacagactgagggcgtgtgtacktgcagctcacagccaggacacctggcagcatgcatgcctgctcctgagcttagacaagcctgggccctgccacgtgagcttttaaggacacgataagataaaatgtcttcacatggcatttgagggaccttggttgtctccttactttctccacccttacagagagaggcaatttacagtgcagaaaacagaaaaaacttaagctttttttccaaatgagtcctggtggtcacaactcatagactatgaaagctgtcccagctctctccagcccagttctgaagacagtgatgatggtcttcgttaacgggtgagtttagc

SEQ ID NO: 535467 - DNA, 592 bp, Homo sapiens
ccaaggctagctgggttcctgataaaaattatagggcgtcagggtcccggttacccctttgtgcgctcagaagaatttcttggcctctctgaacctcacagtagaaaaggaagtacttaaagctacaaaatccctaggagcctttcttatgatccagagtccacaaataactggggctgggtgaccttcagaggttgagctggggagtgagctgtggcccagtctgtagagatgacaatggaccttttcacagactgagggcgtgtgtacttgcagctcacagccaggacacctggcagcatgcatgcctgctcctgagcttagacaagcctgggccctgccacgtgagcttttaaggacacgataagataaaatgtcttcacatggcatttgagggaccttggttgtctccttactttctccacccttacagagagaggcaatttacagtgcagaaaacagaaaaaacttaagctttttttccaaatgagtcctggtggtcacaactcatagactatgaaagctgtcccagctctctccagcccagttctgaagacagtgatgwtggtcttcgttaacgggtgagtttagc

SEQ ID NO: 535468 - DNA, 567 bp, Homo sapiens
gcaaataactaaaccctacattcagtctctactcacttgactatattggtccaatttccagttctattaggctaagcctctagaggaattattatctcatgttgatatcaacagtgtttgatacatagtagaagcccagtgatcattcccttgaaacttgaatgggtaaataataagtagcaagaaaagcagctagcagtttttgaagcacatgcaaagcaccaagcattgagctaggtgtttgccatagatcaccttattttaattgacgacaataacaacttatgagacagggagttttcttatctatgtcttacagatatggaaacaaaaatcagagaggttaagcaagtcacttaacatcctacaaccagagtgatacagaactaaaattttacaccagtttggccgacatcaaagtttgagggttttttttttctttctttyttttttttttttttttttttgagatgggctgtcactctgttacccaagctagagtgcagtggcaggattttggcttggaatctgggctcaagtgattctcccacctcagcctgtggagca

SEQ ID NO: 535469 - DNA, 565 bp, Homo sapiens
tgcaaataactaaaccctacattcagtctctactcacttgactatattggtccaatttccagttctattaggctaagcctctagaggaattattatctcatgttgatatcaacagtgtttgatacatagtagaagcccagtgatcattcccttgaaacttgaatgggtaaataataagtagcaagaaaagcagctagcagtttttgaagcacatgcaaagcaccaagcattgagctaggtgtttgccatagatcaccttattttaattgacgacaataacaacttatgagacagggagttttcttatctatgtcttacagatatggaaacaaaaatcagagaggttaagcaagtcacttaacatcctacaaccagagtgatacagaactaaaattttacaccagtttggccgacatcaaagtttgagggttttttttttctttcttttttttttttttttttttttttgagatgggctgtcactctgttacccaarctagagtgcagtggcaggattttggcttggaatctgggctcaagtgattctcccacctcagcctgtgga

SEQ ID NO: 535470 - DNA, 434 bp, Homo sapiens
agagtagatctaaggtttacaatgtagctctatttagtgtgacaggaaaattaaattacaggaggcactcactcattgtcacccgttaacaggcttgggaaaattgtgaatccctgggggcaaatcactgacgacgtgcgaggggaataaaaatatttcattttaattggctgttgtttcctttgcttgattttgaaaacaacaaacataaacatgtcccccacagttctccttggaaatagggtcccgagtctcccaaacacgaccccaacttacagtctctgcccagaggccggcgggttaaccgccctgggaagcctaggtctgttttctcagcgatggttgagctggtctttatccagggrttcctgggaaggaaaatatagggacaggtttcaaataaaaatgggcttccactactccgccccccgccc

SEQ ID NO: 535471 - DNA, 573 bp, Homo sapiens
ctgtgactgtatgagagttcacagggacttttcctaaggacattctgtggggtaggaatgggttattcagaagaaataccttgccaagcattgacactgtgttgtcaccaagcattgacactgtgttgtctcttggagctgatagagatggatgataggtgtcagagtggatgaaaaatgtgtgctcttggtctaaagaagaaaacaattcctgcatgtgtgccattgatggtaggatatcaagtaacttacagatgttggccacttagttgctgaagaggcatcattatgwggcttatgagctcattgtttactttgacttgggaaaagaaatttttaaaagggattaaacgttgcctgctttgtccaaatgacctttatcaaattatcacatctaatgtgcttcgcttttgtgacaaaagacaatggacatggccaggtgtggtggctcacgcctgtaatcttagcactttgggaggtcgaggtggatggatcacctgaggtcaagagttcgagaccaacttggccaacatgatgaaaccttgtctctattaaaaatacaaaaattagcca

SEQ ID NO: 535472 - DNA, 457 bp, Homo sapiens
actatactaagtgctgtattaaygtaataatgtctttaatatattataatgtgttacattataatacatgtaacataatgtatttaatgtatattctacaatactatattaaataatactttaataggttttactagctctctaggcaacccttagtccattcaagttgacatctaaaattaaccaccatactcactattgtagagaccaaatatcaaccagtgctaatactcagtgttcttacctatgtttgatgacactggaaatcattaggtacacaaatacttctgaagtcagctcagtgcacagtgttaacaatatgtcactgccacatatcacaggttcccattctccccgactgtgataaaaattttcttgttaccttcaaactgactcataggtgggtttgttagggacacaccttacttctcattacaaatttctgtatcagtcagat

SEQ ID NO: 535473 - DNA, 457 bp, Homo sapiens
actatactaagtgctgtattaatgtaataatgtctttaatatattataatgtgttacattataatacatgtaacataatgtatttaatgtatattctacaatactatattaaataatactttaataggttttrctagctctctaggcaacccttagtccattcaagttgacatctaaaattaaccaccatactcactattgtagagaccaaatatcaaccagtgctaatactcagtgttcttacctatgtttgatgacactggaaatcattaggtacacaaatacttctgaagtcagctcagtgcacagtgttaacaatatgtcactgccacatatcacaggttcccattctccccgactgtgataaaaattttcttgttaccttcaaactgactcataggtgggtttgttagggacacaccttacttctcattacaaatttctgtatcagtcagat

SEQ ID NO: 535474 - DNA, 457 bp, Homo sapiens
actatactaagtgctgtattaatgtaataatgtctttaatatattataatgtgttacattataatacatgtaacataatgtatttaatgtatattctacaatactatattaaataatactttaataggttttactagctmtctaggcaacccttagtccattcaagttgacatctaaaattaaccaccatactcactattgtagagaccaaatatcaaccagtgctaatactcagtgttcttacctatgtttgatgacactggaaatcattaggtacacaaatacttctgaagtcagctcagtgcacagtgttaacaatatgtcactgccacatatcacaggttcccattctccccgactgtgataaaaattttcttgttaccttcaaactgactcataggtgggtttgttagggacacaccttacttctcattacaaatttctgtatcagtcagat

SEQ ID NO: 535475 - DNA, 457 bp, Homo sapiens
actatactaagtgctgtattaatgtaataatgtctttaatatattataatgtgttacattataatacatgtaacataatgtatttaatgtatattctacaatactatattaaataatactttaataggttttactagctcyctaggcaacccttagtccattcaagttgacatctaaaattaaccaccatactcactattgtagagaccaaatatcaaccagtgctaatactcagtgttcttacctatgtttgatgacactggaaatcattaggtacacaaatacttctgaagtcagctcagtgcacagtgttaacaatatgtcactgccacatatcacaggttcccattctccccgactgtgataaaaattttcttgttaccttcaaactgactcataggtgggtttgttagggacacaccttacttctcattacaaatttctgtatcagtcagat

SEQ ID NO: 535476 - DNA, 629 bp, Homo sapiens
ctgctccctgtcagcatgcaggcacagaaaaggatgatcctgaatggggaagtgcagggagggcacctcagagatgaagatgaggaatggcaaagtctgtctatgttgtggcaawctgagcagggtggagttcttatcactctgtcctctaccttctgctgagagaaaaggggggtcagagataccaaagcagatagaggaaaggggggcaagaaaggggaagggaaggaaggtattcaggagcttagctagttggttagttgattactttatgcagaccactgtcgcccccacctagaccactgcggtatctcctaactggtctcatgctgccggctgctttcctgctggaaccagagacgtcacaggaacatgcaattcttgcaccctgaaatccccgcgacgagcttccaccatggaatttagacagaattccaaaacccatcacatggcccccgagtacctggatgcaccttccccctgttccccgtaattgttactgctcagtcctgctggcttctgttcattcgctctgcttcaaaggactttctctcctggagccagattgcctgagtttaatccaggtttccctactcgctactactacttacaggcctctccatctccct

SEQ ID NO: 535477 - DNA, 642 bp, Homo sapiens
ctgctccctgtcagcatgcaggcacagaaaaggatgatcctgaatggggaagtgcagggagggcacctcagagatgaagatgaggaatggcaaagtctgtctatgttgtggcaaactgagcagggtggagttcttatcactctgtcctctaccttctgctgagagaaaaggggggtcagagataccaaagcagatagaggaaaggggggcaagaaaggggaagggaaggaaggtattcaggagcttagctagttggttagttgattactttatgcagaccactgtcgcccccacctagaccactgcrgtatctcctaactggtctcatgctgccggctgctttcctgctggaaccagagacgtcacaggaacatgcaattcttgcaccctgaaatccccgcgacgagcttccaccatggaatttagacagaattccaaaacccatcacatggcccccgagtacctggatgcaccttccccctgttccccgtaattgttactgctcagtcctgctggcttctgttcattcgctctgcttcaaaggactttctctcctggagccagattgcctgagtttaatccaggtttccctactcgctactactacttacaggcctctccatctcccttccagccttaaac

SEQ ID NO: 535478 - DNA, 610 bp, Homo sapiens
gcaaacacaaagaagcagctctccagggaacagggtaaggattgtctgaagagatctatgctggtgagattacaaaaatcataatatatgaataaatgaacatatggaaggaatcagcaaagccctctcattcttcccgtatgtaaactcggcctttgcctaaagtcattaagtaaacacagatgcagccaaaccaggcaccagatggcaaacaagaattggaataaaaggtaaagaaagcttttggtgtttactcaaagatggggaaaaaaaccatgatccaaaatgctgtggtttccccagaatggccacctggagtcaccagggcccaaaagtgaccaaataaaacaaaacaaaactagaataatcatgattgggaagttgtaggaaaaccgctgctatcttctgtgaatggaatcccatgtcagaagaaactggttattcwgggaaatgaaataaatggttaaatcaaagtactaggaccagagagcaacaggaatgtggcaagaatccacttttgctgggcactcacatctgtccagagctttgtattcttggccttatataatcctcacaattacccattaggtattggccaaattttataaat

SEQ ID NO: 535479 - DNA, 627 bp, Homo sapiens
actttacatgcatgtattaaataaaaccacctttctcagtgcaaggaggtgtgtattggagtgattaaaatttttattactgagccacacgtggtttctaatagaattatatatagacatttatattttttcctaacacggtggctttatagtaggaaccagaatgattttcttagggattaacctcctagctaggaggcagagagaaccatggagaaacaatatttgtagagtgcctattgtctgaaaggcatygtgctaagggctttatccacagttctttcactgaatccttaccaccaaccctaggaggtaggtagcagaatgatcccaccacagagggaaagactgaggcttagacaggttagctatgttgcccaaggtctttcagcccttctcctttctatcaagctgctcctcactgttgagatgccaaaggtgtcctagtgttgccatgtgtttttgcctaatttctgtgtgttttcctttctctataaagcagtgaaaactcaggtcaggtttggtttggatacgagtttgcttgaaagaatggccagcacccggagcttggcaatcaacaacatgagcactgcaactaaagagcaggtggtgggcaggattcctctc

SEQ ID NO: 535480 - DNA, 540 bp, Homo sapiens
ccaatattaactcttaagttgtacctaatgatgatgtcttctaatcctcacaaagtcacagaatattctaatagctagtatcaaactgtaataaattctaaagatgcttactcaccttgtaatcctatggaggagaaaaattgtccttttactttcaacagttatatcccgactaagtttcacaagtctctcatatttgtcatgcctcgcatcaagtacctgctgaaatgctgaaaacacattatgatcataagcatgtatattctatactcaaagcctaccgaacaatattactaagatgwacgtcacatatgctgggtgcggaggctcacgcctgcaatctaagcactatgggaggccacagaaggtggatcgtgaggtgaagagatcaagagcatcctggcctagacggtgaaaccccgtctctactaaaaataaaacaatgagctgggcatggtggcatgtgcctgtagtcccagctactctggaggctgaggcagaagaatcgcttgaaccccgaaggcagaggttgcagtgagt

SEQ ID NO: 535481 - DNA, 593 bp, Homo sapiens
gtggggtgagacagaaacagatggaaggaggtgaaagggagagagagagagagagaaagagaactacaagtcagaatacaccaagggcttttgtttgtttattcgttttacctgagtaactagatgaatggagttactattaactgagattgagaagactgctggagatatgtttgaggagggtggttatcaagagatcagtttcagacttgaaaaatttgaaatgtatattatcgatctaaatgttgaagtcaagcaaacaattgcatatacaggtctgaaatttaggggagaggtccaggctacagatataaacttgagcactgtcttcctccattttgtgcagtcataacagaataccgcagactgggtaatttataaagaaaataaatttattttgctcaaggttttggaggctgtgacatccaagatcaaggaaccacatctggtgaggatcttcttgctgagtcacaacatagcagaagccatcacatgacaaggaagcatgcaagagagagcaagccattgaactcacagcctcaagtccttttataatkagcattaatccattcatgagagtggagctcttatga

SEQ ID NO: 535482 - DNA, 548 bp, Homo sapiens
tgtcatgctcctgggctgccgcaccccagtgtcgaggtaaaatagggacaggaacaaggaggtgagggatttctggacttgctgattgacatcttaaggctttcctggccacgaacatggctgtcactgaccctttctcttcaaatcctcataaattgtcatcactgggattcctttccctgcaatcctcaagacgtgtgaaatgcatgtgtgtgtgctggttgctcccaccccctccgatagtccagggcaacccttcagactcaggttcacctggctaataggttgaggccccacactttcccaagtgtgcctcttagacaagaattcttggggttgaaggtagagaggggctaaakaatgggaaagtgtcttgaggagttgtacacactccagttgctcactttttataaacaaagtccatgatctaaagtgtatttaatttttataaaggatatcatccataggattctgaaatgagatacatgattggagctactaaagtataatgaaaaataactgttttaaaaaaagatcaataatttttg

SEQ ID NO: 535483 - DNA, 548 bp, Homo sapiens
tgtcatgctcctgggctgccgcaccccagtgtcgaggtaaaatagggacaggaacaaggaggtgagggatttctggacttgctgattgacatcttaaggctttcctggccacgaacatggctgtcactgaccctttctcttcaaatcctcataaattgtcatcactgggattcctttccctgcaatcctcaagacgtgtgaaatgcatgtgtgtgtgctggttgctcccaccccctccgatagtccagggcaacccttcagactcaggttcacctggctaataggttgaggccccacactttcccaagtgtgcctcttagacaagaattcttggggttgaaggtagagaggggctaaagaatgggaaagtgtcttgaggagttgtacacactccagttgctcactttttataaacaaagtccatgatctaaagwgtatttaatttttataaaggatatcatccataggattctgaaatgagatacatgattggagctactaaagtataatgaaaaataactgttttaaaaaaagatcaataatttttg

SEQ ID NO: 535484 - DNA, 529 bp, Homo sapiens
actctgtggcaggagagggttaggttaaagggcctcctctggaaaaagcattccattagcaaaccatgtctccacagcgttagaggccagggtcatggccacagaatcttagccatggtccctgttctcagggtatttgtgatcttagagagacaagtgcatggactggtggtggggataagtccattgtgttggattttgtgccgactcgaaggtcttatttcttttacagtatatatttgaagtgtgcagcatggcattttgcagtacatatccatagtgaaatgaatactacagtcaagcaaattaacatatccatctcctgacagttacctttgtgtgtgtgtgtgtgtgtgtgtgtgtgtggtgagaacacctgaaatctacactctttgccaatttccagcattcaatacagtgttattagctayggtcagcatgcttatttcaaccacagggatttagaaagggatgatagtagtggtctgggaagctttgaggaggagggaatagcttggaaggatggtta

SEQ ID NO: 535485 - DNA, 566 bp, Homo sapiens
gacccaagtagaaagtatgcccaagaataaataaatgttgatgctgctttcagaggactgtgagagttgatgggctttgtgctgaatgctaaagacactggttcatcatggattggtcagaaaagagtttgcctcatttagaggaatattcgtggagttggtgatgaatagagaaaggtgaggaaggcttcccgaagcagaggagaagccatgaatttgttgcctagaaaaaggtctatgtgaaatagagctcttcagagtgagaaatctggacctacgctatgaggaaattggcataaaaggaccaagargaagcctgacaagaaaggaaaatacttggttaaaacaattgcagtagaaagggagaaatctgggcttaatatagatagaactgtcaaagataagagtaactgccagaaaaccaacaaacaaaactagataaatcagtgagccttctgggatttttttttttttctgggattctctctcaaccaacccaactcccagccgcatcccaacccccgtagataaagtctattgtccttgtcctattccttgtagtggaa

SEQ ID NO: 535486 - DNA, 566 bp, Homo sapiens
gacccaagtagaaagtatgcccaagaataaataaatgttgatgctgctttcagaggactgtgagagttgatgggctttgtgctgaatgctaaagacactggttcatcatggattggtcagaaaagagtttgcctcatttagaggaatattcgtggagttggtgatgaatagagaaaggtgaggaaggcttcccgaagcagaggagaagccatgaatttgttgcctagaaaaaggtctatgtgaaatagagctcttcagagtgagaaatctggacctacgctatgaggaaattggcataaaaggaccaagaggaagcctgacaagaaaggaaaatacttggttaaaacaattgcagtagaaagggagaaatctgggcttaatatagatagaactgtcaaagataagagtaactgccagaaaaccaacaaacaaaacyagataaatcagtgagccttctgggatttttttttttttctgggattctctctcaaccaacccaactcccagccgcatcccaacccccgtagataaagtctattgtccttgtcctattccttgtagtggaa

SEQ ID NO: 535487 - DNA, 603 bp, Homo sapiens
ctggaattcactgacatagaaaggaaaatcttcagagccttttatattgtcctgataaagccacacaaggttcaaactggttataccaaccctttctgagaagttcagagcatctcaatgaaggacccttatccatgagttacagcctccttctcataaacatccttataggtcgtcatgcttgatggtgtgtgactctgccaaagagaagaattgaattaggttgagtccttgaccacagaacaaaatgtgtatgctggtgagtggcctgaaggatggaacatgataaacatatgtacccaactagaatcttccttgctggatgatggctgtctaatccaattgtatctcctgtctcttaaggagtctgaatgcaaaactgtaaataactcaacacagagagcagagtattgtataaatcagtacacacagctataagaaacaaacaaaaaacaactaggttgtataggctaaaagaatttattagaagaatgttggagtgcccaagattgatttgagactagaggactaggctggggaaataggcaggacycatggatctgtggaagactggatggcaggagacacagaaggagccatgca

SEQ ID NO: 535488 - DNA, 599 bp, Homo sapiens
caaatgtgtaactccagtctaatctctacactcagcctcaggctaggcttcagcttcgctattagacttctctatccagttacatgaagcagaacacattgttttacccaacataagaatgggcatggttagggtcagtactagtaatctataaatggaagctaggcaagatgcagaatcgtggactgatcaatgcagttcatttaaagatggcgttaacttcctgacactcttttcattggctctgaaatttttgaccctcttctcattgagaggtagggcccatgactcttcttcttgcatatgtgtggattttatgactgttttgatgaataaaacatggcaaatgttaacactgtgccaaattctgagcctaaaccttaagtcactagtggcttccatttcctcgctctcacctcctgactgtgagttctgccaccrcatcaggagtccagctacctcatgaccaccatgctggagaggccatgtagagcttccccggctgccagtctctgctcaacccagtgttccaaccacgcccctaaagtgacagatctgtgaataaaccatctcaagccttccagacaaacccacttacc

SEQ ID NO: 535489 - DNA, 599 bp, Homo sapiens
caaatgtgtaactccagtctaatctctacactcagcctcaggctaggcttcagcttcgctattagacttctctatccagttacatgaagcagaacacattgttttacccaacataagaatgggcatggttagggtcagtactagtaatctataaatggaagctaggcaagatgcagaatcgtggactgatcaatgcagttcatttaaagatggcgttaacttcctgacactcttttcattggctctgaaatttttgaccctcttctcattgagaggtagggcccatgactcttcttcttgcatatgtgtggattttatgactgttttgatgaataaaacatggcaaatgttaacactgtgccaaattctgagcctaaaccttaagtcactagtggcttccatttcctcgctctcacctcctgactgtgagttctgccaccacatcaggagtccagctacctcatgaccaccatgctggagaggccatgtagagcttccccggctgccagtctctgctyaacccagtgttccaaccacgcccctaaagtgacagatctgtgaataaaccatctcaagccttccagacaaacccacttacc

SEQ ID NO: 535490 - DNA, 450 bp, Homo sapiens
ctggctgtcagagcggaatatcatttgtgagcagcagggaagaatgcctgcatgctagaaagaaatgaaggatgacgaaatgagcccagtgcattaggctggaaggaaagccacagaggggctgcaaaaggatgcgccatggcagttaatacacagccacctcgggggacagcaggcctaacaataaccatgtcaaaactcaattccatatcaatgagaaagatgttgtgaggaattcaaatcaaataaaaataaaggccatcaaagcatacagagaataggatagtacaaaaagaatggtgccccatctctgcctcgtgractacatcatccttaaacttccctgctctagattctaaagtcattgtgaccaggggaccaagcagcaaccttcgtgtttccagaaatagcagatgatgcaaggttttccattcagaactggcaattttt

SEQ ID NO: 535491 - DNA, 418 bp, Homo sapiens
ataattatttggactcccagaaaatcagctctcagaagcaaagctgcaacttgagggaggatcagtaaaccatgtgtcatccgcctctgaggtagagatgctgccatctgcactgggtggaatccaagcaaacaaccagccagccaggaagctaaatgcaggaacaatggggatggaaccccaggaacacatctgatcccttgagtagccaagttaattctataaatggttagagttgataggcattcagagaaatataaaaaatgaaaagttcaaccttgatggaattggagactattatttgaagtgaagtaactcaggaatggaaaaaccaaacatcatatgttcttactcataattgggagctgagctatgaggatgcagaggcataagaatgayacaatggattttggggact

SEQ ID NO: 535492 - DNA, 520 bp, Homo sapiens
agctgctaagtgagagaatccacctgcttgccagttggagtgtgataggaagcaaacggccctgatagagactctatttctaggcacactgacagagcrttcagcgaagtgtcaccacactttgcttcatctagatcatcagggcaaacctgaaactctatcaggagagggaccagactcttccaagaagatggagggaaccagggacacagagcatcctccctactcaggtccctattgctatggtaaaggaggagaggaaagacagatgaggtgaggaggctattccagaaactgcgtgtgaaatgggtggtaagacattgccttgaggcattgctgaaacaatcagactttcgagtctagtctgaaggacataagaccagggagaccttgatatgcagagatgctacccaagcttggaacccttccagagagagccccccaaactttgtagaatgtacctagcaagtcaaagcctcctttgtgccaaatatctgtgttcctgctctctacttctcta

SEQ ID NO: 535493 - DNA, 675 bp, Homo sapiens
cagctgctaagtgagagaatccacctgcttgccagttggagtgtgataggaagcaaacggccctgatagagactctatttctaggcacactgacagagcgttcagcgaagtgtcaccacactttgcttcatctagatcatcagggcaaacctgaaactctatcaggagagggaccagactcttccaagaagatggagggaaccagggacacagagcatcctccctactcaggtccctattgctatggtaaaggaggagaggaaagacagatgaggtgaggaggctattccagaaactgcgtgtgaaatgggtggtaagacattgccttgaggcattgctgaaacaatcagactttcgagtctagtctgaaggacataagaccagggagaccttgatatgcagagatgctacccaagcttggaacccttccagagagagccccccaaactttgtagaatgtacctagcaagtcaaagcctcctttgtgccaaatatctgtgttcctgctctctacttctctactttctactccacagcaaaatgtycaagaaaattcgatcttcctctttgctctccaaccctattcctagccttcagttttgttttgttttttttttttgtttgtttgtttctgtttatcaaaggagtggaatgcatcaggcaagaaagtaccta

SEQ ID NO: 535494 - DNA, 424 bp, Homo sapiens
ttggtagaaagcaagatgctgcctaatgaacatcccagaaagcacaggatccactttcctgggatagtaagtgactaagcattttactcttgcctgttattatagctgaaaagatacagagatgatattgtataaggtgcattagcatcttaccgttgaattgcctttttattttaacgcttccagagcctcttcgtctactttctcattgtgccttgacaactttcttgtgagcaaggaagtctggtattacataactttcaatggagaaaaatcacatacaaatgggtttagacttgctttagggtcccattacttcagttggtctgtgtatcagagacatcttggyagaaaattgggacaagttaaggctaataaatggaattattacaaagtcatgagcaaggggtaggaaaatcacagg

SEQ ID NO: 535495 - DNA, 497 bp, Homo sapiens
ctggctaagcttgtggacttgattatttacccagttctatctgagacaacctctagggccccagacccatcagcctcccaggcctcagaccccagtgggacccctatttacttcccaagagctcgtagaacatttactggagactgtggggtatgagttgaaaaggcagaagaaattgctctttccttaaagaaaaatgagtcaaatcaaagatacagtttctgtgcagtgcctagaacggtgtctacagagagatgcatgattaattccagtgcactgtatctcagcagagctccactcacgtgggctgtctcaccttgatgcatttccttcatcctccttggcacatgcatatttatctgtctctcatgtagtgcttaatatgtgctaggaccaggaacttaatttttaaataattctttattttgatataacttcagatgtgcgggaaagttgtgagaatagcacaamgtatctctggatgtccctcatccaga

SEQ ID NO: 535496 - DNA, 539 bp, Homo sapiens
ccagtggtggttttctctaagcayggtccttggttactgagctctttagctgtgcagttccacagcgggcacacgtgttcatgacagggctctgtgcatgggacacgtgttcataaccacatcccatacatggggacgtggcagacacacatgtaacaaggacatcaggcacagaagagacagcagggctgggggtctgaccccgagagagagcaggtgcagcttgggggtgtctgctgggcccctagctgtggccacagtggtgtggcttggggtttgcacgagtctcagccccacctggcccctgggtgcatgtggctgcagaggtgcttggtcaaagatgcctgagcaggcaggagttgaactcggggggttaggagggcctctccccgcaggagtctgggctcttccatgcactgtgcacgcagcctccagagtcggggctgccgagggccacgcccccggatgtgtctgaccacaggccctctgctctgcaactcatctccaggatgggtgggcactttgggaatgccagtgag

SEQ ID NO: 535497 - DNA, 692 bp, Homo sapiens
ggtcctgttggacgctgggaaggaggatgaggcaggagcatggctcagcccagtgagggggtctgtctgggggaaagcctttagaaatccaccgcctattcaagtcacagtgggagctggggaggaaacacggctgctgtgtgtctgagtcggggacgtgcgggcctccctcagagcgccctgacttgctgtgccctgcccgcaggtggagtacatcttcacagacaagaccggcaccctcacggaaaacaacatggagttcaaggagtgctgcatcgaaggccatgtctacgtgccccacgtcatctgcaacgggcaggtcctcccagagtcgtcaggaatcgacatgattgactcgtcccccagcgtcaacgggagggtaggtggcagcccccacgccgtccaagtgtgtgagtgagtgggcggctgtgcatgctgagtccaccccttttcactcgagtgtccaggaaaatccaggccctctctacggacttcagtgggagggatggtcagaaggtgcgatgtgtgtggtgtcccgttaggacacatctgctcagtgatacccgtgttagaattggttatgaaaaccatagaagcagggcaaacacacatgcatgcacccagacaccatgtgcacayggacacacatgcacacacgctcacatgcaaacacatgcactcacacacgccca

SEQ ID NO: 535498 - DNA, 567 bp, Homo sapiens
aaaatgcttctagcacttgcaatctaaaccctttgtgttctacccattctgtacccagagcctcccaggccttcaagggacacatgcctaggggactcatgcccacatctgcctcattctcccagcaaccaagtgggatcggaggagttctgccctcagacccattttacagatcaggagactaaggtccagcacaggagagttactggcccaacacagatagcaagcaacagcctcctgacaccttggtcctctygcccatctcctccggtaatagggagaccctctcaatcatgatggggtctagcctctccccagagcctatgcctaggactgcttttctcagccttctcccttcatcctctctaaaggcagggcccaacctcagaacgccccggagcttacagccaggtggattgctgcctccccatcctgagggactcttaaggacaaagagcactcccccaaagggcatgagcagagagcactatatcctgctaagaggtcagagctgtcgccaggcaaggctgcagcagtgtcctgggtaatcgtggcagcctggccttt

SEQ ID NO: 535499 - DNA, 567 bp, Homo sapiens
aaaatgcttctagcacttgcaatctaaaccctttgtgttctacccattctgtacccagagcctcccaggccttcaagggacacatgcctaggggactcatgcccacatctgcctcattctcccagcaaccaagtgggatcggaggagttctgccctcagacccattttacagatcaggagactaaggtccagcacaggagagttactggcccaacacagatagcaagcaacagcctcctgacaccttggtcctctcgcccatctcctccggtaatagggagaccctctcaatcatgatggggtctagcctctccccagagcctatgcctaggactgcttttctcagcctyctcccttcatcctctctaaaggcagggcccaacctcagaacgccccggagcttacagccaggtggattgctgcctccccatcctgagggactcttaaggacaaagagcactcccccaaagggcatgagcagagagcactatatcctgctaagaggtcagagctgtcgccaggcaaggctgcagcagtgtcctgggtaatcgtggcagcctggccttt

SEQ ID NO: 535500 - DNA, 422 bp, Homo sapiens
taaatgagataatgcacataaactgcatggcacagtgcagagaacctaaagcatcccctgaatatgtgtgtgtgtgtgtgtgtgtgtgtgtgtgtgtgtgtgtgttgggggtggggggggtggtagaaagaataataattatctgaagcttggacctgccactcattcattctcttgctgggtactctctgtacctcagtttcccccactgctctttgaacccccaggamcctctctcctactggctggtagctcagcccctcaactgcttgcattgtattcaatcggctttgggggtgctgcttccggtactgtctcctcactatctcaagggctctattatcagaaaatcaaaatctgttccaaaagaaaaaaaacaaaatacacccatcttacagaaaagcgagctacctgaccacccc

SEQ ID NO: 535501 - DNA, 487 bp, Homo sapiens
tgaccgacttgcttggctcccaattttgcaagagttttgaatatttgtagcatgctcctctttaaaagaaaaaaaaaatgagattggcattctttttataccttaaacctaaaatacctttaccraaaattatgttcttgtggtatctctaattctcaaaaacttgaacagcatcttctccaaccacaaaaattgcactattgctaatgcgttggtattaatcagaatgtacttcaatttaaaaaacaaaaaactggggaagaataagaaaaataaggaagcagtataaagtcataatttaaagttatatgtaaattatgtaaagagaattttattgaacaagttaagggttgggtggcttttccacgtttaccaccacctggtgacagctctgtgcaagtttatataaatatcccaaaataaaatcccattagtaaagtccagttcaattcagtttattgtagtaaatatctactgagctactact

SEQ ID NO: 535502 - DNA, 693 bp, Homo sapiens
ctggaaactcccctcttggagctcccccatccacctgcttttggaattcctcctcatccttatacatcttgctaaattgtcatacactctacaagtttccccagtattctccaggaatcattcccatcctggtagctttcactattgggtggatcatactagattccaaatactcatttggttttatttccccactcaatgtggtgggggaggcagaaaagtaaacaaccaattacaataagtgctttagataatcctgaaagagtacgattacatactaaaaaaattaaaaactaaatttaaaaaccacccacacaaaccaattcgcaagatggtttctatataacatagttacactcttwatttccaagtattaatttaccgtttaggatcagggtttataccaacaccaagctcaacatttaatagaaaaaaatcaatatccttaatattacaacatatttactatttaaaaatttttattttgacatatgcactaatataaggtctgttaaaatctcaaggaaaagagaaaatcatgattacgcatcacaaaaagcacagttatttaagtgtaaaaaataaaatttaagttccatcacgctatctatgggaaacaaaattgagaaaattgaccacaatatgaatagaaatcaccatacttcatcttgaaaaattagtatttattgacaa

SEQ ID NO: 535503 - DNA, 631 bp, Homo sapiens
actcccctcttggagctcccccatccacctgcttttggaattcctcctcatccttatacatcttgctaaattgtcatacactctacaagtttccccagtattctccaggaatcattcccatcctggtagctttcactattgggtggatcatactagattccaaatactcatttggttttatttccccactcaatgtggtgggggaggcagaaaagtaaacaaccaattacaataagtgctttagataatcctgaaagagtacgattacatactaaaaaaattaaaaactaaatttaaaaaccacccacacaaaccaattcgcaagatggtttctatataacatagttacactcttaatttccaagtattaatttaccgtttaggatcagggtttataccaacaccaagctcaacatttaatagaaaaaaatcaatatccttaatattacaacatatttactatttaaaaatttttattttgacatatgcactaatataaggtctgttaaaatctcaaggaaaagagaaaatcatgattacgcatcacaaaaagcacagttatttaagtgtaaaaaataaaatttaagttccatcaygctatctatgggaaacaaaattgagaaaattgacc

SEQ ID NO: 535504 - DNA, 639 bp, Homo sapiens
ctcaaagtttcagaaaaactgtcctgagtgaactccaagaaccaaagccatagccatagacatccccagtgccaagtgctgtgctacatggtaggtactatgctgaaagttgaataaacagttcctctctcactctgaggaacttcagcaatcatctgtattccccaccatcttaaatttcaggaggagaagcagtgacattgaacttcggctatctgagtttcttagctgaaaaacattcagcgtgtgttgctcctcaagtcccaccccaacaccaatgcctcttggctacccaccaccaagttactttgtaccctattggtgccaataaaattttataggtaagatcctgctttctattacagaaggtaataccaaaaggtatactccctgtcttcaaagaaatggaaattaaaacaacattgaagtataattcaaagacaaagcataaaaaaattcatcaaacctaataatggtaaagtttagggaaatatatacycttacaccttgagatataaattaatttaacctttccatagagctatttggttatgtgtgtgtatgtgcgtgtgtgtgtatgtagatataagatatacatgtatgagtatgtgtgtctgtgtgtacctaaaaaagttttaa

SEQ ID NO: 535505 - DNA, 620 bp, Homo sapiens
atatctagaacagaacccatcattccttctgctcagctcacatctcctgctggtgatttctcatcattagtggtaccagttggttcctggtcagttgtaagggctcattgtcactgttgaccgcttttttcaattctcgccatattaatcgtcaagtctatagcttgcatttagttttctcttctctgtttctattgctacagcyccatatggtaaccctataactctttctgaccagtgtcctcactgctctgtagtccatcttctctgcaatccttcctctctacagtccatcctgcacatcagtcttccagtaacctggccatgatctcacaccatctctactcagaagcctccagtgctttcccgttcactatctgctgaattatttatttaagcaggcacccaggcctctctacacaaggcctggctccccttccggctttgctctggcacacttgcacacatatcctttggtcattctgttaaccagccaaactgaatgactgacactccttcaactgccctttgcattttgactctgggcatgtctttctgtctagaatgcctgcctcctcccagctttgcattttaagcaccacatttacccttcaagactc

SEQ ID NO: 535506 - DNA, 637 bp, Homo sapiens
tatagtttatttatacatgaggtataaataaatgaaatccatgtaaagtgctatgaaaatagtttggcatatataaaggtcttcggctgaactagataatgatagaaaacactttttataacctcaaaggtctccatttcaactagatttagtccccagataaattgactggcacaaagtttttaaattttttttttttcagttgctgacatctagatcaagtwattttatcacacacctagattccctgcttcttttgaaaaactaaaagatccatcaacaatgggttcacatgttcacatggcagctgttagaactaattgagctgtagctatctgttttacagtgacgctgtcctctccaaattactatagtctcaaccattcctcattgcatccttgatgctgagggccacccattaatatgaacagcctattaagtgtttgagtttggtagcagaagagttctgcacagattttcatgttgaagtaggggcaaggagcaggcagacaagtacagagcatttgcaggggaaaatattccttaaccaggtgtcccatcttaaaactgaaatcctgtaaagcaagtatgtcagtgttaacagtttatgtaactttaaattgtaaaaatcttttat

SEQ ID NO: 535507 - DNA, 537 bp, Homo sapiens
gcatgtccctattggggaaatctatttatgttttcaattggggatatttttaaagttttttaaaaagatcttggatctaacttctgtttcagcggaaacggcactattggagattggatagcaaatgtattaccctctttcagaatgacacaggaagcaggtactacaaggtaagagtgggctctttctttgtagtttcatacctcttattgctttttcrtgggaatgtagagtataagaaataggaaatacatccaacaaacgtggctatttttgtgcttcctccaggaactattttttttttcttctctatagtctacaaatttcttgggattcaggttgggacctcttgattcttctgtgaattttaaatttccctggggagtgtttctggtaccatgggatgatgggagagggagggaggtgaagattaattgaatatgttagcagagaagtgtgatttaactagaaaattaatggtcacagcagatcagctcaaagtaaactcctgatatccactgcatctagcacactgct

SEQ ID NO: 535508 - DNA, 597 bp, Homo sapiens
tgcaattggagtcaccacttggttaagcttacaataatccactgtctttctccaagatccacctgtcttctgcacaggccaaattaaagagttgaatggggatgtggtgggaatcaccacccctgagtctttcaagtccttgatggtggtgctaatctctgcagtccctctaaggatttaatattgtttttgatttactatttttctaggtagaggcagctctaatggtttccatttggccttttccaccataatagccctcacccaaggagaataaccaactccagtcagctctaggcttccacatcaaagaaggaaaatactcaccttcagcccactttagctcttcacgtgaaagaagggaaatactcaactctggctcactctagccattctctcccacctaaccaggtatggtgtgaactgaaaatcaattttaaagytcatagtccagaagcatctctttaaaaaaaccaaaactaaacaaacaaacaaagcaaagcaaaacaaaacaaaacaaaaacaaaaacaaaaacaaaccatgacctaattacaggactaaagaattcttctcctccctccccacattttaccacc

SEQ ID NO: 535509 - DNA, 622 bp, Homo sapiens
gccttcaccaatattttgcgagatagatttgtgagggcagcacctgaatccttgaagagatctgtgattgctcttctctgtatgccagatcttatagtaggaaccacggtcattcaattacaaaatttaaaagcaatgggaataattggatcccgaggtggtgggggccaagtgacagcacccaactgtcacaggcaagataggcatagttacggtaatggacagcagaggcaaagcagcaatcagaatagtctgacacgtgtagagctctgacattggctgattttgtrtagtgagcaaagtagactgcggagtggcagtgaaaaacaagagaaaaaaaaaacccaacaagtaaaaatgatgtcctgaaacctggaaaagaacatttttcaagaaggtgggatggttcagccacgtgaaatgctgctgagaggtcaaggaggatgagggaggtcagagactttactgattttgtcaatacgtagaaagtggctgaccttgatgttgatatatttaagtagagtgatgggaataaatagcatttggtgtgggtaagaagctgaaagaattaatagttcattttcttcaaatttcagattcaacatgacttatttgaaagtat

SEQ ID NO: 535510 - DNA, 587 bp, Homo sapiens
tttggtgccacaaaaatatgagttattttactaatagtcacaataagcaactttttagggaaccaaaacttcatacattaggtaatattttctcccatttcatcttacacatcttcttctgttatcgtaatgttcatgatttactttstcacaaatgacattgggagttttctgctaagtttccttaaccattttatgaaaaccatgtatttattcatgacccaagaatactagcaaaatggtccttaaccacaaaaaacaaaggcatggttctaaatggaaaaattttccttatcatcaagtgtgtttgtattgctatgtgcatataacattttggacatgaaatagtataagtattgtttaatttactgaattacgtaagaaattaaagaagaattattaaataaaaaagaacagggcttcgtaaagaaagttgattatgaaagagttgggaatcagggcaacacgaggttctttttgactcactgttcatctgaaaggaaagaaatgatttcttgaaaattcacattaccttcctgacacacttcatcctaggaaaagtggctcttcatttaagcaaactacac

SEQ ID NO: 535511 - DNA, 605 bp, Homo sapiens
cttctatttgggagatattttccttagtcctgaagctgtcaaccaaataagtcttgactgtgctatacccactgcataagtgaaatcagtgaatcatagggttatttagtaccagagtgttgggcaacactgtcattttacaaagggctgtagcaatggcttccttttagctagcctctatgatttattattataaattcctccaattgaactccatgctatatgccagaaggactttgccaaaatgaaatrtttcctaactttttgatttcctttccgattttaaattttttgcagctcctcattacctatattgataggagtgattccaaacacagcgcacagtccaaaaacatgacagaatactctttatcttcaacatatgagagttgctatttcccaaatatctcctgaagaaggtctactagcatgggagtcttttcctcaaaccaccacaactcatttttgcaggtacagatgaagctgaatatttccagtcagtacgggaagagcctgattctggggtgaagaggaaaaaaatgttgaaaagtgggaagaactactgaggctgagatgagaggactgcttgcagccaggagtttgag

SEQ ID NO: 535512 - DNA, 562 bp, Homo sapiens
ctgctgatcatatttcatggagctgttaaagcacttaaaacctaaaattaggtactgtctggttgtaaatatttcagatcacttatttaagaaataaatagaaaagtgtgctatcaaaagtaggagacgttttgaatcctctcattgaagagctgaacaaacctctatcaaaacaccttcttcttttttcagtgagaatataatcttgacagtttytttttctaaatggatattattcttacatgtactaaatgctaaactcttataacgtgcctccctgtagagtatcttaaactaattatattcagaaatacagttgggggattttattacaatggttactaggtgaaggaaatcaacaccaggggaatggggtggcattgcagtgtacctgcttctctcatgaatttttcctgctaaactaaaaaatgacatgctgtttcaggcatttgccctggagatgggtgagatgcaatatgtgtaatgctgcatcttatagttagatgtgttttaatgaaggggacactgcatagtcattaaatcatttttggagccaaacttg

SEQ ID NO: 535513 - DNA, 658 bp, Homo sapiens
gcagcatgaaaaatgcaaggacactgatttagaagaattaggcttaagctgagtgtcaccactgtttactaactgtgattcagtctttctgatttttatccataaaatgggatccttccaaggaacaagcaaatgaaatcacatgtaggcatgtgcttcataaactatgaagtgttaaataaatgtaagacattgttttgtaattatataatttgtgaggtaaatttacatttaataagagtagtaatctcaattctgatggcctgagacacttgatattatatcaagtggagctaaaattctatgaaattatgtaaaaacaaatattttagaatcttataaataaaataaaattactcttattaagatcacyaaagcttgaattggaataaaagaaaaaaggggacaattacagttcaagacacaaattatcagttcttagggagaaaagtgttttaaagttccctgccaatctttaatagctagtaggttttaaaactagtcaaatttagcatagcaataaaacttgaagttatgttcaaatcatgctgatattatatgcaaatgtacaattcagcattacagtcatggtaatacttacgatgagatgactaagagttaaagtaaccagtgtttcagtcttgctgcatcttttcac

SEQ ID NO: 535514 - DNA, 484 bp, Homo sapiens
gagtgatcagagtaaagaaagtagtttgtatataggaagttgattaatttttcaaaagggagttggtagacaaatataagtatagatcttggtgactctagaaaggtactgagaacaagataggaaaattatatcagtaaggtagaaagaaaaccactttaatattctgwaaaccagatgaaagaacagtccctagaatataggaatagtcagcaaattcccagtacttaaaactgtactacacaaagatagtctactttatcatttcctttatctgcaaattttctgatagaatttatatgaactaagttaccctgcaatttgatttttagggactccaaggggtgaagcagaaaaatattaaatatttagacagtgaactacatacaggaagaaatgcatggcatctgcaacaaagcaaattaatttactaatatctaatcaaaatggaacagtaggagatggtcaagaaaattccagtata

SEQ ID NO: 535515 - DNA, 610 bp, Homo sapiens
gggagaaaacgtgggtttctcaaagaatagaaagactgtccccctcatccaccacagaacagatccagggaggttttctgactccttcatgtgactcctcatattgttgaatcttaggaaactagaagggagtgaatgttcagatgcaatagaaaaaaagctgaagcccactaagtcccatcaataaaactctgaaggcttctccattgctgcatctagtcaacactgtctacactgccttctggccatttttttttttcacagtcaaagcagccaagatggcaggacctttgaagtcaggtatgaccgacccacaagcaccgcccctgctggtctgctcagaatacaatggcctgcaccaggcccatccccacaaccttggcctttgggcatgacattcgaacaagctagatatatgtaagaggaatgaaataaaaaatacacacattttctaagtaagaaatttatttgatcaaatggcaatatatgaagatattttaaactataaggctctatccagacaaaaagcatctttttataaagtaagtgttatyaatttaaatggcacctaaaatcaaagaatgagtttcctataaatgtctgtataaag

SEQ ID NO: 535516 - DNA, 501 bp, Homo sapiens
gctgccaacccctcgcttggaattagaatcacggagagtgtccactctttgtaccagccccagttagcctggccttctgtaccattgagggccaagtataacattcacatccaggaagacaaaaggatcacctgccctgcctcggaatctgcaactgtcatggccaccagaaagcccagctttgaggagtgaggggctcacctggcccctagacatggggctctctggcctcatcaggagacttactggttcaatggaaagattcagagtccatccctatatagctggaaattatttctttgaacccctaatacatccaaaaccaatttgtagtaagaacaagaaaaagagggaatattatatttcaagggaatgctcttrcatttcacaagttgaacattaataaataacttctacaggtttgcctggtttttcattaattttacgtactgatagatatcagaaatttgcccagaggcccaactatcttccagagatgtg

SEQ ID NO: 535517 - DNA, 501 bp, Homo sapiens
gctgccaacccctcgcttggaattagaatcacggagagtgtccactctttgtaccagccccagttagcctggccttctgtaccattgagggccaagtataacattcacatccaggaagacaaaaggatcacctgccctgcctcggaatctgcaactgtcatggccaccagaaagcccagctttgaggagtgaggggctcacctggcccctagacatggggctctctggcctcatcaggagacttactggttcaatggaaagattcagagtccatccctatatagctggaaattatttctttgaacccctaatacatccaaaaccaatttgtagtaagaacaagaaaaagagggaatattatatttcaagggaatgctcttgcatttcacaagttgaacattaataaataacttctacaggtttgcctggtttttcattaattttacgtactgatagatrtcagaaatttgcccagaggcccaactatcttccagagatgtg

SEQ ID NO: 535518 - DNA, 600 bp, Homo sapiens
gagtatactttgtgtcaggcagtgttataagtaacttagatatattgtcacctattacacacccactccttaccttcaggataggatacctgtaaggcatgtagatcttataaagattgcacatttttatgaaaagagcactgaattagttatcataagatttgagttctagcctttcacagagtctgtgttttctttgagtctgtgttctataggaagtgaagactggaaaaaacctaatcccctcactataacccatctaggattgaaaccgttatttataatgagtatcttactgtattttaatttcttatcccagatgtatgaatagtagctttataaaattcaaagcaagaattctaracacatagcccaggatatgggaatgccttaagctccctggtctcctcctgctggccacagaaaggtcagattgaaagcttccgagcgctattttgaaagttaatatgaagcaaggagctaatttgcacatacgtgtagaatgaaaagggtaagaagcatgaataacaaaatacaaggcagtctgtctcctctgtaaaaactctggctagtgttagattgacataattatttttacct

SEQ ID NO: 535519 - DNA, 642 bp, Homo sapiens
acatttcatacaacttcaaaaactctctgaagaactttgaacttacagagactttgaaacgtgttgctggttaaaaaaaaaaacacctttctaaagaytttatataacatttggaaaaataaaaagcattcatttacctagaactgccatcactgtgccatgctctctcttcttcttcggatgttccaccactgacagcaactacttcgccttcctaagatatgttgaatacatgtcttattgcataattttataaaataacattttatgattacagaaaatatcagtgatatcttataatatcagtcatattgggatatttaaaatttgatttaaattagttgcaaagggtgttgtggctcacgcctgtaatcccaacactttgagaggtcaaggtgggcagatcacttaaggttaggggttcgagaccagcctggccaacgtggcgacaccctgtctctactaaaacacacaaaaaattagctgggaatggtggcagatgcctgtaatcccagctacttgggagactgaggcacggaattgcttgaacccaggaggcggaggttgccgtgagctgagatcgcaccactacactccagagactgtctcaaaaataataataataaaataataaaagagtca

SEQ ID NO: 535520 - DNA, 642 bp, Homo sapiens
acatttcatacaacttcaaaaactctctgaagaactttgaacttacagagactttgaaacgtgttgctggttaaaaaaaaaaacacctttctaaagactttatataacatttggaaaaataaaaagcattcatttacctagaactgccatcactgtgccatgctctctcttcttcttcggatgttccaccactgacagcaactacttcgccttcctaagatatgttgaatacatgtcttattgcataattttataaaataacattttatgattacagaaaatatcagtgatatcttataatatcagtcatattgggatatttaaaatttgatttaaattagttgcaaagggtgttgtggctcacgcctgtaatcccaacactttgagaggtcraggtgggcagatcacttaaggttaggggttcgagaccagcctggccaacgtggcgacaccctgtctctactaaaacacacaaaaaattagctgggaatggtggcagatgcctgtaatcccagctacttgggagactgaggcacggaattgcttgaacccaggaggcggaggttgccgtgagctgagatcgcaccactacactccagagactgtctcaaaaataataataataaaataataaaagagtca

SEQ ID NO: 535521 - DNA, 301 bp, Homo sapiens
caaagggaaaacttaagattttacaatgtttaagttgttatctttaaagcagttaaggggaacgatagtcttgtgataaggtctctgtgagtctgaggcaataggcagtggaycgctctgaggaagcaggttggagagcaagctgcctaatgattaatgctgaacatgctgcaagcatgatttctttttgtttctcctcttccttcttccctgattagttttataaaatttataggaatagtttcatcacctgtagaaaatattacaaatttgtataccttgttacagaagttgtttagag

SEQ ID NO: 535522 - DNA, 599 bp, Homo sapiens
tacgtctatatattactggattgtatcacggaaagaatgcaactgttcagttgtcactgcatttaaagagtgtaaaatatcaaagctaatttaagattacgtatgtctggatgttgaatcataatatgttaggtgaaagctacttyaatatttcatatctcatatctggattacttctcgtgaagtgttattagctatcaacaacaggcagaggagaatgcattaactggtaaccaagagtcttaacaatattcacgatgttacattaagagagcatattaaaaacagtgctttttaattcttaaaatgcaaagaaatcacctgaaaatcttgttaaaattcagattccaattaagtaagattctacttgattatgatggttctggtctataaatccagctttgaaaggcaagggcttaggtgtcattctaagcataataactcttacaaggttaagagttatataattctccaaaagatgctttagtagttagtgactatatttaaaaacgtacttgcaaaccaaaaaatataaataccagaatttctggtgtctgagtaacctgagcttccagagaccatgatagaagatatgcagc

SEQ ID NO: 535523 - DNA, 559 bp, Homo sapiens
tagttgttttacattttgctacgtgaatatattacatattaaattttaatcatttgtttctataaccaagcaaattttacagtgcaaatgtacaaagaaattataatatttttggcacggtttcagaaaagtagttggtattaaattttaactgttcttattaggcttatggatatatatacatatgagatacatgcatttaatagttataacattatttaaatatttaatctgaattatacatttgaacattttttatcaatgaaatgttttatttcatttattttaatagagctctatcatgactcatagttttwtacaatataaaattatgtgattaaagttctgataaatgctcattattactatgaatcatacatttgaaaactcaaaattttcttttaacataagcaacatgttttaattataaaaaaatttaaaaatataaactaaagaaaaaataactttttattgccaatctataataatcactatgaatattgtggtggctattagttctttgtgatgacaaagagataagtacaccatctaaactgat

SEQ ID NO: 535524 - DNA, 600 bp, Homo sapiens
agactcacagggagccatcacccatgccagtgcctggaactgcccacccaactgaagccagcatgcctggtcatgtgcagtgaccagatccaacaaytgctcacaaatatacccctcacagctctgctcttggttttcccttggcgggcatgggatccaggccggtgctgtgagctgagtgcagcctgccagaccaagtgggcgggatgagtacaggaggccccagcaaaactcaggcaaaggctccactggccttagaggtttacagccagaaaagcaacacctcaagtaccctgtgacaatataaaaaaataaaatgaattgtcaatacttatctttagttgtcaatgcttgtcataacaatactttttgttctgaactgtgatttatttcacaaagtatttccagataatgtctattaatgtgttctcaaacattgctgggacttagcatcaaacttaacagtgtcccgaacttgtcttacttactacttcataatattaaaacaaatgtacataactcccagcttctaacagtcttacatatctgaagtacataacaattaatgttactcataaactcagatgaatcagagaatat

SEQ ID NO: 535525 - DNA, 613 bp, Homo sapiens
tcctaacctgctatagtcagggaacctcattatcaggacctcttgctcctctgcagcctctcccrcctattgttcttggcccctttagttttatgttcttgcttcatcctgtgccaaacctactgatagtgggagcactgatttgactcaaccacacaggacacccaggctggagtgacacttctgaaagatgaaaccttctgctttaaataatgaaatactcagaaaacacaataccttctgaatcaaagcgattttatcatagtcaaaatattggcctaaatatactttgttatatttgattacatgtttttagaagatacgtaaaccatgattttgaagtgatttttttggtacatacgttcccattttcaaacatttatgagatgcatgtgttttacctttatgatgagaaaaaaaggtaaaagattttaaatcaacaagtcatgtatattttatatacagccatttgttgcatagaaaaaggattttcttatatatgtataatgaacaaacaaggctgaatttagatggctctgaaaatgtggactcatatcaggaaatatatcaaattatcattttacttttatataagttgataattcactgctgt

SEQ ID NO: 535526 - DNA, 613 bp, Homo sapiens
tcctaacctgctatagtcagggaacctcattatcaggacctcttgctcctctgcagcctctcccgcctattgttcttggcccctttagtttkatgttcttgcttcatcctgtgccaaacctactgatagtgggagcactgatttgactcaaccacacaggacacccaggctggagtgacacttctgaaagatgaaaccttctgctttaaataatgaaatactcagaaaacacaataccttctgaatcaaagcgattttatcatagtcaaaatattggcctaaatatactttgttatatttgattacatgtttttagaagatacgtaaaccatgattttgaagtgatttttttggtacatacgttcccattttcaaacatttatgagatgcatgtgttttacctttatgatgagaaaaaaaggtaaaagattttaaatcaacaagtcatgtatattttatatacagccatttgttgcatagaaaaaggattttcttatatatgtataatgaacaaacaaggctgaatttagatggctctgaaaatgtggactcatatcaggaaatatatcaaattatcattttacttttatataagttgataattcactgctgt

SEQ ID NO: 535527 - DNA, 613 bp, Homo sapiens
tcctaacctgctatagtcagggaacctcattatcaggacctcttgctcctctgcagcctctcccgcctattgttcttggcccctttagttttatgttcttgcttcatcctgtgccaaacctactgatagtggragcactgatttgactcaaccacacaggacacccaggctggagtgacacttctgaaagatgaaaccttctgctttaaataatgaaatactcagaaaacacaataccttctgaatcaaagcgattttatcatagtcaaaatattggcctaaatatactttgttatatttgattacatgtttttagaagatacgtaaaccatgattttgaagtgatttttttggtacatacgttcccattttcaaacatttatgagatgcatgtgttttacctttatgatgagaaaaaaaggtaaaagattttaaatcaacaagtcatgtatattttatatacagccatttgttgcatagaaaaaggattttcttatatatgtataatgaacaaacaaggctgaatttagatggctctgaaaatgtggactcatatcaggaaatatatcaaattatcattttacttttatataagttgataattcactgctgt

SEQ ID NO: 535528 - DNA, 613 bp, Homo sapiens
tcctaacctgctatagtcagggaacctcattatcaggacctcttgctcctctgcagcctctcccgcctattgttcttggcccctttagttttatgttcttgcttcatcctgtgccaaacctactgatagtgggagcactgatttgactcaaccacacaggacacccaggctggagtgacacttctgaaagatgaaaccttctgctttaaataatgaaatactcagaaaacacaataccttctgaatcaaagcgattttatcatagtcaaaatattggcctaaatatactttgttatatttgattacatgtttttagaagatacgtaaaccatgattttgaagtgatttttttggtacatacgttcccattttcaaacatttatgaratgcatgtgttttacctttatgatgagaaaaaaaggtaaaagattttaaatcaacaagtcatgtatattttatatacagccatttgttgcatagaaaaaggattttcttatatatgtataatgaacaaacaaggctgaatttagatggctctgaaaatgtggactcatatcaggaaatatatcaaattatcattttacttttatataagttgataattcactgctgt

SEQ ID NO: 535529 - DNA, 594 bp, Homo sapiens
aatacctgatctaccatgacagaakttgggaagttagaattggagatgtaagcccgagacagtggaataagaatgagtcagtacccaagggcttggtctgaaaaatcaccttcactcccacactcagaatttttaaaagaacaaagaggatttattttatgaccatccatttctttctctctcccagtgtttggatcctcagcaatgttcttgaactttaacccctccagggatatggaacaccccatcttctgagacagctccttaccaggtatgctagagcccattcactggatgctgccaggcttcagtccctttgggaacctctcttgggcttgcaaggcacaacaagctataggagtctgcagaattagtccttgcaccccctttgcgtgaatcatcctttgtgttactcgggtcatcctgctacaggtgcttgttttcttatctggtcctttaactcttccaatctgatctactgtttatgaaattggcctgattatccggcttcatttactgtctgggaatagactttcatctgtggtgaacaaaatggcaactttcttgttactcaagatcatcagtttccctcag

SEQ ID NO: 535530 - DNA, 546 bp, Homo sapiens
caattggagttctaaaacttgaaacaaatcagctcttaataaggtaggtaatcaacttataagcaagaataaatttgtaatcaaatgaaaatgcaatgccatccatctcagkttctgtgtttgtacttacctggtgcctgccttccagtggtaaacatagtgcctaacatatagtagatctcaataaatatttgctgaatgaatgaatgagtgaatgaataaacttaaaacactgctcagagatgtgactgcacatctcaggttttccaaaacattcctgatctcaaaaatcccaacaagtgcaaaatactggttgagaaaactctacttcccagacgactacctctgtcttcagaaatgctgatgacacaatctaattagtttttggaaaatacagagtatagtacagggcattgatttagagtatacatttttagttggaatgatttgcatctaaatccctgacttgccatttacattgtgggtttaggtagttgcttaatgtcatgaccccccttctttggtaaaatgagggtttttcaatga

SEQ ID NO: 535531 - DNA, 593 bp, Homo sapiens
tttttaaattcaagaaatatatgaactgtaaggcagacactctttattactaaagttttactttacaagtcaaacatggaaaaaataaaatatccattcttagattaattcattgggaaaactagaggcttataggatttttttctaatgaatttctcctttaaaaacctttgtattcattaactggatatcatttcatggggtgtatttgtgtgggtatatatgaacatgtccatgcatgtggaatatagggaattcacacagatctataactgtgtgactstggtgtgcaatgtgcaaatcaactgataatgcacaaatatatatgacacaaagtacgtcaatgtgaacaatacagatgtgtaaatgatcgtgtgcaaattatttgacaatgtacaatgcacatttttaagtataacatacacatgctaggctaagcagtgtataacttaatcagtataaaattccttactttaaagtatatgtttttatattaattccaaaagaacagcaatttttaaaatgtttccagtttattaattcaatatttttaaacagactatcaaagaaatcatctggttaacgtttgatgt

SEQ ID NO: 535532 - DNA, 593 bp, Homo sapiens
tttttaaattcaagaaatatatgaactgtaaggcagacactctttattactaaagttttactttacaagtcaaacatggaaaaaataaaatatccattcttagattaattcattgggaaaactagaggcttataggatttttttctaatgaatttctcctttaaaaacctttgtattcattaactggatatcatttcatggggtgtatttgtgtgggtatatatgaacatgtccatgcatgtggaatatagggaattcacacagatctataactgtgtgactctggtgtgcaatgtgcaaatcaactgataatgcacaaatatatatgacacaaagtacgtcaatgtgaayaatacagatgtgtaaatgatcgtgtgcaaattatttgacaatgtacaatgcacatttttaagtataacatacacatgctaggctaagcagtgtataacttaatcagtataaaattccttactttaaagtatatgtttttatattaattccaaaagaacagcaatttttaaaatgtttccagtttattaattcaatatttttaaacagactatcaaagaaatcatctggttaacgtttgatgt

SEQ ID NO: 535533 - DNA, 593 bp, Homo sapiens
tttttaaattcaagaaatatatgaactgtaaggcagacactctttattactaaagttttactttacaagtcaaacatggaaaaaataaaatatccattcttagattaattcattgggaaaactagaggcttataggatttttttctaatgaatttctcctttaaaaacctttgtattcattaactggatatcatttcatggggtgtatttgtgtgggtatatatgaacatgtccatgcatgtggaatatagggaattcacacagatctataactgtgtgactctggtgtgcaatgtgcaaatcaactgataatgcacaaatatatatgacacaaagtacgtcaatgtgaacaatacagatgtgtaaatgatmgtgtgcaaattatttgacaatgtacaatgcacatttttaagtataacatacacatgctaggctaagcagtgtataacttaatcagtataaaattccttactttaaagtatatgtttttatattaattccaaaagaacagcaatttttaaaatgtttccagtttattaattcaatatttttaaacagactatcaaagaaatcatctggttaacgtttgatgt

SEQ ID NO: 535534 - DNA, 610 bp, Homo sapiens
tcattattttgttgtcataaagagatacgtaaacacgcttacatgctgaggtggtaggcataagtgtatcctccaaaatagagataacatggttaaaaaaaaggaaagagcaataaagaagaccaaaatttaaacttgtaagagtgtgaaaggaaaacatctatgagtaactcatggctatgttattttactgacaaagtaactaaattaattctgagtttatttcacatttataatggtcatttaattattagtctytcacagaaataaatttaataattgaatttctaattcatgcacaaacagtatatgtatattatgcaactcctaataattatataatgttctaaaaactaaaagtgaatttagttgtttgctgttgcaccaccccaaagaatgtcaactccaaaaaggtagagattttgtttccacgtgttttcagaccaggaggcatgtgcaagtttctaggaaaatatgaatgtattcagtaacttcaaaacatcagtataatttcactggttaaatgttaaacagtaaagcataatctattagtcaaggccttaattaattttatttttatttagaaggcatgcatctcatacctacttag

SEQ ID NO: 535535 - DNA, 610 bp, Homo sapiens
tcattattttgttgtcataaagagatacgtaaacacgcttacatgctgaggtggtaggcataagtgtatcctccaaaatagagataacatggttaaaaaaaaggaaagagcaataaagaagaccaaaatttaaacttgtaagagtgtgaaaggaaaacatctatgagtaactcatggctatgttattttactgacaaagtaactaaattaattctgagtttatttcacatttataatggtcatttaattattagtctctcacagaaataaatttaataattgaatttctaattcatgcacaaacagtatatgtatattatgcaactcctaataattatataatgttctaaaaactaaaagtgaatttagttgtttgctgttgcaccaccccaaagaatgtcaactccaaaaaggtagagattttgtttccacstgttttcagaccaggaggcatgtgcaagtttctaggaaaatatgaatgtattcagtaacttcaaaacatcagtataatttcactggttaaatgttaaacagtaaagcataatctattagtcaaggccttaattaattttatttttatttagaaggcatgcatctcatacctacttag

SEQ ID NO: 535536 - DNA, 610 bp, Homo sapiens
tcattattttgttgtcataaagagatacgtaaacacgcttacatgctgaggtggtaggcataagtgtatcctccaaaatagagataacatggttaaaaaaaaggaaagagcaataaagaagaccaaaatttaaacttgtaagagtgtgaaaggaaaacatctatgagtaactcatggctatgttattttactgacaaagtaactaaattaattctgagtttatttcacatttataatggtcatttaattattagtctctcacagaaataaatttaataattgaatttctaattcatgcacaaacagtatatgtatattatgcaactcctaataattatataatgttctaaaaactaaaagtgaatttagttgtttgctgttgcaccaccccaaagaatgtcaactccaaaaaggtagagattttgtttccacgtgttttcagaccaggaggcatgtgcaagtttctaggaaaatatgaatgtattcagtaacttcaaaacatcagtataatttcactggttaaatgttaamcagtaaagcataatctattagtcaaggccttaattaattttatttttatttagaaggcatgcatctcatacctacttag

SEQ ID NO: 535537 - DNA, 559 bp, Homo sapiens
tcataatgcactcatacttatcaaaccttgtatcctggattttagcttctcaaataatgtcttgacactcttggttgaaatttgatatttttttttcatggatatgttattacaaacgttggtcagactcccaggcaaacccaaagctcatttaactcatagttgaatatgatacaggtaatacaagtgaattatttmtcatttaatctgtaaacctacactgatttcatagtggacaagagcttacagagcatcttaatatcatgggctaacacgagtaatgtgttaacactaaagcagtgcagagcagcagataatgctggaaaaaatacaaagaactgatattagttgcacatatgtgagttagagtttttcagattgtaattaacaaaaatataaccagttcttcacaaataatcaaagcttatattatggattatcagggaagtaagcaagaacagaaaagaaagaatcccagtcagcagagaactgaaatcatggaaaaaatctggaatgagtctgagaatagaacagcacgggtgactctccaggcacagca

SEQ ID NO: 535538 - DNA, 505 bp, Homo sapiens
tgactggggcatgtcaacatggcatagcagttaaaaacatagattttggacctagactccctgctttagaatgtttcttaacttctctgtgtcacagtaaccttgaatattaagtggcgattataatacatattacataggactgtggtaaacattagrtgggtatacgtgtgcaaagtctttaatatttatagtagaaatgtttgtctaataaatgatatccaggaaaatattgatatccaggaaaataaatgtattcttcaagactctttgatttgactctgaaaatactgtaaattggataggcaaaaggaagattttgctcacctaacagagccacaagaagataagatacagaagcacaaagagtgcaaaaagtatcagggtaactggagctagcaccacaaaaactctctctcttctcttcatctagtcagtttattctcccaagtcagcaactaatgtgatggttcccactaggttcaactggccatgccaaaaccag

SEQ ID NO: 535539 - DNA, 464 bp, Homo sapiens
gctgctataacaaggtaggcaagattcatataaagatggatgaatttcctcacttacaaagctctcatttgcagttgcatgggtagaagggataaaaatggctaacatttatatagtctttattttgtgcatggcactcttctactcattttacatgtgttaattcatgtattgcttacaataagccaattagatattawtatttccattgtacaggagaggaaacagtccagaatgactaagagatttaccctaagccatacaccttgttattgatgaagctaacattttaaaccttccagtacacatgtcaacctattcttaaaatctaagctctggctcaccctagacaccttgaaatgtatgttgtaggaatactagagaaatacagaaatattgacaatggtaatctctagattacaagattgtgggtggatttttaattttttctataatttctctat

SEQ ID NO: 535540 - DNA, 464 bp, Homo sapiens
gctgctataacaaggtaggcaagattcatataaagatggatgaatttcctcacttacaaagctctcatttgcagttgcatgggtagaagggataaaaatggctaacatttatatagtctttattttgtgcatggcactcttctactcattttacatgtgttaattcatgtattgcttacaataagccaattagatattattatttccattgtacaggagaggaaacagtccagaatgactaagagatttaccctaagccatacaccttgttattgatgaagctaacattttaaaccttccagtacacatgtcaacctattcttaaaatctaagctctggctcaccctagacaccttgaaatgtatgttgtaggaayactagagaaatacagaaatattgacaatggtaatctctagattacaagattgtgggtggatttttaattttttctataatttctctat

SEQ ID NO: 535541 - DNA, 558 bp, Homo sapiens
tcataatgcactcatacttatcaaaccttgtatcctggattttagcttctcaaataatgtcttgacactcttggttgaaatttgatatttttttttcatggatatgttattacaaacgttggtcagactcccaggcaaacccaaagctcatttaactcatagttgaatatgatacaggtaatacaagtsaattatttatcatttaatctgtaaacctacactgatttcatagtggacaagagcttacagagcatcttaatatcatgggctaacacgagtaatgtgttaacactaaagcagtgcagagcagcagataatgctggaaaaaatacaaagaactgatattagttgcacatatgtgagttagagtttttcagattgtaattaacaaaaatataaccagttcttcacaaataatcaaagcttatattatggattatcagggaagtaagcaagaacagaaaagaaagaatcccagtcagcagagaactgaaatcatggaaaaaatctggaatgagtctgagaatagaacagcacgggtgactctccaggcacagc

SEQ ID NO: 535542 - DNA, 463 bp, Homo sapiens
tgttcaactaggaaataatgttctagcatgtgtgagcacagtaagtggtggtgaaacgtcaaggatggggaaatgccgtggggcattttgcttttttttctatgtgtcctgcctgagtctccatgccctacatggtctttaccgtgaatctactgtactccagtgctctccttccaatactcttgttgaaatgtggtagcctactcrttgttttggtcgttttatgtgagggtgatgagtattaggtacctctagtctgtcatcttgctcattgtttttttttttctttctcttctttttttttttttggacacagagtctcactttttcaccctggctggagtgctcactgcaagctccagcttatgggtttaagcaatttttgtgcctcagtctccacaaatagctggaactacaggcatgcaccaccatgtctggctaattttttgtattttaatgaaga

SEQ ID NO: 535543 - DNA, 522 bp, Homo sapiens
atgggtcatgatgttattgtttcatttaatttttatcaattttatggagttatgtttacatctcaacgttttagacttggagaagttatataatttgcctgaggtttmatagtaatgatggagtaagtttagttctaggtatgtttgatattcttggtcttaattcctgttctgtgttgccccaacaagtgggtgagcacaacaggcaggaaagaacattatattcatggaagtgtggtaatgattagaagggatgaaatgaaggagaatctataatgacaccaacattgtcaattgcctgccggatcagtagctagcactagcatccatgacaaatccaagagttacatcttgtggtcaatggtttaaatggaaaaagaaatgagaaaaatatatttggtattccaagggcaccagcgagacagctcaacaactcactttgaactagaggaaacctctttgctttaagatccatgaattatgctaagcatgaaagtattttagtaaccttgttatttctac

SEQ ID NO: 535544 - DNA, 522 bp, Homo sapiens
atgggtcatgatgttattgtttcatttaatttttatcaattttatggagttatgtttacatctcaacgttttagacttggagaagttatataatttgcctgaggtttaatagtaatgatggagtaagtttagttctaggtatgtttgatattcttggtcttaattcctgttctgtgttgccccaacaagtgggtgagcacaacaggcaggaaagaacattatattcatggaagtgtggtaatgattagaagggatgaaatgaaggagaatctrtaatgacaccaacattgtcaattgcctgccggatcagtagctagcactagcatccatgacaaatccaagagttacatcttgtggtcaatggtttaaatggaaaaagaaatgagaaaaatatatttggtattccaagggcaccagcgagacagctcaacaactcactttgaactagaggaaacctctttgctttaagatccatgaattatgctaagcatgaaagtattttagtaaccttgttatttctac

SEQ ID NO: 535545 - DNA, 515 bp, Homo sapiens
taccaaaattaaattctcctagaaaactcttggagctgtaaaatttatttccacatccaagtttgggaagaactgaggtaagctgcctgggtagtgtaatgtcctcattagatgtcaaacacttgtactactttagggcactgtactgagcmaaaatatcagggttctaacccctagctcagtgggtctccttgagggagaaaatgagtcattgttagcccctatgaaagattagttttttcctctgtttcttcatggcataaaatgagaataatacctacttctaggctgttttaaagatgaaaagggataatgcatgtaaaagtatcttataaatggtaaagtgcaataaaatacaagatatcattagtgcctagtagcttaccacgttcaaaagagagaacttagagaaaagaaaatactttttaaaaagaggtaagttttagtttcaaagactgtgtattgtagaaacactttcagatcattttttccctatttttacctaattaaaacat

SEQ ID NO: 535546 - DNA, 526 bp, Homo sapiens
gcacttccaagctgtgtctcttgacattgtacagcagagcatgcttgcctccgggctgcacagaacaccacggagtagcaggcaatcatgacaatcagtggaatgacgatgaaggacaccacgctgagaatagtgtagctggggctggccccccagatcatggagcagagagcattgcgctcatcaaaggcagcctggccccagccgtagagtggaggagtgctctgcaggatggccacaatccaggtgccatagaggagcaggtaaccgcggcgctgggtcatcttggacgggtaggagagagggtggatgatggacaagtagcgatccactgacaccamgacaatggtgttgacgctggccaaggcgaacaggtgggtgaggctaaccagggccgtgcagaagtggctgttgaggggccagaagagaggcacagaggtggccaccacccagggggccacgagcgaaatctgcagcaggtcggtgacgaggaggttaaagataaaacggttggtcacctgcagca

SEQ ID NO: 535547 - DNA, 568 bp, Homo sapiens
tttcctctgcaatctcatgctatatccttgaagagttttttggctgtgtggcctcattgagactttttggtatcctatacctttctccgatatgtggaataggctaacttcaaatctgtaaaccgaatagccccattccttggactacatcttgacttccttatcccactgtataaccctattagtttcctgagttggctgatgtcagcctttctacaatatgtccttttaatttggttcatcagaggtaaaaggcagtataaacaattgataatgtaggaaatgcattaatgtctttgaaagtgttactgtcctttacttaattttttaaagtatcttttattccaaaatgattattctctgtagttttctccagtgggactttttgtatttcatgtgtaatatatacactgaggtattatttcagtcatcgctcagtggccaaaagcagtattttaagagtttaccttttctttatttccaaaatatgcaccaaaaaatgttagtggtactaaaattctaaaccaaattgtaaggatatstagcagagtagcaaaggagacggcag

SEQ ID NO: 535548 - DNA, 623 bp, Homo sapiens
tgttctctttacattagtattttaggtgtatacatagttcaaaacattgacataaatgatctccatagagcccttgaacatgtaaaaaatttagttgcttaagatataattaggatacaaagtctgtaaactaatgatttttaaaacaactccttacaaatagtatgcaagctattgctcttatttctgattttatggtgaaggaaatacatatagttaacaaaataaaacctctattggttgcaagaaaatarttcagaggtcattcctagaaagtgctgctgcatggtagaaatccaaatagtttactaatagtaatagtttcccttattttttttcctctctcttattaagaggttaatatttaaaaattgaaaagggattctagaaagttctggatgtggtttatgtttgtatatattacatatcttaatatgtgtgtattatcacccagcacattattcaacagaatcatttacccaaaaactatgtgcttaattgaatataaagacagtattagcatgcaattcatttttagatgattaatttcaattatgggtcaaagaaacgtcagtacccctgtttacactgcatattagctcaccctctaaagcaataaaaca

SEQ ID NO: 535549 - DNA, 615 bp, Homo sapiens
gaaaaattaagagactctgaagcattcaaaagagcctcctccattcctcctgcatgacatccaaaaaagatttgaacattgcaggtaggcatcacatgttgcatgaaatttttccagaaaaccakattgttttccattttgataagccaggaaaggaagtgagggttttaccttcactcttaaggtcaaataaactaaaaccactcacatcagtccaagggaggaaaggaatttccacatcagttccaaggttaatgtgtttctaatgaggtctccaaaaagtcagaccttgtagatgaaacactaaaaggtaacaagcaaatattagagtgtgcaaaattctttccattcttttaaagctactcaagatcttttagttccatccaagagtacacacacacacacacgcacacacacacatacacactcagactccacaaagagtctaggagtaggtcattcaggggaaagatttaattggtctggtcagaacatcaacttagagttcatagtcttctaaataattcatagaagagacttggaaaattaagtcaccaatcagcaagatgtaattttgcttagacgttaatgtggaaagcaagcagtgatgatggt

SEQ ID NO: 535550 - DNA, 617 bp, Homo sapiens
gactctgaagcattcaaaagagcctcctccattcctcctgcatgacatccaaaaaagatttgaacattgcaggtaggcatcacatgttgcatgaaatttttccagaaaaccatattgttttccattttgataagccaggaaaggaagtgagggttttaccttcactcttaaggtcaaataaactaaaaccactcacatcagtccaagggaggaaaggaatttccacatcagttccaaggttaatgtgtttctaatgaggtctccaaaaagtcagaccttgtagatgaaacactaaaaggtaacaagcaaatattagagtgtgcaaaattctttccattcttttaaagctactcaagatcttttagttccatccaagagtacacacacacacacacgcacacacacacatacacactcagactccacaaagagtctaggagtaggtcattcaggggaaagatttaattggtctggtcagaacatcaacttagagttcatagtcttctaaataattcatagaagagacttggaaaattaagtcaccaatcagcaagatgtaattttgcttagacgttaatgtkgaaagcaagcagtgatgatggtaaatgccaccatac

SEQ ID NO: 535551 - DNA, 584 bp, Homo sapiens
ttttgcttagacgttaatgtggaaagcaagcagtgatgatggtaaatgccaccatacacacttgagaagtggcgtagcacttcatggggtccatggtgcttgaggaaaatccacatcacacccttagcactcttaggattatctgtgctcccttgatcttttcaggacagctcattgctccaggctttgccttgcagataaagagtctgcaggatctcctaatcttgcaaaagaccatagaaatactactatccccactgcttaaggtctactttcatygtctcagggcaacacaattgaggcaattcatgggtgcacccaaagtatcctcccccaccaaattccaaaattagagactgacctcaaagtgtaatgtgattttcaagatttgatgttggtgagtagaatttctatggctcagaggctaagtgaggatcacctgttgcagttaagttttcatctccactggcaaggtttaaggaactgctagcataaagaagcaaaatgtgaaactagaaataactgagatggggatatggttagaacattaaaattttaatatccctctaactagtcattacgta

SEQ ID NO: 535552 - DNA, 591 bp, Homo sapiens
ttttgcttagacgttaatgtggaaagcaagcagtgatgatggtaaatgccaccatacacacttgagaagtggcgtagcacttcatggggtccatggtgcttgaggaaaatccacatcacacccttagcactcttaggattatctgtgctcccttgatcttttcaggacagctcattgctccaggctttgccttgcagataaagagtctgcaggatctcctaatcttgcaaaagaccatagaaatactactatccccactgcttaaggtctactttcatcgtctcagggcaacacaattgaggcaattcatgggtgcacccaaagtatcctcccccaccaaattccaaaattagagactgacctcaaagtgtaatgtgattttcaagatttgatgttggtgagtagaatttctayggctcagaggctaagtgaggatcacctgttgcagttaagttttcatctccactggcaaggtttaaggaactgctagcataaagaagcaaaatgtgaaactagaaataactgagatggggatatggttagaacattaaaattttaatatccctctaactagtcattacgtagatagaa

SEQ ID NO: 535553 - DNA, 632 bp, Homo sapiens
ggtaacataatctaaaattttgatatatggccatgtttacaagtaataaaaataaaagaaaaatcataagatacctgggcccacaatgatttattctgggttgatagtgaacaaggctgatttgattcatttttctgccagaaggaaggaatcgcccataaaaacacaaatgagagtaggctggtaagtggtgggtgtttcttttgcaatactattagcaaagagaagcagagccaacaaacagaagtaaaatgaaaccaggtgattcttacttgtagaggtcaggttgaggctgttcacattcaattgctgctcggagggtatcgatggattctgctgtacacagtgcaatggtatcacgtactgcataatgtgtctagttgaaagcagaagaaaaagtgaaaaccaaaaaaactttcttttcataatcatacacccaactgatttcagaaacaaatttagtttatgttttagtaagaggctytggcagaataaacaaatattaacatttcccactaataagttttatggtattattatgaaaatatattacaaataattagaaagataacctgccgcaaggagggtttcaaagacaattaaaaacctaaaagctcttcttgacatggaca

SEQ ID NO: 535554 - DNA, 258 bp, Homo sapiens
gtggcaaaagagaaacaattttctggggtaagtatatgggattttgcaagcaggagagggtagaagaaaagggatgaagaggctggcccttgaatggtttggggtttacattcaggactttttttttttcaggaagggagaattcactaagttcactgttttgtaaggcaactgstttcactgttgatcaacaatcctggagagtaatggtagccatcataaacatgccaatgacattaattcatagtaattatatat

SEQ ID NO: 535555 - DNA, 647 bp, Homo sapiens
cagttttactgtctttacttgtacagattccactcaaaactgtcagcctcatgggctacttggtaaatagagcagaatatcctaatgcagtatgtaatgcctccaaagttcaaagaggcaaccgagtgttgtgacattctcttagcgatggaatgtacaaaataaagcaacatgcatttcattgtggacctgaaaggaacagttcaaacattagatacctaaaattttgttgtggttacagctccctgaatttcctggtagtttatcatctgcactctggaatacacatttcttaacaaggtattgaggatacacacatgctacttcctgctcactaggtccyattagtgagatgtcataaatatggtgagccattgtgattttcatagacaccatgctgttgttcagtgtttattcaaccttcaacaaagacagaagtgtaagacaattcccttttctgacctagatccaggaggaagacaatatttattttggttttggatggtcattaggcatttgttttgtgttccctgggctattcttttgggttttgagatcactgattttgctagaaaataagagtaataaagttttttgttgaacgtcgccactttattttaaccatgcactgaagaattaatagcatt

SEQ ID NO: 535556 - DNA, 523 bp, Homo sapiens
acttgtatcaactaagtctagttttagtaactttaaaaataaacattataacatttatttgctaatgaaatcctaaatatttgatacattgtgagtacatgaaaattaataaaatatgaaaataggaaagagttgagagaaaggttagtctattccaaattatctgcacaattggagtaggtgatgaaacaatcctaactagacaataatacagaaaccgattattttgatattcgttaaatttttaaactttcttgtgawtatggtctggtggtctgggatcattcaacctttggaaccaaagagaagcatgggaaaggtgtccagcttcccccgttccacacctgcatgcagaatcattgtggcactgtgctttgttctccaattcatcaagtactcacatttgtggttgcttccccaccacatttgcaatgggtctttcagcccacaccagtgcttacctgtactattgcttttcaagttggcctcatctctcactgagagcttcttttctaccagcagc

SEQ ID NO: 535557 - DNA, 642 bp, Homo sapiens
tataaataagattgcacacactctttttagattgagtaaagtacagaattgcataaacatgtcttttaaaaattmttgtcttaaatatgtttctaattgtgcgatactcctgtgcttacagtatttagaccacatgtttaaatcagagtttttagtaagggattacagcacttctattccaaagagtgctggctttcttctttcctttctttataaagcttgccactgtttgacacaggctgaatctttgatgtacatataaggtttgatttttactttaatgttttagtttatgatctattttgtacattgaggatgacattctggggttgaaaaaatggtgaagttatttctagaaagaaaaaaagatccttcaccctggagcagccatttggaaattatttaatcacactaagagtaaccttaaaaacattaggttattttcaaatgatattcccagaggtgagcagccaaattctcactaagaataagttcatctagcattgacgttgcttcagtatcaaaagcacaaagtactactgagccatgacagtttcgtttaaccaatgattttagagaaatctgggtggttttccatgtgttgcctggtgctgggcaggttggctgttgcatgtttgtaag

SEQ ID NO: 535558 - DNA, 553 bp, Homo sapiens
ttttgaattatctatctgaaaagtcacatatctctgtttctccartattggtccctggtgccttatgttgtttgtttggtgaaatcatgatttcctagatgatcttgatgctggtagatatttgtcagtgtttgggcattgaagagttaggtatttattgtcatcgtctcagtctaggcttgcatctgtccttcttgggaaggtttttcaggttgaataaatgtttataaagagaataaggctctaatttttaaaagcaacattgtacatggattggaattagactgcacaatataggacacagaacagtgcattttatcattcatttgttctgtgtcaaacactagaataaataaaactgatgacatctctgctttcattaagctagcaattctactgtgagtgttagaaagagagggaacatatataaataagtaggttaacatgtaacattccaaatgataatgagtgttatagttaaaaaagaaatcaggtgaggtaggtcagaaagtacggtggtggagactgctatcttatatacagtgattataga

SEQ ID NO: 535559 - DNA, 553 bp, Homo sapiens
ttttgaattatctatctgaaaagtcacatatctctgtttctccagtattggtccctggtgccttatgttgtttgtttggtgaaatcatgatttcctagatgatcttgatgctggtagatatttgtcagtgtttgggcattgaagagttaggtatttattgtcatcgtctcagtctaggcttgcatctgtccttcttgggaaggtttttcaggttgaataaatgtttataaagagaataaggctctaatttttaaaagcaacattgtacatggattggaattagactgcacaatataggacacagaacagtgcattttatcattcatttgttctgtgtcaaacactagaataaataaaactgatgacatctctgctttcattragctagcaattctactgtgagtgttagaaagagagggaacatatataaataagtaggttaacatgtaacattccaaatgataatgagtgttatagttaaaaaagaaatcaggtgaggtaggtcagaaagtacggtggtggagactgctatcttatatacagtgattataga

SEQ ID NO: 535560 - DNA, 655 bp, Homo sapiens
tgggatggtgaacatatccacatactaagagggtggcacactcccaactccatgtggacacagaagcttttgtgctcaggacgcttccagacctagtcctatgtacatcttcatctggcttttcatctgtatcgtctatcatattttataataaaccagtaaatataagtaagtgtttccctgagttacatgggtgatcacagaaaattatcaaacccaaggaggggtgtcatcaaaattactgatttttagcaaattcaaacatcaatgtgggtaatatggggccccctgcttgggattagcatcagaaatggggggcagtcttatgggtctgagctcataatctgtggtgtctgcactaattccagctggttattgtcataaatgaattgtagggcacacaattggtagctggagaattgttctgtcatatggaaaacagcgacacatttggtgccagaagtgttgagagttaaaaaaaacaaaaacaaaaacagtaaatttttcctatttaaagtggctaggacactggggttcccctcagtaaacgtcctctgtcagcaaccacctatcatctytagaacagaaaaattaactccgaatcctaaccgtagagtggatcaatctgccccagttggcttatcttaaatggatg

SEQ ID NO: 535561 - DNA, 389 bp, Homo sapiens
gagggagcccagcccgacacgtgacagctctcctgggcccagagaacagtgtggcagcatttaaagcagcaaagagacccgccgtctgcacctgacggggaaaacgcgctgtgcctctcctcagagacagacaggtctgcctgtttccatgccaccatcaggggagtgagcacggggaataatcagccaggcagcctcactcagcctcacctcggctccggagatcgttctggagctgagtggtgacgtcagcagcagggctgagcacaaacaacaaggccaggcgccaagacgaccaggcgagggsggcccgggggacagcaccactgcacggtgccctgaagggggagcaggtgccacggcacttccccgagaccgcatgcgggggc

SEQ ID NO: 535562 - DNA, 566 bp, Homo sapiens
ccctccaaacctaccccctctgagcctcatcctccctgcaatgccgtggttggaaggcaggaccccagggagggagccacaggctgtggccacctcttccaggcaccctggactccctgcctgacccctgccctacctatagacccagccgtcctcagggccacaaaggggcaaagacagctctggagctgccatcaacctgctgtgactttggccaagcccctcccctggctggccttcagttcccatatcaaatgaccacacaaccagaaacaatgggggcaggttaaaaaaaaaagtggggagggggctcccatgagagcttggccactgggcctacccagattggcagacagaaggctgcctttcccccagtggccactcagagccaggccagctctgcccagcttcctgccccacatgcctatgggccycagcaagaccccagggcccgaactagtccgtccctactccacgaggctgctccaacctaggcctgcagtgccagaaggctgaacactggaggagagcacactccaggggccccacacccccagggctggcag

SEQ ID NO: 535563 - DNA, 568 bp, Homo sapiens
tgcgaagatgatgccgaaggtgatgcactcctacccagtgctgggagggggtgtgcccctgggagaggtgccttgcgcaggaggaaggaggctggcaacattcctccaggggccaattatgtctctgatgatggctgctggctcacaagctgcccaggcccagcagtgggggcacagcttctcactggggccctcataccttcccatgctgacttgatgcaatgccagcctacccaggcaggtacccttggaatcttctctccagacacagatggaaaacagccaaggtgggcactgaggacccctggcccaatctggcactgcaccaagctcccgtccctgtgccggctgaactatcctacctgatgctcttcgcagacttgtctccaggcttggcaggctgaccygccccccacctctctctggatcctctcagtcctctgcctacagacccaccactaccacttcagccaaacaagtcgtggaagcaccagcagtgaaggcccaggatgctggccagagagaacgccctgctgcccaaggctggggcccccgagggcctgtgctg

SEQ ID NO: 535564 - DNA, 578 bp, Homo sapiens
ctgcacacccctcccgctcctggccctgtctgccttcttccctgaggctccaagggaagtctccaccctcctcctgctgagtcaggccttagatcctggtgagaagttctagcagccctgcctggcactggccacagctcccctcccgtcccccatgcccaggacccagcttgtccctagagtgaactgagcgaggtgttgaactctccccagcaggcagcccaggggcagagtcagagaaaatgggggctgagagcggctatggtgcacccctctcccagcaccagcacagacacacatacacacccagccacacaccagacgaagagcacayttcaccccagcaaggtcctgctggggcaggcaaggagggcacatgtgaagaccttagccccccaccactccgcccccacctctcagcaggaaaagcaccccagaaaacccaaccgctccacttacgttctacaaaacctacataaaatttaaggatacaatggagtggttttgttgtagtcacaaggctggaaaccatctccactgtcttattttagagcattctgtctgttgcagtcaaatgc

SEQ ID NO: 535565 - DNA, 475 bp, Homo sapiens
gctctcaacgaagagctgttcttcatgaagaagaaccataaaggggaagtaaaaggcctacaagcccagattgccagctctgggttgaccatggaggcagatgcccccaaatctcaggacagcaagatcatggcagacatctcggcccaatacaatgagctggcttgaaagaatcgacaggagctagacaagtactggtctcagcagattgaggagggcaccacagtggtcaccacgcagtctgctgaggctggagaggctaagatgacgctcacagagctgagacatacagtccagtccttaaagattgacctggactcagtgagaaatgtgaaggccagtttgtagaacagactgagggaggtggaggccctctacttcctgcagatggagcagctwaacgggatcctgctgcaactgcagtcagagctggcacagacccgggcagaggggcaacgccaggcccaggagtgag

SEQ ID NO: 535566 - DNA, 651 bp, Homo sapiens
atttgtaagtgaatgggaggtgaaagtggaggcaacaataataggtagacttaaaaaacttggctttgaaaaagagagaaatgactaagagctagaagagaagagtgggcgagtggaagttgtttttagattagagatgataatatttatattttgccaggaaagatcaagtagaggggaagcttggagtaaaggagatagagaggataacgaatagagtaacagtttcytgaggcgtaggcagaggtcagatggagggattagttttgaactagagaaaatgtcctgagaggagagaaagaagggatagaattagactgagagtttttaggtgttgttgatggagctcagggagttccgacctgatagctttaattttctcataaagtagaaagatgatttactgaagttgcaggtgatgaaggtgttgagggtttaaggaaaaaaagagaatgcgtgagagagctgttgagaagaatgacagaaggaacaggttagcagcagcttgagggtcacctaaagttggagcaaatgaatctatataattgcttgtagccacctggatgcagaaggcaggaagtcgatatgcagggatgggatgtcatagaatggtggaaaaacaaggacaaggaggagtagggctgggagcag

SEQ ID NO: 535567 - DNA, 615 bp, Homo sapiens
tgctccctgcaaagatgtgaaaggggtgagtgatgtcggctgggaggcgatgtcactgagtcctgaagaacccatcaggagatagagggggcaggcccagagtcaggagagcctggctctgtggtccacgtgggagtggggccagcaaggggtggagcaccctcaggaccgcacagagcagggccccccaccagccccgtacagctckagtggggctggtctgcaggctcttgggggtacagtaggaagttgtcccagtacagcctgtctcactcatggccatgcccattcaactccacacctcccatactggcgccctctgggttagctcacagagacgtgggaactggggactccttgtacccccaacccaactggggcaggggctcagagctccaagccacaccctattggaaggggaaagctagggggacacccagaagctatagaggaggaaggagccaccacatccagccccaaccaacagtcgcaaaaggcccctctgcctgtaccagccgccccacgccatccctccgggcagcctgtgccacaggcctcccccgacccaaaatggagggcctgcgcccgcagggataaagcccaaacatcaaggag

SEQ ID NO: 535568 - DNA, 521 bp, Homo sapiens
attcatcaaactgtggcaggaagaattcaatagagcttttctaagtaaacaatactaattacccagactttcatgggctcttcatcaaagaactatttcttcctagctgaaaaaagataaactgatttctacaaacccagacaggtgctaactttctgttcctggccrcctcattataagacgctgtctctggccgggcgcggtggctcacgcctgtaatcccagcactttgagaggccgaggcgggtggatcatgaggtcaggagatcaagaccatcctggctaacatggtgaaaccccatctctaataaaaatacaaaaaaaaattagccaggcctggtggcgggcgcctgtagtcccagctacttggggggctgaggcaggagaatggcgtgaacctgggaggcggagcttgcagagagccgaggtcgtgccactgcactccaggctgggcgacagagcgagactctgtctcaataaaaaaaaataaaagaggctgtctctgagcattcactgagcag

SEQ ID NO: 535569 - DNA, 654 bp, Homo sapiens
ccccttgtgccagaggcgatgagcaccgggcctcctggcagcggctgggttccgcggcagcacgggccgctcccctgagcctgggaaggaggacacagagactgcccaggagcagcgctgagggggccctggcgccggggactgtggccccgacaaccccccagaagtcgcagtggcgtcggctcttctcccttgctctactgcggctggtggagggggcgggactgtcgacctgattcatccaagacacaatttgaggatgctggtgctgcgccggccggacgcactcctccggaactccgggagccggggaggccggagggaggggtgttccccgcagctcgcagaggtcagcacagccccagcccagactggaggaactgaccgcggcgttcctaccatttatatgtcagggagcggcgggaacctgcaggtgggaccgcatgattcctgctgaaggactcatctgaggcgagtctctaggaggctgggcgtcctctgcacaaccccgtcwtgagagcaattgggtttgccccctgcctgccaggacagcgccctcagcacccctgttggcagggccgcggtccagggcagacggccctcacctcccagggccttgcaggcagcaccttgtgctaaagttggcctaagcag

SEQ ID NO: 535570 - DNA, 602 bp, Homo sapiens
ctcgtgaggagcctgacatgtctcagtgggtcccagtggaggcccacagaggctgcagacggggaggtcaagatgctgtggcgtcttaaggacaacggctggcaggtcggggatccctcaggaaggggtgtcagccgtgggcccagcctacggggctgcattagggcacgtggggagcctggtcggacaggtgtggrtggggtcactggtggcctggttcatggcaggggcaggtgatggagagaaaggagtggacgggacaggcagggaagggggttagcagaagaggtcgggtgcctctgacctgcgggccgcagccactccgctatgacaggagccccgaaccctgacatgctctagtcctgcgtggaagcaactactgcaggcggagaggtgtaggcccatcctggtgatcagggaacctgcaatccggtgggatggtcccgcccccgggcagaggcaggtgactggccccagagcctgtgaggaacagtggcctctaggtggcaggagtgagccacggacgggtgggcctcacttcaccaccaccccacccccaagccccagggaggtccaggtggttcccagcaagagccacagct

SEQ ID NO: 535571 - DNA, 583 bp, Homo sapiens
aggcgtagatggctcgtgcacactccagggcattgtgggctacacactagagcagagagagacatgagaatgggcagcccagcactggccacagaacaagtggcatgatgccctccccaggctcatacgattctgaaagatgatatctgctagaaggtgtaccacagtgttttatctaattagaaccacaatccaggccaggtgcggtggctcacgcctgtaatctcagcactttgggaggccgaggcgggtggatcatctgaagtcaggagttcgagaccagcctaacttacatagtgaaaacctatctctactaaaaatacaaaaattaaccagacgtggtggcatgcgcctgtaatcccggctattcggcagtctgaggcaggagattcacttgaacccagaaggcaaaggttgcagtgagccgagatcacgccactgcactccagcctgggcgacagagtcacactctgtcctccccctccagaaaraaagtagaaccacaatccaggactgggaaacctacttctgggcacagaaaacactgtagttcttactccagcattacaagcactttgaaaaa

SEQ ID NO: 535572 - DNA, 621 bp, Homo sapiens
ctgctctgacaccccgactcttgcccagtgcccctaaaagtgggcacagcccttgataacaccctaggtacatgcccaccacagcacaacaccccagaatttgagaacagcttccacatcaccagggccctgggagcacctacagaagccccgctcgccgcagatgacccgaccccgactgtccacagcacatctgctacccgaagcccagcatcaccctgtgcattcagcactcccacccccaccagccccctgtggccctcgacccagagaagcccctacccctctcggtcctgctggcccttagcaccgagtagaagagaccctgacaccacacgaygactgacacctgacaccacacgacgactggcacatcaccccttagactacaaaagcaccccactcacaccgcacaccccagcctgcaggccccagcacagccccctgcacccacaccttcagacccttccccactcgcaccgcaaccccagctctgcatgcaactctcgggtccgctggactgcggcaaatcgtcaggtgaaccctaaccccacacctaacagttgagaggcgccgcccaggtgagcaggagcatgtgcacctctcatgcctgctcatgcc

SEQ ID NO: 535573 - DNA, 501 bp, Homo sapiens
tatggagaggttaggtcacttgttcaaggacaccaagccagtcagggtgccactggacctaagacaaggtaacctggctctgagaccaaccccacagagaagtatgtggatgctgacaacactgtaggaagttacaaggagcaaaagaatagcagcctcagccctgaattccactgtaagcttccctctaatcttccctgcctcactctcaatcaaataaagagctgatcaggaagcaactatgcamggtcttcccctccacacctccagccccagctcccttccccagactcagtgccagcctgtgccagcccccaagatggcagtgtggagccatgcactaggtctgctgcgcacccagcagtcggctgtgggttctttgcatctgtcagagtcctggcaggaaatggtttcattctcaaagggttaactaggaagaatttagtgaagggtctgtttacaaggttcaggaactaactgaaaatggtgaagcccccaggg

SEQ ID NO: 535574 - DNA, 501 bp, Homo sapiens
tatggagaggttaggtcacttgttcaaggacaccaagccagtcagggtgccactggacctaagacaaggtaacctggctctgagaccaaccccacagagaagtatgtggatgctgacaacactgtaggaagttacaaggagcaaaagaatagcagcctcagccctgaattccactgtaagcttccctctaatcttccctgcctcactctcaatcaaataaagagctgatcaggaagcaactatgcacggtcttcccctccacacctccagccccagctcccttccccagactcagtgccagcctgtgccagcccccaagatggcagtgtggagccatgcactaggtctgcygcgcacccagcagtcggctgtgggttctttgcatctgtcagagtcctggcaggaaatggtttcattctcaaagggttaactaggaagaatttagtgaagggtctgtttacaaggttcaggaactaactgaaaatggtgaagcccccaggg

SEQ ID NO: 535575 - DNA, 501 bp, Homo sapiens
tatggagaggttaggtcacttgttcaaggacaccaagccagtcagggtgccactggacctaagacaaggtaacctggctctgagaccaaccccacagagaagtatgtggatgctgacaacactgtaggaagttacaaggagcaaaagaatagcagcctcagccctgaattccactgtaagcttccctctaatcttccctgcctcactctcaatcaaataaagagctgatcaggaagcaactatgcacggtcttcccctccacacctccagccccagctcccttccccagactcagtgccagcctgtgccagcccccaagatggcagtgtggagccatgcactaggtctgctgcgcacccagcagtcggctgtgggttctttgyatctgtcagagtcctggcaggaaatggtttcattctcaaagggttaactaggaagaatttagtgaagggtctgtttacaaggttcaggaactaactgaaaatggtgaagcccccaggg

SEQ ID NO: 535576 - DNA, 501 bp, Homo sapiens
tatggagaggttaggtcacttgttcaaggacaccaagccagtcagggtgccactggacctaagacaaggtaacctggctctgagaccaaccccacagagaagtatgtggatgctgacaacactgtaggaagttacaaggagcaaaagaatagcagcctcagccctgaattccactgtaagcttccctctaatcttccctgcctcactctcaatcaaataaagagctgatcaggaagcaactatgcacggtcttcccctccacacctccagccccagctcccttccccagactcagtgccagcctgtgccagcccccaagatggcagtgtggagccatgcactaggtctgctgcgcacccagcagtcggctgtgggttctttgcatctgtcagagtcctggcaggaaatggtttcattctcaaagggttaactaggaagaatttagtgaagggtcwgtttacaaggttcaggaactaactgaaaatggtgaagcccccaggg

SEQ ID NO: 535577 - DNA, 612 bp, Homo sapiens
tccatattcagacaagttagagaaccaatgccctcagccctgagagtgagggctggtctcataatccattcacacagatggaagtgcatcctcacaggggtcaggcctcacacaacatcgggcatgttggtaggcatatgcctaagtttctgtgcaatgaatgcatgccttactggtgatgcgtcaatagcaaggcattcaggggagagagtaccctgcctcagtgcctagcatgagacatgtatccaggaccatgtttttattcccatctgatggatgagaaaactgaggttcagaaagggtaggcaaaatcccctagctcacctggctggaagggggcagaacttccctgtacgtgctgagaacaccactgttcgagcagaggggaaacctctgcaaatttcactctgtgttcagtgggtgacttgccaaaatgacttgccaaagccctttagggccaataaattagagtgtttgcatcaaatttccatgcacaagagccaactcaaaaccttagatccaattccattggttcycatagctctgaagtggacagatgctagtaataaatcctacaggctgatggcaggactttgatatataatattaact

SEQ ID NO: 535578 - DNA, 422 bp, Homo sapiens
ccagatatccagggtttctggctgagttagcctgcagaagcaattgtgccgattaagtgatgttgaaccacgagaaagtgtcttcccacttagcaaatcaagggtccgtgggatggagagagaggagggaatagagtttgtcacttgggctrtactgaccccagtggtgatgtcttccctttgatgggtggtgttgggacagcaaggcagtcatcatttagcccactagtgctaaggcggaaggcatccgcagtgtgtggtctggcatccccaggcaaagacgagaggatgggccctgcagagtgttttgggttagaaacaagctgagtgaactgagtgtttcttcagggagcgcactacagatgagccgacaaatccacgacagtggggagtgaggggaggcagggacacaaatccacagc

SEQ ID NO: 535579 - DNA, 549 bp, Homo sapiens
agactttgtgtgtaactccactagcctaccagggtgcctctcataaaggtaagaaatgtaaatttgggctaatatacaaagttgccagggcagcactgggtcaattctacatacagtacttctatgttcatcaagggaaaccttaagggaaagtgaaaatgcttctagaaggcgactggacaccagcgcctttgcttgttgcctttgggctcttcttctaaggccaacagtgacctgagattattgactggcttttccaatcaagtggacaaaatggtaccaaggtcgccaacatcaaacaaattcacttgagggccttatctatgtcctttgaaagacaaaactgcttttgtaaaggacactgtawttcagaaaaacataatcatattaacaaataataacactgtaaaatgctgatgtattgaatgctactttagaaaaacatgctcaaatctagggaaaaaatttgatacaaaactccgtatcaattatctagctagctagctagctagctagctagagacatgctttcattctattgctcaggat

SEQ ID NO: 535580 - DNA, 627 bp, Homo sapiens
atgtctttgttatgtgaaacagattctttgaaagagataatgaactgtctccttgaaagctggatgttgggtgcttcaggaagaatgctatgaagaaccacgtcgggtttatgagctgactgagctctccacttgttttaaagaggtgaaacccagggctgccaatagaactctggtgacctccacatcagagctacgtgaccagtgagctgcctcccaaggtatttgttacaacacttgtctctgagcwaggccaaataaaatggagtaaaaaaccaccccttggactaacagagcatgaccatggaaatttctcaggacaaacagtggctggagtgtagcaaggcagaaagcagcatggtcttaacctgacacttagagataaaacaataaaaagtgtagggggctcctatgccaatttgcaataatgagcaagggtagtgacagttggatttttcttgaatgagaaaaatttccatcaaatttgaaacgaaataaacacacaaagtctctgtgctatttccgtggtaatgtttgcacccaagtctctggagctctggcttctcacttgcttttccatagtgtctactcggtgatgaaaagcagcatttcatggccaagactttc

SEQ ID NO: 535581 - DNA, 627 bp, Homo sapiens
atgtctttgttatgtgaaacagattctttgaaagagataatgaactgtctccttgaaagctggatgttgggtgcttcaggaagaatgctatgaagaaccacgtcgggtttatgagctgactgagctctccacttgttttaaagaggtgaaacccagggctgccaatagaactctggtgacctccacatcagagctacgtgaccagtgagctgcctcccaaggtatttgttacaacacttgtctctgagcaaggccaaataaaatggagtaaaaaaccaccccttggactaacagagcatgaccatggaaatttctcaggacaaacagtggctggagtgtagcaaggcagaaagcagcatggtcttaacctgacacttagagataaaacaataaaaagtgtagggggctcctatgccaatttgcaataatgagcaagggtagtgacagttggatttttcttgaatgagaaaaatttccatcaaatttgaaacgaaataaacacacaaagtctctgtgctatttccrtggtaatgtttgcacccaagtctctggagctctggcttctcacttgcttttccatagtgtctactcggtgatgaaaagcagcatttcatggccaagactttc

SEQ ID NO: 535582 - DNA, 190 bp, Homo sapiens
catgaaagacttctgaatccaggaagagagactgactgggcaacatgttattcaggwacaaaaagatttggactgtaacttaaaaatgatcaaataatagtgcatgcatcaagtgcaatgggaagctcttctggagagtgagagaagcttccagttaaggtgacattgaagccaagtcctgaaagatgag

SEQ ID NO: 535583 - DNA, 190 bp, Homo sapiens
catgaaagacttctgaatccaggaagagagactgactgggcaacatgttattcaggaacaaaaagatttggactgtaasttaaaaatgatcaaataatagtgcatgcatcaagtgcaatgggaagctcttctggagagtgagagaagcttccagttaaggtgacattgaagccaagtcctgaaagatgag

SEQ ID NO: 535584 - DNA, 460 bp, Homo sapiens
  misc_feature (1)...(460): n = A,T,C or G
gtgtgagcaatggagtaacacaggacaactggaactcttcagagtttctgtttccacagggtgcacatgcttgctttaaatctaacaaatgtgtaaaatctgtgatgctcgagggagcgtcactacaagaaaggatacaacaatttgcagacttgggaatgagtgtctggaattggcattgggaccgactacagctctgccagacacacccagaagtgggtratggtttcttcagtgatcaaaactcccaaacgaagccaggcagttaaaatcagcacagatggattgcgaaatgggttcctctacaacatggttagtgcctaataataaaacaatcaaaccatacatagtacaaacgtgtctgacagtgggagaggacacaacaagggcacgaaaatgtgaattagattctgccanaataagacccccagaaaaagcctggggcttgactattctagcc

SEQ ID NO: 535585 - DNA, 589 bp, Homo sapiens
aaggtaaagactcaagctggtgaacttgatggaaatgtgtaatagtgcttacctgacaagtgcttcttcccttcaggccttcagttagctgacactgctgttgctccccatcattttacctgacttgtcttctcttgtgaccagtgcactcagatggtacccttttgagcccccaaagggactggttaatgttacaaagaacaactctggtccttggcatatgggcgtgaattgatgaaggccatcctcatgacaggcccaaagactacacttaaacttgcaatggacaagcgttgggaatgccaccttgttataggaacaaggcaacattggcacctccagctcttgttcctacagagagcaatgttgttctraagtccaagtttccctttggtttggtatgagagacacccgatttaccaaatgacaacacaatccactgagtatgccaggttattgttcttatgcctaaggcttcaactgcacagcctctaaataatagtaagaagtagcttttccttatcatgatataaggaaggttttcaagttacgtggaccctgcagaatcaaatgttgatagaactcacta

SEQ ID NO: 535586 - DNA, 540 bp, Homo sapiens
ccaaaacagcatggtactggtacaaaagtagacacaaagaccaatggaacaaaatagagagcccggaaataaatgcatacacctacaaccttctttaatttgataccaaataaaagtggacccacaggaagaaataaagaccgtcagatgcatacatacacgcatataaacatatgtgtacgtatatacacatatacacagaatatcttttaaatgttattttcttaatttaattaaacaatatatgactgtttaaagaaaaacatcaarctctattgttgggctcattaaatatatgtttatatataatatataatacatattatataaatatattatgtatatttatatatttatattatatataatataaaatatataaaatatcaccaataatagtaaggatatgaaaaaggggaaacagaaatatactgttgcaaggttgctatattttacctgaaataatttaacataaacttaaagaaggtttaaaaccagttaaactgcatattgtaatccctaaagcaaccactaaaaagt

SEQ ID NO: 535587 - DNA, 540 bp, Homo sapiens
ccaaaacagcatggtactggtacaaaagtagacacaaagaccaatggaacaaaatagagagcccggaaataaatgcatacacctacaaccttctttaatttgataccaaataaaagtggacccacaggaagaaataaagaccgtcagatgcatacatacacgcatataaacatatgtgtacgtatatacacatatacacagaatatcttttaaatgttattttcttaatttaattaaacaatatatgactgtttaaagaaaaacatcaagctctattgttgggctcattaaatatatgtttatatayaatatataatacatattatataaatatattatgtatatttatatatttatattatatataatataaaatatataaaatatcaccaataatagtaaggatatgaaaaaggggaaacagaaatatactgttgcaaggttgctatattttacctgaaataatttaacataaacttaaagaaggtttaaaaccagttaaactgcatattgtaatccctaaagcaaccactaaaaagt

SEQ ID NO: 535588 - DNA, 540 bp, Homo sapiens
ccaaaacagcatggtactggtacaaaagtagacacaaagaccaatggaacaaaatagagagcccggaaataaatgcatacacctacaaccttctttaatttgataccaaataaaagtggacccacaggaagaaataaagaccgtcagatgcatacatacacgcatataaacatatgtgtacgtatatacacatatacacagaatatcttttaaatgttattttcttaatttaattaaacaatatatgactgtttaaagaaaaacatcaagctctattgttgggctcattaaatatatgtttatatataatatatawtacatattatataaatatattatgtatatttatatatttatattatatataatataaaatatataaaatatcaccaataatagtaaggatatgaaaaaggggaaacagaaatatactgttgcaaggttgctatattttacctgaaataatttaacataaacttaaagaaggtttaaaaccagttaaactgcatattgtaatccctaaagcaaccactaaaaagt

SEQ ID NO: 535589 - DNA, 540 bp, Homo sapiens
ccaaaacagcatggtactggtacaaaagtagacacaaagaccaatggaacaaaatagagagcccggaaataaatgcatacacctacaaccttctttaatttgataccaaataaaagtggacccacaggaagaaataaagaccgtcagatgcatacatacacgcatataaacatatgtgtacgtatatacacatatacacagaatatcttttaaatgttattttcttaatttaattaaacaatatatgactgtttaaagaaaaacatcaagctctattgttgggctcattaaatatatgtttatatataatatataatacatattatataaatatattatgtatatttatatatttatattatatataatataaaatatataaaatatcaccaataatagtaaggatatgaaaaaggggaaacagaaatatactgttgcaaggttgctatattttacctgaaataatttaacataaacttaaagaagktttaaaaccagttaaactgcatattgtaatccctaaagcaaccactaaaaagt

SEQ ID NO: 535590 - DNA, 555 bp, Homo sapiens
ctgctgcgggtaactttctgggcttcagacaattctgttgagatctgcatggatgttggtggaagagctggctccacccggctgactcagttttaggckacttatacgtcatctctggtctcctgcagtctctgccctttcctccaagtgccttcaagggctgcaccttaatctccctcaagctacaatgaagggacaggaagtgcacacgcagagttgccttcacctcactttacattcctttccgccacaccttcttgccacacacagagctttcaggccttcactggacctcacgtgctcatctgtctcatttcctgttaccctgctttccttcctgcccctctcatacacacaggcactccacaacttcactttcttcaccccaggcttggatgcctggattcatcactccaacttcccctttggcaatgccatcaacttccttgaatattttccctttctctactgtcactcatcagtaattcaaccagcattaaattcctctatacgctttctctgccctgctaatgggcccttgaatacagctatagc

SEQ ID NO: 535591 - DNA, 555 bp, Homo sapiens
ctgctgcgggtaactttctgggcttcagacaattctgttgagatctgcatggatgttggtggaagagctggctccacccggctgactcagttttaggcgacttatacgtcatctctggtctcctgcagtctctgccctttcctccaagtgccttcaagggctgcaccttaatctccctcaagctacaatgaagggacaggaagtgcacacgcagagttgccttcacctcactttacattcctttccgccacaccttcttgccacacacagagctttcaggccttcactgsacctcacgtgctcatctgtctcatttcctgttaccctgctttccttcctgcccctctcatacacacaggcactccacaacttcactttcttcaccccaggcttggatgcctggattcatcactccaacttcccctttggcaatgccatcaacttccttgaatattttccctttctctactgtcactcatcagtaattcaaccagcattaaattcctctatacgctttctctgccctgctaatgggcccttgaatacagctatagc

SEQ ID NO: 535592 - DNA, 625 bp, Homo sapiens
tccacccacaggcaaggggaaacattcttgtatgcctgcctccctcctggctggtatccctggaagtgctcctttccctggtgtctgtcttatttttccatctgccctcctgggttttccttgccaacttcctggtcacctggccattccccttctctccatccctaccaggtccagaaagcccaattggatgggtcaaggaaaggcttaagtcacaaaaaagccagactcataggatcttaggattggaaggagcctttggctgatctggttcatccaagccccacttccctccttatcagctatgcttgtgcacctctgcagcaaccccacaagggacagtagaccctggtctcatgctgaccacattcacaacctgtgccctgatcgaggtcgcagccagcttgccactgcctccctgtgcccagctttctcctagctctttagatttatttaagaaataaagaaaactaagataaataaaaaacaygtgcatgagcccaagcgatggccaaacttttaaataaagctagagaactagaagcacctgccaggcacctgccttgattaccccgggagcctggtaagaaggaggacagctcccagcacctggtcccactattgc

SEQ ID NO: 535593 - DNA, 625 bp, Homo sapiens
tccacccacaggcaaggggaaacattcttgtatgcctgcctccctcctggctggtatccctggaagtgctcctttccctggtgtctgtcttatttttccatctgccctcctgggttttccttgccaacttcctggtcacctggccattccccttctctccatccctaccaggtccagaaagcccaattggatgggtcaaggaaaggcttaagtcacaaaaaagccagactcataggatcttaggattggaaggagcctttggctgatctggttcatccaagccccacttccctccttatcagctatgcttgtgcacctctgcagcaaccccacaagggacagtagaccctggtctcatgctgaccacattcacaacctgtgccctgatcgaggtcgcagccagcttgccactgcctccctgtgcccagctttctcctagctctttagatttatttaagaaataaagaaaactaagataaataaaaaacatgtgcatgagcccaagcgatggccaaacttttaaataaagytagagaactagaagcacctgccaggcacctgccttgattaccccgggagcctggtaagaaggaggacagctcccagcacctggtcccactattgc

SEQ ID NO: 535594 - DNA, 525 bp, Homo sapiens
ggggccagtgtccaagaaacaagctacccttgaccagtgtgctgcagctacagtgccccaggggctgcttcagatgaaaatcagtctgctcacaaaatggggataagagtttcgaaaacaaaggtgagggaggagaaagacgaaggggtttccttttcggcagcatgtcatagttccctcaaggcaggtcatgtcggtctcggattcccagcacacagggtgcctgcccagcaccttcacccagtaagaatccctgcccaagtgctcaaacatctctagtgacaggaaacttcttttcaaaataccccaaccatctttggacagtcttaattcctcaaaaggcttcttagtcgctaaagtgaaagacacctgcccatagccttccccatgggtctccctctgggaccacacaggctcccactgcccagggaagtcctgcagggattgggaattgggggctagaaccccctaggwctgctctccttcaggatggacacccttaggtgccctttggtgccctagtct

SEQ ID NO: 535595 - DNA, 454 bp, Homo sapiens
tgcctagagcccacagtaatttcagaagttcaaaaaatattttaatgttttacaatccgaagacaaaaatgaattttaaattaaaaaatattttaatatatgctataaatatatttatctctataccaaggcagttgtgaaatacaatgttcaattttttttttatagaggaagacatccatggaagcaaaattgcccaaggcctaygaaagtcacaatgtgccccagcttagagacaggaatgtcaatgaaagttgtaatcagggaagagaaggcatactttgagaaaaaaggagccttggcctgagaattgggaagaaagggagggtcctcaaagaaaactgaaaaggaatagtcaagagaaaggggaaaagtaaaaattctccatccctggaaccaagccaataagtgttataagaatgaacattcaattttcctggataaaatgcaacat

SEQ ID NO: 535596 - DNA, 482 bp, Homo sapiens
taataaatgtaaaggacatagctctttgtcaaataaatagtagccactcaataaacactattatttagtgtttattacacttgaaaccaaagtacagcatctcacttttgcctagttttcacatcttcattcagcatatatccaaatgcatatgtattcaatttatataatgaatcaagcactgagcattataccaagtactatgtatttttcagaagataacctgctgtcaaaatgaataacaataacaataaaaatagtgagagagggagagaaaaggaaaaagagaacagcctatataatattctattgtttttcactacaaggtctcaaatttaaaattaarttttcacaaaatattatagagaatagttttaaacctctatcttaaaaataaagatactaaccctaaaaggggctaggttactttctagggtcatacagcatgaaaacaactccaggtaaatctttacttatggcca

SEQ ID NO: 535597 - DNA, 631 bp, Homo sapiens
cagtcatcacttggttacctctatgtttattaatgtccttaagggatggtcagaattcagttcaaacaaaaaaaaaaaaatcaagaaatccagagacgacacataaaagcctcgaataatagagaaacagatcttatycctaaattaaaggaaaaatattaatgtaaaaatcatgggaaattgtaaatctcaactcaaggggattgttttgaaatctgataaataaagtatcaactgcatgtagaccataaatataagagaattgacaaaattcttgaaaaagggttgaatcacaacttgaattatatattactatccttactttatagatgtagaaagtttgatttagagatgttaagctgccaaatgtaatatgcttaggaaatgacaaaataaataggaagttatatctataaaattctaaaatctatgctcttttaactatgtcatagcttcttctgatgacatctaatgagatttaataatatacagaaattttctttcttggaagcttggattaactggcataggtaaacacagcagtgtaaaattaaggatgctcttcttggaaaataaaatgcatgttacttattttcaagtatacaaagtataaggaataaaatatgtagag

SEQ ID NO: 535598 - DNA, 598 bp, Homo sapiens
tattgagatttagaaattctggacagtttttttttcccaaaatggttgactagaggcattttaggcagctctcatccacttagaggaaccaaaatagtgtgtagatgatcacgctttgcatacattatctaagagggagcatggagaatgaacagatgagtgayaggaaatgctaaaatggaggaagaagaagaaaacagacagactgcgtggccaggactagtcaggaactggaagtgaatcaccaaaatggttgaaggtaattgtcttcctgcagtccacttttcctctgtgtgatcataaaatctaggccatggaagagcattgacttggagagcagtccggacactataagaaaaaactgctttagcagggaaatacgccttgggtttcatgtcctttctgagacctgtgcagctaaagtaagatgtcattcttgatatgtcttttaactgggcatagtcctgggaaccagtgatgcaagtcccaggcattaggaaaacttgggctgctacttgcagagctgggtcatgagtgtggcatgggcttccacaaacaggactgagaactgagtgagtgaggcgtggactgcagcagc

SEQ ID NO: 535599 - DNA, 435 bp, Homo sapiens
cccaggggtggtggatgagagcccaggagggagaagtccctgtgaaaccagggaggacctgaaagctaacaggagggaacagcgtgagccacggggttgggggattggcaattggaggggacgtaatgcggggagttaccacctacagacgcgtcccaaaccccaggctttcaccccacctccactccccrctcatttttaatacccgtgcagtggggaattgatactgtggttttcaatgtcacccacactgcagcacggccacagtcaccatcccgatttttgctacaaatgaaaattactgtataatgagctccttaacacttttctttaaacctgtgtttggaagacttgtgttggtgtggccctgtgccctaatacctgtgaaatcacagcaccgatgagctggttccaatttttaaaatatatacatgc

SEQ ID NO: 535600 - DNA, 607 bp, Homo sapiens
accacatcactaacctgccatcttaagcaaatctttaaaaatatattttttagttatttgacaattctgtaagcaaaggctaagaatgtgctccaaagacagaataggagctttatttgctattttccaagtttaagatgttcatccatctggcagagcagctagacaatacatcagccaagaacatctctctggcttgaaatagttctggctctcaaagaggatttgactgagggaaaggcaacatctttagttgctctaaggctgaactcttctaatatttccccccaatgccttctccaagccttggctccatccactaacttggtttccataggaatagacagagctatcaagtggcacggagtcaaacagcacaaatgagagaaggagaaaatgttactgtcaaaaaaaggcttttctctatgagaggaaattatggaaaggtattcttgactctgaggcttccttatccaatgccagatttttcakgtgctcttcctgactaatatagcctattttatttagattattatgaaaattaatgccttcattggagagccttttatatataggaaactaaccaaaaataaatattgaaaaaagt

SEQ ID NO: 535601 - DNA, 646 bp, Homo sapiens
gtgaaaccccagagatgcttgatactttctatgttttgtgttgtcataacaaaataccacagactaggtaatttataaataaaatacatttatttcttacagttctgaagcctgggaattccaaggttgagggacccacacctggacaggaccttcatactgtgtcattccatggcatgaggcaaaagggcaaaagagcatccatgagagcaagagaggaaggcaacaaaattatcctcttatcaggcacgcactctggcaataaagccattaatgcatccacgagacagagccctcacaacttactgacctcttagaagtcccacctctcaacactcttgcattggggattaaatttctaacacatgaacttcagaggagacattaaaacctagcataaaggttctgtctatgaactatacactaaagtcatataatttaaaccaattatgtggtttatactttcttgactcttattatgaaaattatttgaaaatgaggagaagaagagagagacagagagattgagaccacaaggraattgcaaacttggcagcaacgtactctgtattccctgaaacagcccttttcagcatgaggcacacccctgcagttggattagtgcatagatgcagcatcaagtcca

SEQ ID NO: 535602 - DNA, 501 bp, Homo sapiens
actataggaacaatgatactcagagctttttcagagcctggaagtgtcrtttgggaactgaagatgggaaggtttatgtttgtttgcccaggctcaggaatttgtgttttattctaaactcagtgtggaaaacaatgcagatttgcggaagcatggagtgaggtaaactttacattttagcaaggtgatctgggttctagaaatgtacctgaaatttactaagcccctgagcatggctaggcactatactaaaacttttagacattgtctctttaggcaattgcttttaatgtccttattttgcagatgggaagactgaggctgagtgagattaaacatcatggccaaagttaacttccgttagcaggtcctaacatcacaggttttgcagccagtaccacttacagttactgtatcgaagtctttttttttccccaagaccaatgtaaagatcaaggctatataagaggacgcttttttttcttttcttgagacagagtc

SEQ ID NO: 535603 - DNA, 475 bp, Homo sapiens
gtagctaagtgcccgcaggtgctgatgaaattactctgaggccatattcatggcacatgtagagataacattccacatttcatactgagcactgtgtgagcaaagatgacacccacagagaagttctagaaaactctgctctaaggtttctgtcttgtggaaatatggctgtagttgccaaattatttacccggaataaatgccatttctcaggtacagctaaagagatrtcatattaaaagtaattggagacaatacaatgaaattttagtgtttaagtaaatgttggtatttttatattaaaaattatataaacctggatttctttataggtgccaaagaacgttctgagatctatgaagcatttgaaaacatctatcctattctaaaaggttttaaaaaagcctgagcatatcattcagcatctcacattattctggtttgaatatgtccataagcccagcacagaaacagc

SEQ ID NO: 535604 - DNA, 513 bp, Homo sapiens
ctttgggaaaatacaccagcccaaaagataagactcaaaattctgacagtttggggttctctgataaaatgactaagccagatcatcctacaccaaaatccaccattcgacagcacactgactatcctcatacctctcccttaactatgaatgagctggaaaaagaaaacttcawagctcatgggagtatggaaaaattgtttctttcagaacatcatttgcaaagttttatatggtgcctgaacttcccaagaactcttatccctcacaacagatgactagaaagggacttttccttcatttgaaactggaggaactatgatgtcaagaaaatggagacaacttctaaaggtgctttgctctctcaacatcttggtgattttacattaggcacctctggaagtcacattaacccttccatataaaatgtaattatttactttgtaaatgtaattagtcctgtaatttttcaacttgtaggaactctaaaactctactgtatagattgaggtc

SEQ ID NO: 535605 - DNA, 594 bp, Homo sapiens
aaatttgctagaaatgctctcctgctgacactgcatcaaaatgtcaagaacaaaatatacaatcttgttatagaaacaggggcttactttctccatcagttccaagctaaaatgtttcctcatctttctgagatgttgattattcataagcctcagctctatttaggaaaatgcaaaaggcaagttagagtcagtgaaagagttggctcctgcactaaaagaaaattaatgcaatggaggtgactggagtaatgcttttgaaaatacckagtgatttttaaattttttatttccacaaagatgacttccccttagtcagcctaaggcattctcttgctactgtagtaaagtacaattgttttgtcagaaaagtaagaagaaataaagaattcaggccaggcgcggtggctcacgcctgtaatcccagcactttggaagactgaggtgagcaaatcgcctgaggtcaggagttcgaaaccagcctggccaatatggtgaaaccccgtctctactaaaattacaaaaattagccgggcggggtggcatgtgcctgtaatcccagctactcgggagactgaggcagaagaatagctt

SEQ ID NO: 535606 - DNA, 540 bp, Homo sapiens
ttgttttaagaacaaaaaccctgtttctcgccatatcatccttaattcttgacaaagagaagtgccacaaaactttgwctctgctgggggtgagatttaagtgaagggtcaatgttatcttttaaatgtttcgtttccagataagccagatccttaagagcatcctaacgtgtgattgcaaggcaattagttcacctttttcccttgggaaaaataatcttcacaaaacaccttcatgtgtgttagcgctatttggtgaaatttcccataattaacacaaatttgagcccaaaaaaataataaagatggttatcttaaaacttcagtatatgggccaggcacagtggctcatgcctgtaatcccagcactttgggaggccaaggtgggcggatcacaaggtcaagagatcaagaccatcctggccaatgtggtgaaattccttctctactaaaaatacaaaaattaggtgggtgtggtggtgtgcatctgtagtcccagctactcgggaggctgaggcaggagaatcgcttgaacctggg

SEQ ID NO: 535607 - DNA, 693 bp, Homo sapiens
gctgtgaggaaacaaatagtgcaaacaaactgaatgagcttggaagcactttattcccaaatcatgtctccagataagaacacagcctggctgacatcttgatttcagccttgtgagaccctgagcagagaacccagttaaatcatgcctagacttctgatctgcaggaactatgggataataaattggttatatttgaaactgctgaagtttgtggtaatttgttatgcagcaatagaagattagtacaagggggttgactgggaagcaactcaaatatataatatcccataagtcagtccgctaaccactgtgtactttatggagcttggatgcagttctttactgagaatgagcagtcccatgggacagaggagaatgtgactctgcttcaaaatatagatgaatggacrgataaatagctacatagagatacacacatacatataacaaggacttactgtgtaccaggatctctactgagggtgttaaacatttgatcttgtttaaatgagggcttagagttaaaatggtgtagatacttttaatgccagaaatttgctgaagctaatggactcaaaggaaataaaaactaacaaagcaaagcaaaggacacatgaatccacccctcccaaaatcacaggttaagatgtatctcccagtctctatagcccttcaagaaggatatgaatg

SEQ ID NO: 535608 - DNA, 570 bp, Homo sapiens
tgcattacaaaaagtcaagtgctttgaagtgtgagctgcctgtagctatctctacttatactcatcagatacacaagttttccattctcttcagggtcagatcatgaagttagaggtgatctcacagcctaacatagtttaaagtttaagagctgactcctccctgtaccccctccatagraatgactgctgtcaagaagaccctccagagctcctggaaggggacattgagttaaatatgactaattgaacacatatatttacctcctattccacctcaaatctcaccaaaagagggaatggggagaaaggaggtattaactcaaacaaagagaacgggatatcaggaaaatgcaaatcaaaaccacagtgaggtatcatttccaccctacttgggatggctattatcaaaaagacaaaaaataaatgctgacaatgatgcagagaaaagggaactcttacacactgttattgggaatgtaacctagtataaccactatggagagcagtatggagagtcttcaaacaaaaaaaaaaacagctatgaatagaactaccatatgatccagg

SEQ ID NO: 535609 - DNA, 638 bp, Homo sapiens
taacataaggagctttctgggcgtgatggtaatgttctatatcttgacaggggtttgggttagaggtgtcaaatttgtcagagctcagtgcatgcacttaggatttgtgcatttcattgcatgtaaattttatcttaatagaaagtatcaatattgagctgtagttaaaaatatgaatactgaagtgtttaggaggatgcgtagtgatgtcttcactgtctggagggatgaatagatatatgatgaagcaaacatagtgaagcaatgayagaatttaggtgatgtgcaaaaattagcttcgctgtaggtttcaacatttttttaagtttgttggaaaaaacacgttttcaaagaaattcagatacattgtcaaattaaaaagcaggatagaatgctgcatgtgtaaggtgatatagtttagagagagtgaaaaaacactaaaagagaaaagccaatggttatcttggggtgttgtggtaatgtgtgattttaaattctttttattttctacactttctacaataaatataaaagacttatcagaaaaaaaaaacttatcccataagacttttaaaatagtttcaaggaggcagattttaacttggagcatagagaaacactttccaatgtctggaact

SEQ ID NO: 535610 - DNA, 482 bp, Homo sapiens
acctgtgatcggttacctaattgcctctctgaccctcagtttcctcatccataaaatggaacaatcattgccactttacagagtgttgagctctttagataacatatgaaaccgcttggcaaagaggggatggtgtttgaggcacagaaaacacagacaaaagcttggaggtctccttgatgatgacatgtacgtgaaagggacggtgaagaaactccccagctggaggaagtgccctcctgggtccaagacgggagaagcagtagcaggaggctccccagcagggatccacccaacaccattccctcgatactctattgctcagaacactcaagcagttttgtgtttggagcacagttttgggtggtgtttttttttttttttttttttttttccttttttggctagagtcagtaccatctgtgaattacactgcggtagccaggttttttgataattkgaataagacctcagggagtctg

SEQ ID NO: 535611 - DNA, 565 bp, Homo sapiens
tgtttttgtttttttattttgtttcgatatgttttatttttttagagcagtttaaggttcacagcaaacttgagtgggaggtacagagatttctcattatccactgccccaacacaagcatagtgctgtggttgttgttttgagaaagaatttcactcctgttgcccaggctggagtgcaatggcacaatcttggctcactgcaacctccacctcctgggttcaagcaattctcctgcctcagcctcccgagtagcttggattacaggcgcccgccaccacgtccagctaatttttgtatttttagtacagacggggtttcaccatgttggtcaggctggtctcaaactcctgacctcaggtgatccgcctgcctcggcctcccaaagtgctgggattacaggcgtgagccaccacgcccggctgtgttgttgyttttttataatcaaacaatatgtgatgtaaaaacccaattccaaccaaagaaataggaaaatcataaagaacatcgcattgcagtctctgctgctccacaactcgccactaactggatccctgtcacctct

SEQ ID NO: 535612 - DNA, 576 bp, Homo sapiens
ttccctctatactctattgccctaatagcaatagccacaaaaaagtcacatggcacatgattagtaacaattccataggaagtgatagtaatatttgaaatggctggtgttgaaaatttatggaaaaaaacctgggattttatgtttcactcatttttcttagctggagagattgtgtatgtgtatgtgagtgtctacacaggtgtggtatccctaatccaaaaatctgaaacccaaattactccaaactccaaaactttttgagcacagacatgaagctcaaaggaaatggtcgttgtagcattttcaaccactggtttatgtttattggatttttgaattgggtatgctccacaaataygtatctacagatatttcaaaatcaaaaaaaaaattgaaatccaaaacactgcttgtcacaagcatttctgtaaggaatattcaacctgtacacacacacatgcacatacatacacccgtgtatatttgtgtacatatacatatatacataaacacacatagtacactcacattttgaaaaagttcttgtttataggcatcaactttttaaaaagc

SEQ ID NO: 535613 - DNA, 579 bp, Homo sapiens
actaggcttttctttcctgtggtccttaaggaggctagagcaggcctcttcaaataccaccacacatcaaccaatgtacaggcaattatcaagtgtccccttgagtcatttttgctgacatatctttggccaatgcaagtcacgtggtcaagctcagagtcactgtgagagaaaaccacaaggtatgattcattgagagccatcagtgtaacaatctaccacttagtaatcctcttgcctgcactgaggcaagcactgtaagatgcagcgtgagatattctcaaaagaaaacaaaacattataaaaaccactatttaagattaaaacttcttagcaatacacggtaactacttcttgtgaaaaaacagtatggccagccttcacgaacccagaatatagatttccagaaaataacaattctcacagagctatgcaataaatgtcttcatataccatcaggttctgagcaaaaattgcagcaaatatatttctgagaaagatgactgattgcagtacaataaatgtcccaracagtatagtgctattgctatgtaataaagtcttagatagtacagtgct

SEQ ID NO: 535614 - DNA, 554 bp, Homo sapiens
cccaataaggcaacagatactgacttcaagtgcagcgggctgatttgagaatagcagtagaaattccaatagtggstgagtgtaaggagtaaggcctttaagtggctggagcagtcaaatccctctgaacccttcaaacaggcccaacaaggcttccttccagaacagaaccacacaggataaacttctgggagtgaaataggagaggggcagggtaggagcaacagagttaaatgaaaaagaaggtccagatcgaagtgcaggaggggaacagagccaggaaatctcagggaaaaaatgaaaaaaaaaagaaagaagaaaaaaaaaagaaaagagagagcctttgtaaagtgaaaaaaaaaaaatctcaaacaaacatcttttttaaagttcaataaaaccaaaaccaaatttacattaaaatgagtaacaaacaaagtatcaaaatcaaataccatacaaggtttctattaaaaggtgaagaaaaagaaaaagaaaaagcagaaggagaagagaaggagaggaaaagacggaacagaataatatcgctatag

SEQ ID NO: 535615 - DNA, 560 bp, Homo sapiens
aaaatggattgcggagggtaaggagctggagacaagaagacatgttataacactattgctacagattttgctattttaaaataaaccacttggctatttttgttattattagtaccaaacaataactgagtgattactgtgatttaggacctaagctaaacacaatatatatataatcttacttaatgtttctcactttcataaggatttccccattatatagataaggtaacggggtcttagactggataagaaagtggcagtcagtttggagtcaagctctgactaacaaagcctttgctccttactgctttgtgtgctgggcacatggtctggattcttaacctcttgatcaaaccagactgttctcatttataaggtgggcaataaaaccaaacagctcagacccctactgggaatgggacggtctaggacaaacagcctcrggaaatctgctcctccttggaggctggagctaactgtagggataaaaggagtgtttctctgggctttgccgggtgtggggagcatagacatatgtcctattacaaatacaccta

SEQ ID NO: 535616 - DNA, 616 bp, Homo sapiens
aaaatggattgcggagggtaaggagctggagacaagaagacatgttataacactattgctacagattttgctattttaaaataaaccacttggctatttttgttattattagtaccaaacaataactgagtgattactgtgatttaggacctaagctaaacacaatatatatataatcttacttaatgtttctcactttcataaggatttccccattatatagataaggtaacggggtcttagactggataagaaagtggcagtcagtttggagtcaagctctgactaacaaagcctttgctccttactgctttgtgtgctgggcacatggtctggattcttaacctcttgatcaaaccagactgttctcatttataaggtgggcaataaaaccaaacagctcagacccctactgggaatgggacggtctaggacaaacagcctcgggaaatctgctcctccttggaggctggagctaactgtagggataaaaggagtgtttctctgggctttgccgggtgtggggagcatagacatatgtcctattacaaatacacctacataatagcttccttaagtctattttaagtstattcctcccaaggagatggaaagt

SEQ ID NO: 535617 - DNA, 606 bp, Homo sapiens
caatcaggtagtcctagaaacaattgggtactaaattaagagttaccaactccaagtgcccatrgagctcagagcacaaagagctccaaaagggtgaaacatgaaccagacttgaaggaaggatcaactctgtgggatgaaggtcggtagacattcatcctgagaaggaaaaactaccattgacaccgctagaagtaaagggcgaagaaaacaggaaatgagcacaaagcaggatttcttaatccagggtccatggtacttctggggcttctatgaaaccccagagattataagcaaaatcctaggtatgtatgagaaaggttattttactggggaaaaagactagaactttcgtgaaatagtcaaaggaatccaataagcctaagtaggtcaagactgtctcggggagaacagttaacctacttcagatagcctgtgaatcacttcattcgtgacaaataattatgccaatggactcccaacacaaaaaaccttgggactgagtgagcagcagtggtttcagccctgcctttaagtggcatttttagcatttccttgctgctgcctatcaatccagacctatccacgttgtcagggtatccttag

SEQ ID NO: 535618 - DNA, 647 bp, Homo sapiens
ctgctagacagctcaaagtgaactattacataaaaactacccttcaccctacatgatatataggatttctctattacagagaatcattataccaggaaatggttttcctgatattctaccaaaatcctgagtaaaagtttgcattattggaagattattagaatagactaatgtatggtaattgaaatttaaaaaaccttgtagtagcagagtcctagaaaaccagagagttgaaccaggaaaaaggatggtatctctgacttcagcaggtttatcacttatttaaagctgaggccagccaggcacagtggctcacgcctgtaattccagcactctgggaggccgaagcaggtggatcacctgaagarttcaagactagcctgactaaaatggcgaaaccccatctctactaaaaatacaagttacccgggcatggtggtgtgtgcctgtagtcccagctactggggaggctgaggcacgagaatcgcttgaacctgggaggcagacgttgcagtgagccaagattgagccactgcactccagcctgggcaacagagcaagactctgtctcaaaaaaaaaaaaaaaaaagaaaaagaaaaagataaagctgaggccaataattcttacagccagagccaaactttag

SEQ ID NO: 535619 - DNA, 647 bp, Homo sapiens
ctgctagacagctcaaagtgaactattacataaaaactacccttcaccctacatgatatataggatttctctattacagagaatcattataccaggaaatggttttcctgatattctaccaaaatcctgagtaaaagtttgcattattggaagattattagaatagactaatgtatggtaattgaaatttaaaaaaccttgtagtagcagagtcctagaaaaccagagagttgaaccaggaaaaaggatggtatctctgacttcagcaggtttatcacttatttaaagctgaggccagccaggcacagtggctcacgcctgtaattccagcactctgggaggccgaagcaggtggatcacctgaagagttcragactagcctgactaaaatggcgaaaccccatctctactaaaaatacaagttacccgggcatggtggtgtgtgcctgtagtcccagctactggggaggctgaggcacgagaatcgcttgaacctgggaggcagacgttgcagtgagccaagattgagccactgcactccagcctgggcaacagagcaagactctgtctcaaaaaaaaaaaaaaaaaagaaaaagaaaaagataaagctgaggccaataattcttacagccagagccaaactttag

SEQ ID NO: 535620 - DNA, 634 bp, Homo sapiens
tgcagcagccatagctggctgtgtgtgcatatagatgaagaggatgccaacctgcagagatggaggagaatgatgcacacagcacatgcctgtgctctggctgtttttgcctcactagggcacctaggacacccactcaccaggtccacttagaacaaagtccctgcagaaaatattacaagagtattaacatagccctggggcaatctggttgtgtgccagtgtgctgccatgctgaggtcaattggttttagatctttctaccaatggggatagagaagaacacatttgccaggtcaataatcacacaccaagggccagaaatagtgatgatckactccagtgaagatataaattaatcagagaagctgcaactggggctaacaactggttcaacttacagtaattcattatcatttgccatgctctttcttttttcagagaccagataggtaacttaaataggtatgtgatagagactaccaccttgcaacctttaagtcttttgaagatagaactaatttccacaataccagaagacaaagagacaagttataaaggatcctactttgtccttcctgccacagtgaccttactccatacatcagggacccaatgcaagagttccagcagc

SEQ ID NO: 535621 - DNA, 634 bp, Homo sapiens
tgcagcagccatagctggctgtgtgtgcatatagatgaagaggatgccaacctgcagagatggaggagaatgatgcacacagcacatgcctgtgctctggctgtttttgcctcactagggcacctaggacacccactcaccaggtccacttagaacaaagtccctgcagaaaatattacaagagtattaacatagccctggggcaatctggttgtgtgccagtgtgctgccatgctgaggtcaattggttttagatctttctaccaatggggatagagaagaacacatttgccaggtcaataatcacacaccaagggccagaaatagtgatgatctactccagtgaagatataaattaatcagagaagctgcaaytggggctaacaactggttcaacttacagtaattcattatcatttgccatgctctttcttttttcagagaccagataggtaacttaaataggtatgtgatagagactaccaccttgcaacctttaagtcttttgaagatagaactaatttccacaataccagaagacaaagagacaagttataaaggatcctactttgtccttcctgccacagtgaccttactccatacatcagggacccaatgcaagagttccagcagc

SEQ ID NO: 535622 - DNA, 315 bp, Homo sapiens
gggaggcggaggttgcagtgagctgagatcatgccactgcagcacttcccgcctgggtgacagagtgagaccctatctcaaaacaacaacaacaacaacaacaacaacaagatgggtagtcatgatggttaggctccccatttaaaaaggaaggctaaaatcactgttacttgtttttccacaagtactatttayggatagtttgccagataactgatactcccttcagataactgatactcccttgtacccctaattttatttttttcttttttttaggtggagtctcactctgtcacccagggtgaagtgcag

SEQ ID NO: 535623 - DNA, 604 bp, Homo sapiens
tatcttttatatttctatgttttcatcctttagagttgatgccattttatagataattatttgctaccaactacagcagattgtttacacaaaaatatcccatagaaagggtgacatttggaactggaaagatgtattacactgtaagatttatctgtgttatttaataattatagatgtttatgttttaaaacagaatagaggtgccagggctacataggaagagcccatcagcagatragagatagattagatagctctagaaattatctgatttaatacatagtgttcacctaagtttaaaaataatattaattggcctaaattaataatattagtcaataggttcagttatcctttttaaaagaggaatcatcttaatacacttccataaatatgctgctgtgattagttttttccatgcactgtaaaatattgccacaagttttaacctcatactaaccataaataatgcttaaatgatgctgtaatttttgcaatttggggccattcacagatgagttattcagtgaaaagtgatatctctcctgaagtactcttgcctcattatcttattccaaaatgaatgaaggggaggagaagt

SEQ ID NO: 535624 - DNA, 604 bp, Homo sapiens
tatcttttatatttctatgttttcatcctttagagttgatgccattttatagataattatttgctaccaactacagcagattgtttacacaaaaatatcccatagaaagggtgacatttggaactggaaagatgtattacactgtaagatttatctgtgttatttaataattatagatgtttatgttttaaaacagaatagaggtgccagggctacataggaagagcccatcagcagatgwgagatagattagatagctctagaaattatctgatttaatacatagtgttcacctaagtttaaaaataatattaattggcctaaattaataatattagtcaataggttcagttatcctttttaaaagaggaatcatcttaatacacttccataaatatgctgctgtgattagttttttccatgcactgtaaaatattgccacaagttttaacctcatactaaccataaataatgcttaaatgatgctgtaatttttgcaatttggggccattcacagatgagttattcagtgaaaagtgatatctctcctgaagtactcttgcctcattatcttattccaaaatgaatgaaggggaggagaagt

SEQ ID NO: 535625 - DNA, 501 bp, Homo sapiens
aatcaagtgactggtacatgcctataggctcagtaatatttttktgaatgaataagtgaataaaggtagagtgaatgtgtattgcctttgaatgtaaacctttaataccaattgcagtatgatactgaattcacttaagaattatttttacatagttgtgtagaagcaatttataatatggaaatatttctcaaatttacagaaatttgataaatattatatttattttatgtaaattcccaaactaaaaagacatgtcttttctctcactgtccatgtaagttagtggaagacatcgatctcaaattacaatatttaactgtattaaattgtatatatagatgcagactctaggataaaagattaaatgtttgatatttttaagccagatcctattattaaaatcatcaatgatttttactgtgaaggtgtagccacatgacattaccttcagaaaacttcaaagcagcaaaagcatgtcgcagagccaaatgcagttcc

SEQ ID NO: 535626 - DNA, 623 bp, Homo sapiens
tacttcttaggtctcagctgaggactccagtgcaggtgttgcaagacagcagacgtagcactgcttatgtgtatcctgaagtcccatgtgtatcctgaagtcccagaaagctgcttcaagtagattccagtggagaagggagtcaccaaggctggacagtcatttatccatggcaggactagcaaaaaaatctgcaccatctctcatcgcacacacgtgggtaaggtttggactggtatgatctttttccataatstcattttcgtgatttcttaactgagaatataatagtaaataccaatctcacagaattgttatgaggaatgcagaaacttaatcaaattacttaattgttattttcatttcttattaatttgttcccattgaaattaatgttatgtctggtctcattttaaattatttatcgttctgaatttggatcccatcctcaagttttcaatgcttgactttttatgaattcttgtattatacctcaaatttaataaaatccttttaatcttgtcttcaccctagcactgtctatactgtcccctgggtggaagtttcccatcattctaattacttttgtacacaaatttgacttctctctccagcccctgtga

SEQ ID NO: 535627 - DNA, 623 bp, Homo sapiens
tacttcttaggtctcagctgaggactccagtgcaggtgttgcaagacagcagacgtagcactgcttatgtgtatcctgaagtcccatgtgtatcctgaagtcccagaaagctgcttcaagtagattccagtggagaagggagtcaccaaggctggacagtcatttatccatggcaggactagcaaaaaaatctgcaccatctctcatcgcacacacgtgggtaaggtttggactggtatgatctttttccataatgtcattttcgtgatttcttaactgagaatataatagtaaataccaatctcacagaattgttatgaggaatgcagaaacttaatcaaattacttaattgttattttcatttcttattaatttgttcccattgaaattaatgttatgtctggtctcattttaaattatttatckttctgaatttggatcccatcctcaagttttcaatgcttgactttttatgaattcttgtattatacctcaaatttaataaaatccttttaatcttgtcttcaccctagcactgtctatactgtcccctgggtggaagtttcccatcattctaattacttttgtacacaaatttgacttctctctccagcccctgtga

SEQ ID NO: 535628 - DNA, 623 bp, Homo sapiens
tacttcttaggtctcagctgaggactccagtgcaggtgttgcaagacagcagacgtagcactgcttatgtgtatcctgaagtcccatgtgtatcctgaagtcccagaaagctgcttcaagtagattccagtggagaagggagtcaccaaggctggacagtcatttatccatggcaggactagcaaaaaaatctgcaccatctctcatcgcacacacgtgggtaaggtttggactggtatgatctttttccataatgtcattttcgtgatttcttaactgagaatataatagtaaataccaatctcacagaattgttatgaggaatgcagaaacttaatcaaattacttaattgttattttcatttcttattaatttgttcccattgaaattaatgttatgtctggtctcattttaaattatttatcgttctgaatttggatcccatcctcaagttttcaatgcttgactttttatgaattcttgtattatacctcaaatttaataaaatccttttaatcttgtcttcaccctagcactgtctatactgtcccctgggtggaagtttcccatcattctaattacttttrtacacaaatttgacttctctctccagcccctgtga

SEQ ID NO: 535629 - DNA, 633 bp, Homo sapiens
tggttacacatagtaagtagagtgcagatgaatttcagttgtctgtgatattaagccctcaggagtaagtaaaaagggrgctgaggaagcaagaaaaattatctaggctggccaataaagcaccattttgtaaatttgaatgtcttctatttgagtgtttagatgacagtctatattgaagggcaaaattctatacaaattccaagccaataatattttattgtttcaatcctttctacaggtatgttctctaaatcacactgtaaatatttaacttataatgatcacttctgttgattttatcaataattatttcatcagaccaaataatttgtatgctcagcatggtagctcatgcctgtaatcccagcaactcaggaggctgaggcaagaaggtggcttgagcccaggaatttgaagctgcagtgagatatgattttgccacagcactccagtcttggttacagagtgagactttgtctctaaaaataaataataataataataattttaaaagaatctaataacttatgtgtaaaataaacttcataagacataaatcttcatagtttccgtatttgaaggagtcatgaaattaaaagagagtttttgttttagttttctaaggaaggg

SEQ ID NO: 535630 - DNA, 633 bp, Homo sapiens
tggttacacatagtaagtagagtgcagatgaatttcagttgtctgtgatattaagccctcaggagtaagtaaaaagggggctgaggaagcaagaaaaattatctaggctggccaataaagcaccattttgtaaatttgaatgtcttctatttgagtgtttagatgacagtctatattgaagggcaaaattctatacaaattccaagccaataatattttattgtttcaatcctttctacaggtatgttctctaaatcacactgtaaatatttaacttataatgatcacttctgttgattttatcaataattatttcatcagaccaaataatttgtatgctcagcatggtagctcatgcctgtaatcccagcaactcaggaggctgaggyaagaaggtggcttgagcccaggaatttgaagctgcagtgagatatgattttgccacagcactccagtcttggttacagagtgagactttgtctctaaaaataaataataataataataattttaaaagaatctaataacttatgtgtaaaataaacttcataagacataaatcttcatagtttccgtatttgaaggagtcatgaaattaaaagagagtttttgttttagttttctaaggaaggg

SEQ ID NO: 535631 - DNA, 633 bp, Homo sapiens
tggttacacatagtaagtagagtgcagatgaatttcagttgtctgtgatattaagccctcaggagtaagtaaaaagggggctgaggaagcaagaaaaattatctaggctggccaataaagcaccattttgtaaatttgaatgtcttctatttgagtgtttagatgacagtctatattgaagggcaaaattctatacaaattccaagccaataatattttattgtttcaatcctttctacaggtatgttctctaaatcacactgtaaatatttaacttataatgatcacttctgttgattttatcaataattatttcatcagaccaaataatttgtatgctcagcatggtagctcatgcctgtaatcccagcaactcaggaggctgaggcaagaaggtggcttgagcccaggaatttgaagctgcagtgagatatgattttgccacagcactccagtcttggttacagagtgagactttgtctctaaaaataaataataataataawaattttaaaagaatctaataacttatgtgtaaaataaacttcataagacataaatcttcatagtttccgtatttgaaggagtcatgaaattaaaagagagtttttgttttagttttctaaggaaggg

SEQ ID NO: 535632 - DNA, 628 bp, Homo sapiens
tcaaaagttatagcaagaaagttccacttccacttaagatatggaacatgaaagagcattactaataccttaataatttgggggaaaaatagtggaacatactacaaaatcatctctattcttgaatccaacagagagctgatattgcaaggaaatgaaatagcctaaaatccaaggaaagacagggcatgcaaagggagacagattgatacttgtaacagagcatggagggaagatgaggccacctttgtcctcttccattgcataagagcctgctccatgacagkgtgtaactgatagaatatggtagaagtacagctataccagtttctctgcctagaccttaagaaaatggcaactttactttctatcttttggaaaacaatctctctgaatcctcacctgccatatgagtttgactctcccaggagagatggtattgttaaaaggaaaatttcagccaaactaatttaaaggagtttaatggagcaatgaacgattcatgaattgggcagcccccagaatcacagcagattcagagagactccagggatgccttgtggtcagaacaaatttatagacaaataaagtgacgtgacatacaggaatcagaagtgaggtacagaaa

SEQ ID NO: 535633 - DNA, 628 bp, Homo sapiens
tcaaaagttatagcaagaaagttccacttccacttaagatatggaacatgaaagagcattactaataccttaataatttgggggaaaaatagtggaacatactacaaaatcatctctattcttgaatccaacagagagctgatattgcaaggaaatgaaatagcctaaaatccaaggaaagacagggcatgcaaagggagacagattgatacttgtaacagagcatggagggaagatgaggccacctttgtcctcttccattgcataagagcctgctccatgacagggtgtaactgatagaatatggtagaagtacagctataccagtttctctgcctagaccttaagaaaatggmaactttactttctatcttttggaaaacaatctctctgaatcctcacctgccatatgagtttgactctcccaggagagatggtattgttaaaaggaaaatttcagccaaactaatttaaaggagtttaatggagcaatgaacgattcatgaattgggcagcccccagaatcacagcagattcagagagactccagggatgccttgtggtcagaacaaatttatagacaaataaagtgacgtgacatacaggaatcagaagtgaggtacagaaa

SEQ ID NO: 535634 - DNA, 628 bp, Homo sapiens
tcaaaagttatagcaagaaagttccacttccacttaagatatggaacatgaaagagcattactaataccttaataatttgggggaaaaatagtggaacatactacaaaatcatctctattcttgaatccaacagagagctgatattgcaaggaaatgaaatagcctaaaatccaaggaaagacagggcatgcaaagggagacagattgatacttgtaacagagcatggagggaagatgaggccacctttgtcctcttccattgcataagagcctgctccatgacagggtgtaactgatagaatatggtagaagtacagctataccagtttctctgcctagaccttaagaaaatggcaaytttactttctatcttttggaaaacaatctctctgaatcctcacctgccatatgagtttgactctcccaggagagatggtattgttaaaaggaaaatttcagccaaactaatttaaaggagtttaatggagcaatgaacgattcatgaattgggcagcccccagaatcacagcagattcagagagactccagggatgccttgtggtcagaacaaatttatagacaaataaagtgacgtgacatacaggaatcagaagtgaggtacagaaa

SEQ ID NO: 535635 - DNA, 653 bp, Homo sapiens
tgggattacaggcacccgccaccatgccctgctagttttttgtatttttagtagagactgggyttcactatgttagccaggctggtcttgaacttctgatctcaggtgatccacccacctcggcctcccaaagtgctgggattacaggtgtgagccaccatacccggccccttttaagaaattttaatcaatttattctccccatctgatattatcatttcccctcacttctctcaatcaactaaacaaccaaccgaacaaaaacaaacaaaaaccacaatgtccatgaattccagggtcaattcagtgtatgggaatcagtcatcctgtttatagaaagatagagtggagaaggtggagagggtggttttcaccgactggggcagtggcttctgatgctgccacacaatgttgtggaatatggagtccacgcatcctgaaggacacttggtctttccacttcagtccccagagaagagtgaagtcactctatgcttgggctcaacaattaaaattctttgaatttatattcaatcatttacgcatgttttcccgaagaaagacttcatgcaagaatggccagtgcttagggatttccagagtaagcaacacttttggccagaaaaagccttttcttaggacggccagagctt

SEQ ID NO: 535636 - DNA, 653 bp, Homo sapiens
tgggattacaggcacccgccaccatgccctgctagttttttgtatttttagtagagactgggcttcactatgttagccaggctggtcttgaacttctgatctcaggtgatccacccacctcggcctcccaaagtgctgggattacaggtgtgagccaccatacccggccccttttaagaaattttaatcaatttattctccccatctgatattatcatttcccctcacttctctcaatcaactaaacaaccaaccgaacaaaaacaaacaaaaaccacaatgtccatgaattccagggtcaattcagtgtatgggaatcagtcatcctgtttatagaaagatagagtggagaaggtggagagggtggttttcaccgactggggcagtggcttctgatgctgccacacaatgttgtggaatatggagtccacgcatcctgaaggacacttggtctttccacttcagtccccagagaagagtgaagtcactctatrcttgggctcaacaattaaaattctttgaatttatattcaatcatttacgcatgttttcccgaagaaagacttcatgcaagaatggccagtgcttagggatttccagagtaagcaacacttttggccagaaaaagccttttcttaggacggccagagctt

SEQ ID NO: 535637 - DNA, 597 bp, Homo sapiens
ctttaatattgcatgtatacaattatctgttattattataagattgtaatttgatcttgattacagaacatttcattcttaatacaatatgctatttggtaatttttctacaagccaaagaaaacagattatttaaaattcacataaatttgaaatgtgcttatattttagatgtgatgtggttagcactggtattttttctaagttccayggatgttaacaatacttcgactctttaatcaaaattcaaggtgcagtggttcaagaaagaaacattgataattttacaacaatcggttacttctatttgtgactgggaaataaactctacttttccttacttaaattaatgacaatttaacaaaaaaatgatacaagatttatgagaatagaatagttaatattactgtcaaatgtagatgagattactctagatattaaattgctatttatcattttaaaggcaacatatatattttgtattggattaccattataactattgaatatcaaataacttttcaaataaagttccagaatcaagtaatatatttcagaggaacacttaggtagagtgataacaactgatttttgtct

SEQ ID NO: 535638 - DNA, 597 bp, Homo sapiens
ctttaatattgcatgtatacaattatctgttattattataagattgtaatttgatcttgattacagaacatttcattcttaatacaatatgctatttggtaatttttctacaagccaaagaaaacagattatttaaaattcacataaatttgaaatgtgcttatattttagatgtgatgtggttagcactggtattttttctaagttccatggatgttaacaatacttcgactctttaatcaaaattcaaggtgcagtggttcaagaaagaaacattgataattttacaacaaycggttacttctatttgtgactgggaaataaactctacttttccttacttaaattaatgacaatttaacaaaaaaatgatacaagatttatgagaatagaatagttaatattactgtcaaatgtagatgagattactctagatattaaattgctatttatcattttaaaggcaacatatatattttgtattggattaccattataactattgaatatcaaataacttttcaaataaagttccagaatcaagtaatatatttcagaggaacacttaggtagagtgataacaactgatttttgtct

SEQ ID NO: 535639 - DNA, 558 bp, Homo sapiens
tatatcttcacttggaggtacatttgataagtttgagaaaacttagcgtattcagtatttaaattcttatctctgttctccctagcccattcctccttttgacctcccagttatccaagctagaaacctgaaataattatttactacttcctaacctctatatctaatcagttaaaaaatctgaccaattcttacttaacttctatcatctctatgccttttaaatgtccttcatttagggtttctcaatcttggctctactgaaatcttgagccagttagttctttgttgttggaggagggaggttgtcctgtgcattgttaagtgtttagcagttaccctgtcctttacccctctagatactagtagcaccccttgctggtacagccacaatgtttctagacattaccaaatccagtgggaggaggtgagtgggagggaatcacatttcaacccatagagccactgcctcacttgatggaggccctcttcttaatcatctgcgttagggcaaragtttccacctggccctctagcccaggaccgcacctctcttct

SEQ ID NO: 535640 - DNA, 648 bp, Homo sapiens
aatttgacagtagagatacaattggaatagaatattaagaaatcactyttattacaaaaattattttttatgggaggtagatttatatgttctacgacaagagcatatatgctttaagtatgagctatcagcataagatgtctgtggttgttatttttgctaatccccaactattacctattctccctatttccagacacaggatgtgattgatctttgcgactatgtgacttgctttggctaataaaatttgagtgcaagtgacatatgccatgtccacgtgaaagacttcaaagccagtatatgatttactacatttccttcccactgatgaagtgaccctgaaagcacatgtatagaaggagccaccatcaacctgggtctctaaataactacaatgagtagatgttttgctgccaagtcacttcagacatatagactaagtgagaaacttttattaagcactgagatttgagaaggttttttttagtgtattattaacccatcctcacaaagtcaaacacaaatttcaggaatacaatcatcttaacttcaagtttaattaaaaaaaagagtgatttaataactagttctcagacaaactatcttatataatcatatttaaaaatgacaggattttattgagaa

SEQ ID NO: 535641 - DNA, 648 bp, Homo sapiens
aatttgacagtagagatacaattggaatagaatattaagaaatcacttttattacaaaaattattttttatgggaggtagatttatatgttctacgacaagagcatatatgctttaagtatgagctatcagcataagatgtctgtggttgttatttttgctaatccccaactattacctattctccctatttcyagacacaggatgtgattgatctttgcgactatgtgacttgctttggctaataaaatttgagtgcaagtgacatatgccatgtccacgtgaaagacttcaaagccagtatatgatttactacatttccttcccactgatgaagtgaccctgaaagcacatgtatagaaggagccaccatcaacctgggtctctaaataactacaatgagtagatgttttgctgccaagtcacttcagacatatagactaagtgagaaacttttattaagcactgagatttgagaaggttttttttagtgtattattaacccatcctcacaaagtcaaacacaaatttcaggaatacaatcatcttaacttcaagtttaattaaaaaaaagagtgatttaataactagttctcagacaaactatcttatataatcatatttaaaaatgacaggattttattgagaa

SEQ ID NO: 535642 - DNA, 469 bp, Homo sapiens
gtgtgttaaggcttttctgtgctggttggcttgggtattagtatagtgattctgggagtaacagacagtattttagcaagtgtttgtctttctattatccatttaaacataatcctagaatctccacagacatacaggagttcttttgttgctttctggcactggataaaagtgtccatttttattaagtgctcagtgcagagtttaacagcccttttatggactggtactagattacgtatcgaggggtggggtgaagatagtttttctatcgacatttgtaaaaccttagatttgggtttccatgaaccagaatactgctctacagacgtcaaagactctaaatgttgcaaacgattgtcttttgtttcttcattttcctttttccaggttgcttggtcacaaaagrcatctgtccacctgatctttccaagggagtatggtgggggtggttggggctttctgtgag

SEQ ID NO: 535643 - DNA, 587 bp, Homo sapiens
atattagtagtatcaggaaaaataaaagtatcaaatattaaaaagtttacagaagatctaccgtctacaggcactcaaatggtgtagcccctgtcatatttgtrcctgcctctctctttctaatctgtcctatgcactactgccagattgattttcctaaaatatggttttgctcctactgattccttccgttttcttccctttcacccttcagcttcaataatactgcttgctaaatgaaattcaaactgcttggcctggcatttaaagtcctacataatcagatttttaagacccctttccagcggtcctctgtgctctagacaatccaaacaatatgctatgttttctttaaaggcctagtttaagggtgatatataatatgcttaatatcctgtaaagcacagacacatatcccaatctggagtcaggtcttagggagccagccatgccttaaaatgttagttgtttaattgtgagaggccccatgagaggggcctgtggagcttggatggcaggaaggccttggggaaggttggggcagaagccaattaccacatggtatggaagtatctcaatatattaac

SEQ ID NO: 535644 - DNA, 587 bp, Homo sapiens
atattagtagtatcaggaaaaataaaagtatcaaatattaaaaagtttacagaagatctaccgtctacaggcactcaaatggtgtagcccctgtcatatttgtacctgcctctctctttctaatctrtcctatgcactactgccagattgattttcctaaaatatggttttgctcctactgattccttccgttttcttccctttcacccttcagcttcaataatactgcttgctaaatgaaattcaaactgcttggcctggcatttaaagtcctacataatcagatttttaagacccctttccagcggtcctctgtgctctagacaatccaaacaatatgctatgttttctttaaaggcctagtttaagggtgatatataatatgcttaatatcctgtaaagcacagacacatatcccaatctggagtcaggtcttagggagccagccatgccttaaaatgttagttgtttaattgtgagaggccccatgagaggggcctgtggagcttggatggcaggaaggccttggggaaggttggggcagaagccaattaccacatggtatggaagtatctcaatatattaac

SEQ ID NO: 535645 - DNA, 587 bp, Homo sapiens
atattagtagtatcaggaaaaataaaagtatcaaatattaaaaagtttacagaagatctaccgtctacaggcactcaaatggtgtagcccctgtcatatttgtacctgcctctctctttctaatctgtcctatgcactactgccagattgattttcctaaaatatggttttgctcctactgattccttccsttttcttccctttcacccttcagcttcaataatactgcttgctaaatgaaattcaaactgcttggcctggcatttaaagtcctacataatcagatttttaagacccctttccagcggtcctctgtgctctagacaatccaaacaatatgctatgttttctttaaaggcctagtttaagggtgatatataatatgcttaatatcctgtaaagcacagacacatatcccaatctggagtcaggtcttagggagccagccatgccttaaaatgttagttgtttaattgtgagaggccccatgagaggggcctgtggagcttggatggcaggaaggccttggggaaggttggggcagaagccaattaccacatggtatggaagtatctcaatatattaac

SEQ ID NO: 535646 - DNA, 605 bp, Homo sapiens
ctccactatcgtacttatcaatatgtgtggaactcgtaaatggaatatatattggaaactctttccaatacagagtcctttagaaagaccaaaataatgtagccacattgtgagattgccatcaagaaatgtgctcaacatcgttctggcacactcttttaatgagtccatatttgtgattaataaatgcgtgaaatcattactttccagtaaatatatataaggtaagatttcaaagtgacatgtcaagtatgattagtatttcttcgcattaaattgataaggaacaatgtgctttaaaatcatagtcacagactgggggatttaagagccattgccacacagatgacaattraattcctgagaacagattagattgcctagaaaggacaaatttgttataaggcaacatgcacttttgtaaactgcattgatttttgtgctaataataacaatggttattgaggttgttgataagtgtatagaactaatgaggtttgttatattttaggtcaacttggtgtccgttactttcagtcccaattttatctcagaacttctaaacctgagatgtaaaataggctacatagatatcttaaacaatt

SEQ ID NO: 535647 - DNA, 555 bp, Homo sapiens
tgtgtgggtggggtgaggggggtggtaaagtagcctagggataccagtaagaaggcccatttggagcttggaaagcctaaagcaatggtgaaagaggagtaatttgaagtgttctattcaaaggctgcaatgggtactggtctgggaaaaggcctgcttctctccttcggtgagggttcctgacagtgatctggcccctggtgaccccgagcccacaaacaggggcactgggagaggtggggctcaaatgaggctcctgggtcaagggagctgcctcagagcatggggtgggagaatgggagcctgcaggcaaaagaatgctgggaatggtgaccgtggtcacaagctctgggctgagcagcacttgtacaatttcatggagtcttcattttacagaagaggaaagggaggctcagagaggctaagttgcttgttcaagatcatacagctagtgtgtggcagagctgacactgcacctcaggtctgactcttgagtctgggycctgatccatggcatggcttcagccttcccttcccatcctggccttatttgac

SEQ ID NO: 535648 - DNA, 644 bp, Homo sapiens
cttacttgtaggtgatgaaagttcagtagtgaatgtgaaaaacatatagtacttatggatgactatggtttgcatgttcatgtccttccaraattcatctgttagaccctactctcaaggtgatggttttaggaggtggggctttgggtagatggttagaccatgaggaccttgcaccctatgaatgggattagtgcccttataaaagcctgaaggaatttgttcacccaatttgccatgtgaggttgctgcaacaaggtgccatctacgaggaagaaggccttcaccaggcacagaatctgctggtaccttgatcttgtatttcccaccctccagaattgtgggcaataaatttctgttattcataaattactctgtgtaaggtattttgttataacagccaaaactgactaagacatggactcaacattatactggaatatgacagtcctgtttaaagagaataagcatttcttcaaggtaggaatgagaatccatttaatgtaacaagttttttctccaggatacttgttgcatgtaatggtctctctatagctctgttcctaggttttcacttcaaagaaatatacactggaaagaaattaacctacaacatataacatttgtaaaagaaaagttataat

SEQ ID NO: 535649 - DNA, 644 bp, Homo sapiens
cttacttgtaggtgatgaaagttcagtagtgaatgtgaaaaacatatagtacttatggatgactatggtttgcatgttcatgtccttccaaaattcatctgttagaccctactctcaaggtgatggttttaggaggtggggctttgggtagatggttagaccatgaggaccttgcaccctatgaatgggattagtgcccttataaaagcctgaaggaatttgttcacccaatttgccatgtgaggttgctgcaacaaggtgccatctaygaggaagaaggccttcaccaggcacagaatctgctggtaccttgatcttgtatttcccaccctccagaattgtgggcaataaatttctgttattcataaattactctgtgtaaggtattttgttataacagccaaaactgactaagacatggactcaacattatactggaatatgacagtcctgtttaaagagaataagcatttcttcaaggtaggaatgagaatccatttaatgtaacaagttttttctccaggatacttgttgcatgtaatggtctctctatagctctgttcctaggttttcacttcaaagaaatatacactggaaagaaattaacctacaacatataacatttgtaaaagaaaagttataat

SEQ ID NO: 535650 - DNA, 510 bp, Homo sapiens
taaaaacaggaaaagtatcctggattattcaggtgggcccgatataatcacagggtctttaaaagatggaagatggaagcagaagattcaatggcaaagtaatgcaatatgaaaaagactaactctctcaaaagaatgcagaaaacttcargaactaataagctatcacagcaaggtgcagggtacaaggttgatacttaaatgtgaatcacctttctatataccagcaataaacaaataaaatttaaaattagaaacaaaataccattcacatgagcacaaaaaaacagaatatgtagatataaatctaacaaagtatgttcaagacttatatgagaaaaactacaaaactctgtagaaagaaatcaaagaactaactaaatgaagatattttatattcattggtagacttaatagtagcaagatgtgagttattttcaactttatagattcaatgtcattccccatcaaaatcctagcaacttattttgtggatatcaaccaattgat

SEQ ID NO: 535651 - DNA, 520 bp, Homo sapiens
aatcaataaaagtcaagaaataagatgcctttatgctaaataggaatgaagaggccctcttactacagagaagcttccaagctgtcaagacaaatttatatatatatatatgtatatatataaattggtagtttagtagtaaatattcagttcaaaacaaatacctggacttgttagctagcagtcaaatgaggaggataatccacttttgactcatattgtctaggtggcaaatatcccgctgaaaacagcaggaagaattagatgagactaaattactcagatgtctatgaaaataggtaggaagaggtagtgaatcatggctgagactaacataaattggttcttgtcatcataaacagcaagttttctagggcccattttagaacttattttaaaagttcatttaaaaaaaaaacatcgagtcataaagtaccataaaatctatccatttaaatacaattcaatttttttagtacagttgtrtaatcatcatcacaatctaagtctacatttttcc

SEQ ID NO: 535652 - DNA, 502 bp, Homo sapiens
  misc_feature (1)...(502): n = A,T,C or G
tgcactatgcagggaatatctgctttaggaaatgtagttccaagacagctttcatttgaaaaatggttttactaccacagtacattctgaaatggctacagattttgtccctttcacactgactctgaattggccatgtgtgtatatccataccaccctacacatacccagtttggtctgaatnggccatgtgactcacttggacaataggacattaagaaacatgacacagagactttaaaagtgcttgcacattggggcttgttctctaggtgttcatgaaagccagttgctacatgaagaagcctgggctaacctgctggaagaagatgaaagaccacaacaatcatgatccactccagycatcccagctgaactcctatacatgtaaaagactcccctgatggctagccaatcctcctacagaagcagataggcaactgatcgcagacacatgagtaaatccagcccccgataagaacagctcaaccaacctgcacat

SEQ ID NO: 535653 - DNA, 594 bp, Homo sapiens
aggcccctaggaaccagcaggaactggggactgtggtgggctatgaattggcagtcttaccaaccgcatctggatctctgaggagcaaggggccccagtatatattaagtattttagtattagaaaaagatctaagagaaggaagaccataaatattttaacaagtgctttgatatgtgtgagatggtagagagaatagaagagactggagtcagaattatttccttctttgtaagttgatgtgttatctgattttttatgagcatacatttcttatataatcataaaaacaacggctgggcgcrgtggctcacacctgtaatcccagcactttgggaggctgaggtgggtggatcacttgaggccaggaatttaagaccagcctagtcaacatgacaaaaccctgtctctactaaaaatacaaaaattagctgggcatggtgatgcacgcctgtagtcccagtgactgagtcatgagactcgcttggacccaggaggcagcagttgcagtgagctgagatcatgccactgcactccagcctgggcaacagagtgaggctctgtctcaaaaacaaaaacaaaaaacaaaaaaac

SEQ ID NO: 535654 - DNA, 561 bp, Homo sapiens
gatactcctgatgtgacttgtactaactatgcatgagattttcaactcaaatgcaccttatcagtactaccctggcacagaatgaatcatgctatcgttttatttttaaattatgaaaatatacttcgaactttttcattaaaagtattgtagctaatttcagtcatagctaaggtgttttggaagttttaatgcatctgcttgctttaaaacatgctctggaaagaatgacttaagaaacattatgcaactgtaatttggtacaattatttcatttttgtgccacaaatagatgcccatttaacaygattagacaatgtaatataaaataatataatagagatttaatgcaactttcaatgatgtgtcaaaattgtacatcttcaagtggatagaaaaatctgctgcacaaatacacacacagatacacacacatacatacacacccatgtcactctgcatagctaaaatatattaaaagataatattcatttattttacttctattcaggtattagacttgttatttgttacctttatcatttattttacttcttttga

SEQ ID NO: 535655 - DNA, 556 bp, Homo sapiens
gctgcatgtggttgagcaggtcctttaacttctttgggccagcctctttaaattgtcagtaaaattgtcatgaggattaaatgaggtgagggatttgaaaaatgctttggaaagtacattaaggtattcctatcatttctcaggccatcctaccccttcctctggtgatggcagtggtgagcccttgcatggcctcttgttgggcagcatcctgaggtcgatctttggggtagagggctagaggtggaccagcttcccagaggccctgcctttctccatcccagggcctaggaggctaaatggaggaccagggctccttcctgccacctagataaggccctgagtaggattgctgtatttagcaaataaaaatagagcctgcccagtgaaatttgaatttcatatraactacaagtaatttttgagtatgtttcctgcaatatttggaatatacttatacttttaaaatattctgttatctgagattcaaatttaactgaatgtcctgtattttatgtggcaagtctaccacaggggccaattctatcccatgttc

SEQ ID NO: 535656 - DNA, 431 bp, Homo sapiens
tgcctccttctactcagccccagtttcactgctaagagcagagagaagttagccagaagccaggagccatgggtagtgggaccaaasgctcctgggacccacacctgggatcctctctcccatgctttgtagcattgtcttgtttcatgcctatgagagaccaaaccccagctcttatgtctgattatttactgcccaaaatggaattatatttcaaattgcttatttcatgtgtttctcctaattttctcaggaaccaggaagcaagactgtattttaacattgtaaggttgcattttaggtcatcagacctaaatctagcaggaggtatgtggtcctcccgaatgctcctgaggaaacagagacctgagctcaactggtctctcccaggtcagagaatatacaagaagatgccctataggacatctata

SEQ ID NO: 535657 - DNA, 469 bp, Homo sapiens
tcctgtcagtaaggaagagcttttagccaagatcaccactggccaggacactacagaaatagagccatcatgtcagcaccctgaggccaggtgattacaaatggtgttctcaccaaatgcttcctatagactattacacatgccacgcacttcaccagccaaagtaaaagtcctttactcaataaatcacccactactccccaagagcctcacatcacatctaaaacataaatccatagagaaatgtctratttctgccatgcaaaattgaagaattcgctgccaaatgagatcactgtgtgagataacacagtttgggtcacaacctgagactccccttcttaggacaccccactcaaacaggctgcttatcacagcagtgcaggcaccagagtggcagcagacctagtgcccccagcatctcagacaggctgactttacaagttgacgtggagaactggaaactcag

SEQ ID NO: 535658 - DNA, 469 bp, Homo sapiens
tcctgtcagtaaggaagagcttttagccaagatcaccactggccaggacactacagaaatagagccatcatgtcagcaccctgaggccaggtgattacaaatggtgttctcaccaaatgcttcctatagactattacacatgccacgcacttcaccagccaaagtaaaagtcctttactcaataaatcacccactactccccaagagcctcacatcacatctaaaacataaatccatagagaaatgtctaatttctgccaygcaaaattgaagaattcgctgccaaatgagatcactgtgtgagataacacagtttgggtcacaacctgagactccccttcttaggacaccccactcaaacaggctgcttatcacagcagtgcaggcaccagagtggcagcagacctagtgcccccagcatctcagacaggctgactttacaagttgacgtggagaactggaaactcag

SEQ ID NO: 535659 - DNA, 608 bp, Homo sapiens
acccaaaagccttttctacctgcctccctgcagcccatccatggggtcctcaatgctgaatccttctccacttttgcccactgccagctccagccccaatacctagagatcctgctggctgcaaggttttcctcctccttctgggtctgtatctcctgggggctttccgagggtcagagctgttcctgcttaaagcaacggtgtccccaccacagtgtttrtttcctcatttattcaacaaatctcagtggggagcctaacatatgcccatcatgcctgtcattctaggagctctctgatgaggaagcccacttttcctctacagatcatgaactccccagggtaagagacagagcacagttgagagccactgagattatggatctcagagagcctttagttcacactcctcaagggatgattggggaatctgaggccaccagaggtgaaataactcaccaaggtcaaaaaaacaaaccctaggaagaaaagaattttacacagaaatcctgtgttctcctttgttttaattccttgtgactccctaatgtctatggaggaaattaagcccaggcagaaaattgattagaggtggaaaggggagccct

SEQ ID NO: 535660 - DNA, 570 bp, Homo sapiens
ggcagtaaccggcatggaaatggttgtgcacatatgaaagtacagaaggttttttaaacttgggcaagacactttatcagtgagatcgaactattttttcctgaatggcaccagcctgggcaagtgggkttttttcctgctgggtatatacagggtgtatgctgggaaaaaaaatgagcaataacgatggggttttaagggctgcctgccaggctgccgaatttgttgaaaggtttttctcggttttggcatctgtagcctttcggtgtcccttgcaatggataatggtggcctttggtggtggtttatccacccccaacagcttatgtgtaagtttgccatttcttatgggggttccttttgtagttaggaaaccctgttcctgccagatgaaggcatgagactgtaggacatggtatgcatatttggaatgggtgtaaatgttgaccctctttccctttgctagggtgagggccctggttagggcaactagctttgcctgttgagaggtagcatggggtgtgagagcattcgattctaggagtttatcttcagcactgatggaatagc

SEQ ID NO: 535661 - DNA, 303 bp, Homo sapiens
aaaggaaaaatgagaaaattgaaataacaaaaatatatataatgaactaatccctacttcttcctgtcctgtgagccatgaaacaccaaagaaatagttctaaggaaaaggagtctgattcactggcaggtaacctatgaaccgtaacataccaagacagctctttcatcttaccgcctcctcatactaacccagtaaggcactacagagctagaaggcacctaatttcaacttaccttctgcttttcttttcttggrcaatatctaatgttaatgtgttaagtaaacaatacacccttgtaa

SEQ ID NO: 535662 - DNA, 303 bp, Homo sapiens
aaaggaaaaatgagaaaattgaaataacaaaaatatatataatgaactaatccctacttcttcctgtcctgtgagccatgaaacaccaaagaaatagttctaaggaaaaggagtctgattcactggcaggtaacctatgaaccgtaacataccaagacagctctttcatcttaccgcctcctcatactaacccagtaaggcactacagagctagaaggcacctaatttcaacttaccttctgcttttcttttcttgggmaatatctaatgttaatgtgttaagtaaacaatacacccttgtaa

SEQ ID NO: 535663 - DNA, 597 bp, Homo sapiens
gttgtgttatcttaagaaattgccacagccaccccaaccttcagcaaccaccaccctgatcaatcagcagccatcagcattgagacaagaccctccagcagcaaaaagattatgagtcactgaaggcctggatgaccgttggcaatttttagcaataaagtattttaaaatgaaggtatgtacattgtgtttcagatataatactattgcacaattaatagactacagtatagtgtaaacataactttcatatgtaccaggaagccaaaatattcatgtgactcactttattgcaatasttgccttattgccgtgatctagagcaaaacccaccgtatctctgaggtaagcctgtatacggatatgtacacgtacatacacatctacataggcaacaagatgctgaaaaaggcaagtgaaactgattttgacttctagcctccagaactgcaagacaaaaaaggttttgctgttttaagccaccaagttcatgtgtattaatttgttacagcagccatgggaaactactgaagagttgaatcttgtggaagtggtgtggttctgggttaggaaatgccattcaggtttggaattgag

SEQ ID NO: 535664 - DNA, 597 bp, Homo sapiens
gttgtgttatcttaagaaattgccacagccaccccaaccttcagcaaccaccaccctgatcaatcagcagccatcagcattgagacaagaccctccagcagcaaaaagattatgagtcactgaaggcctggatgaccgttggcaatttttagcaataaagtattttaaaatgaaggtatgtacattgtgtttcagatataatactattgcacaattaatagactacagtatagtgtaaacataactttcatatgtaccaggaagccaaaatattcatgtgactcactttattgcaatagttgccttattgccgtgatctagagcaaaacccaccgtatctctgaggtaagcctgtatacggatatgtacacgtacatacacatctacataggcaacaagatgctgaaaaaggcaagtgaaactgattttgayttctagcctccagaactgcaagacaaaaaaggttttgctgttttaagccaccaagttcatgtgtattaatttgttacagcagccatgggaaactactgaagagttgaatcttgtggaagtggtgtggttctgggttaggaaatgccattcaggtttggaattgag

SEQ ID NO: 535665 - DNA, 589 bp, Homo sapiens
cccattagttgtgaatatggaggcatggtgtaaacttaatattctggacaggaaaagtaatttttagcttcacttagaaaagaactaaaaaagaaaaaaaacatagaccagtgcctgttccaaaccctttctgcaatgcacagagttgtagagttttagctctgcccaagagaagctcaaaatatggaaattatttactcatccattcaacagaaaacaaaattgattgtctacagcactgagaaaacagaagtgaatactagagacaaagtgtctctcctcaaggatcttacattctagtgtagggagacagacaataaataaaaaacacaaacataatataattcaggtagagataaatggaattttttaaaaaattgcagaataagtgcaaggagactgatgtgagatgcatacatttcttatagacagcaatgtcagggatgacyctctgtgaaggtgacaggtgagcagagccaaaatgcaatgagaaagtgaatctagcagaacccaggcctggcagggtcctctaacgcagtggtccccaacctttctgccaccaggttccagtttcagggaagacaattat

SEQ ID NO: 535666 - DNA, 639 bp, Homo sapiens
ttatttaaaattctactgtgttcttcattcagcagagacagtgtgtcatttccatatttgtaacaagcattaatgatacttgcacagatgacaaatgtcttctctggtgaaaaattaatgcaccacaatattttccctacctggggttaatgaacatgtcagatgctgaaaatgagttgtttgaaactaaattactataatctatatttagaagattgccactaggggggagttacgggtatatgtgagtggatttttttgaagttctctttaccttgagtcttaattttcacaaggccttaaaaatactaacttgctcaatagtctcacataaagaagaaacagtccatcacattctctacaatgttggatagaactctcctgaacaattattctcatttattcattcattcagtgagtaaacaaatatatagagtactcattatgtaccaggcactctgctatgtactagggataaagagatgagtaagacatgatccttgccctcaaagagctcatagctgtacataaaaaatataacattgcaattaactgtagygatggttgggaaaaacacaggggggctgtggatataaagagatagactccctaatccacctggaatcttttctggaggct

SEQ ID NO: 535667 - DNA, 463 bp, Homo sapiens
tgcctccccgccctcttttctggtctctgctgctcctcctggtttttcctttctccatatgccctccctgctttctccyccacctcctcctatgtggaggggaggaaggaggagagagcaaaggagcagggaaaacttggcacctccgcctgaggggtgcctccagcgcctgccttctgagtaacagggtagctctggcacctccatcctggtgggggctgagggtggcccctgggggctctggcaggtagagaaggctggggatggcaggagaagggaagtgggaaacaggataaaccctactgcatacagcgtggtgcgtacagggtggtggggcagaggacgaacaatttggagctgtgattctgaatccagggcttagcaccacaggaaactagacgtggagagaccaaagtctgaggatatttagaaactgaaggattagcagggagaggattgcttc

SEQ ID NO: 535668 - DNA, 463 bp, Homo sapiens
tgcctccccgccctcttttctggtctctgctgctcctcctggtttttcctttctccatatgccctccctgctttctcctccacctcctcctatgtggaggggaggaaggaggagagagcaaaggagcagggaaaacttggcacctccgcctgaggggtgcctccagcrcctgccttctgagtaacagggtagctctggcacctccatcctggtgggggctgagggtggcccctgggggctctggcaggtagagaaggctggggatggcaggagaagggaagtgggaaacaggataaaccctactgcatacagcgtggtgcgtacagggtggtggggcagaggacgaacaatttggagctgtgattctgaatccagggcttagcaccacaggaaactagacgtggagagaccaaagtctgaggatatttagaaactgaaggattagcagggagaggattgcttc

SEQ ID NO: 535669 - DNA, 463 bp, Homo sapiens
tgcctccccgccctcttttctggtctctgctgctcctcctggtttttcctttctccatatgccctccctgctttctcctccacctcctcctatgtggaggggaggaaggaggagagagcaaaggagcagggaaaacttggcacctccgcctgaggggtgcctccagcgcctgccttcygagtaacagggtagctctggcacctccatcctggtgggggctgagggtggcccctgggggctctggcaggtagagaaggctggggatggcaggagaagggaagtgggaaacaggataaaccctactgcatacagcgtggtgcgtacagggtggtggggcagaggacgaacaatttggagctgtgattctgaatccagggcttagcaccacaggaaactagacgtggagagaccaaagtctgaggatatttagaaactgaaggattagcagggagaggattgcttc

SEQ ID NO: 535670 - DNA, 463 bp, Homo sapiens
tgcctccccgccctcttttctggtctctgctgctcctcctggtttttcctttctccatatgccctccctgctttctcctccacctcctcctatgtggaggggaggaaggaggagagagcaaaggagcagggaaaacttggcacctccgcctgaggggtgcctccagcgcctgccttctgagtaacagggtagctctggcacctccatcctggtgggggctgagggtggcccctgggggctctggcaggtagagaaggctggggatggcaggagaagggaagtgggaaacaggataaaccctactgcatacagcrtggtgcgtacagggtggtggggcagaggacgaacaatttggagctgtgattctgaatccagggcttagcaccacaggaaactagacgtggagagaccaaagtctgaggatatttagaaactgaaggattagcagggagaggattgcttc

SEQ ID NO: 535671 - DNA, 626 bp, Homo sapiens
acatgtaacagtctagagttagtagtccaggcctaatggggtggtcattctactcccagtacctaattcccaaggttgtttcacttgttgacatttccctgccagtacaaataaaggaagaagtggcctaaaggtggcactgaattgtcaatataatttgtagatatgtattagctcaatttttagcctggtttaatttttgtagttatttttgtcgttattgttgcctgaaagtgtaaatgcaaagaatggcagatatttttattttacaatcaaggagtgagcattagaagacacttttttttttttttcggaaagacagcacctttatctgctacattttctgtggcttcctcaagttaagaagctaaaactcatttttccagttttccttgcatctacagctcagcaatgcaaattatacttctctagttagatgtatttgttcaagatgcttgtatagaatagttacaacagcagatactcaatcatttccctcttgtgagtgtagcaaagtatgacagaagtattcttcttttgaggcagtgatgcccgaggtggtagcagaattagctcatacccagtrtcaatggtgcaaactgagactcttggctcactagcactgt

SEQ ID NO: 535672 - DNA, 610 bp, Homo sapiens
acatcatcctaagtcaattaatgcaggaacagaaaaccaaatactgtatgttctcacttataaataaatggagctaaacattgagtacatatgagcacaacaatgagaacaacagacactggggactacttactggagcggggaagaagtggggaaatggttgaaaaaatgttgggtaatgtgctccctrtctaggtgacaagatcattcatacagcaaaacccaacaacacacaatttacccatgtaacaaatcacacatacccccaaaactaaaataaaagtaaaataataaaaacaaatcttatccaagtgaaattaaatgaagtttttatttgtatacaaattttacttgatattggtgaatattaaaaaagaaaatactttctactaattatgaaaacatagctgaaggcctgcaatgttgtaaaacacataataaaatatttttcctagaaatgtgtgcaggcgaattagaactagagaaataaaaatagaaaaatcttttgaataaacactaaaagagctcagtaagacagttgtttgaaagaaataacttatttcaattcatgaaaagaaaagataaagtatgcaaaaagaatttattgggc

SEQ ID NO: 535673 - DNA, 465 bp, Homo sapiens
aatccagtcttgccaaagagttttatttgccttataaagttaacctctatttatcaaagcagtttgctcatatctaaaaatgagcatgattcaatcacctcccatcaggctcatttttcaaaacatgggaattacaatttaacatgcaagctgggtgggacataaagccaaaccatattatatgtgtttcaaaattgtatgagatgcctataattytcctttgtcttagtatatgttatcagtaataatgaccattatgctgaattgttgtatgccacagaaataactgaatttccttgtcaattgtgtgtttatctatggctgtcctaagacttttgcaatccttagacaattattgttttactgtgatccttctcaaagagcagtttgctatcagctgaagtctaaaacttgattttttagggaagttcgtggaaagaactctgacaggtgctgttgaatgca

SEQ ID NO: 535674 - DNA, 465 bp, Homo sapiens
aatccagtcttgccaaagagttttatttgccttataaagttaacctctatttatcaaagcagtttgctcatatctaaaaatgagcatgattcaatcacctcccatcaggctcatttttcaaaacatgggaattacaatttaacatgcaagctgggtgggacataaagccaaaccatattatatgtgtttcaaaattgtatgagatgcctataattttcctttgtcttagtatatgttatcagtaataatgaccattatgctgaattgttgtatgccacagaaataacygaatttccttgtcaattgtgtgtttatctatggctgtcctaagacttttgcaatccttagacaattattgttttactgtgatccttctcaaagagcagtttgctatcagctgaagtctaaaacttgattttttagggaagttcgtggaaagaactctgacaggtgctgttgaatgca

SEQ ID NO: 535675 - DNA, 644 bp, Homo sapiens
ttaaaacaattttaggtagatgaaaaattttggtgaattatacaaatgagacttactaagacaaagattgcttcattttctttctattgacatttctttggcttcttttgggaggcttaattattttttatcaagtcattaattgataattatttcacctaaaaaaactccttggagtgctattatatatcaagcactgtgttaggtacacagaatgtagaaataaatagaattaagttcctaatscaaagatctgtgtggtccagagaggagaacatgaccagctttggtggctgagtattctggaaggcttcatggagataatgttaatttgcttaatctcaatttagaaggatgagtatgattattttaggtaagtgaggggcagaaaagcttttagggtagaagaaactgctggtaaaaaggcaaagaggaatggaatttgtatgtcatgtttgggtaatgacaagtagttcggtggttctggagcatggggtataaggaactatttaaggagataaagtggtatggattgtgaagggcctggttcaccaagggtattagtttcctagggttcccatagcaagttaccaatatctgaacagctttaaacaatagaaatttattatctcacaattatgaag

SEQ ID NO: 535676 - DNA, 644 bp, Homo sapiens
ttaaaacaattttaggtagatgaaaaattttggtgaattatacaaatgagacttactaagacaaagattgcttcattttctttctattgacatttctttggcttcttttgggaggcttaattattttttatcaagtcattaattgataattatttcacctaaaaaaactccttggagtgctattatatatcaagcactgtgttaggtacacagaatgtagaaataaatagaattaagttcctaatgcaaagatctgtgtggtccagagaggagaacatgaccagctttggtggctgagtattctggaaggcttcatggagataatgttaatttgcttaatctcaatttagaaggatgagtatgattattttaggtaagtgaggggcagaaaagcttttagggtagaagaaactgctggtaaaaaggcaaagaggaatggaatttgtatgtcatgtttgggtaatgacaagtagttcggtggttctggagcatggggtataaggaactatttaaggagataaagtggtatggattgtgaagggcctggttcaccaagkgtattagtttcctagggttcccatagcaagttaccaatatctgaacagctttaaacaatagaaatttattatctcacaattatgaag

SEQ ID NO: 535677 - DNA, 652 bp, Homo sapiens
caatgataaattttcccaaactcagttctgagaagtgctctcaaacaaaactcaccagcactctgaagagggtgaaatccctggtgtttctcctttagcttaacatagagctctgtagttggtggctcattggcaatcttactctccattaaaatgccacagaatgcagtctgtctctcagaactgacayatctgtgtgcttgataactccctccttccgacaactgatgttgactcattccccactagtgtcacatgaacatcatcaattgtcccagggctcaatgggctctgaaaaagcatcttagcacagagaacacttctctaccaatccccgtcataaacctatttggcagcctatagcccatcttttctgcctgttctttaatcatcacctccttcccattccctcctctctgtgaccctacacacaggttccaagtcagaattggaggaaaatgataaaagaatctgctcaagtattttatagtcactcagaggttagcaattttggcctctaaccatgttccatagtgaaatcttgtcctctgaagaagataaagatgagaatttttacataaagaatttttaaataaaataaatattaagatgaaaaatacagcaattgtgattctaacaggtcaatataaca

SEQ ID NO: 535678 - DNA, 636 bp, Homo sapiens
gtaatgaaagttagaggttcaatcccagccaacccctaggccactactcattactggatgtctgctgtcatttgggggatgtgaggtgacaagtagacagagggaggacctggcatttgctgcttggtgacctgttcctgatggccagcataccttaaatggctactcaacatcagccacccctttccaaccagctatattccctcaccatcccactttctatactaagacaaggctgctgttttcatttttttttttttttttggcatcaatttttcacctgacactagagctgttttctgcccccagctcacccggtgggagttcctgtcaagcacttgctgggctccttctggaagctagaacttgtcttcagtacctcttgggatcctgttgcaaaaaggacagttgtctataatcttgatatggatactatcagattgtaagtatcatcattattagggaatccttcctcctctgttccacctgaaaaattttattttcttatagtctattcaattctaatctaccagactttaaactacygttctcatctgcccattaagaaagtgggccttcaataaggttaacgcttctagacccagcccatcccattcccagtttccttccctgcct

SEQ ID NO: 535679 - DNA, 586 bp, Homo sapiens
atcacccatcttctgcgtcgctcatgctgggagctgtagactggagctgtttctattcagccatcttggctccctctctttcactgtttctttactgttgatttctatagtttttcagtgtgtcaacatttagttttatttgtatttattctctcagtatttgtattgtactgatctgatgacttataagatttctttaattttgaaaaattatcagcacaacaatwtcttcaaatattacctccctattattcatttcattttttttctcctggaatttctacttattaaaatgttagaatatctcaattttccatatctcataacagctattgaaatatatctgtctatccctctctaagtctagcagggaaaacaataaaatccagtttattataattttttaatttaatcaataaatttcttttaccaaatctttagttgttttttaaatatccacctattcttttttcatttttacctgtttttgttgaaaaattttgaatatattttaagggaagttctgctgtattgtctctcgttttggaaatgctcaatgtttctaatttaaagtctttgtcaggat

SEQ ID NO: 535680 - DNA, 629 bp, Homo sapiens
agctatttagggcttctagaacaggaaaacctacctaagaaccaagccaacaaagaggaaatagtcaacagatggtaagagatggtttcctgaccatattactttaggactttgatcaagccatgcctagacttttcaatcttcttgggtaaaattttctggttttgcttaattgagtagacttttttgttatgtgtaactaaaacagccttaattactacactagtatcattttcatggaaaggaccacaaattccccagaaaagactgccttctaacaaatctactaagtctttcmaaagtagttctagaagtcagtaatacaacaatgcataccttttgaaaactaaagtttgaaaagcattgccctagaaaacaagctcaacttatatcttatttatctttgtatccctagagacttgtatttggtctagtatataattaatattcaatgattattgaataaagtgttctcaaaattctatacattacttgggcaatagaatacaaagaggtacaaaaacaggttattttcatttcagaacatcaaaaatcgtgtaattaagtgttgattacataataattaaatgattgattacataataattaataattcatattttctcact

SEQ ID NO: 535681 - DNA, 494 bp, Homo sapiens
agtggtataaaatgcaataaatgccatctgcacagtgaaagcaaatactattattcaaaagagggcacaattcctttcacttaggagagcaagagtgatcaatattttgtaattgactcttaagtaatataaagactttaatagacaaaagcctcagtgggtagcatttcaggtgaagaaaggagtatwaaaaaaaggtaaaccaaacaaaaacaaaacaaaacaaaaccaggagaggatacacataaattaatgtgtagtttagctcaaaatccaaagcctaacataggacattgttcaggtacgctattgctgtgtaatctgtagcatatcacctgaaaactcaatggctcaaaacagcagtgatgttattgtctataatggtttctgtaggtcaaaaattggaggcaggcttggctagacagaacaggctcagagtctctgctgaggtttcagtcagagagaggctggagctggaaagtgggggctgcagc

SEQ ID NO: 535682 - DNA, 494 bp, Homo sapiens
agtggtataaaatgcaataaatgccatctgcacagtgaaagcaaatactattattcaaaagagggcacaattcctttcacttaggagagcaagagtgatcaatattttgtaattgactcttaagtaatataaagactttaatagacaaaagcctcagtgggtagcatttcaggtgaagaaaggagtattaaaaaaaggtaaaccaaacaaaaayaaaacaaaacaaaaccaggagaggatacacataaattaatgtgtagtttagctcaaaatccaaagcctaacataggacattgttcaggtacgctattgctgtgtaatctgtagcatatcacctgaaaactcaatggctcaaaacagcagtgatgttattgtctataatggtttctgtaggtcaaaaattggaggcaggcttggctagacagaacaggctcagagtctctgctgaggtttcagtcagagagaggctggagctggaaagtgggggctgcagc

SEQ ID NO: 535683 - DNA, 634 bp, Homo sapiens
gtgaaaatgcaatgcactgcagacataatttgtgtgtttttctatataatatagttcaataaaaagtaaataygaaacaaacaaatacacaatactctcaaagacaattgtgtgggggtggttaaggcagcttgaaatgttataaactccatttaaagtgtatacacagtcaagtttttaagcctttgatttatatttcttatagatttaatgattaaaaatctcaaattttcacatccagtcgttgggatgtcttgtacagatttagctttatgtaactatctcccttggtaattttatgcaactatctcactggataattatatcagctaatcctttttctctccaagaatactatgggaatattctccatgaaataactgattttcttctcttcatgatttctgccttatatttattcaccctctgactcctatttctttcatttctgtattagttcattctcacactgctattaggatatacctgagactgagtaatttataaaggaaagaggtttaattgactcacacttcagcatgattgtggaggcctcaggaaacttacaatcataatggaaggggaagaaaacctgtcctacttcatatggcagcagtaatgagaagaatgagtg

SEQ ID NO: 535684 - DNA, 659 bp, Homo sapiens
cttacttttcctcagttagatctgccttgtgcaacaactgttccagacctttcagcatttacagggtgtcccactactcacacactgggccccatttcattaaagatagtggctacagactcccacatagaagtggatggccaacccaggattttcctcttcacccatcccattgtcttggcactcatggggatttcctcaacctcatactgggcttgccaattgtcgtacagacccctattaacttcagtagggatagcaccatgttcaagaggccgaggaaaagacctggctccagcaaaggacatatgggtgggggactgggggacttatatcagggatggtcyagtgctggacaagagaaacagttccatttgtaaaaagcatacagtttacatagatcacgtgtgtctgtgttctcagggaatgcttaagttattgctatcaggtgcatctcccaaaaagctataaatagaaggaggtagtgtggtctgtcaaacaattcaggaatgatttttttggctaatataagcaccacatgaaaaccctcagaaggttcgatctggtttccccaagtctcaatgagtaaggttgaagatggtgaaaactgatgcaagttctaaaacatgctatttgaaaaactttagtaaattcttcta

SEQ ID NO: 535685 - DNA, 615 bp, Homo sapiens
ctttttataaagtttggcccttacatactattcagctacttcttttagtgctcagataataaatcagtgatgaattttccagcaggattttcagaagaattgtcaggcaaggtggtgcctagcatagctcaggttcccctaacatttagtggactcatgtgacaaggctcctgcacaaactctctccctagagttgcccaagtttccttcatgttcccatggagccacttaaaacaatatctgacaaggctaagaatcactggaaagaagttggtgctacaagtgtgaaaagcaaactgaactgcctggccaggctgcaacagcttcccatttcacgttgcagtttaactttgagcagttaagaaatccctctctcatgctgtaagacactagctaagggatagtttctcaaagaccaaggatggtttgatagcttttctctgtagtgcttccattttttcagtctttctactccatttatcaggaaaactattctgtggacgtgacatcatgaaatttttttccaatccttagttatttctttaaaaagcctgcataaaggccagatwaaaaaagacttatggggccacctgtttattatgtggcagcacattc

SEQ ID NO: 535686 - DNA, 567 bp, Homo sapiens
gcagccagaaagcagggtttaccgctggccccacagcgccatacggtctggggaaaagaaggaaacccaatagtacacaaacaaaggcccaaagagaaaccttccaagtgctctatgcctcacggtttagcagaaaatatcaagcaactctcaacctagctggtctgtagcttccacaaatgaaatactgtattcattgcagcctttctggttgagatatttcaaatatttggtggagcttttaatgagacggagagacactctcgagtgtgraagaaaaacatgagggggtgtgaggataaggcgactttaggacagaaaaaacaaagagacaaggaagccacgtaaacgttttcgggtaggcgtgaggcgatgtcagttttgaaccccgtttatgttaggtagagagcgcagccctcttctagcacaaacaccgtttcccacattgaagaaatcacagagatcagcaactctagagtgcgatgaagaagcttcactctgggagaacccccttcgtgaccacggtctctttcctgccaggtaagtgggaatgagcgcatgccctgc

SEQ ID NO: 535687 - DNA, 674 bp, Homo sapiens
atggaggtgggggagaccaacaatgttattctccctcacactacatacaaaagtaatttgaggtgcattatacaccaaaacttaaaagttaaagatataaagcatttcaaggatactctgtaggtaaagattagcctaccaacaagtaggacactgaaaaaatatatataaaagacatgataaattagacttcatcaacattagccataccttctcatcaaaagataccactaagaaagtgaaaaggcaagcaagccacagacagagagaaaatagtcacaaaacgtatctgacctccacatcctgtaattagaattattgtggtctggtacactgcacccagtttctgcaggagtactttctgggtgtctctaatgagtaagagagggccccatgggatattcctacagttcccagatgaacagtgggaaagactctacgttgacaaaccccggggacctgaaaactcaggtcctcaaggagggtagaggatacctggaccctgacccagacccctagatgggctgtgccaagagacccagcaagggaagggattccctcctgcctcaggttctctgttcttctgtggttagaagacctgaacccaactccctcyccaagcagtggagatagggcttttccaagggctggggatcttgctgtcctaaggacag

SEQ ID NO: 535688 - DNA, 674 bp, Homo sapiens
atggaggtgggggagaccaacaatgttattctccctcacactacatacaaaagtaatttgaggtgcattatacaccaaaacttaaaagttaaagatataaagcatttcaaggatactctgtaggtaaagattagcctaccaacaagtaggacactgaaaaaatatatataaaagacatgataaattagacttcatcaacattagccataccttctcatcaaaagataccactaagaaagtgaaaaggcaagcaagccacagacagagagaaaatagtcacaaaacgtatctgacctccacatcctgtaattagaattattgtggtctggtacactgcacccagtttctgcaggagtactttctgggtgtctctaatgagtaagagagggccccatgggatattcctacagttcccagatgaacagtgggaaagactctacgttgacaaaccccggggacctgaaaactcaggtcctcaaggagggtagaggatacctggaccctgacccagacccctagatgggctgtgccaagagacccagcaagggaagggattccctcctgcctcaggttctctgttcttctgtggttagaagacctgaacccaactccctctccaagcastggagatagggcttttccaagggctggggatcttgctgtcctaaggacag

SEQ ID NO: 535689 - DNA, 471 bp, Homo sapiens
aggaggagcttgggtggtggaggagaggaaaccgggtaagatgtgtgaagcagtcggctataccaggcacagagaggacccactgggacacaagagcctgcatgtgaagccaggccttgggccaccttgttcctcaaaggggtgcttacttccatgggatcttcaaagggactgtggaaagagaagccttcagcccacacctctgaatgcttttccaccacagcatgccctgtggcctgtatcctgctggtgtggaacagtcagacccctgcagggctgcagagcctctgtactgggcggcatcccagcctgagtgccagagctcagtgggcaggcccccgagcaagcagagaggagggcaccttttggacagaacctgtgggacaagagcgacgtctcatcckttcaggttcctcacaaaatgacagtcaggaagatcagggtgcagacctgatttcccacgaagggctg

SEQ ID NO: 535690 - DNA, 471 bp, Homo sapiens
aggaggagcttgggtggtggaggagaggaaaccgggtaagatgtgtgaagcagtcggctataccaggcacagagaggacccactgggacacaagagcctgcatgtgaagccaggccttgggccaccttgttcctcaaaggggtgcttacttccatgggatcttcaaagggactgtggaaagagaagccttcagcccacacctctgaatgcttttccaccacagcatgccctgtggcctgtatcctgctggtgtggaacagtcagacccctgcagggctgcagagcctctgtactgggcggcatcccagcctgagtgccagagctcagtgggcaggcccccgagcaagcagagaggagggcaccttttggacagaacctgtgggacaagagcgacgtctcatcctttcaggttcctcacaaaatgasagtcaggaagatcagggtgcagacctgatttcccacgaagggctg

SEQ ID NO: 535691 - DNA, 648 bp, Homo sapiens
agctggaatgagtcaaatactgttcatctagtgagtcctccaggacttcatccatttcttcctcctggacttccctcttgagccaggtgaagtaggcaagacaagggattaaaccarggcagcctggaaccacatagctagttctgatctgaagctcatggaagaggcaccaaaaccaaagggaccatcacatcaaagaggaagtatacagtccacttttgactgggagtaaagtgtgcctagagttagtatagaagtgaaaaaagcaagtgatcagtgcattgacctcataacacacagataaggcagcagactcaacaactactctacaatacgctcacggcacacaggacacacagtgacccatactgtcggcttcaaaatgctgtttaaattttatttaatatgatgtggagtggtccactgaatactggctcttgagacaacacaacctcgcagggcttttgcagattttagacccctagctctaaatacttggtatggtttcaatttatttttcaaggtaaatttctggctataaaatatctgccaacataattcaggacaactgtgcagaaaccagataggcatctcactttggtttgtaaccctataggttttaaagatacagaaaccagggatccctgg

SEQ ID NO: 535692 - DNA, 597 bp, Homo sapiens
cattgattcttttagcatctcaaatgttaattagaataattggaatcactttttaracttttcaagttaccttccttgggaagtttgtgtagtgttacagtttagtttagctcctcttatagggcaatggtttgctagtttaaaactgtaaccaaatgaactggtcagacaactcatatctaaaacacttaaaatgttagaacgtttgggaatgttataacctaagcgtttttgctgataactttttgttatttatagacatttgtgtatttaacatacttacttctggaaatatatgcctttcctaaaacttaaccacacatccactaccatggcctatgtatagaattgaatattttggaccatgttatctgtggcacagtcagtgctgtgtttgaggtaaatgcagtaacggttagttttctactttgccttataaaaggtagaaaccatgtgtatgttatgtttgtctataaaagaaaaatactaatattaaattatttcttatgactgtgagtcactcacttatttttccaataattgatattgtacattcttagtgccattaggtatgtatgtatgtaacttttacagttt

SEQ ID NO: 535693 - DNA, 624 bp, Homo sapiens
ccccgcagctccacccggcagaaagcccaccagaggccctgccagttgcacgccccgcggggtgccgagaaatcaatgctttgtaaaaagaacttccccatggaaaaaatctcttgatttccactctcagtgctctttaaaggattaaaagctaaaggagacgatggattcattcgacaagtcctagtcgtgcgccttagtgagtgccagaccctgctccccgcgaggggacccaggagcgaccctcaccaccatccctgccctggtggagccccggtggggaacacaggatccgaagatggcagcggaagctccgcagcagcccaaaagcgactgagcagggtggatacaggctccttcactgggtgaaggcggcacaaagaacgggaagaaccatcccgggagsccaccaggcgttcagcttccccttgggacctcaggcggctcgggctgggtcgccgaccgcggagtttctgggggcttctgaagcaagagaggggcagggcgggcgaaggccattcggctctccgtctggctccagaatctcctaacgcgcaggtatccaatgtgaccagcgcaactcaccgctctaatctctctggttttccaaagccttgctcagtc

SEQ ID NO: 535694 - DNA, 557 bp, Homo sapiens
gattttcacagaccctgagaacccaagagactgcagaccatgggcagacaaatctctgcaaaaagcagccccgcctagataaaggaagagctgtgcggccttcgcgctagctagcttgtgtaaaggtcgacgattcttatttctcccggggcggggagaaagcgacatattactactatttctcagccttcgactgtgagagtaacgattaagactaaaacacaagccagtaaaaaaaacaagtaacccttgctgtgtagactattctttaaactacaaaaaatcaggggaaagcgcgaacgcagtcccccactaccacaaattatgcagtcgagtttcccacatttggggaaatcgcaggggtcagcacatccggagtgcaatggataagcctcgccctgggaaaaccaccttcgtgatcatggtatctcccctgccaggtaagtatgagctcttgcacctccgccccgccacagcctcacacgcttcaccctttacacrcacggtcacttgccccgcgcaggcccccccccccccccccccccagccctcctagc

SEQ ID NO: 535695 - DNA, 588 bp, Homo sapiens
ccctatcggtgatgtcaccgacagtgcctttcccagtccccttctgttcttccgccccaccctctgccactcagccgaccaacacgctgccggagcaggcgggggaagtgacgtctgcctgtccctcctttccttcccgccttgtcctttggggaggtgcgccaagaccctgcatctagtctctcccaaagaggtgactacttaacctgtgccctgcggaggaaccttytggcggccagctggaagcctgtgcacccgtcttcaaataaaggcttttaattcgcagactagaacgtttaggattacaaagaaaactggttcctttcaaatctggttatgtttgtgaaatagcattccgcttaaaattggaagcccttcaatatcagggagaaatcatatctatgaaactagagaggcaaaccagccatccttactggttttaccagtagtagtgttataaagaaagttgtccaatttcatgaatcttgtaagtttggttttttgtttttccaatacagtactgtacaaaaaggaagcggaatgtggttgcagtcttaatgtaatgcctctctgggcctgagaatttga

SEQ ID NO: 535696 - DNA, 526 bp, Homo sapiens
gtgaacaagaaacattcatgcccccacctaagtttgctcctggttgcatcaaaacctgtttgcaaatctggagaagccccagctctacaggtgagctccacccaagcaggtgagcgtcactgggggtagagrcaatgcccaacctagtttggcttcttttagggtttcctttccccccacttcccccagcccgccccatcccgcccctggattctggaccacttggctttatgtatctagcattttcttgatctcttgttattaagacattttgtcttgtccactgtttatgcctctagctgtgatatgctcctccagactgatgagtgactggatgtgtcaggccactcacattagctcctattcccaccctgtgtgctttcagatcttggggaacatctcttccttcctgcaggtggtccttgagtgacccttcttcctatctgtcctggtttgagtgtcagactacatgttgatgggtatgtttctgaaatacctaaatataatgcttggcagaagttaaatg

SEQ ID NO: 535697 - DNA, 526 bp, Homo sapiens
gtgaacaagaaacattcatgcccccacctaagtttgctcctggttgcatcaaaacctgtttgcaaatctggagaagccccagctctacaggtgagctccacccaagcaggtgagcgtcactgggggtagagacaatgcccaacctagtttggcttcttttagggtttcctttccccccacttcccccagcccgccccatcccgcccctggattctggaccacttggctttatgtatctagcattttcttgatctcttgttattaagacattttgtcttgtccactgtttatgcctctagctgtgatatgctcctccagactgatgagtgactggatgtgtcaggccactcacattagctcctattcccaccctgtgtgctttcagatcttggggaacatctcttccttcctgcaggtggtccttgagtsacccttcttcctatctgtcctggtttgagtgtcagactacatgttgatgggtatgtttctgaaatacctaaatataatgcttggcagaagttaaatg

SEQ ID NO: 535698 - DNA, 544 bp, Homo sapiens
ctgcatcctcccctcttatcagaaaacaagcccaaatctcagccataatgaatatacatagacaaaaatcaatcacaaccaaaataaacaaataattttttccctttaaagcaaaggctctttcctctcttacaatcaaattttgaaaaatctacctgccaactccacttcatccccatcactcttcatttttcactttagtgtcttccataaccactatactgaaaatcttccataaaggttaccaaggtcttattaataattctactgwaattgtgttcaagatatgtgaaaactaagagacacaacaatatttattttgcgagtatctctttaagctatgtaatgctgttacagaaatgagcaggacttagcacactagcctttaataaatatgtgctgaattaaaagaaatgaaattcatccatctatgaaatccaagaaagcaataaaataatcaaatcaatggcctttgcctgatttttaatcattcaacattttgaatagcatttctgactgttgaaccataatcttctccttggaa

SEQ ID NO: 535699 - DNA, 537 bp, Homo sapiens
agaggtcctataaaatctcattccaattctaggctaaaaccaaaatcagatagataatcactcagtgacattgaaagatattgagcatgaaagaaagtatttgatgacaaaagggaagaatacattcctgcaaataatttcatatataaacagaataaatttagtctttttttggtccaaaaattttcataacttttaaacattaaatgcataacacaacacaaagtgctaaattacaatggagaaacaaacatcaagttttgcaaagaaatgattgtgtcccaagacttttatgtccaaccagattgttgattatgtataaaggtgaccatgatgtgactcagaacctgtaactctagtgcatattttttgagactgtattcatagatcaaaccaacttagaagctaatcaaagtcagraactcaagcatagaagtagattattcaattgcatgagtatagaatagaatgaaggcaattaatctcatattgcttagactgactacattaaattaaactggtcattgttgagaagca

SEQ ID NO: 535700 - DNA, 570 bp, Homo sapiens
tctcccagcacgctcagggcaaaaaacatagccatctgtacctgtgaatggaccatgattgtatcctcttaatctattctctgcttctcctcatcagtttacagtcagtgtttrtttgaaatgtaaagcctgaccattcaactgccatgattgaagcactctgaaagacttccatggccttaggataaagttcatcctcctttacaaggagcacaagacccttagaattccagaccctgatttagtcttcatcttatacgagtaagttcctcataatctattcttccccctttccagactttttgagcttgtttcagtacctcaagggtgtctcttctctcctctcttctggattttgcatctaaatgaggccagtgcagtgtggacaatatccataaacgtagtaggtatgatggttaagaacacagatgcaagagctaaaatgtcagggtctgagttctagctctgcctttaaacattatataagctaattatttttcatcgtcagttatactttccttatgtataaaaatcaaaatcaaaataataataatattttaccgcataggc

SEQ ID NO: 535701 - DNA, 638 bp, Homo sapiens
gagagaattgtgatatgggaatctggacttggtggttttcttggagaaaatcatgtaatttagagtctacaaaatgggrttcagtttcatgaaaattggaccctggaaaaggcaaaagtctcataccactttttccgaatatgctagaatattgcactactatttcattttctttaaagccgttgtcatttcagtgggcatgtgcttctttcacttttattgcttgtggtttccagagtgctcatttgttcctgaatttagagctatttcaattttactcttatctctgcataactgctgactttcccctcttatttccaaggtaaatcggttaggtttagtttgcctttttcagtaaatcttttaaggaatgtatgtgagttagatatttcatgtgtattttgattacattttattgatttaaatttttttatcagagagtgtctaacgttatgcataacgtttaaaaattctattacatttagaccacttatattctagctttcctaatggattgatttcattatagattttggaaaaaatgagtccagtacactctgtaagaatagtgaggtggctgagggaaggctctggagttagacttactgggtatgaatctaagctttgctgcttaccag

SEQ ID NO: 535702 - DNA, 638 bp, Homo sapiens
gagagaattgtgatatgggaatctggacttggtggttttcttggagaaaatcatgtaatttagagtctacaaaatgggattcagtttcatgaaaattggaccctggaaaaggcaaaagtctcataccactttttccgaatatgctagaatattgcactactatttcattttctttaaagccgttgtcatttcagtgggcatgtgcttctttcacttttattgcttgtggtttccagagtgctcatttgttcctgaatttagagctatttcaattttactcttatctctgcataactgctgactttcccctcttatttccaaggtaaatcggttaggtttagtttgcctttttcagtaaatcttttaaggaatgtatgtgagttagatatttcatgtgtattttgattacattttattgatttaaatttttttatcagagagtgtctaacgttatgcataacgtttaaaaattctattacatttagaccacttatattctagctttcctaatggattgatttcaytatagattttggaaaaaatgagtccagtacactctgtaagaatagtgaggtggctgagggaaggctctggagttagacttactgggtatgaatctaagctttgctgcttaccag

SEQ ID NO: 535703 - DNA, 656 bp, Homo sapiens
gtggggggaaattagaaaagctaagggagtattaagtagaaatttttgttttcagatttaattttcttccaatttaagttttgaaagtttatgaccactggattaaaaaacttttcttccaatttaagttttaaaagtttatgaccattggattaaaaaacaatctgttttctataaatcctttcagttaggtactttcctcccataaggccatgaactaactgagggcagggatggcatatgagtttcctattaaacctgaactaaattaacacaaattcagtggcttcaaaaaacacacatttattaccttatggttctggatgtcagaagtccaaaatgggtcagcagggttcatttgttctgaaggttctagggaacaatctttttgttgtcgttgccttttccagcctctagatgmctcttagattccttcatccaggagcccctcctccatcttccaagcacaccactctaacctctgcctccatcatcacctcacatttcctctctgtctctgacccttcagcttccctcctgtaaggaaccttgtgattactttgggcccacccagataatccaggctaatctctcaatcagaagatccttaatcatattggcaaaatcccttttgctgtgtaaggcaacatattcac

SEQ ID NO: 535704 - DNA, 565 bp, Homo sapiens
caaagtctatgagacgggcacgcrtcttgcccagtgttgacgtctgtagtgactccgtttctaatgtgtagtcccttctcttcctttcttcctctccctcttcatccttggctccttaccggcctctgttcctccctcccttctttccttcctggacaaccacgtccagcgggtgcgaggcactgtcctaagagctgatggtccaagtccaatggagacagccttccttccttacaggagggacagggacaggagaatggaaggtgatcccagggcgctgtgctgggtacattctgaggtgctggggcttaacacttcaacctgtctcctggggggccacaattccgcccactgcagggctccattcagggttccccaagcccaccctccgtccctctacagctctccccgcatagcaggcctcggtttcccctgtgtcctcgctgtgagcacaggacgttcaggattgctgacccatgttccttcatcgtcttcccctccactgggttgtccgcgtatttgatcatctgagccaggcatggtacctttcggtatgaaaggaggt

SEQ ID NO: 535705 - DNA, 565 bp, Homo sapiens
caaagtctatgagacgggcacgcgtcttrcccagtgttgacgtctgtagtgactccgtttctaatgtgtagtcccttctcttcctttcttcctctccctcttcatccttggctccttaccggcctctgttcctccctcccttctttccttcctggacaaccacgtccagcgggtgcgaggcactgtcctaagagctgatggtccaagtccaatggagacagccttccttccttacaggagggacagggacaggagaatggaaggtgatcccagggcgctgtgctgggtacattctgaggtgctggggcttaacacttcaacctgtctcctggggggccacaattccgcccactgcagggctccattcagggttccccaagcccaccctccgtccctctacagctctccccgcatagcaggcctcggtttcccctgtgtcctcgctgtgagcacaggacgttcaggattgctgacccatgttccttcatcgtcttcccctccactgggttgtccgcgtatttgatcatctgagccaggcatggtacctttcggtatgaaaggaggt

SEQ ID NO: 535706 - DNA, 565 bp, Homo sapiens
caaagtctatgagacgggcacgcgtcttgcccagtgttgacrtctgtagtgactccgtttctaatgtgtagtcccttctcttcctttcttcctctccctcttcatccttggctccttaccggcctctgttcctccctcccttctttccttcctggacaaccacgtccagcgggtgcgaggcactgtcctaagagctgatggtccaagtccaatggagacagccttccttccttacaggagggacagggacaggagaatggaaggtgatcccagggcgctgtgctgggtacattctgaggtgctggggcttaacacttcaacctgtctcctggggggccacaattccgcccactgcagggctccattcagggttccccaagcccaccctccgtccctctacagctctccccgcatagcaggcctcggtttcccctgtgtcctcgctgtgagcacaggacgttcaggattgctgacccatgttccttcatcgtcttcccctccactgggttgtccgcgtatttgatcatctgagccaggcatggtacctttcggtatgaaaggaggt

SEQ ID NO: 535707 - DNA, 635 bp, Homo sapiens
ccagttcacgtacacaaatacacgtacaatctaagatgcgggagcccactgccccacagcctcayagggagggaggtcccttggctgacacctggggaggagagtcccacccaccaccctgatcgtggtcctcctaggaggaggaccttctctgccctcctagggaggagccagttactgctgcccacaaggagggcaatgatcccattaccagttggccttagggcactgtgggcccagccctgcttggggcaggtgtgaaagtgaaggtctacctgactctgaacgcttggccacagcctctcctcagtggaggcccatagcctccatccacaagacaacgtgagaatgtgaaatcaggagaatggagaagtaccttctctccagagggaatacagtgagtgaaatcaggagaatggagaagtaccttctctccagagggaatgcagtgagtgaaatcaggagaatggagaagtaccttctctccagagggaatacagtgagtgaaatcaggagaatggagaagtaccttctctccagagggaatacagtgaatgcgtgcacgtgggggctctcccactcaggctgtgtgacctcaggcaagcaccttagcttctctgtgcctcagtttcctc

SEQ ID NO: 535708 - DNA, 635 bp, Homo sapiens
ccagttcacgtacacaaatacacgtacaatctaagatgcgggagcccactgccccacagcctcacagggagggaggtcccttggctgacacctggggaggagagtcccacccaccaccctgatcgtggtcctcctaggaggaggaccttctctgccctcctagggaggagccagttactgctgcccacaaggagggcaatgatcccattaccagttggccttagggcactgtgggcccagccctgcttggggcaggtgtgaaagtgaaggtctacctgactctgaacgcttggccacagcctctcctcagtggaggcccatagcctccatccacaagacaacgtgagaatgtgaaatcaggagaatggagaagtaccttctctccagagggaatacagtgagtgaaatcaggagaatggagaagtaccttctctccagagggaatgcagtgagygaaatcaggagaatggagaagtaccttctctccagagggaatacagtgagtgaaatcaggagaatggagaagtaccttctctccagagggaatacagtgaatgcgtgcacgtgggggctctcccactcaggctgtgtgacctcaggcaagcaccttagcttctctgtgcctcagtttcctc

SEQ ID NO: 535709 - DNA, 565 bp, Homo sapiens
gtgcacactgtgttcttattaaacactgtggtcacagttgtccattctctgggatcctcagtgcctcctgccattggcctcctctctgcactgctgcagcccccrcagcactgtagctgccctcactccccactctgagctgagctccttgcagagctgtgttctctgagcccctcctcctttccggtcctgcccctccactccccccggagtcatcctgtgagggctcacaaaggccttttacttctccccacacaatgaacatgctgggaacttccaccaactggacttcctatggcctttgagataagtgatagttcttcctccttgaagtctctcctcccttggtatgtaactccaagcaagctatactcaatgtacacaaaaccatttagcatctgtcatggtttctcactgtctgtaggatgacgtctaaactctttagcatggcattcacatggcttacgatatgattcctggaaaataaggttctggtcttattttctctgttccttcataggcaccctactccccagcaatatcaaaaaatcttgcaatttcccaa

SEQ ID NO: 535710 - DNA, 622 bp, Homo sapiens
ctcaaagcagtgaagtcctgaaactttgagtgtcaacctctgcaccgtgcaaaggcgaccaggaaggactccagagagggccaggctcggctggacaccagggcgacggtcactaccggtgttttgtggggagagccagtgctgccgtctgccgcctcaggctgcccttgcacctccctgctcagacccgtcacgtgtgagcttcctcacagaggcggccccattgctgaggaagaaccatgagcatctccaccctggaacagttgcagaatcctcctaaaatcaaggccagaacttcacagccaaaacgccttacttgaaatttttagcttaatgaaaggaaacatagttgtatggtaagtggtttgttttattgtattttaacgaaacatgtaataaacataactatgttttcattgttagaccaaaagaatcaatcatatatacatatctttctgkgtgaatttttctctgacaagattagacagcagccacctagaatgcccttgacatgtgactttggcctccggctggaaaggagcattgctcctgcagaagttcaagggctccgtgagctttcccgagggctccccctactcctgagttcacgtcatttcctttc

SEQ ID NO: 535711 - DNA, 601 bp, Homo sapiens
gctgcgcatctgagcctcgccacagccaagcagaaaggaagaccttacaaagcacgaatgtggaaatggagtgcgcactgcaacatctgacagcgtgcacgtgtgtgcgtgtgttagttgtgtgtgtgcgtgtgccgtgtcgacaggaggaagagcagtacacagggaaggagccacatgtggcttttgagagatttcatttgtaacagggcttccccagcgactcctaatgtctgttctgaaaccatcaaatgaatttaacacacgttttaactgatgaaggacatgtctccaaaataattccatcgaattttattttaatcaatagggccatcascttctgtgagggggattttctcagtatttctgggtggtgttttaaaggaagttgaagaaggtggtctcccagtgcagcaacatttgtaaaaggaagccacagggcatagtgtgttcatgtgtgtttgtgtgtgcacacatgtgtgcccatttgtgcatgcatgtgtatgtgtgcactagtgcatgcccatgtgtgtgctgtgcatatgcaggtgtgcacttatgtgtgtgtgtgtgttgtgcatgcacatatatgttgccttat

SEQ ID NO: 535712 - DNA, 588 bp, Homo sapiens
agctgtttaagtctggtaaatgtcagggagtgaagaggtaggagtctagcagggccatgttttcaactgtacccagaacagaaatgtgtgcaaactcatcatccgtcttagtagggtgagagggcagggcatattgagaagaggaggagtgttctttctcaaagctgactagtttctgtgtcctgggaaaggagagaaacacattgcaagaaaagatagtacacactgcctccatttaaggcatgaaatcacttgataatgcacctctcgaatgacgacattaacatttagctgccacctggagaggtgctgttcctgcaagttgagaactatacttctagtaatgggggaatgcctttgcctctcaaatagtggtacaggcgccctcaagtatgcagtactgtgccaggggttgtgagaaaccataggatcaacacattgcttcttcatggagtactaaatttactttggcaattttagcaaacatttaaaatgttgaggaccacctgaatacataaacaaaatcaacaaatcctttctctacagatgagtcaatcttaraaaatatgagagtaggatatttttata

SEQ ID NO: 535713 - DNA, 570 bp, Homo sapiens
tttccatggtttctaccaccacttgttaacccatatttaaactttgataatgccacagtatgctattttcatcttatttgttctacaaattttacaattgtataatagttgtttggttatggcttctctttactactttcttttattctttcactctccaataagtaacgtctctcatgacaattttatattaatcctcatagacacatcacaataaaaagtcactcaggtctctataattgacataccattgggtaacgaaaggttgtatacatattattatcacttcttctgaaagtttcaatgcagctatcaatgtccctgaatagaacaaactgttatagcacctttatgttctccaaatatattaaggtactttccccaaggtgtcccatatttccaaatcaatatccacagattagaggaattagtctattcaggcactaaatcaggggttttaygtacattatctattttaatctctgtaataaccctgaaacatagctattattatttctgtgttaacaactagaaaatggaggctcaagaagcttatgtttctctccctca

SEQ ID NO: 535714 - DNA, 539 bp, Homo sapiens
ctgaaggccttcactcttaatcagcataacattttccttgtttactctattaatttacttagcaaactctttttcatggaagcaggttaaacaaagattctgagtaacaaagctctaggtctcagcagatggcccataggaacagccttgttggtctagtcaaaacaaattttgcacagcaaacacttgctctgttccacggccttgtcacaatcacattccatgtcagaatcattctctgtggaggaaaaaaactttaattggtgactgtttggtgtttgccttgtaagcagtcagagttggccttgggtatacatatggaaatagtctaagtttgycagctaagtcctgccctcttgttttcttatccttctcccttcttctatgctactggagatcttggtctcacaaacaagtagttcattttcctgccccccatggaaatgcctccttctaccaatgatcagtcgccattccactggaaaatttacatcactaataacactattcaaaagaaaagacacccagcattgtgccat

SEQ ID NO: 535715 - DNA, 501 bp, Homo sapiens
tacagcaaatttcccacgtgtgttagtctgctctcacactgctgtaaagaactacccgagactgggtaatttataaagaaaagaggtttaattgactcacagttcttcgggctatacaggaggcatggttggggagacctcaggaaacttacaatcatggcagaaggtaaacgggaagcaaacacgtcttaacatggtggcaggagaaagagagagtgaagagggaagttttacacactttcaaacaaygagatctcatgacaactctcacaaaacagcactagaggattggtgctaaacctttagatccaatcatctcccaccagcccacacctctaacactggggattaaaattcaacatgaaatttgggtggggacacagagccaaaccatatcaccatgtgtggaacataacttattatcttgcttcttaacactattctttgttctgtattcataatatctaatcaacaatgatttgctgagaatttccaggtaat

SEQ ID NO: 535716 - DNA, 602 bp, Homo sapiens
gacaatgttcacttgttcactgcatcatttttcacaataaacataaaacatgaaacataaaaaaccaatcatagtgagaacttgtatcaactaagtctagttttagtaactttaaaaataaacattataacatttatttgctaatgaaatcctaaatatttgatacattgtgagtacatgaaaattaataaaatatgaaaataggaaagagttgagagaaaggttagtctattccaaattatctgcacaattggagtaggtgatgaaacaatcctaactagacaataatacagaaaccgattattttgatattcgttaaatttttaaactttcttgtgawtatggtctggtggtctgggatcattcaacctttggaaccaaagagaagcatgggaaaggtgtccagcttcccccgttccacacctgcatgcagaatcattgtggcactgtgctttgttctccaattcatcaagtactcacatttgtggttgcttccccaccacatttgcaatgggtctttcagcccacaccagtgcttacctgtactattgcttttcaagttggcctcatctctcactgagagcttcttttctaccagcagc

SEQ ID NO: 535717 - DNA, 596 bp, Homo sapiens
gacctaggaacttgccagtggcttcagatccacagactttaagattgatcatataattatactctctgtttaatattaaaaagatgaatattaaattgtccctatgtcagtataaaaatcattaacttacaagygctcccagccttcctttgccctaccctcatacaggatcttctaagttgtcccatttggttctcttttctacccactctgctttatggaggacctttcttattagacctggtgttttggcttttgtgagaaagaattggaggaaggcaagagggtatgaggaaaatgtgagattcacaaaggttacagaaaaattgtggcctggagaatgatgggcatgggagcagctttggggtgagtcaggtggacggaaaaggaaattcagggaggttttaaggcctgttgaggaccaagtgttcccattattgtatgattttgaaattactcttgctttccaggacgtttccctttcaacagtggggttgagtcacccaggtcagcatttccaagtgttatatttgatggtggtaatgggagttaaagccaaggtttgaagccaagatttaaagccaaggtgtcatacc

SEQ ID NO: 535718 - DNA, 596 bp, Homo sapiens
gacctaggaacttgccagtggcttcagatccacagactttaagattgatcatataattatactctctgtttaatattaaaaagatgaatattaaattgtccctatgtcagtataaaaatcattaacttacaagcgctcccagccttcctttgccctaccctcatacaggatcttctaagttgtcccatttggttctcttttctacccactctgctttatggaggacctttcttattagacctggtgttttggcttttgtgagaaagaattggaggaaggcaagagggtatgaggaaaatgtgagattcacaaaggttacagaaaaattgtggcctggagaatgatgggcatgggagcagctttggggtgagtcaggtggacggaaaaggaaattcagggaggttttaagscctgttgaggaccaagtgttcccattattgtatgattttgaaattactcttgctttccaggacgtttccctttcaacagtggggttgagtcacccaggtcagcatttccaagtgttatatttgatggtggtaatgggagttaaagccaaggtttgaagccaagatttaaagccaaggtgtcatacc

SEQ ID NO: 535719 - DNA, 620 bp, Homo sapiens
ttcccatccaagaagctgagcctccgacagagtccatgttggtgcctcactgtcctcatctccccaccactcaactcattcttcagaacttgttcttcctagatgcacttccatctcccccacagagcattttaaattttcccacttcgtcatcattgcagagttttgactgaygggtgatgacaaatttcttcaaagacgttgatttttatgcagggtctatgctttatattttaaaagtaaaaagcccattaagaaagctttctaggaatgaatggagatctgcctaagtagttattcaaatgtagatgggataaaaatgggaatatatacaggtatgatcttttattttacttcactttctaaaggagagtcttttttccttttctctttctttttttctttctctctctctctctttctttctttctttctttctttctttttcagctttctggacctttcttatgctgagcacatggggatagaattgcaaaaagacaaagggactcagttgacctctctaagaagaggtgaggaagagggagtagcaggtagatagccagtaacagatggctgaggaatgaggagtttggggtatttagactgatataaaacag

SEQ ID NO: 535720 - DNA, 668 bp, Homo sapiens
gcaggagggaccaggggaaggggaagcaagggacattaatctcacatcccagcttgtgaatcagggcactggccgccatcccctctgttctcattgcattttacccctcttgtctactgtgttatttttctcttttcctgtctcctgttatcgccaagtaaggatcttgttgtatagtggtcttagggggaaaagtagcacatagaatgtgtgttaggcttgattttagccttcaagaatgccagaagctggaatgaaggattgtttctttataaacacaaggaaaattcacgagttggcatttcttagtaaaacatgatgaacagaatgtactttctgtagaaatggccgtgtatctgaatagaattccattccgctccctgatgcttcccctccagtgagggaaggagggaggacagtgctgcagtgggcccagattccagcctgcctgacctccgcggccctcacagagctatgccgctcttgcaccgtttcccgaagagcccagccatgtggaaatcagtgacaaaagtaattgctrcctccatatttaatttctttacactcggtgcagaaaacttgccttgagcaaagcagcatatgagttgcagagagagaaggaagtgttttttaagtgaaggaagattcctgggtttctttacctttct

SEQ ID NO: 535721 - DNA, 573 bp, Homo sapiens
cccagctggtatcagtgcctctggtcctgagcctctgggaacaggagttggaatccactctcaagtggacacaggggaagtaggtgaaagrcagcttgctaggaggaagcttctgcaacatgaatgtgcgctcactgctccctaaatggaaggaacgagactgctttctttacaaaccactcagtccttgtagaaatttcagaagagccctgtctgcctgtctgccttgtggggagaccctcattctctgatgctaccagaagttagttgcatattttagaagccccaggctggtggtctagttgtttcctgggctccccatgcttctagcactttcttgggcatgacccagcaccagagcacagggacgctgtctttacctctgtccagagcaacccagaggggaggtaacaccattttctctttccctggggtgttctttacacactacagtctctcactctgaccagatctttctgccccaggagagattagaccagagataagatctctgtgtggcctcactgtgtaactatctgcagagtactgaacgcactgaattctgcttcattc

SEQ ID NO: 535722 - DNA, 493 bp, Homo sapiens
tgctagctcttgaagctgacatggcgtctggtcacaggcttcatccaggcacacgcagtagccaaaaaaactamcaccctttgtcttgggccaaaggagtcaccaggtctgtcaggaggtcccagagaaaggtcttgttgttggtgggtctcattaattactttgtcacagctcagccacccacctgctatcaggcaattgttaggaaagaagttcgacttccttagcaggtgagtggggactcatccccagactgcttcagtgtcacataggcagctcctggaactcacggtcaggagaaagctctgcttcgccctcctggtactcagttgtcccacacccttcagccactgcggcaccatatcgctattactgatggagcacccctctcaattagccagcacttcctgagtagttactgtgtgagggacactcacatggtgctgcagggaaaaccaaggtgaatgacaagagcttctgcctagaagttgcc

SEQ ID NO: 535723 - DNA, 559 bp, Homo sapiens
agtctaggagaagaaagccttctcatggacatgagctaaattccctgggaaaggccattccataatggagaaggccttctgttcacccacagtgtggtcctcagaccagcagcttcagcgtctcctgggaactcactagaaatgcagaccccaggcccagtgtggcagctcacgcctgtaatcccagcactttgggaggccgaggcgggtggctcacgaggtcaggagyttgaggccagcctggccaacatagtgaaaccccgtctctactaaaaatacaaaaaaattagccgggcatggtggcgcatacctgtaatcccagctacttgggaggctgaggcaggaaaatcacttgaacccgggtggcggaggttgggctgagctgagatcgtgccgctgcactccagcctgggcaacagagggacactccttctcaataaataaataaataaataaataaataaaatgcacccaaacctgaattggaaactcaggtggggggcctagcggtctgtggttttactagccctccaggcaagttttgatgctttggtgattg

SEQ ID NO: 535724 - DNA, 571 bp, Homo sapiens
cacattttatattccattgaggaggaatgaaaagagaaagcattgccaattaaactattacacagtgctttcttagaataaagtattatttctttcaataaatgcaaatataaaactcagtaaatataaaaattattttacatttactcagttttatcatgtatcatctttgaacatacgttgaaagtataagtgaaataaattgattaaattattcctaaaatgtctttgtactcagagcccaattcttttttttttttttttaattatactttaagttctgggatacrtgtgcagaacatgcagttttgttacagaggtatacatgtgccatggtttgctgcacccatcaacccgtcatctacattaggtatttctcctaatgctatctttcccgtagccctcccccacccaccgacaggccctgatgtgtgatgttcccctccctgtgtccacgtgttctcatttttcaacttccacttatgagtgagaacatgtggtggttggttttctgttcctgtgttagtttgccgagattgatggtttccagcttcatccatgtcccggcaaa

SEQ ID NO: 535725 - DNA, 525 bp, Homo sapiens
gaaaagcaattaagcaaaattatgtaattcattatacatgagtgggcagtgaagtcaagagttctatcagattatttatgttattggtatattaagtggaagaacaagaagtatgggccaagccatgcaatacagtttcaaagtaaagggtaaaaagcatcmgtcacatttcttgtcttcaatatattttgataagtaatgagctatatttttacacttcagaagtattaaaaatttccacatttctcatataagtatgtacaccaaaatctcttttggaaataaatatttctatttaccaacttcaaacgagcctcaggatagtatgtattattaagataagaccaaacacatcattttttctaaatccttttcataaactccatggccagatattttgcagaaggctttgcagcttaaaatagaaaatatcttctagagacaactacagaaagattttgagatgaacaaggttaaccgctcttttgtgggtcatagcactgatgtgcttcagcctcagagcac

SEQ ID NO: 535726 - DNA, 418 bp, Homo sapiens
atttctggtatggttcagggtacctagaaaatatcttgtgccataaaaaatgctgaatacagactattatatgtctttatttattttctggattaggtggtttgggaaagtagaatgtagaaccatagaatgcttttgagtgatatgtgtgagtgagaaagtagaattttatggttctgattttctgttytaaaaattgatacataatattttacatatttattgggtacatgtgatattttgttacattgtgtggaatgtgtgatgatcaattaagagtggttaaattatctaccattttgtgtatttgtcatttctttatgttgggaacaatttaagtcctgtcttccagctactttgaaatatataatacaatgttgttaacaatagttactatgctctcctttgacaacagagt

SEQ ID NO: 535727 - DNA, 535 bp, Homo sapiens
tgcttctccggcggaacccaggctggaccgcgggccccggcctgggggccactgctgccaccgccgccgccacctcgtctcctccccgtccccgcccagccccaggtctccccgcctcactcgggcccgtggccggggtcactccccgccgcccctccccgcacggatgccgaaggtgaaggcgctgcagtgcgccctggcgctggagatcagctcagtgagtaccggtagcgcctcccacccccgggcattggctcagggactccctcagtcacctccgagagcccggaaccacccccaaacctccttcaccctcygaatcatccctagggagcgtcgacctcacgccccttcggtcctgccccatcttgttctcagaagcgctctcccactccggccacgcagaggcctgacccctgctccgctatgctggcttcaacccgacttccaacttgcgcgctttcagatcgttcccaaatcacttcagagttctttcctcgctcctaactttccagtgagagagagtgtatgtgcg

SEQ ID NO: 535728 - DNA, 578 bp, Homo sapiens
tgagttccactggagacaagcacactttctccaattccagagtctacacctgacygggaatttttcattctggattctgattgagggaaaatactgatatccaatgggctataaggaggacctttcagtttctgtaacagcatctgagttctatgcatgtcctggaaaggcacctgcccactggctaattcacatgctgtaatcccaacactgtaaatatctgacttcacattatacccatgtaaatcctgtctcagtagttctggactcagccacggctgcactgatgtgctgaactgtgggaaatcatacacagccctatgcctctgtccatgcttaaccaaactatgcagatgggacaggccagagagggtcactaggccatcaccagaaatgaggatatggctggctttaatactcctgtgaatacagccattttggtacagatagttcaaccctctcacagctccaaagataatgtttcttattaaagtttcactcattccttcaggaaaacaggtcctcaagagttgacttgctgaaccataggccataaatggagaaataacccaaagcca

SEQ ID NO: 535729 - DNA, 681 bp, Homo sapiens
cttcctttcaagatgcagatatatcctacctagcagcgaccatggccagcgactctcttcaggctgccagcggtgcggacaggggcgggcgccagagccctgctcgcggaggggcgaggcgagtgctctaggcccgctcccggtgcggggcgcgggagggcggcgaggccgcgaccggggccgtgggcttggaactctcggtgcgtttttacagagtgctgattggtgcatttacgatcctttagctagacccagagtgctgattggtgcgtttttacagagtgctgcttgatgcattcacaatccttcagctagatgcagagcactgagcggtgtgtttttacagagtgctgattggtgygtttacaatgctttagctagaccaagagtgctgattggtgcatttttacagagtgctgattggtgcattcacaatcctttagctagacacagagtgctgattggtgcgattttagagtgctgattggtgcattcgcagtcctttagctagacagagtgctgattggtgtgtctttacagagtgctgattggtgcatttacaatcctttagctagacacagcgctgattggtgcgtttttacagagtgctgcttggtgcatttacaatcctttagttagacacaaaagttctccaagtccccacttgacccagggagtcca

SEQ ID NO: 535730 - DNA, 615 bp, Homo sapiens
gaggaaaaagggctgagtatcctggaagagaaaagatatcatggggactaagaggggagagcaaatgtgtcctaagcagctctaagccattaaatgaacattaaatagaatctttgaggaggtaaattttgtctcattgtaaaagagaacctgatagcagtcatagacatgtaacactggaaaagagaccctcatactgycagggcccctgatagcctgtgtggtatctttttgtgaattagaaaaaggcacttctttctctagttggacaaagcctgacacagtggcttctgggccccatccatctgttgctttgggcaggtgctctgtgcagagcacaacctgtactatcatatgtagcatctctgcagaaggcagtgagctgtctgtcaccaaacgcattcaattaatcactgcatggtcgtctgttttggttctgtaaagagtatttcgtgaccacgtgcagtagctcatgcctgtaatcctaatactatgggaggctgaggcaagcagataacttgaggccaagagtttgaggccagcctggccaaactggggaaaccccatctctactaaaaatacaaaaattagccaagtgtggtggtgcgggcttgt

SEQ ID NO: 535731 - DNA, 629 bp, Homo sapiens
tgtgttcatgtctggaggaaaaagggctgagtatcctggaagagaaaagatatcatggggactaagaggggagagcaaatgtgtcctaagcagctctaagccattaaatgaacattaaatagaatctttgaggaggtaaattttgtctcattgtaaaagagaacctgatagcagtcatagacatgtaacactggaaaagagaccctcatactgccagggcccctgatagcctgtgtggtatctttttgtgaattagaaaaaggcacttctttctctagttggacaaagcctgacacagtggcttctgggccccatccatctgttgctttgggcaggtgctctgtgcagagcacaacctgtactatcatatgtagcatctctgcagaaggcagtgagctgtctgtcaccaaacgcattcaattaatcactgcatggtcgtctgttttggttctgtaaagagtatttcgtgaccacgtgcagtagctcatgcctgtaatcctaatactatgggaggctgaggcaagcagataacttgaggccaagagtttgaggccagcctggccaaactggggaaaccccatctctactaaaaatacaaaaattagccargtgtggtggtgcgggcttgt

SEQ ID NO: 535732 - DNA, 645 bp, Homo sapiens
aagttcctgacctccccactgattcatcagacatgaagagaaaaagaaagtattaatatgatgtctggttcctgaccttgacatagtaactccagcttcctgaaacttggccaaatgaaggttttatatttggaaaagtggatttataaactctacttttgcaaggaagaagacaagggatgtgtaccagagtagaaaagtatgcagaagtgtatctgctcmcagttccctctgtggggagggaaacagagttctctcctatgtggaaaatatgaggaagggtggaaagtttcccccaaatattcagccactattggttttagatgagagtatgagcatgtgttaaaaggcagggttatttttgctcttagttagtgtaatagacagatctgtgcctgctcccaccaaacccccaaccccaacaacgatcttcaattcctaatttcagaacctgtagatacattacattacatgacagttgccaatcagttcactttaacagagagcagttatcctgggttattcaagtgggcccagcgtaattatatgagctcctaatagctggaaaaaggagtcctacaactgctaggacctgaattctacaagcccccagaaaggaatgcaacctgcagactcctttatttt

SEQ ID NO: 535733 - DNA, 645 bp, Homo sapiens
aagttcctgacctccccactgattcatcagacatgaagagaaaaagaaagtattaatatgatgtctggttcctgaccttgacatagtaactccagcttcctgaaacttggccaaatgaaggttttatatttggaaaagtggatttataaactctacttttgcaaggaagaagacaagggatgtgtaccagagtagaaaagtatgcagaagtgtatctgctcacagttccctctgtggggagggaaacagagttctctcctatgtggaaaatatgaggaagggtggaaagtttcccccaaatattcagccactattggttttagrtgagagtatgagcatgtgttaaaaggcagggttatttttgctcttagttagtgtaatagacagatctgtgcctgctcccaccaaacccccaaccccaacaacgatcttcaattcctaatttcagaacctgtagatacattacattacatgacagttgccaatcagttcactttaacagagagcagttatcctgggttattcaagtgggcccagcgtaattatatgagctcctaatagctggaaaaaggagtcctacaactgctaggacctgaattctacaagcccccagaaaggaatgcaacctgcagactcctttatttt

SEQ ID NO: 535734 - DNA, 613 bp, Homo sapiens
ggaagttggctgtgggatagccaaactcaaggagaagatcatcttcccactctatcccctctccaccttcccatctcactgagagccgcctccatcactcaataaaatccccggactcaccatccttcaactccatgtgacctaattcttcctrgacgccagacaagaattcaggatgcactcagtgtgggaatccaaaaaggctgtcacactgacttttcactgagtggtttaacatttaagctgtccctggacagcagggctaaaagaacactgtaatacccctagacattgccatggggctggagcccaaaagcactcaccccagctcctgcacctgctcacttgcatgctccccctcccataaggggtttgggtgcatggcagccaagtaaacaagccacacttctgtcacaagtcccatgaggggatcagggaactctcccatttcaataatagattggattgaatctactgaatacagtgagataaataaagctatgttgcaattgtttaggccaggcatagtgatggctttgtctagcctgatggtgatagtgcaggagaaaaatagataattgtgaaaaacatagggaatactattgatatgatt

SEQ ID NO: 535735 - DNA, 613 bp, Homo sapiens
ggaagttggctgtgggatagccaaactcaaggagaagatcatcttcccactctatcccctctccaccttcccatctcactgagagccgcctccatcactcaataaaatccccggactcaccatccttcaactccatgtgacctaattcttcctggacgccagacaagaattcaggatgcactcagtgtgggaatccaaaaaggctgtcacactgacttttcactgagtggtttaacatttaagctgtccctggacagcagggctaaaagaacaytgtaatacccctagacattgccatggggctggagcccaaaagcactcaccccagctcctgcacctgctcacttgcatgctccccctcccataaggggtttgggtgcatggcagccaagtaaacaagccacacttctgtcacaagtcccatgaggggatcagggaactctcccatttcaataatagattggattgaatctactgaatacagtgagataaataaagctatgttgcaattgtttaggccaggcatagtgatggctttgtctagcctgatggtgatagtgcaggagaaaaatagataattgtgaaaaacatagggaatactattgatatgatt

SEQ ID NO: 535736 - DNA, 479 bp, Homo sapiens
ctccatgctgtacattagagctctagaactcattcatcccacataaccgaacttttgtaccctctgactgatattttatttccttccattctacccttgtcaacaggagttctggagggaacaaatattcagaccatagcaaaaggcatagaatataagaatgtaattgtgcacagaaattaataaaacatatttattgcttgatagtctacgtcctatatgcttgatagtctacatcctactcaggaatgcctgtagctagtgaccaattattattgcaatacaaaactcagctcctttgcttcaagtcacgatacacttagaagtataatttatgctccagagtttctcaaatgattaagcattcttggatgccaccaaaattgtatcttttctgggctkcttacctacccttccttttcctgcttccctcactcttacttgtttcttctggtagtacttgctcagtaaataacttg

SEQ ID NO: 535737 - DNA, 655 bp, Homo sapiens
aaaatgctatttacttcagtctcgactgtacttttccttcatgtctaggattcagtattaaaacagaaaaaaataaggaaaaaataacycacttagaaaaagcaatcatatcaattagagtcagaaaagaccccgatgttaaaattatcagggaataaatttaaaactatgactaacagtttaaaagttttaaagcatagtttcctcatcttcaaaataattttttaaagtgtcaagtgtcaaattcttatggttattgtgcatattaaatcacataatgttagtgaagtgcatacttaacaaaatatctgacacagggtaaggatttagtaaatgacagtagttgtagtcattattacctgcaatacttaataaaatatggttgactgtccaaatgtgtttgtgataaacttggtttgaataattcctattaattatgcctttctagaaacttttgcaacaataaaataaatgctgcaagggctgattggttttatttcagatgttcctaagcatatctttaagccttaccctacccactccaagctgatttccatcactccccacctccttgctccttgcttcctttgccttaactatattttttgttgttgttattgttgttgttgtttaatcaggactaggagatgaaagg

SEQ ID NO: 535738 - DNA, 639 bp, Homo sapiens
ttccattttacacatgaggaaactaaacatcaaagcatttacactgtatatatatgataaatccaggaattcaaataaaggtctccctagcacacataccaaactccttccacaatgcttttccacatttattagaagaaaacaggaacaaaaaaagcagtactcaataaaagcwaaataagttaccctggtgaaaaggaatgctgggaggaatgcttttggctatttataatcatacctacatcctcaaaaatccattgccagagtctatttccctgtttaacaatttgtgaggatccttagagaatcaacagcaggaggcaccactgttcagcccattagatatgatccaagatttgtctcagtgcctgactcttctgttctctagtaaggggtctatcaaaacccaatgtacttcatttttagcagaaaggacacatttcccaggggaaattgaaggtgatccttctcaaagtacaaatctagctgttttttgagatgcgatatatcgatgtctggatgaccatattgtgcaagacaattctcttcaggcccaaagttcttttcatatttacaataaaggaatgctatacagaaaaattttcacaaagatcaaaacaattcaaatagattatgcca

SEQ ID NO: 535739 - DNA, 639 bp, Homo sapiens
ttccattttacacatgaggaaactaaacatcaaagcatttacactgtatatatatgataaatccaggaattcaaataaaggtctccctagcacacataccaaactccttccacaatgcttttccacatttattagaagaaaacaggaacaaaaaaagcagtactcaataaaagcaaaataagttaccctggtgaaaaggaatgctgggaggaatgcttttggctatttataatcatacctacatcctcaaaaatccattgccagagtctatttccctgtttaacaatttgtgaggatccttagagaatcaacagcaggaggcaccactgttcagcccattagatatgatccaagatttgtctcagtgcctgactcttctgttctctagtaaggggtctatcaaaacccaatgtacttcatttttagcagaaaggacacatttcccaggggaaattgaaggtgatccttctcaaagtacaaatctagctgttttttgagrtgcgatatatcgatgtctggatgaccatattgtgcaagacaattctcttcaggcccaaagttcttttcatatttacaataaaggaatgctatacagaaaaattttcacaaagatcaaaacaattcaaatagattatgcca

SEQ ID NO: 535740 - DNA, 606 bp, Homo sapiens
ccttttagttgcaaaggatagacagagtaaatagcaagtacctaatgactggagaacagggtagcagcatagacatggatatcaagcttaagtagggataagtgttgacaacctacggtatgctggcattggtggrgtgaggttttcttctccttagaaaagaattcagttaaatagaggtatagaagaataaatagaagtatttaatgatatggcttagcttggtggtttgaaatacatgcctgctacatctggattctgaatatttctgtatttgtaaccatctcaaaaactccagggtattaataaatttgtccataaatacttaacaattggaaaggcatatggctttagatttaccttttcatttcaggattttactcattaaatcagtattagatgctgcagcataattaagttgaagctgacatttgagaacattatttgtttttctctttcatgacatctaaatacatttgatattttttcccaattgccaatcaagtattcttccactagaatttacttttacctgattttaaaagaacattccaatcatggttggtagccatatggacctctcactcaactacaatgtcagtggct

SEQ ID NO: 535741 - DNA, 584 bp, Homo sapiens
agaaaagaagaaaagataagcaacagagacatccttctccagggagttgtttgtgttttccataaggaagcccatttcttaacctccaagatgtgaaaatccctgttgacaaatgctggctgtttgatattcataattatttacattctgcttcttatttgtcccagattaatgtgaactctttagactttgagagctaaagtaaattttggtacctttcaggaattttcttggaatctatatgctctgacatatgacaggtctgaaatctatcttcttaataactttaatagtcttactcagaatttaagcaactctttcattaaaatgttcagctcatcaagtcatgataagtaatttaaaaactccttcacttctttcctcgatgaaaggcatgcagagcataattgggtgctattgtggtagacagcatttggtgtgattattcttgacactttgcttatcacagtaygatcttcagataaataaaataacaactcacttcccttcacaacaaagaatatactcagagataacaatgattggggaattttgaaaactctactagattcatatgttaatga

SEQ ID NO: 535742 - DNA, 521 bp, Homo sapiens
tcaacttatgtgcttttgaggaacacaatttagcctataacaccatccttatggctcagcttaagtatcagtctctcagggaagccttttctcatcctgacagaggtctacatccctctgtcatatgtatgtatgtatatatgtatgtgtgtatacatatgcatgtgtatcatatatagatacatatatgcatgtatatatgtataggtatctgaccatacttctctcccatgacatcataattataatattattccgttttcataaaacaaactaggackaccttccttcatgtagatatttctatgtttgtgtatagctatatggataaaggtatggaaagatataatctagattggtaacattggctacatgggtattggaggggaggttatggtaaggaggatgggaaagatgtagcaaggaaacaaaaatcaaccacaaaaacttacaaaaatacggtatcatgcaacatgaccatgtatgcatggataatataatgtaatttattattttaaaaa

SEQ ID NO: 535743 - DNA, 521 bp, Homo sapiens
tcaacttatgtgcttttgaggaacacaatttagcctataacaccatccttatggctcagcttaagtatcagtctctcagggaagccttttctcatcctgacagaggtctacatccctctgtcatatgtatgtatgtatatatgtatgtgtgtatacatatgcatgtgtatcatatatagatacatatatgcatgtatatatgtataggtatctgaccatacttctctcccatgacatcataattataatattattccgttttcataaaacaaactaggacgaccttccttcatgtagatatttctatgtttgtgtatagctatatggataaaggtatggaaagatataatctagattggtaacattggctacatgggtattggaggggaggttatggtaaggaggatgggaaagatgtagcaaggaaacaaaaatcaaccacaaaaacttacaaaaatacggtatcatgcaacatgaccatgtatgcrtggataatataatgtaatttattattttaaaaa

SEQ ID NO: 535744 - DNA, 522 bp, Homo sapiens
cttcttaatcttcaggactaagctcaacacacacttcaaagcctttctgaacccattctagtatggctgccctgttttgtcttcccccaaccccagraaccctgtatttaccttcaacaaagctttgaccacacattctctgctatgttttttactggagattaattttttactcattttgttgaggctatttccaggggctctgaatagtggctactcttaataaatacgtaaatatactcttagggataaatgaaaaatcaaatggtccgagtggcctaacacaatttccagaacacactgggaaatgtttgtctcttttttcagccattgtcactacttctttatccccacctctatctacacataaataaacacatgccaacacctgcacttaagtatgcacatgtacacatatacacagcatcgattactccatggattaactctgcttcatctactacctttcatgtaaaaacaagacaaaggaagaaatttaagaatttatgatattcacacaaa

SEQ ID NO: 535745 - DNA, 522 bp, Homo sapiens
cttcttaatcttcaggactaagctcaacacacacttcaaagcctttctgaacccattctagtatggctgccctgttttgtcttcccccaaccccagaaaccctgtatttaccttcaacaaagctttgaccacacattctctgctatgttttttactggagattaattttttactcattttgttgaggctatttccagggkctctgaatagtggctactcttaataaatacgtaaatatactcttagggataaatgaaaaatcaaatggtccgagtggcctaacacaatttccagaacacactgggaaatgtttgtctcttttttcagccattgtcactacttctttatccccacctctatctacacataaataaacacatgccaacacctgcacttaagtatgcacatgtacacatatacacagcatcgattactccatggattaactctgcttcatctactacctttcatgtaaaaacaagacaaaggaagaaatttaagaatttatgatattcacacaaa

SEQ ID NO: 535746 - DNA, 486 bp, Homo sapiens
attccaaaatgtacagtcacaggctggctcctctgaggcttggctcacagtgyttcatcaaaagaaataaagataaggaagtatcttcctgctatcagcccctgcttcggtggcaccccactcatctcttacccacccttggggagggaatggagatctttaaccctgggtaaagagtacaatgaaacttcattttctgagctcccagaggttttggaacgtgatagctcctacagagacatgattcttgctgaataaataattctaagtcagtgacctgactagggactcatgtctgaagcaccgtttgattcttcaattttcaatttttcctccttttatttactagccaatatttccatgtgacaaccacatgcccatcccattaggagggctattacaaaagaaatgaaaagtaaatattggtgaggatgtagagaaactggaatcctcgtgcattgctggtggggatgcaaactcctgcag

SEQ ID NO: 535747 - DNA, 486 bp, Homo sapiens
attccaaaatgtacagtcacaggctggctcctctgaggcttggctcacagtgcttcatcaaaagaaataaagataaggaagtatcttcctgctatcagcccctgcttcggtggcaccccactcatctcttacccacccttggggagggaatggagatctttaaccctgggtaaagwgtacaatgaaacttcattttctgagctcccagaggttttggaacgtgatagctcctacagagacatgattcttgctgaataaataattctaagtcagtgacctgactagggactcatgtctgaagcaccgtttgattcttcaattttcaatttttcctccttttatttactagccaatatttccatgtgacaaccacatgcccatcccattaggagggctattacaaaagaaatgaaaagtaaatattggtgaggatgtagagaaactggaatcctcgtgcattgctggtggggatgcaaactcctgcag

SEQ ID NO: 535748 - DNA, 486 bp, Homo sapiens
attccaaaatgtacagtcacaggctggctcctctgaggcttggctcacagtgcttcatcaaaagaaataaagataaggaagtatcttcctgctatcagcccctgcttcggtggcaccccactcatctcttacccacccttggggagggaatggagatctttaaccctgggtaaagagtacaatgaaacttcattttctgagctcccagaggttttggaacgtgatagctcctacagagacatgattcttgctgaataaataattctaagtcagtgacctgactagggactcatgtctgaagcaccgtttgattcttcaattttcaatttttcctccttttatttactagccaatatttccatgtgacaaccacatgcccatcccattaggagrgctattacaaaagaaatgaaaagtaaatattggtgaggatgtagagaaactggaatcctcgtgcattgctggtggggatgcaaactcctgcag

SEQ ID NO: 535749 - DNA, 510 bp, Homo sapiens
aaacgatttctcatccattcagacaggttcttttgctgaaagtctccaaagactgtttcattatcgtaccttctcaatgactttccataaaggaatacaagatgtgaatctggcttttaatatgtgccatttaaagtagttatcaatgatacattagtcattccatccagtacccctgtgaggtgagtgagtgaataattataggtgaccttcagacawgtgaggatctaatgtagccttgaaggcttctaagtatggggtgttttctttgatgagtgagtaatcactgagttattagcatgacatttgagaagtcattagggatttgtaagtaaaacaaatctatttttcttagtcatgataatgggctactgttctaacctgtaatgctggattttagctttttcttttcttatctcaagatttatctcttaataggtatattttccttcaggaaaggacacaaagttggagctatcagaagcaacaatgtttaataaaaacaatttt

SEQ ID NO: 535750 - DNA, 327 bp, Homo sapiens
ggatacagtggataggtagttgccactcctttttactrctactcgaattacaaattatgttttcttggtggtgatgtttcattgatggactgattgcttgattggctgttttcctctctgtcgttatctaaggttcatagccatattgcccatatttgtctgttattcaggatccctctcaccacttctgatcgtcatcacatccctcttgtttttgccattgccattctttcttttattcctcttagctttaccaaagggtcttttattatatgttaccactccatcgaagtatgtctttccttcgagctcataaatcgtggtcct

SEQ ID NO: 535751 - DNA, 474 bp, Homo sapiens
aaaaactgttctatactcagtagattacttttaaaatattaaatagctaaaaattttaaattttatttgtttattcctctttagtttatctatatcaaagtgaagaggtatctgaaagacctggtttctagaaatctcaagtttctttgtcatagaaacttgtcatacatagtatggttaccccatttaccacataggtacagtgggattttgtctgaggaatttgaatgtggcataacaggcaataaagagccagtgcatattcttcagataaaattaacatgatgaaagttatattctgatgacttaaatagtattcattatgcaggggtttgtgaagggtatgggatgcagattcaacttcaatatatgaagtactaaggaagactattcacagtgttaaatatgctgccrtcaacatctttaccaatgtagtaaagttccgtaatcattgagacatcataactccataag

SEQ ID NO: 535752 - DNA, 600 bp, Homo sapiens
agctaacttagggaaatttagtaaagaaatgatttggaggaaagcaaataaagtmatccaaatatacaataattataccaaaattttaacatcgatttataagaatatcttaccacttttaaatttcttccaaaattgacagatactgatttttttcattaactgtcagtggaaatcctatgggagacagctcaaattttgacagcttcaagaaaatggatggcttctccttctgtgtggtaattgatcttaccttttgaagaattagctcataagtatagatttggagagagttacaatatgcaatacagccttcctcttttgaaaataagtcagtcattctgtgaactgaagacttcagcatgaagaaggttgctctgaagggcagagtatataatattatttggttgcgacttttgctagcttggtggctcttgagaaatctttagtgaacttgccagtttcatgtttgtagggggtatgcatctatccaggataatcatcccccattgaaaaactaaccttttcaaggttaagtataatgtgaaacaaataatattgctccagaatgaatttctgtgcagtttgtatgaattaaca

SEQ ID NO: 535753 - DNA, 549 bp, Homo sapiens
tccaaccaaatgaggcttctttgttactcaatgcaccatgttcctttccccccaggacctttgcacttgtatgttgcttcatcctgaccaatttctcctcattcttcagagctcagctcaaatctccctttttctggaaagccctccatggccctccaggctagtttaggtggtactcaccacaacagtaattttagagctatttataaattatttaattcctgtgtctccctggatagagataatgccctcctgttcatccctgcctaagaatcacctaaagcaaaacttggcatagaaaaggtgctcaggaagtttttgttgatgaccacaggagtgcttagcccttaccacattacataaaatctgcagtttacctggtttctctcacaccagyctgtgagtttccagaaaaaactcacagcctgtgagtacaggatccagctccatgtttgacatttcatgggctcaacaggggttttctgagcagggggagacattgtgatgtgctgcccagatcccccatcactgaggacttaggacagacac

SEQ ID NO: 535754 - DNA, 549 bp, Homo sapiens
tccaaccaaatgaggcttctttgttactcaatgcaccatgttcctttccccccaggacctttgcacttgtatgttgcttcatcctgaccaatttctcctcattcttcagagctcagctcaaatctccctttttctggaaagccctccatggccctccaggctagtttaggtggtactcaccacaacagtaattttagagctatttataaattatttaattcctgtgtctccctggatagagataatgccctcctgttcatccctgcctaagaatcacctaaagcaaaacttggcatagaaaaggtgctcaggaagtttttgttgatgaccacaggagtgcttagcccttaccacattacataaaatctgcagtttacctggtttctctcacaccagtctgtgagtttccagaaaaaactcacagcctgtgagtacaggatccagcyccatgtttgacatttcatgggctcaacaggggttttctgagcagggggagacattgtgatgtgctgcccagatcccccatcactgaggacttaggacagacac

SEQ ID NO: 535755 - DNA, 494 bp, Homo sapiens
ctgaatagtctacaccctattctctagttcagttttaatggtttccaaatgttagtccatggactggtttcatcagaatcactgggggtcaggggagtgcttaaaataaagattcttgggccctgcttcagtaggtctcagccttgtgcatttttaagagctccccaggtgcttctaaaagcaaggccgggtttgatctataactgtgagaactgggaaggaactaataaaagaacacagagaaaaaaatmaacattaggactgagccacagagcaaaacacaaacctgccgcagtaagggaccttttgtttgctgcactcttgcttctcatttactcctccaggtgaatgggttgcagggtggggtggtggcaagggatacaaaggccaccagaagcacggaatcagaaaaggcaaaaatggggcctccagaggagaaggcctgagggaagaaatggtcagaatggcaagcttagcccatgagcccattctgt

SEQ ID NO: 535756 - DNA, 522 bp, Homo sapiens
atcctcctttattaatgacttcgaactactgaatagtctacaccctattctctagttcagttttaatggtttccaaatgttagtccatggactggtttcatcagaatcactgggggtcaggggagtgcttaaaataaagattcttgggccctgcttcagtaggtctcagccttgtgcatttttaagagctccccaggtgcttctaaaagcaaggccgggtttgatctataactgtgagaactgggaaggaactaataaaagaacacagagaaaaaaatcaacattaggactgagccacagagcaaaacacaaacctgccgcagtaagggaccttttgtttgctgcactsttgcttctcatttactcctccaggtgaatgggttgcagggtggggtggtggcaagggatacaaaggccaccagaagcacggaatcagaaaaggcaaaaatggggcctccagaggagaaggcctgagggaagaaatggtcagaatggcaagcttagcccatgagcccattctgt

SEQ ID NO: 535757 - DNA, 589 bp, Homo sapiens
gctaaccacagcccactgtcaaccaktaggggttaggaaggcatcctagacaaggactggtggtcgggcaacatagtttgaactgacactggagagaggtggaaagagcagcccacacagacaaaacagcctgaggagttcagagaagaggagtgggtcagagggattggtttgtctagtataggtggggaagtagcaagtggagtggttggcgggggccagatgggagggcctggaatgctgagctaaggatgcgggcattgtggagcctttggtttccaaatgggggtgacacagctcttttagaaagacaagtccctttcattcctgggctcagtgcgctcacctgtaaaatgagggagttgaagattattttcaaaatcattccagtgcatgtatcctgtgatttacagcattgcttcttaaagtttattgtgtatctgtgtcacctggggatctcagtaaaatgcatattctggccaggcagtgtggctcacacctgtagtcccagctatttgggaagctgaggtgggaggattgcttgagcccagcctgggcaacataatgagaccccagtctctaaaaataa

SEQ ID NO: 535758 - DNA, 589 bp, Homo sapiens
gctaaccacagcccactgtcaaccattaggggttaggaaggcatcctagacaaggactggtggtcgggcaacatagtttgaactgacactggagagasgtggaaagagcagcccacacagacaaaacagcctgaggagttcagagaagaggagtgggtcagagggattggtttgtctagtataggtggggaagtagcaagtggagtggttggcgggggccagatgggagggcctggaatgctgagctaaggatgcgggcattgtggagcctttggtttccaaatgggggtgacacagctcttttagaaagacaagtccctttcattcctgggctcagtgcgctcacctgtaaaatgagggagttgaagattattttcaaaatcattccagtgcatgtatcctgtgatttacagcattgcttcttaaagtttattgtgtatctgtgtcacctggggatctcagtaaaatgcatattctggccaggcagtgtggctcacacctgtagtcccagctatttgggaagctgaggtgggaggattgcttgagcccagcctgggcaacataatgagaccccagtctctaaaaataa

SEQ ID NO: 535759 - DNA, 563 bp, Homo sapiens
ctggtgctcgcctcagccagggagttgcccagccacygtagaggtgacagaaagctgcttggaaaggagctgggggaagaaatgagtcaaacaggcctagggccctaggaggggcagcggatggcttccctctggctgtgtgctggtcctagaggctggcttctgtcctgtctgctcctttcctcttggctgtgcctggggaggagaggagggcctgcatcccccatggcactgcccagcaggccctagcaggccttgggagtgtttgctgaagactttcccttgggccctcccaggtcagcattccccggtgtgagtcccttgggcctcagggatggttggcttcttcctccccagttgtctgctggtggccgacttgacaactttcctccttggggaaatgctggtagcaggtgaagccagagagagagagacccccagggggcagtgaggagcgagagcccagagggcggatggaacaggcacgcccttgaaggaagtaaatgcatgcatgctctcccagcaccaggttagtggtctactcccaggcccatgctgtccca

SEQ ID NO: 535760 - DNA, 603 bp, Homo sapiens
ctgcaggactcagcagtgcctccctgagctaccagtttctgacctggggagtgggactggggagggaccctgttctctggagaccccgcagagccctcacataggccttttccagctcccatggggatgacattccagttttcataggcttctctcagcctttgcctgttagatgctgattcttcttctgactgtatggaaggggaaactgagaacctgatgatagtgatgcacatgacctcagggagtgtcagcccagggtcatctcttttactctctgtagtaacacggggcctggctgcctcctcgcacccmggcttagaaaggtgaaactaaggccctgatggtcgaattggctccatcgtcagtagggcaccattctcagaactcaggtgtcctcaattctgggtgggactggagtcagaactgtatgtgcttccccctcccacccccaccctctttgttccctgctggatccgggaacagggtgctctcaggctgaggggtggacacaagccttttgcagtaccgaagggctttgggctcctgactggggacctcaggtgcaccactggccccactgggccctgcttgcccacctct

SEQ ID NO: 535761 - DNA, 579 bp, Homo sapiens
cctccccaccaggccgtcgtggtggggaatgatttgtagctggagaggcgccagcagtctctcttcctagcctgccccctgccacagcagcctctcctccccaggccaygtgtgctctggtcccacccggagagggctgcttgttataaacagcagccttcctcctctgctcccaccttgccgagtggccatttggcagatgcttgcccctcttggggtctctgccccttgggagtagggcatctccagcccctctcaatcccattctgtggaattcttttgttttcccctaagagtcagggattcacatggtgggagtctgccatggccaggccccaggtacagggtgctccaaggagctggccctgttctctgaggcccagggctggaagcatgggggcaggggctgtgaaatccaaccccatggggccccaacaggagacatggcctaaaccacacaactgtttattagcagagcctacatctactggaggctttttacacctacttattttggtgctgagctctgacggggctgattttttaatacctatgagccagtgagagcagactctacat

SEQ ID NO: 535762 - DNA, 617 bp, Homo sapiens
gtcagctggagggggcccttagagatgtgttcacctgaggaaactgaggcccagaatgggaaggggtgacactccttccaccgctgggggccctgctgctgcctcccattttgtctttcctcgggcctcctgatctttgcaacctcattttcatgccttggtgttttggggcaaaggtggaccacttgtttcatgtttggaccacttgtttcttgggaaataaatagatttatggtcttaggatctggcttggttagaattgtgtaactccttagtggaatgggttggaggagagaacccagaaaattttgagggaaactcttcccgatttgraagcaaagccgccctcaccaaaaagtgctccttccgctgcagcctcttcattccgaatggggtgaatcctttggctggagcccttcgtgtgtctccctcctcctcagcacctgcagcttctcagtctccccaggtgggatgggaaggtgggggagagggcgaatttagatgtcgcctgctgatggatgatggtggcttgagccccagagcccgctgggcagtacaaagccacgcaccgagtcccgcccaccacacgcgggtgctggctcctgcaccctactgtc

SEQ ID NO: 535763 - DNA, 598 bp, Homo sapiens
aaactgagacatgggccagaagagccctgatggactcctagggccttggaccagatggctggaacagggtggtaggactggttggcaccatgccctgtgtcccccttggctaagctatgcatggacgtctgtctccacagccaagcaggtgtgtcctgcagagaagctgagctgtggacccaccagccacaagtgtgtacctgcctcgtggcgctgcgacggggagaaggactgcgagggtggagcggatgaggccggctgtgctacctgtgagtctggggtcagatctccagggtctgccaagcatggtcaggcagcctcagggagtggcagccacttctggggagggggcccagttccccrtggggcttggtggtggagaggaaaggataatgatcaggacactagtaatggctagattctatggagacatggtcttctttcatcttcacaagcacctcatgagcagccattatcatccccattttataggtgaggaaactgaggctcagacaagggaggaaaagtacccaaggctgagtgatgaaaccaagattcagattcaggactggacagcaaagcccatgagcttttgtta

SEQ ID NO: 535764 - DNA, 598 bp, Homo sapiens
aaactgagacatgggccagaagagccctgatggactcctagggccttggaccagatggctggaacagggtggtaggactggttggcaccatgccctgtgtcccccttggctaagctatgcatggacgtctgtctccacagccaagcaggtgtgtcctgcagagaagctgagctgtggacccaccagccacaagtgtgtacctgcctcgtggcgctgcgacggggagaaggactgcgagggtggagcggatgaggccggctgtgctacctgtgagtctggggtcagatctccagggtctgccaagcatggtcaggcagcctcagggagtggcagccacttctggggagggggcccagttccccatggggcttggtggtggagaggaaaggataaygatcaggacactagtaatggctagattctatggagacatggtcttctttcatcttcacaagcacctcatgagcagccattatcatccccattttataggtgaggaaactgaggctcagacaagggaggaaaagtacccaaggctgagtgatgaaaccaagattcagattcaggactggacagcaaagcccatgagcttttgtta

SEQ ID NO: 535765 - DNA, 577 bp, Homo sapiens
acactacagagaggtataaaatgagaagtagaaatgccctcctccccagtccccacccttactcccagggtccctttccgtagagccgccaagttctggttccttgtgggtcccgcyatgcaccttccatccatatgtgcacataccaatgtgcagctctttttattcatgtagtggattcggatcacacatataatatgcctgtgacgacttttgcacttgtaacctatcttggagaacttcacatgtccacacttgtagatttaactcctctttgatggctacttagtatttcatgatacagatctcccagttttcccatccattgccctataaatgaccattcggttcttttcacagtttagttggctaccaacagtgccaccactggaattctgtccaggtatcgctctgcctgtgggtggacatttctgcaggattgacttgctgggtcaaagggtatatgcatgtaacatttgaaggatgtgtcaaattgtccccctaaaacactgctccaaactacacttgcaccaacagaatataagggtgtctgtctacttccccacattttgtcaac

SEQ ID NO: 535766 - DNA, 577 bp, Homo sapiens
acactacagagaggtataaaatgagaagtagaaatgccctcctccccagtccccacccttactcccagggtccctttccgtagagccgccaagttctggttccttgtgggtcccgctatgcaccttccatccatatgtgcacataccaatgtgcagctctttttattcatgtagtggattcggatcacacatataatatgcctgtgaygacttttgcacttgtaacctatcttggagaacttcacatgtccacacttgtagatttaactcctctttgatggctacttagtatttcatgatacagatctcccagttttcccatccattgccctataaatgaccattcggttcttttcacagtttagttggctaccaacagtgccaccactggaattctgtccaggtatcgctctgcctgtgggtggacatttctgcaggattgacttgctgggtcaaagggtatatgcatgtaacatttgaaggatgtgtcaaattgtccccctaaaacactgctccaaactacacttgcaccaacagaatataagggtgtctgtctacttccccacattttgtcaac

SEQ ID NO: 535767 - DNA, 427 bp, Homo sapiens
tgggagatggtggggaacaggacacttcttgcagaaggcagggctacccaagcaaggaagaggtacccccaggcagacagktgagtcatggctggagagtggcagatcttcagttttcactgaggcctgggacagggctgctccacacggcctcattttggggtgccagctctgcatcaatgtctctgagggccagccaactgtctcaggggcccctccgtcaccatcatctccactatatcatccctccagcacccccacactgactcctgctctccttccaggcctttgtcacctggaccctggagctcctgaaaaggggagaggctggatgccagctcgaagtggggcctcctccatgaggactggggccttctcccatcaggatggcgcctgtcaggggagagtgaggcagacccactggccc

SEQ ID NO: 535768 - DNA, 427 bp, Homo sapiens
tgggagatggtggggaacaggacacttcttgcagaaggcagggctacccaagcaaggaagaggtacccccaggcagacaggtgagtcatggctggagagtggcagatcttcagttttcactgaggcctgggacagggctgctccacacggcctcattttggggtgccagctctgcatcaatgtctctgagggccagccaactgtctcagggscccctccgtcaccatcatctccactatatcatccctccagcacccccacactgactcctgctctccttccaggcctttgtcacctggaccctggagctcctgaaaaggggagaggctggatgccagctcgaagtggggcctcctccatgaggactggggccttctcccatcaggatggcgcctgtcaggggagagtgaggcagacccactggccc

SEQ ID NO: 535769 - DNA, 654 bp, Homo sapiens
tatagactaaataaatttaacctaggcccaagagccagaaattgatgatgaatgaaacaccctccggaagtaaccaaaaggatcagagcctgagacctttgtcgtcagggcacctgtggcttgagctctcaaaacactttgaagagagggagttacttctcaaggaagcactaaaggcctagctgarcatgtttctcctgtgaggccagtgtattctgcagaggaaaggtcacctgggacctagaacagactcccttcagatccagagaaaaaagagctgctctgctagattggggctgggctcagagctcagctcctccacccccagctctgtggcccagcatctccatgtacaccacctcctttgaccttctcaagactctgtgggccaggtaaggctgtgtattcatttcctgtggctgccattataagttatcagactaggtggcttaagacagaaattcattctctcacagttctggatgccagaaatctgaaacaaaggtgccagcacggtggactccttctggagactatgagggagaatttcttccatccttttttcctagcttctggtgactgctgggaatcccagcattttttgacctctacgtatatcactgcaatttctcctttcttcataaggtctttcta

SEQ ID NO: 535770 - DNA, 464 bp, Homo sapiens
ctgccaccatgcctggttggttttttgtatttttggtggagactgggtttcaccatgttggccaggctggtctcaaactcctgacctcaagtgatctgcctgcctcagcctccmaaaatgctgggattacaggcatgagccaccatgcccagcctaatcattcttttcagtgggagcctctgatcactgctgcttctagtcggccatcttgtgaactcagttctttgacctccctaattccaccatcccatcccacctactcccaacctcacttatttcccttctcactgtctatgatgtgttcaccataatttcttgtgaccttgacctactttatcagttctcaaccataatagccccctgaaatccgcagcattaccagttagataacccaaacaattgtgagttgattttgaaagagtcaactctgtggccacctctggttaacactgggttctacctag

SEQ ID NO: 535771 - DNA, 505 bp, Homo sapiens
tgccaccatgcctggttggttttttgtatttttggtggagactgggtttcaccatgttggccaggctggtctcaaactcctgacctcaagtgatctgcctgcctcagcctccaaaaatgctgggattacaggcrtgagccaccatgcccagcctaatcattcttttcagtgggagcctctgatcactgctgcttctagtcggccatcttgtgaactcagttctttgacctccctaattccaccatcccatcccacctactcccaacctcacttatttcccttctcactgtctatgatgtgttcaccataatttcttgtgaccttgacctactttatcagttctcaaccataatagccccctgaaatccgcagcattaccagttagataacccaaacaattgtgagttgattttgaaagagtcaactctgtggccacctctggttaacactgggttctacctagctggtctcaggcttccccgtaagtgtgtgtgcttttgctttc

SEQ ID NO: 535772 - DNA, 627 bp, Homo sapiens
caccatgcctggttggttttttgtatttttggtggagactgggtttcaccatgttggccaggctggtctcaaactcctgacctcaagtgatctgcctgcctcagcctccaaaaatgctgggattacaggcatgagccaccatgcccagcctaatcattcttttcagtgggagcctctgatcactgctgcttctagtcggccatcttgtgaactcagttctttgacctccctaattccaccatcccatcccacctactcccaacctcacttatttcccttctcactgtctatgatgtgttcaccataatttcttgtgaccttgacctactttatcagttctcaaccataatagccccctgaaatccscagcattaccagttagataacccaaacaattgtgagttgattttgaaagagtcaactctgtggccacctctggttaacactgggttctacctagctggtctcaggcttccccgtaagtgtgtgtgcttttgctttcttttatgttgggtacaatttattttttatgttgggggcttttttttttatgtttcaggttggggcagggtttcctcaatcttcaccccaagaatctggtgaaattccttaaggtaaaattcatga

SEQ ID NO: 535773 - DNA, 483 bp, Homo sapiens
ccaatgagggcaagaattttcatctcttatgtttatggatacatccccagatccagaacggtatccatcacatggtctgatgaacaaacaaatgatcaaacttcttttttttcttttttctgacacagagtctcactcactctgttgtccaggctggagtgcagtggcgtgatcttcattcactgcaacctccgcctcctgagttcaagcaattctcctgcctcaacctcctgagtagctgggattacaggcgtgcaccaccatgcccagctaatttttgtatttttagtagaaacgaagtttcaccgtgttggccagtctggtctcgamctccgacctctagtgatccgcctgcctcagccttccagagtgctgggattacaggtgtgagccaccatacccagtcaaaattttcaatcacatctgatagcagcataggacagacttccccccaaaaggatttgatgaatgacagattctccc

SEQ ID NO: 535774 - DNA, 579 bp, Homo sapiens
caacctcaagaggaacactgaggcagaaatgcctagctaagccactcttggattcctaacccacagaaattgtgaagataacaaatgtttgttattgttttaacctactacattttgggcaatttgttatacagcaatagataaccaatgaagattttagcacagaaaatggtactatgctgtaataaaaacctgaagtgtgggagaagtttcagaaycaagaactgagaggaagctgaaaggactttgaggagagtgtaagcagaatcctaatgacctttgaggaggctactggtgaggacttaaagaaaaataagaaaaaacattattggaaactggagaagaggggctcctcattatgttgaggcagaaagtttagtgacaatattacctgcagttgcatggaaagtataaaatgtactaatgaattatttaattctcttttctttgtatgtaggctgaacttagtgacttctaatcaataaaatgtggcgagagagagagtgtgacttccactacatatttagggtaatttgttacacaccaatagatcatgaatccccttcccaaatagcctca

SEQ ID NO: 535775 - DNA, 309 bp, Homo sapiens
gaaattttctctctggaagacttctaataagcacatttccattatctttaaccacacagtgtgagctgactttcttttcttactgaatcctrtaatgtggatgtggacatgcattaatccagccatggctgagcagagcttatcaaagacaagaatcaagggtccgcccccctcaatacacagattaataagtgcaggatgtagccttcacagctaaggagttgaaaagaacgagaaaatctggacctctttgcatcccaagggactagacattatttatgtttttaacgtaaccgtgttttactgaca

SEQ ID NO: 535776 - DNA, 392 bp, Homo sapiens
tgctaaccttttttcaagacaaaagtcaccctaccctgcctctgggaaacccttcaaaccggcaaccaacagcttccagtgccaaaaccaggactaatttgcctcagcgtgtaaacaacttgaacaccaactggcattaatcaccatggtaggattgcccctcttcccttcaagggtagccccacctggggacccatgaaaggacccaaatataaggaaagcactgagaataattctgcctatctcttgtccctctgggaaagtgcstagagagtaggtgtggtatgtatgtggtgcatgttctgtgtgtgtgtgtgtcatatatctgtgtggtatgtattgtgtatgtggtttgtgtttggtgtgtatgtgtctgtatattgtgtataagg

SEQ ID NO: 535777 - DNA, 632 bp, Homo sapiens
tgtacatcaatgcctccggctagcagcccctcgtcctccggcaacacaatggcccctccatctttgtcagccccctgtttctctcctgcctctctgtttctccatctcctcgtcttgactgttttccctacttgctgacttaaccccccatagtgtgggggacctgcagagaaccatggcattccctattccacagtcatctttggacagactttcctctagtctccgggttgggggtgggtgagggaatggggtgggagtcgggggaagtgcagtccttggagatgtactggtgtccgtctcccagcatgctctagagaggcggctctggtgcccatcctcccagcacgctctggggaggcggctctggtgcccatcctcccagcatgctctrgagaggcggctctggtgcccctcctcccagcatgctctggggaggcggctctggctctcgccttcccagcatgccctttactacaaagggctatttttcttttctttcttttgtttatttatttttctttgttcactccctgtagaacttggatgaaatcagtgtccatggttctttatgtttgtagtcttgatgtgctcctgtggtattacttcccctctgataggacattgtagcc

SEQ ID NO: 535778 - DNA, 632 bp, Homo sapiens
tgtacatcaatgcctccggctagcagcccctcgtcctccggcaacacaatggcccctccatctttgtcagccccctgtttctctcctgcctctctgtttctccatctcctcgtcttgactgttttccctacttgctgacttaaccccccatagtgtgggggacctgcagagaaccatggcattccctattccacagtcatctttggacagactttcctctagtctccgggttgggggtgggtgagggaatggggtgggagtcgggggaagtgcagtccttggagatgtactggtgtccgtctcccagcatgctctagagaggcggctctggtgcccatcctcccagcacgctctggggaggcggctctggtgcccatcctcccagcatgctctggagaggcggctctggtgcccctcctcccagcatgctctggggaggcggctctggctctygccttcccagcatgccctttactacaaagggctatttttcttttctttcttttgtttatttatttttctttgttcactccctgtagaacttggatgaaatcagtgtccatggttctttatgtttgtagtcttgatgtgctcctgtggtattacttcccctctgataggacattgtagcc

SEQ ID NO: 535779 - DNA, 519 bp, Homo sapiens
ttcctgtactgatgtggagagtaagaagagctcccatccagagtgagggcaggagaaaaatgtatgaccatctggcccgtgcaggctggtagatgtgtgcacagggcagtttaaaagaacaacatgaatcacaaacagccataaagatgagtcagataatataccctccccacccaatttacaaaatgcaatctcagagtttccaaggcttggaatctctaaatgggtcttttcaccttcagctcaaatagctgtatgrccacccattagtcttaagactgtgggtgtatttttacggatgtctaatgtgctatgttgccctctgcacctcttttttgagagtgcatctaccagtaacttttagaatttctacacacacctgtacatatacggcagctctcagttcctggactctcctcctcttctttgagtctccttaaactctctcccctgagagacagttgcaggcaaggtgagctcattccttcctcttttcatatcttcttttcttccagggcc

SEQ ID NO: 535780 - DNA, 578 bp, Homo sapiens
atttttttttaatttttaattttttttattttttatttttattttttgtagagacagggtctcactaagttgcttaggccagtctcaaactattgacctcaagcaactcccaccccacccctggactcccaaaacactgggactacagatgtgagccaccacacccaatcctattccatatttggtaatggtcttggtcatagtatatatacaatatcctgcccagcactctactcagttatactagtgactgctagggcacccaatataccacagacattaatcttcaatgctttctctcacatttgtgttactctgtgctgggaatattaacacctctaacctcaaggcaatgagagacrtctttgagtaaagatgtgaactgggaaattattacaggcccagagtaatatggtttggatctgtgtccccacccaaatctcatgttgaattgtcatccccaatgttggagaaggggcctagtagaaggtgactggatcatgggggcagactctccccttgccgttcttgtgattgcgagtgagttctcacaagatttggttgtttaaaagtgtgta

SEQ ID NO: 535781 - DNA, 631 bp, Homo sapiens
atttgaatagggttattgttatttgtttctgaaatagtcctaagtaatacaagcaagttacaacatctagaagtgtacagttactaaccttgagccacttcaactccagtaatagaatgaatatgcgtgtgaatactgagactagcaggtataattggtgcaaatttttcttatgcttccatttccactgaaattagtttagttattactaggaagtgtactttacgggtttgctatatggatcaaataaaaccatgtgtgggccaggcacggtggctcatgtctgtaatcccagcactttgggaggctgaggtgggaggatcacttgagaccaggagttcgagaccagcctggccaacatggcgaaactctgtccctactacaaatacaaaaattatccgggcatggagacacgtgactgtagtcccagctattcaggaggctgaggcacaagaatcgcttgaacctgggaggcggatgttgcagtragccgagatcataccactgcactccaccctgggcaatagcgagactctatgtcgataaaacaaaataaaataaaataaaataaaataaaataaaccatgtgtgagtaaagaactttgttaaaaaagcatattgccaacttcag

SEQ ID NO: 535782 - DNA, 607 bp, Homo sapiens
atattacaatttatgactattggctgtagacatgtcaatgatatatacctgtaaatacccacttcaaaaaatgtagtaactattagttggtatttggtctgacacaaaatacttcacaaatattaggaatcagtttgaaaaaataaagccactcgcctttcatttgggaataacagtccttggtaacccttccttgcttccatactcaacatgaaagacattggtcagccattttggggttgcttcctactaacttccttgacttcattatccttttgcactttaccttattcactttggttatactgaattttcaataaacccagtaactatgttttgccagaccaatcacttcctctatcaatttttgtctccaaatggagtgaggcctgagctagattattgccaatggaaatgtaaaagccatttagatatcacaagtgaaaaaatgagcaaatgtgacatacgaggartatcaaagatgctaaatcatacacacaaggatcagagccaagatcctgaatgcatggatgagttttctaagacaaagaatatactaaggattattattttaaatagtggaacattattatgtgattccaaatca

SEQ ID NO: 535783 - DNA, 573 bp, Homo sapiens
tgtgcctagattctgctgctagattatacatacctttatatgaccagttacatgtttctaattattttagatgattattatataaaaattggctttctagtttaaaacacatcatttaaacgagaaaatgtattgccttggtggagcttacatagtaataaaataaatccaacacaagaaccactatttatcctaatgcctgtagcattttctcctaataatacttcaaaaactcgagtatttgctgtgcctaattcttttttaaaataatgtatgacacataaatctactttgcttctattaagaggtaatatcattgcatgtgccgaagtcagaattatgttttgaagctaatagtatataattaaaatttccatgtcacttaatatatatggtatcaacttagtcaaatgagcctgaatatacttgatacgaatttgaattgttgaccaagattttaacaaaaggcatataaattgacaactgcaatgagtttaccatttcgtattstatgtataaatatactagtgctattctaaaatgatttatggatttgaaagtgaaagcaaagaa

SEQ ID NO: 535784 - DNA, 602 bp, Homo sapiens
agcttcagttttggagtcagacagatttggtttcaatctagcccatctgactccaaatctcacgttcttaagcacttacatgtttttatttacattgtttggccctgctaacatttttttctcataaatcccttccttacaggttatcctgtaaaatctgacactatatatgatatagatgtattgtggaatatagggttttttctctctaattaacaaatgagaattacatgcagcaatgaagattcaaatatacatctaaaaatttgatgataaacattagaagccaaattttctggcaggagaatcacctactctgatagcatatttaaataatgacttagggaaattcattataattctgcatagacctagctcctatactagaaacatgcctctaggctcatttgtacaagaatttcttattcagcatctcagctgcacaggtttccacacagaaatgagcaggtaaaaatggttagagcttcataatgagtcaacattaacataattactttccatttcatctattacrgtacactgtttgactctctcatttcttttcatttcaatcattcctttagaacacccacaaggccctg

SEQ ID NO: 535785 - DNA, 626 bp, Homo sapiens
ggtttggctagcagagttcccagggatagtgtgtgtctcttacaaggaaaggtggtttcgagkcactggtccagtgaggaggacaaaagggaacagaaatccatccaggatgccttccatgatgattgtgacaccttcacggggtttaccacaaacacccgccatcagagaaatgggctgagacagagaagttaaccagcagctactctgagatgaggatggcggtaaggagatccgcaggctccccatcgggcattaaatgatatatacttaaaggattgctctatttacattagaattagttgtgcagactgacaccaaggaactgctggcttccaaatcccgagcccggtaatccctccctaagcttcacactgtaaaccacctgggcacaaaatcaatggctcccccggcccagccagcactgtggaaccacctgctcccagctctttgcccaagcccgaaagcctagctgtagccacagccttctggaatccaccagactggtcccccaagaccaacagggtggggacataggcagggtgaggttcaaggtgagcagctttgctcttggagacacttgaccctgggaaatggcagccctgcttcctgggccctcggcttcc

SEQ ID NO: 535786 - DNA, 626 bp, Homo sapiens
ggtttggctagcagagttcccagggatagtgtgtgtctcttacaaggaaaggtggtttcgagtcactggtccagtgaggaggacaaaagggaacagaaatccatccaggatgccttccatgatgattgtgacaccttcacggggtttaccacaaacacccgccatcagagaaatgggctgagacagagaagttaaccagcagctactctgagatgaggatggcggtaaggagatccgcaggctccccatcgggcattaaatgatatatacttaaaggattgctctatttacattagaattagttgtgcagactgacaccaaggaactgctggcttccaaatcccgagcccggtaatccctccctaagcytcacactgtaaaccacctgggcacaaaatcaatggctcccccggcccagccagcactgtggaaccacctgctcccagctctttgcccaagcccgaaagcctagctgtagccacagccttctggaatccaccagactggtcccccaagaccaacagggtggggacataggcagggtgaggttcaaggtgagcagctttgctcttggagacacttgaccctgggaaatggcagccctgcttcctgggccctcggcttcc

SEQ ID NO: 535787 - DNA, 613 bp, Homo sapiens
ctgccccttcactgctgtggagggtcagcctcgtccgggaccggctccaggccagccatgtcctgctcgtggggccccagcctggggtgcacgaagtggagcgtgttcccctcacctcctcttggggctggtggtgcctcttgctgcatttggctggccctggagatggccggcaggaaaaggggttgtgccctctacagacacggagtgccacgccagggtaacgtgcctcgttggtgtgtctcccttcccccgggccatacccaacatcgagtcaccccaaagccttggaggcacccccagggcagcccagcacagcccacatggtcctccttttcctcaacatttagagggcattcrctccaccccaggccctgcaccaggtggtgggatgccccttcctaccctggagtcgacgctggctcctacccctgcactgtgaattcccggtaacagccaagcctgggctcctgtcagaatctcaggacccaccagggcctggctgctcagagagcccatgtctcaccggggaccggcctccaagactccctaggcagaaaaagggagcaagagtgtctctggctgtccctccatcttgcaccgtgtttgtgtg

SEQ ID NO: 535788 - DNA, 630 bp, Homo sapiens
tgtactccctgccagctgcctcatgagcccttcacactaccccttggtcatttgcacggacactggcacgtacgtggctcttcctcctcatcctgggtgctgctatggcaggctggctgttcaggacacaggagccacccctgcttgcccctcacccatgtcagaagtcagtgatcaatttggccttcagtccccggaacccagcatccttctcaacccagcatctctgcccaaccagtgaccacctcttgaccagggatggctcgaattgcacttgggatggtgcagaaggtggccatgagggcacttcccagcagacttgccctgtgctgctgtctgtggactctgcttgaccatttacccaagtggtccagcactcccatggaggaggagcacaccatccccaaacctctcagccaggcccaamtctagggaggtgcaccccatcatcagagatgcatccccacatccccatcatcagagatgcatccatttatagcagccctctccagagacaggcagacggcagccaagggtctggcagaggtgccacttctaattcagccacttctaattccctccccacaggctgccaatagtgccatttgtgcctcttcccagtgggttcaa

SEQ ID NO: 535789 - DNA, 370 bp, Homo sapiens
atttgctttgtcaaaggaaagaaaaagagaaagtgtcttgttatccaccagcaccaagcagcccctcatttacgcacacacagacacacacacagacagaaacacacacacacatacacacatgcacacacatagagtttacttattccttccccagcccagcaaaaggggagaggaatacagagagtgtcttctttcaggagggttactaaatggaattcctgracaaagtagggcaggtcatccctgagtattctccaagcagttttctctagaaagggaaagaccatgttgtacagaggaagactcttgccctgcaacatccatttctagctttgttggtggcacgtgtcatgcacagtccagaatg

SEQ ID NO: 535790 - DNA, 642 bp, Homo sapiens
aagcgtgggcatcaccttaaattgcatctagccgtctcctctgcctcactgcacctgcccttctttgccctacttgtacttgtatttccatgccttaaatatggaatctgccataaagagatccaaagtcatgtggccacaggattaaattaagacccatctgattggtctaccccagaaacttggtggttaatgactcagactctggagagtttagaaaagcctgctagtttagaattctggacctacacttgctagctggtagtctcaaccaacatacttaaatactaagctgcagttctctcatctgtaagaagggaataatagcagtacctacttcatagcattgtaacgaagattaaacaagaaatgcatgtaaagtactttaagcagtgcctgggacaaatctctcaatacatattaactatggtgacatgttggtgatgatgktgatggtagtggtggtggcagtgatggtgatggtaatgatgataatgatatgataaatattgggctttgatatcactattattctgatcacaataatttataatgcatagtaagctatcctttccatgtggtctttgaattctagcaggaattaacatcttgaacactagatatccaacaataaattactag

SEQ ID NO: 535791 - DNA, 526 bp, Homo sapiens
acacctccacttgttatagttcacgatgtgcagagaaaccattaggctgaacttaaaatatgtaaggaggcagctttaggctaaatttgatttaacacatgggacaactacctgtttctttctgaccaattatttcttagccccattatgtctacatataaaggactactgctttcccagtctcactgatttattttatgagacttatctcagatggaacagacctttgaaatttatatatatacacacacacaaatcctatgtcatttcctttctgtatttttttttttttttgtatactttttctcttctagggtagtgggaagcttacatcagggaaattagcaaatttccttaggcaacctacaaagaaaaagatcttaaaaccactctccaaattttgttgtgtggaaccagcaattcttttgtgaaaccagctaccacatattctatcattcttcatttctgaatctcaagttcagggcattrgataagcatagaccttaagttctacatctctagatag

SEQ ID NO: 535792 - DNA, 550 bp, Homo sapiens
ttgcaatttactctgaaatacaaatatcctaaagaaggcatgcaggtggatattctaatcccgtatcagtcattaacatcacaaagtttattagttgattctcactaaataagagtaagttctttaattgggaaagaaggagattcaggggcagaactaatggacaatatggaaagtgtccccagccacagcctgaagacaaacagtaagtttggaggtcaacatataaagatggggaaagtaggagacacaaaagtctctggttcattacagcagtggtgatactactaggcatttcagctttctgggcctcmttttactaatgccttattaagtaaagaggtttatatgagctaaaaaggtcccaattagttgtacagcttatgatttaatttaataacaatttattgagtgtttactctatgccagccacttattaagccctttaactgcattattttatataatccaatgactcccatgagatacttagcattattatctcccttttagagatgaggaaactgaggcttaggaggatttagtaaat

SEQ ID NO: 535793 - DNA, 550 bp, Homo sapiens
ttgcaatttactctgaaatacaaatatcctaaagaaggcatgcaggtggatattctaatcccgtatcagtcattaacatcacaaagtttattagttgattctcactaaataagagtaagttctttaattgggaaagaaggagattcaggggcagaactaatggacaatatggaaagtgtccccagccacagcctgaagacaaacagtaagtttggaggtcaacatataaagatggggaaagtaggagacacaaaagtctctggttcattacagcagtggtgatactactaggcatttcagctttctgggcctcattttactaatgccttattaagtaaagaggtttatatgagctaaaaaggtcccaattagttgtacagcttatgatttaatttaataacaatttattgagtgtttactctatgycagccacttattaagccctttaactgcattattttatataatccaatgactcccatgagatacttagcattattatctcccttttagagatgaggaaactgaggcttaggaggatttagtaaat

SEQ ID NO: 535794 - DNA, 554 bp, Homo sapiens
gccttgccacaccacaacaccttatagcaagaactctgactttccagaccaataaggacaggacctgaatatattataagtggcacagagccaaatgcctatttcctgatacttcttgtgcttacatgcagaggggttcaaagaaaaaaatcattgcactgaaatccgctacctacttgtgttgctttcactgtttgtttaatgaatgaaagaagccactccagttttctggttttagctgggccacttactacttacattcttacgaaactcactaaacccttctaggtaacagtttctccatatttcctctgccaaagrcatgggacaccatgagagacttgtggatgtgaaagggtgatcagtctgtgaaatgccattatacacacagcaatgagaatttgaacaagttcccacggtgtgttcatggaagcagccactatcttcccaatgctggtgaagccagtgtctcagaaccagaaacagcattttcaagtgtttcttttttttttctttttccttttttttttgagacaaggtctcactctgtcatc

SEQ ID NO: 535795 - DNA, 624 bp, Homo sapiens
gaaaaagttatgccttggctactgagcacaatccatgctcagtgctaacgatcctatgtcagtccataaattataatggctaacactggaacattaacaccacccaaaaacacactcgtaagcaagcccgagcggcaaaatgaggtcatggagaggcttaaatctattttaggatatatcttgaacaccagtatagttcctttgacaccacctgttctcatttggaggactgtatattkaagtcccacaacagcaactgggctcaaacccagtgctgactctacagtccagttcaggataaatgctgtcttgtcattaggtgctgacctttagatgagacatttaagtccctctgacaacattccccaccttctgcttaattggcacagtataaaagatgtggctgagagagcattcgacagtggtcatagttgcctgcataatatcatagtaaaagaagcatgtgaaaaaataggtggataatataatccaatacaataaatcacttttgctgaggatcacagtggcatcaagatgacaacttgcactcacactaggaatttacttattctccataaaactattcttgccccatttcataatgaaatctcagtgtttgggatg

SEQ ID NO: 535796 - DNA, 575 bp, Homo sapiens
aactccatgtcacaggcacagaggtccaggagggagccgcgtccctaaccccgctgtcttctggcctctggccacacactggcccaaccccctcctgcctgccacccttcctgctcacacaccacattccaggactcagtgaacatgtcctccttggacaagtcttcccaaactgccccacctctgmcagttcccccagacatccagtgccctcctcgtgaacgtgcttgctgtagcagccctgcctgtcacctggcacggaggcacccagtgggctgggcaggtaggagtcccaagagccagcaaggcgccagcagggacgtcagggtgcagggcagggacgtcggggtgcagggcagggacgtcagggtgcagggcactacagtgcaggatgccagggtgcagggagccgggatgcagggcgccagtccttgcccctgttcacagtccagcaagctggggagggacgtggagcttcgtgggcaaggtttctccctaactgtgcctcccgctgctccacatggagagccgctctccgggcccggtctcctggacacccacctccaggtgcagag

SEQ ID NO: 535797 - DNA, 575 bp, Homo sapiens
aactccatgtcacaggcacagaggtccaggagggagccgcgtccctaaccccgctgtcttctggcctctggccacacactggcccaaccccctcctgcctgccacccttcctgctcacacaccacattccaggactcagtgaacatgtcctccttggacaagtcttcccaaactgccccacctctgccagttcccccagacatccagtgccctcctcgtgaacgtgcttgctgtagcagccctgcctgtcacctggcacggaggcacccagtgggctgggcaggyaggagtcccaagagccagcaaggcgccagcagggacgtcagggtgcagggcagggacgtcggggtgcagggcagggacgtcagggtgcagggcactacagtgcaggatgccagggtgcagggagccgggatgcagggcgccagtccttgcccctgttcacagtccagcaagctggggagggacgtggagcttcgtgggcaaggtttctccctaactgtgcctcccgctgctccacatggagagccgctctccgggcccggtctcctggacacccacctccaggtgcagag

SEQ ID NO: 535798 - DNA, 575 bp, Homo sapiens
aactccatgtcacaggcacagaggtccaggagggagccgcgtccctaaccccgctgtcttctggcctctggccacacactggcccaaccccctcctgcctgccacccttcctgctcacacaccacattccaggactcagtgaacatgtcctccttggacaagtcttcccaaactgccccacctctgccagttcccccagacatccagtgccctcctcgtgaacgtgcttgctgtagcagccctgcctgtcacctggcacggaggcacccagtgggctgggcaggtaggagtcccaagagccagcaaggcgccagcagggacgtcagggtgcagggcagggacrtcggggtgcagggcagggacgtcagggtgcagggcactacagtgcaggatgccagggtgcagggagccgggatgcagggcgccagtccttgcccctgttcacagtccagcaagctggggagggacgtggagcttcgtgggcaaggtttctccctaactgtgcctcccgctgctccacatggagagccgctctccgggcccggtctcctggacacccacctccaggtgcagag

SEQ ID NO: 535799 - DNA, 575 bp, Homo sapiens
aactccatgtcacaggcacagaggtccaggagggagccgcgtccctaaccccgctgtcttctggcctctggccacacactggcccaaccccctcctgcctgccacccttcctgctcacacaccacattccaggactcagtgaacatgtcctccttggacaagtcttcccaaactgccccacctctgccagttcccccagacatccagtgccctcctcgtgaacgtgcttgctgtagcagccctgcctgtcacctggcacggaggcacccagtgggctgggcaggtaggagtcccaagagccagcaaggcgccagcagggacgtcagggtgcagggcagggacgtcggggtgcagggcagggacgtcagggtgcagggcactacagtgcaggatgccagggtgcagggagccgggatgcagggcgccagtccttgcccctgttcacagtccagcaagctggggagggacgtggagcttygtgggcaaggtttctccctaactgtgcctcccgctgctccacatggagagccgctctccgggcccggtctcctggacacccacctccaggtgcagag

SEQ ID NO: 535800 - DNA, 636 bp, Homo sapiens
ggtcagtttctacaccatctttcacagaagtgtcagggtgaggtgggaagccatctccttttgcactggcttttcaaaacctcactattttgtctcagtgaatcagttcagctctcattgccctgatggattcatgtcctttccttgttctttgcccctttttgacacagagcaactccacccccgcccgaatcatttagcaactgtgagtgcccatttgaggcaagtaatgcagccgatgaatgctgagttagtgtgaattataaaagagagcaacgttgctgaatatgcctgktgaatttgcatgaaaatcgattcacccttcttatgggggtataaatcgctggtgaatggaggctgaaacatatgttatcattttttacagccttgcttgcttgtctcaaaaactgaggcctgtgatgcgaagtgtcttcagcagcagggtaattgctgccgggccacttgctgaggaagtgcttggaactgatttgaaatcacagaaaacagtgagcattctttgtggttaacgatgtgcttcttttaagcacaccccagccaacggcgacaaagaaatgtttggaaagcaaattgaaaggctgtaagggagagatgaagagagtgtgcaaccctgacaca

SEQ ID NO: 535801 - DNA, 535 bp, Homo sapiens
tatcagaagccgggtgctttactagagagtagaacagaaggccagtagtactcagccccggggccttcagtgttcttcctgcttcctggaaaggaggacttttgacttgggtaaatcataggagatgggctggagcttgctgggcagagttkggagagaagtgcgttgcatgctgagagccaagcaccgacaaaggcccagagacgtgcaatgtactggggttcagggagcaatgagaaagtcagcatgtccaaagtggccatggtcatcccactgttctttctcttgtctattattacaacaaaaatctctctgtctatgctcaatattttatttcggatgttgaaaaggctgaacattgtttttgtctttgccttgttgctttaacccttcatttctcctcagggacttgtgggtgcctctgaggagggaaaggtcacgtatctttcctgaaaaaaaagcacaaagatgaatatctcactgcagtatgaggacacaaggtggggcagttcagggaatttggggcaggaaccca

SEQ ID NO: 535802 - DNA, 523 bp, Homo sapiens
cccccaacagacccaagggtagacaatgtacaggctggtcatgagaaaatgtgtgcatgaggctctgcttaatgaaatgaggtgaataattaggacaatctgacaatctctccatagaatgtcaccaggaagtcagagaaaaaaacagccaataaatagtaagggaaaaaataagaagataaaaggaatgagagaagcagagaccaaatgagagactgagttatatcaatggtggagaactctttgtgtygaggggatcaccatacaactcagttcctgaagctgcctctcagtccttttgaatggatctctgtccctttgctatgattaaaagaacttgctttgcataggaaatttaccaatatgggatcgctagccaaatcaatcagtaaggccattcttaagccagtgcttctgggatttgaatgtgcatacagttcacttggggatcttgttaaaatgcaccttccaattcagtaaattggggtggggcttgagattccagtttctaaaagctcccacc

SEQ ID NO: 535803 - DNA, 213 bp, Homo sapiens
cacatatattcacacacaaacttgcrtacatacatgcttatatacacactcaggctcacttataaacataaacacacataattgtgtgcatgtttgtgtatgcacacatgcacaaacacacacaatcacagttgtgtctgtgctactcccattgctttttggctctgatggcgctcagcagatggaggtccaggctccctagatgctgtcttg

SEQ ID NO: 535804 - DNA, 615 bp, Homo sapiens
tcaacccccagtccacctgtcctgagtgtgcatgttgcttctctgatgatggcatttgtcaatcctatttgacatcattctgcctttgccctttgtcctctttgcgtttctgattaatctgggcaatggccatcaaataagccatatagagccaaaataacactatataacaagaaccctaaaacctcactggtattccacaataagtgcttaatattcgagctstctttcatcatcttcctgggagcagtggcccaacccaggaatctcattctcctggtggtggcaaaggtaccagagaacaaacagaaacaagtctgattgtctcctgccgtgcaggcttgttggtaggactctcagagtcccaggtggtattatccagtgcatataaacagccaaagacaagctgaataagtatgttggatggcaaagcctttgtaaaagatttatcggcccctgcagaaacagcttttaaatcacccaagacctgtaattgcattgggtgtacgagtaaatgcatctagctagcacctgtgagtccaagttcaccctttgccacttcttaccggcagagtatccattccttatttattgagtacctaatagggatcgtac

SEQ ID NO: 535805 - DNA, 280 bp, Homo sapiens
ctctagactccacacccactctattctgcatctktagccctctttttaattatgatattctcatttgcacccaggcaaccctaatatctcactgtcgagggtacaggctgctgtggctatccgtacctgggtgacacaccactccaaaatttaatgacttaaacaacaaccattttgttgctcaacaatgtgaacagctcagtagggatggcttgtgtctgctactcatgatattgactggcactattcaactggggctggagagtccaagatggtgtca

SEQ ID NO: 535806 - DNA, 564 bp, Homo sapiens
accctgtggccatgcttggactccctgcccctcacttgtgccctgctgccactctctgcagctaactccttagcaggtggggcttaattccaagatacaatttgcggcagatgtggccgctcagggcagccagcatggcaggtgagtaaggcccttcttccttgctccctgtatggtctccaaccagtcctgggtttgctgaggctcttccagctccctgtctcccatccccagcccttctgcccccagatgctgccagtgtggagacaccacagtgatttgcatccaggagactgatgttccaaaacagcttagaggaaacccaggtatttctttgattttaacaatttttagaaaagttttctcaaggctcactttcctgccaccacaagggaagcctaacttggtttttcttcaatagtcaaacatgctsttttgctgcacctctatttgcaatgcatcatcttgttcccctttccagtgataagatgccaggccttggagacttcagcaaatggaaaattccagggcctcagtttctgggcagacgccacctgactgagc

SEQ ID NO: 535807 - DNA, 525 bp, Homo sapiens
cctgcagtggtaacttgcttgataacccacctctttgttggcctccttctctttccttttcaatttccaatactctcatgatgttttctgctatcattatcctctagcccccagttaaaattgcactcaagtctttgttttggtgtatgaatctggatgaccctgacatgagagccagtgggcttagggttccagagcacggtgagatggttcgggctcacagtgcccatracgagggctgggagccagtgaatgtagagggccaagtgcacctgaggtcctggacttggaggtaggcctgaggccaagggaagggacaagtgggcctggagagctctttggctaaagaggagagcgactgaaatgaacttggagagaccctgaaactagttaggcactgaccattgccaaaagatgtgccttgatttgaaagtttactacaaagtggtttggctattgggaaaaagtaccactgccaccagccaaaacccacatctgcatacttctgtcctgctgcagtacttg

SEQ ID NO: 535808 - DNA, 531 bp, Homo sapiens
tttttgtaaataaagttttattggaacaatactacttctggtcatttacatattatctatgacttcttttgtagtattcttccctaagaatactactaagtgaaatgacgcattyaaagtgtttagtacagggtcaggcacagtggctcatgcctgtaatcccagtactttgaaaggctgaggcaggaggatcacttgagcccaggagttcgagaccaacatgggcaacataaggagactccggctctataaaaaaatttttttcattagccaggcttggtggcacacacctgtggtcctagctactcaggaggctaaggtgggaggcttgcttgaacccaggaacttaaggctgcagagatccatgatgagccactactctccagcctcggtgacagagcaagaccctgtctcaaaaaataataataataataaaaaataaaaatgaagtgcttagcacagactcggatacacagataatacttgttatggactgaatgttagctgctgccccactgcataaactcctat

SEQ ID NO: 535809 - DNA, 479 bp, Homo sapiens
gcagctggacagaaatttatcagtggaacatatctagaattggctgtgctgagtcataaggagtgtcactcttctgttctaagcaaggcaaaattacgttctaasgttagtatactcactcacactctctcccatggagtttgataattttcttcttcatattcttggaaatagtgacattgtcaaactttttattgtcaacctagtggtcataaaaaggtattcaatgtgcatctcctcaattgccaatcagcttgaatatcttcataactttatgaaacacatatgttttctcttatgtaaaagtcctgtttgtattttttgcttatttgccctttaagtttttgatctttttcttaagaatttttaggagaatgtgtgtgtgtgtgtgtgtgtgtgtgtgtgtatgtgtattatggatactaatcctttgtcatgtatatattacaaatatcttccagctttggattttaatttta

SEQ ID NO: 535810 - DNA, 479 bp, Homo sapiens
gcagctggacagaaatttatcagtggaacatatctagaattggctgtgctgagtcataaggagtgtcactcttctgttctaagcaaggcaaaattacgttctaacgttagtatactcactcacactctctcccatggagtttgataattttcttcttcatattcttgraaatagtgacattgtcaaactttttattgtcaacctagtggtcataaaaaggtattcaatgtgcatctcctcaattgccaatcagcttgaatatcttcataactttatgaaacacatatgttttctcttatgtaaaagtcctgtttgtattttttgcttatttgccctttaagtttttgatctttttcttaagaatttttaggagaatgtgtgtgtgtgtgtgtgtgtgtgtgtgtgtatgtgtattatggatactaatcctttgtcatgtatatattacaaatatcttccagctttggattttaatttta

SEQ ID NO: 535811 - DNA, 563 bp, Homo sapiens
ttttacctatattttcaagtggttcacagaagtccatctatagttcgtggatgttagtttaagaaatagtcacactrgactagaaagattatctaagttcttttctaactcttaacacctatttttttatccacgctgtgatagttaatattaagtgtcaattaagtgggtttatttgtgtgtttctgggtgttgccagaagaaattaacatttgagtcagcggactcggagaggaagacccaccatcaggaagaccaacccacagtgtgggtgggcactatccaatcagctgtcagtgtggctagaaaaagcaggcagaagttggaagaagctgacttgcggagttttccagctttcatctttctcccgtgctagatgcttcctgcctcgaacatcagactccaagttctttagtttttggactcttggacttacaccagtcgtttgccaggggctctcaggcctttggccacagactgaaggctgcactgtcggcttccctgcttttgagattttggggcttgaactggcttccttgcatctcagctggcagacagcctat

SEQ ID NO: 535812 - DNA, 600 bp, Homo sapiens
tgtttaacactaagttagcacttctctgtggccaagctgtgacgtttgttgaggacttgtccccatgattttctggttttgggatccccacgtctatccacccacttggtcaaatctgtgaagtttcatggtcctctgagatatgtcccaggcaaggtgggtgacggatatctctagcaggagggagcaagagggactgatcacttgatttcttcatctatacaatggagatgatttttcttgcctcttggaatggttataagtatgcaatgaggccatatttgtgaatcatgagtacctcctgcaactccagtgcagaggaggtgctcagagaattccagcatctttcctctgtggcagagcaggaccttgcacacaatcacaggattgagagccctggaggagggtggagytccacaaggctctggttggcaggggtggcctttcgcccatctcttgccgcagtctcctgtagatagaaagacccaggactgtgcttcttaactctctttttgggacgtgatctatttgagaatcaaataaaatccatggtcccttttcctacaaaaatgaacatgtaagtaggaatgacggcaactt

SEQ ID NO: 535813 - DNA, 569 bp, Homo sapiens
ggaatgtaagtatcatttattctagttaatcattcattaactcttcgtgaataaatgatctctgcacaagcctggatattttcacaggttgattttcctccccagcctccacaccccacactcacacaccccctaagacttcaccggctcttcacagctcttagttccaggaggaagaaccggccatccacagggtagagtagagatccagctttggatctttcgaaaaaggtaaatggaaatcaactggcaaaggtgctccttccatccagaatcagacaggccgctggccacccaaatggaaagaggaagtgcatgaacacctgcggggcaggcagagggcaggaccactgactggccagggtggggcatgatggagctggactcccctgttactcgatatgattctaaatattaattatataccttaagtccctttgaaatctgcaaagattaaaataataaggcttttggctttggaaggtggctcaatacaacactctgaggaaygaagacttagcccagagcttggggacagtcaactctccagtgactgcaacccatattag

SEQ ID NO: 535814 - DNA, 665 bp, Homo sapiens
tcacaaatgcaccactgtagcgtgggagccagagaggcaatgagaactttgtaccttctgctcaattttgctgtgaatctaaaattgctctaaaaaattaagtctattcaaaaagaggagagtaaggaagaatgattaaaatatgttctttttttaccaactgcttattttcagcaagcattgtttacatatttatggaatccatgcttttccctttgacttgtaatatttttaactctgctgagataagggggtttccataactggaaatacaacactgcagttgcaaagacagaaaaacagtcctgatttaaccatggggcatgttttccaccatgaatacgaatccagaaactcaagcctccatagattacagcaaaacaaaaactcagcaygagcatggtaatggaaacaggatacagagtaggtggaggaaatgctaaagaaatgagcaaaatatgacaggaagtctaaacaaataggtctcatcttccttcatttattcagaagaagaagaagaagaaatagatattttctccagtactatgggaatcccttgcttagagtgtaaaagtgactcttatcaattaaaagatgactccacacctgtcgccatgcttcctgccctccctccccgcaggtctgtgaccaagtcacttcatttc

SEQ ID NO: 535815 - DNA, 682 bp, Homo sapiens
tgtaaaagtgactcttatcaattaaaagatgactccacacctgtcgccatgcttcctgccctccctccccgcaggtctgtgaccaagtcacttcatttctttgctaaacctgttccctggctgccactgggccaccctcccacaggagccagcaggcagaggtgcctggggaggagaggcctaagctgctgcctgagctcccagggcagcaggccacgtgctactcagggcagagaacccacaacataaaagggaagctcacagaacaggcccgaccgccctctcctctcagcccgtggaactggaattgaagcagggccatctcaactcctgcccagggccccaggtagagggactcagaaaaccctgctatcctttctaaaacatccatggatacagcaggcacaaggtgggaatcataattcaaacatccaccttccttaaaaaatgagtccaaaatgctgagaaagcaactccctaattttctttttccttttttttatttttattttatttttttaatgtcagatttcaaaaagaaaaggccagwctactaaagggaaaggggatgaggaaacttcatgtgtcattggtcctgcattgagaggccacacagcagccaaactcaaatctaacaaagatgtaaggctcaagaaagttctgaagcgattgattctaccag

SEQ ID NO: 535816 - DNA, 491 bp, Homo sapiens
gctccaacattgcgtgagcccattgccaaactgctggtgaagtaccatgctctgtggcaaacacatggcagcttggggagggaagtcttctgacgccctgagccctggcagggcaatgggcagtagatcaagctggcctgccctgcgtgggccctcagcagggatgcaggcgaggctcccagaagacratgactcaggcctgcatctgtgactggttattccagatgctgccctgcaatgggactgttctctgctccccccacccccgacaccagtacagcacgggaatgcatgagagtgagccttggtttctttaggggagtcactgcgtaattggagagcagtgttcatgggcaagacaaaggagggccggggcaagtaagggaagatgagaagatgatgttccaaactactctcggtataaaatgtgctttgaatattttggattatttttccaatggtagagagagttttccctgagacactggttc

SEQ ID NO: 535817 - DNA, 491 bp, Homo sapiens
gctccaacattgcgtgagcccattgccaaactgctggtgaagtaccatgctctgtggcaaacacatggcagcttggggagggaagtcttctgacgccctgagccctggcagggcaatgggcagtagatcaagctggcctgccctgcgtgggccctcagcagggatgcaggcgaggctcccagaagacaatgactcaggcctgcatctgtgactggttattccagatgctgccctgcaatgggactgttctctgctccccccacccccgacaccagtacagcacgggaatgcatgagagtgagccttggtttctttaggggagtcactgcgtaattggagagcagtgttcatgggcaagacaaaggagggccggggcaagtaagggaagatgagaagatgatgttccaaactactctcggtataaaatgtgctttgaatattttggattatttttccaatkgtagagagagttttccctgagacactggttc

SEQ ID NO: 535818 - DNA, 502 bp, Homo sapiens
gatggctgggactgggaggaaggcgccatgtagaccaaacagggatataagtgaactttcacactcaccaactttcacttacagtcaggggcatcataagaatgattatccaaaccaggatacttttgaatggaaagtggcactattaataattacaatgggacagcaggcataaatcaggcaaattggggtataggrctgtcttccttgtaacctaggtttggaaagttttagctctggaaattatgtacaataagaaaagaaacattaagtgaatgcatgacttgaaaccactaaaagagaggtctgttcaaataaaggaattacattctgtcaaagtataatatacagtgaagggatggttagtctagaaatcaccatcccttttatgatttaaccaagggtatcgtatgcgtctaccctatggcactctggattggtccaagtggtcacctgacctaacctggcccaatcacgagtcctttccctgggattctgggac

SEQ ID NO: 535819 - DNA, 566 bp, Homo sapiens
gtagcatctcccaaagctgacctgaggctcccaaagaccagcagatgcattagaaaccaatccttctgtgctccagctaaggctgggggtggcttgtactctgctggtgacacctctcagaaagccagaaccagggcgattcggaattagctttcccgatgttcrgccctggcgagtctctcttgcctgtgtcaaacagccagaaagggccatattacaatgtcccaagcccagtgacatacggtgctttccagaaatgtgaactcagaaactgccaagctgagtgtgatgggcttttaggttctgatgacgttgatgttgtctactgaaaacaagtgaatctggataaaggtgattcggataaatggatcctcccagatatctgcttacacaggcggcatctgagacactgtgaggcacacaccagacacagcccacactcagtgtgggcaaaggaatgcctccaggagtctggaacagcacagatagcacagataaaatcatgtttgatgtttgacttcactttttagttttcctccagatgtgtgttaacatgaagacacagc

SEQ ID NO: 535820 - DNA, 566 bp, Homo sapiens
gtagcatctcccaaagctgacctgaggctcccaaagaccagcagatgcattagaaaccaatccttctgtgctccagctaaggctgggggtggcttgtactctgctggtgacacctctcagaaagccagaaccagggcgattcggaattagctttcccgatgttcagccctggcgagtctctcttgcctgtgtcaaacagccagaaarggccatattacaatgtcccaagcccagtgacatacggtgctttccagaaatgtgaactcagaaactgccaagctgagtgtgatgggcttttaggttctgatgacgttgatgttgtctactgaaaacaagtgaatctggataaaggtgattcggataaatggatcctcccagatatctgcttacacaggcggcatctgagacactgtgaggcacacaccagacacagcccacactcagtgtgggcaaaggaatgcctccaggagtctggaacagcacagatagcacagataaaatcatgtttgatgtttgacttcactttttagttttcctccagatgtgtgttaacatgaagacacagc

SEQ ID NO: 535821 - DNA, 635 bp, Homo sapiens
ggtacaatttatttttctgcatttcagagaaaatatcaacaagtctatacatacttgcacaattcaaaatacccatctcctttggttaagaaatactatttcttttaaatattatgtgaagctatcttgtctccccactcttcagcctccctcctaccccaactgttattattttactcacctatatgcctgccctagacttttatatgcatcaataaagtcaactttctgcttcaaagcttctttgaaggattcaatagcttcctataaaaagtgtagagaaaattatttcatttgcataattgttamaattgagattcacttaaatcataaaaggatttaaatatatatcctagtctctgacagattttcttttaggaggacttttaaaaaagagaggcagaaaatgcaataaactataagtcagaaggatttaatttcagtaaacaaatgcattactatgaaaaatatgagccttaaatttctcccctttacaatgggacatcagctttccattttatctacttcattactagctacttcattaaaactttgaatactaatcatttcaccttcatattattaatatcatatccttaattaagaaaggccctaggaccaaaagcaagcctaac

SEQ ID NO: 535822 - DNA, 635 bp, Homo sapiens
ggtacaatttatttttctgcatttcagagaaaatatcaacaagtctatacatacttgcacaattcaaaatacccatctcctttggttaagaaatactatttcttttaaatattatgtgaagctatcttgtctccccactcttcagcctccctcctaccccaactgttattattttactcacctatatgcctgccctagacttttatatgcatcaataaagtcaactttctgcttcaaagcttctttgaaggattcaatagcttcctataaaaagtgtagagaaaattatttcatttgcataattgttaaaattgagattcacttaaatcataaaaggatttaaatatatatcctagtctctgacagattttcttttaggaggacttttaaaaaagagaggcagaaaatgcaataaactataagtcagaaggatttaatttcagtaaacaaatgcattactatgaaaaataygagccttaaatttctcccctttacaatgggacatcagctttccattttatctacttcattactagctacttcattaaaactttgaatactaatcatttcaccttcatattattaatatcatatccttaattaagaaaggccctaggaccaaaagcaagcctaac

SEQ ID NO: 535823 - DNA, 566 bp, Homo sapiens
gtagcatctcccaaagctgacctgaggctcccaaagaccagcagatgcattagaaaccaatccttctgtgctccagctaaggctgggggtggcttgtactctgctggtgacacctctcagaaagccagaaccagggcgattcggaattagctttcccgatgttcagccctggcgagtctctcttgcctgtgtcaaacagccagaaagggccatattacaatgtcccaagcccagtgacatacggtgctttccagaaatgtgaactcagaaactgccaagctgagtgtgatgggctyttaggttctgatgacgttgatgttgtctactgaaaacaagtgaatctggataaaggtgattcggataaatggatcctcccagatatctgcttacacaggcggcatctgagacactgtgaggcacacaccagacacagcccacactcagtgtgggcaaaggaatgcctccaggagtctggaacagcacagatagcacagataaaatcatgtttgatgtttgacttcactttttagttttcctccagatgtgtgttaacatgaagacacagc

SEQ ID NO: 535824 - DNA, 566 bp, Homo sapiens
gtagcatctcccaaagctgacctgaggctcccaaagaccagcagatgcattagaaaccaatccttctgtgctccagctaaggctgggggtggcttgtactctgctggtgacacctctcagaaagccagaaccagggcgattcggaattagctttcccgatgttcagccctggcgagtctctcttgcctgtgtcaaacagccagaaagggccatattacaatgtcccaagcccagtgacatacggtgctttccagaaatgtgaactcagaaactgccaagctgagtgtgatgggcttttakgttctgatgacgttgatgttgtctactgaaaacaagtgaatctggataaaggtgattcggataaatggatcctcccagatatctgcttacacaggcggcatctgagacactgtgaggcacacaccagacacagcccacactcagtgtgggcaaaggaatgcctccaggagtctggaacagcacagatagcacagataaaatcatgtttgatgtttgacttcactttttagttttcctccagatgtgtgttaacatgaagacacagc

SEQ ID NO: 535825 - DNA, 610 bp, Homo sapiens
tgcctctggctataaggtcctgggtggaagtcttgcactgctaagggatttaatagaatggcactggattctccagaaagaaactctgcaaaaacttgatagattaatctaytgttcagtttcaaatctgagctagggtatctgccagtattatagaaaatgaacacattcacttcaatgatgagtaaatgggaaaaaataaaggagaagataacacgcatttaaattttcctaaaggctactcaaatagaatgagatgcatctatatccagtggtaaactggcatatcgctggccacaacccagacagcagattggactacacggtgtatgaaaaattgcaaaaattcaactaaacaattttaggtttctagcttctcttagaacatcaaaagatccaacaaacatgggcccacattttggcattctcacacagcaataaataagagactagagctaagcactggctgtctctatagatgagaggtacaagtccatcagttcaccacagggcctacccatcacagccacactgcaccaactttctttactcatgttacctccctggcccctacaaagttctggatttatgaattatatgtaactggtat

SEQ ID NO: 535826 - DNA, 544 bp, Homo sapiens
aactatagagtcacacaactatcgagagtgacaccaactgcagccaaacaaccaagtcacaaaacgttgaatcgatgtcggccaaggaccacctctgatctaagaagccagctaaataaatgagactcctgtctgatatgagagctcagtaacagacttaggtgacgcacaatatcaaatttctttgcaagtgggcgcctactggcacgtgattaccattggtccactgaagactcctctgttatatttctttcctgtcacctttatttccacccctattccttccataggctaccattctattctgttaaatataccttatttgcatatatttaaaattacrcaagtggtgttgttatatatactatgattttaatgttcccccccgccaaaactcatgctgaaatttaatccccagtgtggctatattgagaggcgaggcctttaaagggtgattggatcatgagggcactgtccttatggtggattaatctcatggattaacagattaatggattaatttaatgagttaccatgggagtgg

SEQ ID NO: 535827 - DNA, 604 bp, Homo sapiens
gcccaacaggaaatgggtgcagaggtgcaccagtccccagggttgtcaaggttaagggacaaataattgtgtctgccattctgggctcatcatctcacagggacaaagacgcaccaacaaggaattcatcagcatgatccccatttttcctctatcacagtgcttcctaacggtaacagggaagagggtaactctggaagctgcatagggcttaagagcccagcactgggcttaggactgcctggttcacatcttcactttatgccatagtttcctcatctgtaaggtgggttgctgtgaggattacaytctgcaatgcagggagggtgctcagcacagacccggcacgtggtgagattcctgattgggacaactgttaaaagaggatttgtgctgagtctggagggcaagtggggccttctcaggtggataggggtcaggggacggagcaaaacactgaggtccaagagaacatggtccctgaggtgggtgagaacagagcctgtgggatggcagtgcagggctgagggcagggctgagtgagtgacgcatcgtcccacacacatggagagcagggaaaggccaagagcaggggcacacaggg

SEQ ID NO: 535828 - DNA, 604 bp, Homo sapiens
gcccaacaggaaatgggtgcagaggtgcaccagtccccagggttgtcaaggttaagggacaaataattgtgtctgccattctgggctcatcatctcacagggacaaagacgcaccaacaaggaattcatcagcatgatccccatttttcctctatcacagtgcttcctaacggtaacagggaagagggtaactctggaagctgcatagggcttaagagcccagcactgggcttaggactgcctggttcacatcttcactttatgccatagtttcctcatctgtaaggtgggttgctgtgaggattacattctgcaatgcagggagggtgctcagcacagacccggcacgtggtgagattcctgattgggacaactgttaaaagaggatttgtgctgagtctggagggcaagtggggccttctcaggtggataggggtcaggggacggagcaaaacactgaggtccaagagaacatggtccctgaggtgggtgagaacagagcctgtgggatggcagtgcagggctgagggcagggctgagygagtgacgcatcgtcccacacacatggagagcagggaaaggccaagagcaggggcacacaggg

SEQ ID NO: 535829 - DNA, 642 bp, Homo sapiens
acatggagagcagggaaaggccaagagcaggggcacacaggggtctgctgttgtctcaggaaggggtgaggcacagcccagaggaagggcaggagggagggaggggactgctgggcagagatgggggtctcggtgagaagcacagagaccaagttgcgggtgggtggatgcagccccatggtgtcctgcctctcagaagcccygtgactggtagtgaggaggaaccattgagcagagccaatgaatcctctatgtccaggaacatcctgctggaacagcccttctgtcccaccatgggcagcaaagccccgaaagtcacagatagacctgagctccaattgctctccgcccactcgacctgccaggcacctgaccccctgcatcccggtgtcctgacccacagcgtgaacagggacaccagcctcccaagggtgaaagaattcggagtacacacacatccctatcatgggcacagcacagaggaagggcctgtgctcataaatgcttatgtatcttcccaaggaggcgtctggaaggcttccctactctgggaatgatctatattagccccccaagatcttttgatacccatgaaatcaaggaaccgatccccagcccaacctacttactgccctaataggc

SEQ ID NO: 535830 - DNA, 622 bp, Homo sapiens
tgtccactcactgagctgttgttcgagcacagaagtggcatatgctcaactctgggcctgcagcataatgtctgacataaacggggtatacaataaatatctactggaaaaaaaaaatcaatgaatgatttcagagacagaaaatagatggtggctgccrtgggctagtgagagtggggggcagtcattctttaatgggaacagagtttcagtcttgcaagatgagttctggaggtgtggattagcttgacttaatcattccacaatgtacacacgtatcaaaacatcttgttgtacatcataaatatacacaatttttcatttgtcaattaaaaagtaataatttttaaaaagagttctcgagatggatgatggtgatgtttacacaaaaatgtgaatgtactgaatgccaccagactatacacataaacatgattaagatggaaaattttatgttgtgtgtattttgccacaattaaaaataaaacttaaaaaaatcaatgagtgattaattaaaaatggaaagaaatggccaaggttaaccaaggaatgaatgacatcatacaatcttagatttaaaatgggtgcaaactctctgcagctcttctatcaagaggtgcaa

SEQ ID NO: 535831 - DNA, 552 bp, Homo sapiens
gtcccacgctcccacgccctgaggccagctcacttcacccagggcaatcggcaatagcttactaaatactgtctgtgtgccaagaacagtgtcagctgtccttgtgtccatctgaacccttgggcaatatttcattttaagacacagtcgccaacatgagggcctctcagggtccttcatgaaccactctggcccaccctcctcataggcctcctgctgggatgagggctctgatcagcaatgatgtggacaagtgaaaaaccaaaaarcaagtgccttgaggtatcagtatttaaaaaccctgatctgcccagcagtccgagccctattccaggctcaccaccgtctctgtctgtaacacactctcatgacgtaaagaaccctccaacacacatcaccaaatgttccagaattcagaaaatcttggtcttttatttctgtcccttgggttaaagacacctgtcttttagtcattttgcttatgaatgtacttctactggggcaacttaggagatggggaaaatgaattaaaatcagtgaagcttgatgctc

SEQ ID NO: 535832 - DNA, 630 bp, Homo sapiens
cacattactctgaaaagtggatgaagatagggcaggtcatcttattatactcatgttttaaatgtggaaaccgagttctggaacatttaaaccactcgcctaaggtttcatagctcatggaagggagagctggaactcctgcccacgccttccgccctcctccggtaggactcagtctacacaacaccagtaaagtccatcatttgaatcatagaaaatgttagtcagttcagcaaattgttattctagcagctccatgccccgcccctccttccagctccatccacttcctctcaagctctcttagkgctctagagcccaggatacctaactactgccaacatttgtgggtgagagcttttttaaaaaaaaaaatcacacaaacttaatcaagaattaagaaaaaaaaacaacaaacttaatcaagtacaaaaaaaacacaaacttaagagcaagcagatggtgggcagagaagaaggggaaggaagaagggaataagaattccagtctaataaaaatttatctaaataaaggaatgttttaaaattaaattaaattttactatgttgttttcacgtaagtgaggcattagtagaaactcctcaaagatttgccttaaggaacaaaatg

SEQ ID NO: 535833 - DNA, 492 bp, Homo sapiens
atgggatccactgatcgtatcacaaatcacaacatccaaaagcagataacctgatagggcattagaacagcttgcttgaggcatgattgatacaccagctcagagccaatactctgcaagaataagttgctatcttctgggatgagtatacacactaagttggatacctccataaccattacatacctataaaaaaaaaaaggatgcaaggcttttcaaaccaaggaatggagtggctccactcacaatgacctattggaggcactttgtgcttctcattcctgctactctgagttcctaagggataaatattctggtccyctaaaaggtgtaatcttgccaggggacaagtttactgttaactgccaggttcagatgctgcctgggcactttgacattcttgtatacagggaccagcaagaatgaagactagccatcttggcagaggtaggaggagatagagctgctgtaaaataacagaggcaaagagaa

SEQ ID NO: 535834 - DNA, 602 bp, Homo sapiens
ctgatttaaaaacttttcattcattttattactggcaaagttttcttttaccatatgttaactggcaatttttagtttttcaaaattgcttttcatgtcctttgcatgctaatgattttattaattgaaaattaggtttgctatactaagggctgaactctgaatttttataaagtcgtattgtcttctacttttaaagtttatgggtattttttggtacagtgtttaccttttttagttggatgttatgtkcttcattattctttattgctctttgacttacatatgctgagatcaaaaaaacattgatttcttttcttctttttctagttttacgttttcctgactttataagatttaaccctttaattcttacagaattgatttttttgtctgaacttttaaaatattttctcataacagaattttacattaaagcaaaagcaagggaccacggaaaatagcccagcagctagttactcatgatctaaggcttgggtaactgcagattaggatgaacagtgccaacagatcattacattggtattataatgccaaacaatggttgcatcacataaaatggcacaatttgacttttattc

SEQ ID NO: 535835 - DNA, 564 bp, Homo sapiens
gcccaaattctgaagattttaggtccttctttaacttcttcagtgcagttcattgaaattaaatgagatcctaggaaaagttttttccctactagaattgttattataactttcccgattacattcctgacatccataagtctagggaagtgtactttccccaaacagacttagtattttagtcattccatttacattttgtgctagtttcttcctttgtaattgtacatcagagtttgtcaggccaacaaatatacagatttttttaaaaagataaccaatagataaatgcacatttttattttaaacattactgatgtgttttattgatgcaataggtatttgttagaaaaaaatagaaaatacaaataggcaaaaaagaaaaatgagtggcaatcctcccattcawagccattgttaacatcacagtgaatattctttcaggtttttatgtttatatgtatatataggtgacccttgaacaaccctggtttgaactgcacaagtacacgtatacacacatttttttccagtaaatacagtcagccctccgtgtccctgcat

SEQ ID NO: 535836 - DNA, 598 bp, Homo sapiens
caaaatagcatacataatctgtttttttgatttttctagaagtattttagaatagccaggtctaatctggtctttaattttgtctataatgtctactcattcttgcttaatccagacttatttaactttaatcatcagaattctgccaggtaaatgatatctttcaagatgccttataactgaatctagagtttttttctgaattcctagtacagtgttttagtaacttttataattagtgcctttctacttaaacaattcacctaatgtgttaatcgcagctaatttatcttctggccttagtgcttctgcttatggaattgtatactgagtattgctctgtaaactcttaccaaaagtgacaaattagcactgttaatactttaaccatggttttagtttagggttttctrggaatggggaaaattctccaataatctctctatatataatcttcaagcctactcttgaagatcattagtttcattttcacctgctggggtttgcccctggctgaggggaagtagcatgtttgtcttgggaaagtagcacgtgttgaaaaagtctggggcttagcagcttcacgtgagctttgact

SEQ ID NO: 535837 - DNA, 581 bp, Homo sapiens
gccagctgacctcacgatccttatctcacttttgctgtcaaagcaaccaggactgttgccctttgatcccatccctagtccctccacctgcacttcctctcatgccaccactgaggacaattcgagaaactgatgctaccrtgtggaacagcttaccagggcctcatctcctgcaaagttatttgtatacttctccactataggagcaacccaatgccagaagtctttttagagggtttgttttctggggccatttctggtaccaatgactgtcagtcagatgttatagctgttacacttaaatggagtaattgagagaatttagtgaagaagctattttaaagggtctgcacaacaatggagatacatagatgacagattattgacagattgatgacagataaatgacaactaaataatatatagacaaatgacatagatgatagataatagatagatagatagatagatagacagacagatggcatggaaggggtttggggaaatctgttagggataatgagggatccaattatgttacaacagtatgagagctacctagagaaaactgtggccttgac

SEQ ID NO: 535838 - DNA, 432 bp, Homo sapiens
tctcagcaggaatcagaagtcatgccagatagctcaaatgaagaaaggtgcagagggsattagggaatatacaaggagtggtgaggagcaaagggaagctaacagtaaccagaaaggacagaaggagaaagtagggctgtctggaggaggatccgactgttgccagagaagtagtgctgggggctggaagagtaacaccgaactgcctcagtgttggaactggtccacttctgaaatccaaagtgcaggcctcccactgtttgcttatagtccctcaactttctcagtctcactcacccccactgcatctatcaggcgcttctgtgatcttcagtcactgtcatgccagtgtgctcagttgtatcgttgttgttctgtagcatctgcctggcagcttctcagccttgggcagtctcaactctctgcctcctg

SEQ ID NO: 535839 - DNA, 609 bp, Homo sapiens
agctgtcacaggttgattgtgaccttttaggatgtaattagggcactcaggttttatagtggttttggcagttgctcttgtgaccagatttattggtttaaaagacagtgcatggcacacagtacagaatcaaggaatggcatctgtcctgtgaaacaaatctagctgacacccctctcagaagccgcatcttatagcttcttatggcaggaatttcacacagccttttgaggtctctgctgctgttgttgaggagatgaaagaagagcccgtgcatccccagatctggtcagcccggccaccgtttcactgagtgtctggcactggactagacactagagtgaagaaagaatatgatgacaagcccaggcaagcccactgaagattgctggcagagagcttggcacagtaactttttttcatccctttttctttaatgtaaaggatactatcatttgttataatcactttcttaagatagttaatttacaggagaaatgagcaccacccccagcccaaaaaaatgcatrtaactcagagctgccaagaggaagcctcatgtggtcagcgttcttaaggagaccctctgctgcctggatctccagccag

SEQ ID NO: 535840 - DNA, 551 bp, Homo sapiens
tttaaccagcaataaagaaattaagtaggcaggagtcaggtaatcaagtccctggcaggctgtgaaatttgaatttaatccaagaggcaatggtacttttgacaagggtataatatgatcagctttgtgttttagaacgatcacccttataattttagaagaatggattggagggataataacataaggatgaagaaacaacatggatargagaaattctgcaaagttagcatacacaggcctccttgcttgatagaatggggatggtgatggagagcacctttgtggtttcagtcactgtctccatgaagatgctggtcttttaaactggaggaagaagatggagcttggtttgagatatgatacccccagagtttcttatgaagctgtatagcagaatccccagtggaattcatgaaggataactacagaaagacagagagaaaaagagagagagagagaatgtataatgtatatatacacatatatatgcatatatataaattatttgattaaaataacacatgttcattttagaaaattgatatgca

SEQ ID NO: 535841 - DNA, 551 bp, Homo sapiens
tttaaccagcaataaagaaattaagtaggcaggagtcaggtaatcaagtccctggcaggctgtgaaatttgaatttaatccaagaggcaatggtacttttgacaagggtataatatgatcagctttgtgttttagaacgatcacccttataattttagaagaatggattggagggataataacataaggatgaagaaacaacatggataggagaaattctgcaaagttagcatacacaggcctccttgyttgatagaatggggatggtgatggagagcacctttgtggtttcagtcactgtctccatgaagatgctggtcttttaaactggaggaagaagatggagcttggtttgagatatgatacccccagagtttcttatgaagctgtatagcagaatccccagtggaattcatgaaggataactacagaaagacagagagaaaaagagagagagagagaatgtataatgtatatatacacatatatatgcatatatataaattatttgattaaaataacacatgttcattttagaaaattgatatgca

SEQ ID NO: 535842 - DNA, 606 bp, Homo sapiens
agggttcttacagcaattccactcttctgagcagtttagaaaacaagctagaaagcattcattcacttggtagattaaaatatatttagcattttttcttttcatttagccgttctaaaattaaaagttaaatgcaaatcacactattcatggccatatcattttcttcctggtagtgaacctctggctctttctgtcttgttacattaaatgatatcttaagaaaataaatgacacctgggttgttatagtccatttggctgcctgggcttttgtgggtaagtctgaactgatatggggaaaggcatgttttactatttgtacaaagtctcaaaaaataaaaattatacctctctaatattttccacgatcatttccactttgctaggcttaacaataaattttagcatggctgatggtttcccttctggggttgaaaaactaaaatgtttttcaaagaaatgtacgtcacagaataaacaagagcamaatcactttttgtgacttaccctttcctggtatggcaagaggctgccatttcctttcaacagagacgaacgaggccagagtatgttttacaatctgtgcacagactcattcacagct

SEQ ID NO: 535843 - DNA, 636 bp, Homo sapiens
ctgcagctagtgcttctgctccgggtggggtgatatgcctggacagyggaggtgcagagtggcaagccagcggctgctgccctaagactcagtccacactgcacaccatcacatcagtgggtaaaactgggaagatggtgccatttcccatgtctttcctattactgctgacatcactgacaaaatgcaaattggccttgttcccactgaataaagaggaccttcaaatggagaattccaaaagacaagacaaaacaaacaaaccaccccaaaacaaaaaatcaaccacccactcccagctagcaatttaagttaaaatgctatcatgcggtccgttagaaatccttcttttagaacataaagagatctaaatcctttttcacagaaaatcacataattaggttattcctgccctctgcagcacagggcagggctggcagggccgggagagaacccaggtcctcactaagcacagacattttcacattctgactgagttgttccctctctccaggtactgggctctcatatctctggcagtgtgtgcctctcctcaatttctcctttccttctggaccacctacagacacagcccactgccagagacgcccagatataaacacaggtgcaaaacac

SEQ ID NO: 535844 - DNA, 661 bp, Homo sapiens
tgaatatatactgcatcccacagcacagcttccaactctgctggagcgttcgctgtgcctttgtggggccatgctgatgtcctatcagggtggcagtctggggtgtgcgatctatggtggaaccagtggagcttgcggtcacgtcccctctgtctgcctctttcgctcttacaagggtgcttggtccaaggtggtattatgggaaatcctgtgataaggcaagacattctgtaagcaattgggtagtcatgcctggaaggctctacaagcaaggaagacaaacccaaacccaaacccagaatatgcatctgggcctatggaaatcaacttgccaccgagagacggcagccaccataccatgggctgcccattggcctctacggctggagagggcagaggcaytgtctagatctgcctttttctgtgggtccctgtagcctccaaccctgtgaatggccattccattcacaggcccattgtgcagagactgcctgacctgccctagctgaatcatcccatttgctctgtgctctgctgcggatgctgtctgccgggcaggcatttgtgtaagacacatagatgggccaaatactgtttgtgtgaggagcatgtgtgagttcttgagctgagaggctgtgatatccacagcatggttatgcag

SEQ ID NO: 535845 - DNA, 646 bp, Homo sapiens
atcccacagcacagcttccaactctgctggagcgttcgctgtgcctttgtggggccatgctgatgtcctatcagggtggcagtctggggtgtgcgatctatggtggaaccagtggagcttgcggtcacgtcccctctgtctgcctctttcgctcttacaagggtgcttggtccaaggtggtattatgggaaatcctgtgataaggcaagacattctgtaagcaattgggtagtcatgcctggaaggctctacaagcaaggaagacaaacccaaacccaaacccagaatatgcatctgggcctatggaaatcaacttgccaccgagagacggcagccaccataccatgggctgcccattggcctctacggctggagagggcagaggcactgtctagatctgcctttttctgtgggtccctgtagcctccaaccctgtgaatggccattccattcacaggcccattgtgcagagactgcctgacctgccctagctgaatcatcccatttgctctgtgctctgctgcggatgctgtctgccgggcaggcattygtgtaagacacatagatgggccaaatactgtttgtgtgaggagcatgtgtgagttcttgagctgagaggctgtgatatccacagcatggttatgca

SEQ ID NO: 535846 - DNA, 653 bp, Homo sapiens
tttactacgtcttttatttacttaatttttttacttggccactaatatccagttaaagtgtttcttttgcaaactaaaactgctgtttctgctactgtctaaaaaagataatctttctattasatgagattatgtgagagacatccataatacttttgaagtatctcaactttagaaatgggtggctggaggccgagcacagtggctcatgcctgtaatccagcacttagggaggctgaggtgggcggatcacctgaggtcaggagtttgagaccagcctggccaacatggtaaaaccccatctctactaaaaatacaaaaatcagtcaggcctcgtggcgggtgcctgtaatcccagctactcgggaggctgaggcaggagaattgcttgaacccaggagacagaggctgcactgagctgaaatcaccccactgcattccagccaatcacgaggtcaagagatcgagactatcctggccaatatggtgaaaccccgtctctactaaaaatacaaaaattagctgggtatggtggcgcgtgcctgtagtcccagctacttgggcgacagagcaggactctgtctcaaaaaactaaaaaaaaaaaaatagaaatgggtgaccagtatacagtttcagaccactaaaaacacctc

SEQ ID NO: 535847 - DNA, 552 bp, Homo sapiens
gaaatctgggttgctaatgagcaatgcttttaatattttagcccaagaaagctgaaaacacaagtgyagcaaaacaaggctggaattgcccttcctttggaggagggaggaaagttgggacaggaaaccaaggaaaggcaatcagaaatggaggactcagtcctgtggaaaaatacaaataatatagtcagcctgggaagaagtaactggatctagaaatcaggcatggcagaggtacccatttgctcagcggcaaggaatccgcaaggttagatcgtagaataagtctgtaattcaccaacctttagattgcaagatggccaagaaatagggatagagcttgagtttacaatattctagaaggaaaattttatacaatttggtcagaaagtgggtatttcgtttgctcattaggctatatattcatcacttaatatgtaacaagtgccatttcaggtctggggaggtagaagtgaaggagacttaacaagtctctgttgtcatgtggcttactttctagtagggggaggcagacaacaaatacccaagaaa

SEQ ID NO: 535848 - DNA, 552 bp, Homo sapiens
gaaatctgggttgctaatgagcaatgcttttaatattttagcccaagaaagctgaaaacacaagtgtagcaaaacaaggctggaattgcccttcctttggaggagggaggaaagttgggacaggaaaccaaggaaaggcaatcagaaatggaggactcagtcctgtggaaaaatacaaataatatagtcagcctgggaagaagtaactggatctagaaatcaggcatggcagaggtacccatttgctcagcggcaaggaatcygcaaggttagatcgtagaataagtctgtaattcaccaacctttagattgcaagatggccaagaaatagggatagagcttgagtttacaatattctagaaggaaaattttatacaatttggtcagaaagtgggtatttcgtttgctcattaggctatatattcatcacttaatatgtaacaagtgccatttcaggtctggggaggtagaagtgaaggagacttaacaagtctctgttgtcatgtggcttactttctagtagggggaggcagacaacaaatacccaagaaa

SEQ ID NO: 535849 - DNA, 621 bp, Homo sapiens
atcattaatttgtaataaaattaacattttatagtatgttatccttaacctgctttgttatatatagttttctattctgacagtctcatgcttgctcaaattgtctattcaactctagtgatagggtaagtaaaaaaccaataaccggccgggcgcggtggctcatgcctgtaatcccagcactttgggaagctaaggagggcagatcacgaggtcaggagattgagaccatcctgactaacacggtgaaaccctgtctctactaaaaatacaaaaaattagccgggcgtggtagcaggagcctgagtcccagctacttggaaggctgaggcaggagaatggcgtgaacctgggaggcggagcttgcartgagcctagatcgcgccactgcactccagcaacttaagagttttaattattactcctcttctagcatctaacatattgctaggtatcaaatagctagttgatgtgtatacattaattaactttgctcttttaaaagtcctttacttttattcataaatgtatatatttgatatttttggaaatataataaattcacctttcccttgttttagaatattatcttaatggtggcgctccatggtttcttcagct

SEQ ID NO: 535850 - DNA, 402 bp, Homo sapiens
tctccttattagagaattgaacaaaagtgsaataaagaaattgtgactttttatttagtgcttaatattatagtatatgcccctattattgtctccttcatgattgttttttgctctgaatataattttaaagggcattttgactattgttacaaactgaagtcattctggaatatatcatttctgactgcttttatcatcatgtgataggtgaaatgtccatcagagcaagtatctaagaaattccaggtgtttattaggataaagtggtaggaagttgtgtggctatttgtattatagttctctatttctacttgcacgtgctctgtattaagaatgtaaaagtagaaatagagcttttagactactttgatagaaataactctatattcctatagcaaa

SEQ ID NO: 535851 - DNA, 402 bp, Homo sapiens
tctccttattagagaattgaacaaaagtggaataaagaaattgtgactttttatttagtgcttaatattatagtatatgcccctattattgtctccttcatgattgttttttgctctgaatataattttaaagggcattttgactattgttacaaactgaagtcattctggaatatatcatttctgactgcttttatcatcatgtgataggtgaaatgtccatcagagcaagtatctaagaaattccargtgtttattaggataaagtggtaggaagttgtgtggctatttgtattatagttctctatttctacttgcacgtgctctgtattaagaatgtaaaagtagaaatagagcttttagactactttgatagaaataactctatattcctatagcaaa

SEQ ID NO: 535852 - DNA, 591 bp, Homo sapiens
atttgaaaggaaaaacatttagtgttcatgcccaggcttgggctaagccccagaaaccagactggactaatggcaatccaagcaccataattaggctgagacaaaaataaaagaagaatatcctttttttctttttcctttttccaggtgacctgagacactgtgtatgcttgaattcccccattgatctcaatagcatgtatgtctttttgttttcagctactgagtggaatagcctgacaacactccaagttgtttctcacatttccactgggtattttcccaaaaactctgcatgtatttattcgtcaratatatttaacacgatagagtgtttttccatctaaacatactctagtgagtccttttgataaccaagagtaattcatatatgtatgctttagataaaaattttttagtgtagagttggtttgaaaagttactcaacttcaatccagtgggattatttttaaccctcttagagattactagtggagcaactaatataagggaacagaaatataaatggtaaagaacaaatatgatttctactctaagagagataaacatctactaatgtatgaagagatc

SEQ ID NO: 535853 - DNA, 561 bp, Homo sapiens
gggttccaaaacctgctgctgctcaacaggacttgtcaaaatcctgtttctatgtgggagcacctctattttttactcactatatcccctttttcccatttacaaaatcacaggatgcctgagtatgaattttccttctctgttttctccctgactagctggtttgtcaccaggacttgccatagaccccactctaccctaaagtcaaatatcaatagctgcaggtactcaaggatctttgcttgaatactgaccaaatttcccagaacacaccaagaagctttccttccaaaagcaaactgaactatcccccgccccccataaccaatttggtttaaatcaacacatatttatgagccctgactatggaccagactttgtgctaactgtggggggtacatggktgaataagatgtagctggaaagtgctttccttgtggagctttcagtcttgtaatagactgggggagatacacacttaaccagataattttaaaatgaggtaagaggtgctaaaatgaaggcagtcactgagggagaatacctagaatgatctgaagg

SEQ ID NO: 535854 - DNA, 556 bp, Homo sapiens
tccaaaacctgctgctgctcaacaggacttgtcaaaatcctgtttctatgtgggagcacctctattttttactcactatatcccctttttcccatttacaaaatcacaggatgcctgagtatgaattttccttctctgttttctccctgactagctggtttgtcaccaggacttgccatagaccccactctaccctaaagtcaaatatcaatagctgcaggtactcaaggatctttgcttgaatactgaccaaatttcccagaacacaccaagaagctttccttccaaaagcaaactgaactatcccccgccccccataaccaatttggtttaaatcaacacatatttatgagccctgactatggaccagactttgtgctaactgtggggggtacatgggtgaataagatgtagctggaaagtgctttccttgtggagctttcagtcttgtaatagactgggggagatacacacttaaccagataattttaaaatgaggtaagaggtgctaaaatgaaggcagkcactgagggagaatacctagaatgatctgaag

SEQ ID NO: 535855 - DNA, 261 bp, Homo sapiens
aaaatgttaactgcgtcatgaactttcctctatgggtctcccaggcaaagtctaaactctagttattgaaaasagcattttttttcatgtgggatttcaaatcagtgctagcaatgaggttgagtcccggggagggggatggagtctgggctccctcagggcaattccagtgaagtggctggctggtgtcctcttcagagatgtgtgtgtgtatgtggggctgtcctattgatttaattaatgcacttatttagagtctat

SEQ ID NO: 535856 - DNA, 261 bp, Homo sapiens
aaaatgttaactgcgtcatgaactttcctctatgggtctcccaggcaaagtctaaactctagttattgaaaacagcattttttttcatgtgggatttcaaatcagtgctagcaatgaggttgagtcccggggagggggatggagtctgggctccctcagggcamttccagtgaagtggctggctggtgtcctcttcagagatgtgtgtgtgtatgtggggctgtcctattgatttaattaatgcacttatttagagtctat

SEQ ID NO: 535857 - DNA, 610 bp, Homo sapiens
ttaatatctaataactaatgtctaacattggtcagccttttgtcacactcaacagaatactctttttgagttataaacagcccctgatatggtctttgggtagccaggaaaataaacaaactattagattgaaaacaaaactattaaatgaagatgttttcaaaagtcttcttattgctaagattattsctccacaaacaccaggtaggctattaccaaggattctgaaccaagaacctcctactggtgagtaagaagatacctgagagaaagccttacgattcaagctccatgagggaaaggacccagaaccatgcctggcatataggaggccctcagtagatacatatttttaatggctacatgaataaagcatgcatttttgattcagctacagtggctcatgcctgtaatcccaccactttgggagggtgaggtgggaggatcacttgagcccaggagttcgagaccagcctgggcaacatagcaagacccccatctttacaaaaaaaaaaaacaaacaaaaatttgctgggcatggaggcatgtgcttgcagtcccagctacttggaagactgaagcaggaagattgcttgagcccaggagttcg

SEQ ID NO: 535858 - DNA, 578 bp, Homo sapiens
actttgggaggccacaaagggcgaatcacgaggtcaggagatcragaccatcctggctaacgcgttgaaaccccgtctctactaaaaatacaaaaacaaaattagccgggcgtggtggcgggcgcctgtagtcccagctactccggagactgagatgggagaatgtcatgaacccgggaggcggagcttgcagtgagccgagatcgcgccactgcactccagcctgggtggcagagtgagactctgtctcaaaaaacaacaacaaaaaagttttccattctatatatctgcaattgtggtaaaagcttttaaaaatgaatttggaacaattgctatcttcttttaagacaggaatagttaaaactttaaataaaaattaggtatttcaacaaaaatttttgggtctagtgctttttaattggtagttattttatttttttattttttgctatttcatagcattagcttttggttttatttatcttttctgtggatcttgttttttagttcatcaatttcagattttgtctttaataatttccttctcatatactgtttgttgttgttttgcctatatt

SEQ ID NO: 535859 - DNA, 578 bp, Homo sapiens
actttgggaggccacaaagggcgaatcacgaggtcaggagatcaagaccatcctggctaacgcgttgaaaccccgtctctactaaaaatacaaaaacaaaattagccgggcgtggtggcgggcgcctgtagtcccagctactccggagactgagatgggagaatgtcatgaacccgggaggcggagcttgcagtgagccgagatcgcgccactgcactccagcctgggtggcagagtgagactctgtctcaaaaaacaacaacaaaaaagttttccattctatatatctgcaattgtggtaaaagcttttaaaaatgaatttggaacaattgctatcttcttttaaracaggaatagttaaaactttaaataaaaattaggtatttcaacaaaaatttttgggtctagtgctttttaattggtagttattttatttttttattttttgctatttcatagcattagcttttggttttatttatcttttctgtggatcttgttttttagttcatcaatttcagattttgtctttaataatttccttctcatatactgtttgttgttgttttgcctatatt

SEQ ID NO: 535860 - DNA, 398 bp, Homo sapiens
tttgtcctagaaatccttctaccagagactctagagtgagttaaaatgccagctccttgtaccttattattccatcgttacggaataccaacatcagcatcttatcacatacaaactcagctgagtgggggcagagagcagggttccaaggaagaaaaattaagaatgggactgtctggggcactatggggtaggcacttcccttggaccagccaagaagagacttctcatggaggctgaaggcctgttggtaaaggggtgggagcaaacccccttcatgggcatgccaccagatcattcacatatggccccacacttaacaggacctcatgctcagtttaacacyctgctgtcagtcaccatcttgaaattcttaattttctaacatgggattccac

SEQ ID NO: 535861 - DNA, 610 bp, Homo sapiens
aagcccacggttggacggaagacaaacacctgcaataccaactcacttgagtgactaagcccatcaaggtgtgtttaagtgtaatctttgaacaggaacttgaaattctgtrtagacttccaaatctctgtgctttttctggacaccccctccaattttctatagtcattttccttaaggagctggaagacaacattaaaaagcatcagtcttattaagaaaagcaaattttacagccttcccagttagaattgtttggatcattaaccaatctcctttctcatttccctcaattatggaatgctcctatctactttttgactcatatccatcaacacatcactgaaaaaacacaaaaattccaggagccatgtaatcctctagtaacttcacttcttctcaaaggcttaatgggattggggctcattgatagtctagtggaaggcatccaaagaaactcccaaagcattgaggaaatgctatgttagtgactcaaaaaccatactagtttagctttattcaagtgtttcaagtttgaaatgatttatacttgatctactcatcatgaaataacatacttcttctctgacacatgatgcctctttgtgat

SEQ ID NO: 535862 - DNA, 610 bp, Homo sapiens
aagcccacggttggacggaagacaaacacctgcaataccaactcacttgagtgactaagcccatcaaggtgtgtttaagtgtaatctttgaacaggaacttgaaattctgtgtagacttccaaatctctgtgctttttctggacaccccctccaattttctatagtcattttccttaaggagctggaagacaacattaaaaascatcagtcttattaagaaaagcaaattttacagccttcccagttagaattgtttggatcattaaccaatctcctttctcatttccctcaattatggaatgctcctatctactttttgactcatatccatcaacacatcactgaaaaaacacaaaaattccaggagccatgtaatcctctagtaacttcacttcttctcaaaggcttaatgggattggggctcattgatagtctagtggaaggcatccaaagaaactcccaaagcattgaggaaatgctatgttagtgactcaaaaaccatactagtttagctttattcaagtgtttcaagtttgaaatgatttatacttgatctactcatcatgaaataacatacttcttctctgacacatgatgcctctttgtgat

SEQ ID NO: 535863 - DNA, 633 bp, Homo sapiens
attggcttcaagagtgcatttcataaaattcctcacttattgattcaggtttttttgttttgttttgttttgttttgttttgtttttgagacgaagtcttgctctgtcgcccaggctggggtgcagtggcacaatctcggctcactgcaagctccgcctcccgggttcacgccattctcctgcctcagcctcccgagtagctgggactacaggcaccygccaccacgcggggctaattttttgtatttttagtagagaccgggtttcaccatgttagccaggatggtctcaatctcctgtccttgtgatccgcccgccttgggctcccaaagtgctgggattacaggcatgagccaccgtgcctggcctgattcaagtttgaatatatccgtggagcactgtgtgctcacggcagatgagggtagaggtgagaagacccaacaactctttggatatccacgtgttaaccagccaggcatttacattgtttccctaacttggcttcagttcccctcagccttttgagtgttggtcgctgatcgtggttatggaggaggtgtcttcaaaagcatcaaggaaaaaatatcaaatattttgatatttgatatcaaatatcaaaatttgccatggtgc

SEQ ID NO: 535864 - DNA, 633 bp, Homo sapiens
attggcttcaagagtgcatttcataaaattcctcacttattgattcaggtttttttgttttgttttgttttgttttgttttgtttttgagacgaagtcttgctctgtcgcccaggctggggtgcagtggcacaatctcggctcactgcaagctccgcctcccgggttcacgccattctcctgcctcagcctcccgagtagctgggactacaggcacctgccaccacgcggggctaattttttgtatttttagtagagaccgggtttcaccatgttagccaggatggtctcaatctcctgtccttgtgatccgcccgccttgggctcccaaagtgctgggattacaggcatgagccaccgtgcctggcctgattcaagtttgaatatatccgtggagcactgtgtgctcacggcagatgagggtagaggtgagaagacccaacaactctttggatatccacgtgttaaccagccaggcatttacattgtttccctaacttggcttcagttcccctcagccttttgagtgttggtcrctgatcgtggttatggaggaggtgtcttcaaaagcatcaaggaaaaaatatcaaatattttgatatttgatatcaaatatcaaaatttgccatggtgc

SEQ ID NO: 535865 - DNA, 636 bp, Homo sapiens
gaagttttgaagcttgcttataaataacattaagttttaaagagttgcttttactttattgtatatattttcagtgtacaattaaagtacttatctttgataaatacagtattcaagacagtagcatgtaatgtatttttgacatttgaatccttgcagagtaattttctgcattacttttgctcctttgagaattgaatacaggcagcctttgctttgcacagtgctgtgttaactgaaactcatttgtatcagaagtgtgcaaagcaagggctgctgtatgcttttctgtttgtattaacttatcaggattcaaacatcacttttgggagactggaataactttgtcttctgattgcattggcactttcctctacaattgagaagctatttgggttgtctttatcagacttacattgcctctgtgaatatcagccttgrtctactccaagtgcaggacaaacacaaagaactctctgcacagttcattactccattaggtggttcagatgcaattccagcccttagtcaggttctttccagtgtcctcaaacacagtaaggagagtgctctaagtgactctttgtgtctcacacaatctcttgggttcccaggtcactggtgtagtagccagct

SEQ ID NO: 535866 - DNA, 466 bp, Homo sapiens
ggaacatggtttcccacccagctcctgaatgaccgtggttcttccctgcgtggtctcgcgtgccatgccatgtctcccgcttctcgggatcgacgagtataaaacttctttcctgacagttatttccatgtctgtgcatcttaccacacccgattaaaacaaakccccagttcattttaaacacaggttagtctacgtcatacaataagattcttttccttgaccttccccaccagcttttgaagcatgtaactagacatcatcattgtcaacaacatcattatcatcgttatcctacagctaagaaagggaaacaagggcaaatgccagggattcacctaaggtccacaaaacatggccaagctgggacttaaacacaaatttgggagctagcaccaaatgctggccatttccccaaaaagatttgcagaagcccataggaagttagaaatatggtccccagtga

SEQ ID NO: 535867 - DNA, 401 bp, Homo sapiens
tgtctcccgcttctcgggatcgacgagtataaaacttctttcctgacagttatttccatgtctgtgcatcttaccacacccgattaaaacaaatccccagttcattttaaacacaggttagtctacgtcatacaataagattcttttccttgaccttccccaccagcttttgaagcatgtaactagacatcatcattgtcaacaacatcattatcatcgttatcctacagctaagaaagggaaacaagggcaaatgccagggattcacctaaggtccacaaaacatggccaagctgggacttaaacacaaatttgggrgctagcaccaaatgctggccatttccccaaaaagatttgcagaagcccataggaagttagaaatatggtccccagtgaacctc

SEQ ID NO: 535868 - DNA, 616 bp, Homo sapiens
ccagggaaggacgacactgccccacagagagccacgtgggggttgcagytgggaacagagtgaaccaccaggaagctgtgggaggcaggctttgtagtaacaagagggaaaggtgcccctggttcctgtaagaggatgtgtttggtttgcttggataattctacaggctgacggggacctgaagcctagcactgcgcctggtccctttgataaggagggttgcttggctagaggactttatccaccaggagcagagtgggaggagaacttgcagttaatccatttgagcctctgtaccctgattttaccagcctccatggtcaaggcagcacttagttttgaatcttaatttcaggccttacaccacaggtctatgagtcattggagctgaatttcctatccaaaggtattcaaaattattttcaaatctgatctggccaaacagaattctaccattcatcactgctggtttccaagcccggggccacttccgattccctagatggcacatcagggcattcctaatcaggcctaatgcatatctcctttctcatcatccctgctaaatttcagcctgagtttacacacattcactggacaacttgtgtttttggca

SEQ ID NO: 535869 - DNA, 595 bp, Homo sapiens
ttttttgtaatttttaattgagcttaatctctcctttaataatagcaaagaagatcttgaacattcagaatccctagacagtaaaatccttaacacagagagtgtgccggggacatggctacctatagttcagcagtgctgacaagctgaatgacactggataaatcatttaattttgatgtcccttagttaccttgccttgaaatgggaatgctaaaagtttcactacttcctttgcaaggtactgtgaatgtaaaatwgaataactagaaagctaaaatatatatgtaatttatgtatctgtaagtaatgtgtggaacttttaagccttgtatgggaataaaacaaatatacactgtactattctatgaacaaatctgttggccaacattctgatattgaatatttatacacgatataatgtcttcatttattttctggacagaatatatgagatttctcaacagaggatttcccgttctcttatttaagtattctcctcggtgtttgggaggctgtatattaaactagagaaaaggtatttgtttgtagtcaaacataagcttttgtatctactctgcccttttactagatc

SEQ ID NO: 535870 - DNA, 452 bp, Homo sapiens
agttcaaagtgtaggttaatcttggagggggcagtgagtaagacagaaactagagtgaaacaggataacttgagaaattctcagtgatcaatatatgccatgtttttcaacataatggaatggaaatcgagtttwaaaaaaaagacatcttggaagaagtcatttatagccgaatgcacaatgtgaaatgtttgaactgcatgagaaatataaaagccaagctgaaaatatacacttacattatcaagattgttagacaacactgcattatcatttttccaaaagcagagcgtgagtttggatcttaattacaatgaaagcaaatgtgtcaaagaaaagtttatttcctattgttgtttgcctataattgatagtgtgacaaataactgcacagctattgtgtatggcagataagcaacttcagtagaaatcttgccctacatggcaaccaa

SEQ ID NO: 535871 - DNA, 559 bp, Homo sapiens
attcatttatccagttttttacttcagaaagatgtccatttcattgaaatagtttatatatgatactttcagtgtaagtgaagagcaaaagcccctacagtcttacttgctaggtatggctctacgcaaagtgtttctatagcttctctgagagttcccgagggatttctcataataattcaggaataggttgctcctgtccttcatacaggagtccttcctttgtaacacactcccatctttgatgctgatgggatrtgaaggtaggtaggcactccatctaagtcaggcagttctgttgctatctcctctctggccttgtgggtcccagagtggaggagacatttctcccccattttagtaaaatgcttctgatgatggtaatttaaatgagggatgtgggaatgaggtacatccagcctcaccaactagatgaatgtggtactgttctctgagttaatgattatagggggagataaggaagtgccttgggaatggcatgaaaagtccacttttgcatattagtttgtgttaacatccatgtaaggtaacagaaggc

SEQ ID NO: 535872 - DNA, 613 bp, Homo sapiens
tgctcgtggctcgtttcccacccagagcgggggccctggcagcrcagggtgtaggaggcggcttcccccatggggaagaacttggtggcaccactgtcacacaacaggttgaggggctcctgtctgcagaggtgctctcttgcttggggctgacagcccttccctggaccaccacagtctcctatgggaaggaatgggtggcctgaagttctgaaggactgtgcatttcctaagaacctgcggctctaggtttccattgttccagggtcctgagagtgaagagtctatgtcctgaggtcctacctttctaggacttggaggtgtgctggtcaatagccagtacagcaatgagaggggctgagcagagccaggctgggggaggaggccttgggcccatgtccggctctggccccagaatcactgggaatgggcagtccctggaacagcctccaccaggaaaagtaggggcggttccaacacaacccctggggaaggcagccaaggcaggcagaacttcaaatgctttggggttattttattttattttacataagtggaggcaaaaattggtttctcgtgtggtcttaagctttccaagtcataacatcactcc

SEQ ID NO: 535873 - DNA, 613 bp, Homo sapiens
tgctcgtggctcgtttcccacccagagcgggggccctggcagcacagggtgtaggaggcggcttcccccatggggaagaacttggtggcaccactgtcacacaacaggttgaggggctcctgtctgcagaggtgctctcttgcttggggctgacagcccttccctggaccaccacagtctcctatgggaaggaatgggtggcctgaagttctgaaggactgtgcatttcctragaacctgcggctctaggtttccattgttccagggtcctgagagtgaagagtctatgtcctgaggtcctacctttctaggacttggaggtgtgctggtcaatagccagtacagcaatgagaggggctgagcagagccaggctgggggaggaggccttgggcccatgtccggctctggccccagaatcactgggaatgggcagtccctggaacagcctccaccaggaaaagtaggggcggttccaacacaacccctggggaaggcagccaaggcaggcagaacttcaaatgctttggggttattttattttattttacataagtggaggcaaaaattggtttctcgtgtggtcttaagctttccaagtcataacatcactcc

SEQ ID NO: 535874 - DNA, 600 bp, Homo sapiens
tgctcgtggctcgtttcccacccagagcgggggccctggcagcacagggtgtaggaggcggcttcccccatggggaagaacttggtggcaccactgtcacacaacaggttgaggggctcctgtctgcagaggtgctctcttgcttggggctgacagcccttccctggaccaccacagtctcctatgggaaggaatgggtggcctgaagttctgaaggactgtgcatttcctaagaacctgcggctctaggtttccattgttccagggtcctgagagtgaagagtctatgtcctgaggtcctacctttctaggacttggaggtgtgctggtcaatagccagtacagcaatgagaggggctgagcagagccaggctgggggaggaggccttgggcccatgtccggctctggccccagaatcactgggaatgggcmgtccctggaacagcctccaccaggaaaagtaggggcggttccaacacaacccctggggaaggcagccaaggcaggcagaacttcaaatgctttggggttattttattttattttacataagtggaggcaaaaattggtttctcgtgtggtcttaagctttccaagtc

SEQ ID NO: 535875 - DNA, 644 bp, Homo sapiens
cctccatagagtccctgcatcacctcccactggggaacctccaccagcctccatttcacaagcatctgtgggcatctagtggctgggctgcctcagtttgctcatctgcaaaatgaaggtagtgctgcctgcctgggagacttccagaagaaatgaggggtggcaggttggtgcaggtgggtgtacacttccccagggttggggccctgggttcagatccccaccctgccagcttcttgctgggtgactttagcacaaggaacaggayagcgggggctgcagagctgcagggaagagagcagtctgagagtgctcggggtccagggaccatcctgggacagagcccagcggctgggtggccccgcaaagacagacgcccacctatcactgcagctcagagccaagcccttcccactggctcagggtagcagtagccccagtgaggatccacccaaggctctgtcaggcctgtcattcaggcctaatcccggctcattgtccgcctgccagtggggcttttggctgccacctgccccgcacagggtgttgtcacagaagaatgtggcaggtgggggtaggtgggggccatcctggagggggtctgtccccacccaggcaggcagagggctttgggaagacaatgg

SEQ ID NO: 535876 - DNA, 644 bp, Homo sapiens
cctccatagagtccctgcatcacctcccactggggaacctccaccagcctccatttcacaagcatctgtgggcatctagtggctgggctgcctcagtttgctcatctgcaaaatgaaggtagtgctgcctgcctgggagacttccagaagaaatgaggggtggcaggttggtgcaggtgggtgtacacttccccagggttggggccctgggttcagatccccaccctgccagcttcttgctgggtgactttagcacaaggaacaggatagcgggggctgcagagctgcagggaagagagcagtctgagagtgctcrgggtccagggaccatcctgggacagagcccagcggctgggtggccccgcaaagacagacgcccacctatcactgcagctcagagccaagcccttcccactggctcagggtagcagtagccccagtgaggatccacccaaggctctgtcaggcctgtcattcaggcctaatcccggctcattgtccgcctgccagtggggcttttggctgccacctgccccgcacagggtgttgtcacagaagaatgtggcaggtgggggtaggtgggggccatcctggagggggtctgtccccacccaggcaggcagagggctttgggaagacaatgg

SEQ ID NO: 535877 - DNA, 610 bp, Homo sapiens
cctggggactctccctgggctgctgccataaccccatcttcgggtgacaggggctcctgaggtcagggatttgcaagtctcagacttccagagctttgttttagtgacttgcgctgcctggctcatggcagggctggttacacatcaggtgcatgaaacatacagcaggggtatcaatgccccaaaatgggctgcagaacctrggcttctggggagcagccctggctcatgcaattcctaaggctgcgtggcaaaatgaggccaagatgggagtgtggagcccacagcaggagctgggcccctcctcaggctgccatgagtttctccgagcctgtttctccatctctgaagcaactttgatcctccccaactgtccttccaacctgcccagggacaagatgcccctcaccctgcaggaagtccccagcagcttcctaaatctcctctgaccactcttggtcattagaagtcctttaacctcaaatctctcatttctgtagtaccccaccctctctggcctgtgcttagcaggaaacggacaggactggcctttgcggagggagggacagaagcagtaaccggctccagggtggctgcgtgccctgggcct

SEQ ID NO: 535878 - DNA, 610 bp, Homo sapiens
cctggggactctccctgggctgctgccataaccccatcttcgggtgacaggggctcctgaggtcagggatttgcaagtctcagacttccagagctttgttttagtgacttgcgctgcctggctcatggcagggctggttacacatcaggtgcatgaaacatacagcaggggtatcaatgccccaaaatgggctgcagaacctaggcttctggggagcagccctggctcatgcaattcctaaggctgcrtggcaaaatgaggccaagatgggagtgtggagcccacagcaggagctgggcccctcctcaggctgccatgagtttctccgagcctgtttctccatctctgaagcaactttgatcctccccaactgtccttccaacctgcccagggacaagatgcccctcaccctgcaggaagtccccagcagcttcctaaatctcctctgaccactcttggtcattagaagtcctttaacctcaaatctctcatttctgtagtaccccaccctctctggcctgtgcttagcaggaaacggacaggactggcctttgcggagggagggacagaagcagtaaccggctccagggtggctgcgtgccctgggcct

SEQ ID NO: 535879 - DNA, 537 bp, Homo sapiens
tcctcttccaagccccctccaggccagacactccccctgcatgcaggcccctcatcttcaggagcctcgcctttctgtctctttttgtccttttctctttctctttctttcagcctctctccctctaggcccctttttctctctctgcctccatmtctccttccctgtctctctccattttctcagtctctgcctctctgtctccgcatatccaggtcttgccctctttctgatcccctagctctgcttctctgaacctgtgtacccacctcagactccttcagcccccacttttcccagaaccactcctttccccacccctccttcccaggtactggagtctgagggtctggcggacacctccatggcctggaggcacatgggtggacaggagctgtccatgtgcaaggattctggggagcagcgggcaatgctggagcaacttcaggtctgggttctggctgtgcctgactctcccctctctgaacctcagtttcctgctggggaactggagagctgggggcatctgtccccaca

SEQ ID NO: 535880 - DNA, 537 bp, Homo sapiens
tcctcttccaagccccctccaggccagacactccccctgcatgcaggcccctcatcttcaggagcctcgcctttctgtctctttttgtccttttctctttctctttctttcagcctctctccctctaggcccctttttctctctctgcctccatctctccttccctgtctctctccattttctcagtctctgcctctctgtctccgcatatccaggtctygccctctttctgatcccctagctctgcttctctgaacctgtgtacccacctcagactccttcagcccccacttttcccagaaccactcctttccccacccctccttcccaggtactggagtctgagggtctggcggacacctccatggcctggaggcacatgggtggacaggagctgtccatgtgcaaggattctggggagcagcgggcaatgctggagcaacttcaggtctgggttctggctgtgcctgactctcccctctctgaacctcagtttcctgctggggaactggagagctgggggcatctgtccccaca

SEQ ID NO: 535881 - DNA, 604 bp, Homo sapiens
tgggctgccttccttcagtaactctttcctcaccccaacttttccaccttcttctcctatctgctctttccctttcctttctccagcctgtctctccatttcttcccctccctttccgccgtttctgtgcctccccacccccactctctcacacacacttccctgtttccccttttctctctcttagacactgccgctgtcttccacctctgtctctcctttctgcatttcttaccccgtgtctcggtcccagctccctcggggtcgagtccctctgcgtgtcctcccctacctcggcctccacctgccccttgcacgggcggcgccgcctgccatgcgcagcacgagcctcgctaatgcgtttcgcatggcgcgtcagtcaaacgcccttctaatgtccttaaagcacgcagaaaattgcatccttatgaaaaaggagaaaaaaagcaaattgcctggtggargcggagctgccgcgggggctggggcggcagcgcgtgcgggcggagttgcgttcggcagggcggacttggggcggctgtcaggggctctcccgggccaaggcgcaagagcaagacgctgcctcctcccagcgcttccaagt

SEQ ID NO: 535882 - DNA, 634 bp, Homo sapiens
ttatagtttaacatttaaggagaacaggtaatgtagtggaggctgcaagaagagcagaattcagatataatctctagccattgagattgttaccagagtagacagacagacaagacccacagaaggcagggagtggaggtggaggaagcatcaaggaaggtggttccttatgcgactgtagctgagggagtttgaggcatctgtcagcagctgttttcagaggcttcagccagtaaaagaaaggtttctctgagacttttattccaagagaaagytggtcttaaaaaaaatctagctccttttttatatgtgtgcaagcatagtcacccatacctcttttggctattcttttaggaataggactagatttatatatattttttgtttcctctagtggacagagaagaaatccctgggtaacggtagaagtctgtgtttttttgcagctcattctctgcaatgtggcaaaagtccattctcactctaaggtgtcagaaagagagtaacagtgatttgggtctttatgacaaatttatcctttctcacttctcagagacagtctgatacatcttttaacagggttgggaagatgcagcatgggtccagcaacgttccatgctatccttctctttat

SEQ ID NO: 535883 - DNA, 634 bp, Homo sapiens
ttatagtttaacatttaaggagaacaggtaatgtagtggaggctgcaagaagagcagaattcagatataatctctagccattgagattgttaccagagtagacagacagacaagacccacagaaggcagggagtggaggtggaggaagcatcaaggaaggtggttccttatgcgactgtagctgagggagtttgaggcatctgtcagcagctgttttcagaggcttcagccagtaaaagaaaggtttctctgagacttttattccaagagaaagttrgtcttaaaaaaaatctagctccttttttatatgtgtgcaagcatagtcacccatacctcttttggctattcttttaggaataggactagatttatatatattttttgtttcctctagtggacagagaagaaatccctgggtaacggtagaagtctgtgtttttttgcagctcattctctgcaatgtggcaaaagtccattctcactctaaggtgtcagaaagagagtaacagtgatttgggtctttatgacaaatttatcctttctcacttctcagagacagtctgatacatcttttaacagggttgggaagatgcagcatgggtccagcaacgttccatgctatccttctctttat

SEQ ID NO: 535884 - DNA, 631 bp, Homo sapiens
tagtaattctttcttatgtttagtaagtgtgccgtgtcatttgattatcttttcatttgtgcatgtatttccatatatctccaaaaggttttaagtcagcatataatgctgaaacataatataaaatatagctaaacataaaaaagacaaaatcaatgaaaaagaacagagatatagatcatgctgagtctctaacagaagataattatcacagttkagaaatcagtttagccaggggttctctggcaggtaaggcaaaaagggaaacacattgtgcttctcactggcttatgtataagaggagacacattataattttaagcattaagttcaaagagaaatgagttcatgaggtctttatggaaagaatatcaagtatcataccagacagtgtcttcagcaaaatgtgcagacattgtctttaagttgttaattctcatactgcttttctaaaaaagctggaagcattatgtgtatgtttttattttaaaggcagtataactttattacagttggtttggaaagcagagggagtaaaacatccacaaatctgccaatctaacacaattattttcatgttggcaaatttaatcatctttgcccatatacaattatggtttccacaaggaac

SEQ ID NO: 535885 - DNA, 621 bp, Homo sapiens
agggttgcacagctctgtggatattctaaaaccygctgaattgtttactttaaataggcgaattgtatggtatatgtattatgtctcaataaagctgctattaaaacattttagaaagactttaatgctgcctggcaaacctgctccattgtcccaggcggctgtccccagccgtttcggcccttttccagcctccttgtattggagcaccccttcctgcctccaactcctgccacttcaggaagtaaaaggcatcggttgcggataatatgagattcctgccatcaaacctccaaatctcgcaagcccatgctgggttcatgctctcctttcacaattctgggaaatggctttaaatcctgactctgcctattattggttgtgtgactttaggccagttacttataagctgagccccagtttcttttattttttaaatagtagcgcttactatatacctggtaatttttgtaagtgctttaagaatattaactcatttacacattttaacacatttaatcatccagttaatcccatgaggtatagggactgctgtcctctccattttgtagatgaggaaagtgaggcacagagaggttaagtaatttgcacaaggtcaca

SEQ ID NO: 535886 - DNA, 488 bp, Homo sapiens
ttttccaacgacttaacggacctgtaccccagagcctaacctggtcaacatcttgatttcggccttgtgagactcaacacagaacacagttgagctcattgacttccagccttagaactgtgaggtaataaataagtgttgttttaggctgctaaattggtagtaatttttatgcaatagaaaactagtacagatgctccttgacttatggggttatgtcccaataaacctatggtaagttgaaaatatcacaagtaaygacttacgattcagagttacattcatccggatgtaaccctgcactgaatgtgtattgctttcacactataataaaattgaaaaatcttaaattgagccattgtaagccaggaagagcctgtataccattccataatgttgaaagaactacggatgtttaatctggataaaaatgactgagggggaacatttggatagtttttcatgtgaaagaagtagtcaatattctg

SEQ ID NO: 535887 - DNA, 488 bp, Homo sapiens
ttttccaacgacttaacggacctgtaccccagagcctaacctggtcaacatcttgatttcggccttgtgagactcaacacagaacacagttgagctcattgacttccagccttagaactgtgaggtaataaataagtgttgttttaggctgctaaattggtagtaatttttatgcaatagaaaactagtacagatgctccttgacttatggggttatgtcccaataaacctatggtaagttgaaaatatcacaagtaatgacttacgattcagagttacattcatccggatgtaaccctgcactgaatgtgtattgctttcacactrtaataaaattgaaaaatcttaaattgagccattgtaagccaggaagagcctgtataccattccataatgttgaaagaactacggatgtttaatctggataaaaatgactgagggggaacatttggatagtttttcatgtgaaagaagtagtcaatattctg

SEQ ID NO: 535888 - DNA, 488 bp, Homo sapiens
ttttccaacgacttaacggacctgtaccccagagcctaacctggtcaacatcttgatttcggccttgtgagactcaacacagaacacagttgagctcattgacttccagccttagaactgtgaggtaataaataagtgttgttttaggctgctaaattggtagtaatttttatgcaatagaaaactagtacagatgctccttgacttatggggttatgtcccaataaacctatggtaagttgaaaatatcacaagtaatgacttacgattcagagttacattcatccggatgtaaccctgcactgaatgtgtattgctttcacactataataaaattgaaaaatcttaaattgagccattgtaagccaggaagagcctgtataccattccataatgttgaaagaactasggatgtttaatctggataaaaatgactgagggggaacatttggatagtttttcatgtgaaagaagtagtcaatattctg

SEQ ID NO: 535889 - DNA, 559 bp, Homo sapiens
acagaactcccagagctccttgcagctgtcactagtggcactaaatgcacacacttgtcatgtgttatagtcctctggaggtcttatttctgttgccatatattwgatgagttgaagagaggcttaattccaactaggtatttagtaaacatctactgaatataaatacaagtataaatctaaatataaatatcttgctttttgttcacttttaagaagacaaccaggctgggtgcagtggctcacgcctgtaattctagcactttgagaggcaaaggcaggtggatcacctgagatcaggagtttgagaccagcctggccaacatggtgaaaccctgtctctactaaaaatacaaaaattagctgggcatggtggcggccacctgtaatcccagctacttgggaggctgagacaggaggatcacttgaacccgggaggcagaggttgcagtgagccaagatcgcaccactgcactcagcctgggcgacaagagcaaagctccatctcaatcataataataatttaaaaaataagacaaccattaaataaaaggtatac

SEQ ID NO: 535890 - DNA, 502 bp, Homo sapiens
tcaaataagtaaaattttaatccatgtgttttgaaaacccatggattaaacacacagattaggaaggagtacctatggaatgtgaagacctggaaacggattgcctaagagttatccaagcaaaaaagaaaaaaaaaaaaaaaagaattatccaagcatatgcactccttagagattcctcgtgccccaaagtgaagacttccatrctataccatgccaaagagctcctggataagttttcctgactcataacacaactgttcttcctattcttctgtttcaaagaggaaacagagcattttagtatatttgaaagaatacacatcactaacgcctggtgcttcagtgtttccaaatcaccatgctttccaacatgggctaaaatacagtagcccccattacgtgtgggggatatgttctaagacccccagaggatgcctgaaaccacagatagtatcaaaccctatacagcccatcttttcctatatgtatgtgcatagat

SEQ ID NO: 535891 - DNA, 539 bp, Homo sapiens
agtatcttggcctctgtcagcaaagtcccccatttctgctctagctaagcagaccaatacacagctcccagcaccactggcctttctacctggaaaggctctcgtctttctgtctgcctccttgtagaatgctggtctaaatgacactcaggtttctatcaatttctcatttagactcagttagtgtgttttatccttggctcaagctaattttttcccccattttattaagaaaaatttctgccaggcgtgatagttgatacctataatcccaatgctttgggaggcagaggtgggaggattgcttgagggcaggatttcaagaccagcctgggcaatatagcaagaccccatttcyataaaaaatttaaaaaattagccaagagtggtggcaggctcctgtagtcccagctacttgggaggctgaagtaggaggagggcttgagcccaggagttcaacggtaccattgcactccagcctgggctacagagtgtgaccctgtttcaaaaacaaaaagaaaaagaaaaaatttaaaaat

SEQ ID NO: 535892 - DNA, 548 bp, Homo sapiens
cttgcctactcagtgctaggtcctgtgctgagtacgagctcagaacctaaaagtaaattaggcttggtcctttcctcaagaagctagtgatagagacaggtagagaaataatcataagaaaatatatgtaatatatgtccacattctatattctggaataggatgctatattttggtacaaaggtcactgaccaacttgagggtactggaaagacatctcaaaggagataatggcaaagctgagctaagccttgaaagacaagtaaataaacgttaagcctggtggagaatgttcagaagggtagttgtaagacaaaggcacacaagagaagagaaccataagtaactgtcccttcaagataaggagagagaatgctgaggctggaggagggaagtagcccccatcaacggcagaggaacttcagcctggcascctccccaccccgcacccttgtaactctgccctctagttccacccaggcaggtggagcaatgtgtgaggaagaatgggcaggcaagtgcattctgactaggtgtaaacaaagcag

SEQ ID NO: 535893 - DNA, 652 bp, Homo sapiens
gtagaatggcaacattataatgaatgatatctatacaagtctatttttgtacttcatctctccttagcaatctcactccagatcctcacaaatactgtttgcaatattacctcctgatctatttcatggacataatgaacagagaaataaaagtttttaattcaaaagataaatagtgattgaattcatcacttagcctcctgcccttgtaaatccatggtgcctcctgacttcagtttctaaattttattgcaaaaacaatgagccattaaacccttttacctgctgtttacatttttttatgtatttgtgaaaataaacatactgagtgaagtaagactaagcaaaatgttgaagtacagatgaattttttaaaaagacaggttatctatgtatatgtttccctccatcttccccccamccccacctctagtcagtctcgctctgttgcccaggctggagtgcagtagtgccatgttggctcattgcaacttcgtcctccagggttcaagggagtctcctgcctcagcctccagagtagctggggctaaaggcatgcacctccacacctggcttgtttttttccctttttgctttttgtcccatgcacttctttttcaagactatatagatagcgacagtaaaaagtaga

SEQ ID NO: 535894 - DNA, 557 bp, Homo sapiens
caatagcttaattttccatatgttccttaagctaaaatgtattcaagttattaaagaaccatatattcttgcttggatggcttgaaaggagatgttttgctgagcccatgtcacataagattccagaagagataataggtagatttaaatatttaaaaaatgcaagtaagaacacagaaacaaagcaatatcaagcaaaaaccagtcatcgccctatggaaaacacaacttagacaaagacaggcatgcctacaagctacagtaaaatgcttgggaattccaccccaggagacctcagtactgctccatcattttactaagtcactgcattggacttaaacaaacwctaaaaataggttctgtacctttgagcgtggacggaggagctcatgatgtcagcccacacttctttaagggtctctaactgagtctgaatcaccctctgaccttctttgttgctacttctcaaggcctgttcccccttgccaatggccatattcaacttaacttccccttcacctttcatcaggagaatatcctgggaaggaagaaagaat

SEQ ID NO: 535895 - DNA, 465 bp, Homo sapiens
  misc_feature (1)...(465): n = A,T,C or G
agggccacctggcagctccggagtttctctttggtcattctaagtaggttctggtggcttgtgaggagctgggaacacaggcggccctcctgcccagcaccgtggccttcttcactcagaagctgccctctctgggaaagcttatcaagagactctctgaaaaaaaggaaaaaaaaaaaaaaaaanaaggaaaaaaaattacttctgacattctgaagtgcaggggagtgacaaatgattgttgatattggagcagtaaccagacacaggctcatagctgacatgccttttaaataaagatgctgggaactgacctggttatttcattctcttatgatctctcctaatgttgtcagtacctatcrggggataacattcagtctgtgctgtgcctgcatccaaatagcagtggtggagcctactgtattacttactgtatttccagaaatttaattcagaaaatgg

SEQ ID NO: 535896 - DNA, 256 bp, Homo sapiens
gaaaaccgtcggtgccggcgggcccccgaagctcccgatcccggcgacgacgcccgggcatcggaggaggaacccgcggcccggggcgctgtccagggggtgcctcggmgcccggaagctggctccttccggtgccaggccacgcgcaccgctctccgcacgccttccagagagggtcccgggattatgcgcgcggctccggggaagctttcagggggttcagtggtctcgcccagcagcggggcctggtggcggg

SEQ ID NO: 535897 - DNA, 472 bp, Homo sapiens
tatccttttgttatgtcctcttttagctttgctagtgatgtgttttgcaattttaatttttgtatgttgtcaatcttattctttagttatttaatgggayttttatttatttttatttattattattatttcttgagatggagtttccctcttgttacccaggatggagtgcaatggtgcaatctcagctcactgcagcctccgcctcctgggttaaagcaattctcctgcctcagcctcccaagtagctggaattacaagcactcgccaccatgcctggctaatattttgtagttttagtagtgacggggtttcaccatgttggccaggctggcctcaggtgatccacccaccttggcctcctaaagcgctgggattataggcttgagccaccacgcccagcctaatgtgacttttaaattatgggtaagaacttaccaagccaagagcagggcagtccaggcacatggac

SEQ ID NO: 535898 - DNA, 472 bp, Homo sapiens
tatccttttgttatgtcctcttttagctttgctagtgatgtgttttgcaattttaatttttgtatgttgtcaatcttattctttagttatttaatgggatttttatttatttttatttattattattatttcttgagatggagtttccctcttgttacccaggatggagtgcaatggtgcaatctcagctcactgcagcctccgcctcctgggttaaagcaattctcctgcctcagcctcccaagtagctggaattacaagcactcgccaccatgcctggctaayattttgtagttttagtagtgacggggtttcaccatgttggccaggctggcctcaggtgatccacccaccttggcctcctaaagcgctgggattataggcttgagccaccacgcccagcctaatgtgacttttaaattatgggtaagaacttaccaagccaagagcagggcagtccaggcacatggac

SEQ ID NO: 535899 - DNA, 483 bp, Homo sapiens
tagcacttcttaaatttcagtgtgaacaaaaattaccttgggatctagtttaaatgtagatttgtattcagtagatctgttatgggccctgaggtttggcatctctaacaaaatgatgtcagtgctggtggtctgtaggttgcaatttgagtagcagggctctagaatacacatgtttataaatgacccaatcaccttccagatcaccaacagaaagatatgccagcttttcatacaatgacaagagaatagtaatgcatgaaaacaatcgatgactccactagagaagacactgtatgaggggaggttttttggtctgtgttttctctgctttagttctggtgctcataacagtgtccagcacatgatagacrctcaatattacttactgagtgaaaggtcaactagttgaaatgttttattatatggaggatgaaaaatagttcctacccaatatttttatacttttatgcttcagaatta

SEQ ID NO: 535900 - DNA, 617 bp, Homo sapiens
ttgcttttgtgtttcatctgaaaccaatcagtaagcgaaaaagcagaaagctcttttggcatctattccaccattgacactgggagaaggaaagaggatttatacatagagacccccattaacactaatgaaaagtaggcgggtaaatcccatgtgtacgaggagcaaacactgtcctttgtgtgggggtaattaagagctaaagagagcttacagttgctcaccactgcacacatgctcctggtgaaagctccttcacagcagtgttgcagtggctttctttagtttcaatggttgcagcctaacagttgttaaccatctctcgccctcgttcccccataaaggagtgaaagggaacgatgtattggaaatgacagtatttgacactwttggcaaaggggctttcaaggaaaacgtacaagcaaagaaaggagacattcaaaacgaacctaaatttaagcagaagagaataataagtggctcaagggaaataaccctatactcataacatccttgccagcacccaatcctttggaactgtggcaggaagaggagccatgtgtaaaccaagaatatggaatactagcaagcaccacgtctaaggtccaaagccataa

SEQ ID NO: 535901 - DNA, 502 bp, Homo sapiens
gaaaaagttttaatcaatttgctatttaaatacwtaaatctaaaaataaaatctaaatattaggagctttaaggttttattgaacatggggtgtggttaatacaaatataactttaagcagataaatgtactagagaccttttaggtctgattttccaaatttgtttctgttccatattatcttaatttttaaaaaattataaactgggttctgttagagaagtaatatgagaaattctaaattttatttacccaattgtgtctatgttcataatgagtatgtttgcatatttccttcacaaatgtacttttacaaattcatcctttccccaaagtcagtgcctgttaatcacgttcctgattaacaggaaagtaggggttaaaatctggagggaaaaacagtgaaagaatagacctaatatttcattagcatagcctaagcttcatcaagccttcattacaagttgatttacttttcccattttacttgtgagaatgctac

SEQ ID NO: 535902 - DNA, 543 bp, Homo sapiens
ataaacaccgactacagaatgacagccaaaaagatgtctttccttaatgccttgcttagctaaaatgcctcccaaccatcctactgacctaatcttatgwcctgacttttcccctctgcacaagaagaggtgggtaaaaataattcctgtcttgtgctcaaaataatgaccctaatattcaggggttatcttgaccataccccctgtctaagataaattcacccataacttatcttgggcttcatctcaggagaagaaagcatttagagctatgtaataatgggtgttgcttcctggaaaagcacagaaaccattcaagcaaagggatgttgtacaggaactcagacccacctgaggactttaaatcagctgacaaccaactttccaccaagtctgaggtttttagtgtcacaaagcaaatttaagtactactggatattttttaagaggaactgtctatcatgtttttcaaggatgtaagtttcccacgcagggataccaggttttgctatcttacttagtttattgcacaatggacattta

SEQ ID NO: 535903 - DNA, 543 bp, Homo sapiens
ataaacaccgactacagaatgacagccaaaaagatgtctttccttaatgccttgcttagctaaaatgcctcccaaccatcctactgacctaatcttatgtcctgacttttcccctctgcacaagaagaggtgggtaaaaataattcctgtcttgtgctcaaaataatgaccctaatattcaggggttatcttgaccataccccctgtctaagataaattcacccataacttatcttgggcttcatctcaggagaagaaagcatttagagctatgtaataatgggtsttgcttcctggaaaagcacagaaaccattcaagcaaagggatgttgtacaggaactcagacccacctgaggactttaaatcagctgacaaccaactttccaccaagtctgaggtttttagtgtcacaaagcaaatttaagtactactggatattttttaagaggaactgtctatcatgtttttcaaggatgtaagtttcccacgcagggataccaggttttgctatcttacttagtttattgcacaatggacattta

SEQ ID NO: 535904 - DNA, 530 bp, Homo sapiens
tttatttcctactagctgacctgcagttcacacagaaaataatgaatatcttgaggggtctaaactatactgctttttatagcttcttctgattctttgaaaagtagacttgcagaggtctcacctgctcaggctcctgttggcagaatatcaaaccgtggtctcatagccagattttccctgaataatgaatgagccagtgtcgagaaagtcagaaatagaaatcaataaagctaaatttcaccaagaagaggcagctttgcagtggaatgatagagaacattgaggccaatggatgccaaactcaataatgcacatccttaaactctcacggattagggaragcagaaaagaaaaccagtgtcttgggaagagtcagaagggatcagagcttgagaatacaccttgctcagtgggaagaggaaggatgggccaagcatcagaggctcagcttcttacggccgggacagcaatagcgtgatgcacaaacctcctgggagccagcgttaaacatcttcataaatcatatg

SEQ ID NO: 535905 - DNA, 635 bp, Homo sapiens
gctgtaggctcataaatagcagtgcctcaaatgacgcatcaacacagaaaaaaggactgagtgctaaagatttgttttccagaacttctcaagtagcttttccatgaagcctcttccgttcttggtcagtacttgaagagaacaaaatatttartttttgagatgccactattaattcttttcatacaatttctaacgttgtcaaaacattttgagctttattggtctcctgaggtggtggtgtgtccctgcatataggagaaaacagtgattctggaagtacagattattcataaatcaagaggtgctcactttggacaagtctgccaacaggtaccagggtctgtatgcctggcttaaatttgatgggctaaaatgtcttctgttcatgttattggctaaaacgactgatgtttcaataaccactccatcatgtgagcctcaaatgacagagccatattttcctggaaagactatgcaacaatctttaaataattatatatacatatatatataattataggtgaagactataagggctaacaatttactcagattgactagacatttctagggggacagtcaaaattagaaggccaatctctaatatttccctaatggaaaatattagaaaa

SEQ ID NO: 535906 - DNA, 594 bp, Homo sapiens
ggattacaggcacgtgcaccacacccagctaatttttttgtatttttagttgaaacggggtttcaccatgttggccaggctggtctcaaactcctggcctcaagtgatcctcccgcctcgtcctcccaaagtgctgggattacagtcgtgagccaccatgcccggccgctcttttggtattatgtggagacaacagacaagtagtgataacctttaggaatctgactttgctggactcatctggattctttttaattgaacacgttctagagattttcttccatgcattctatgctgctctttttaaagccatctgtcctgagatattacttttttagtttagggtgactactgattttcagagtaacttagcaatttcagtttataaacttgtctaagtcactgttttaccaactaatttctatcaactgacttcagaatatttctgcaatataaggaaaaccctttaatatgaaacatgttttggatgtaggaaatctctgctcataggagggaaataattgaaaatacctaaaccatrcatactgcttgttttgtgtgtttcttttctgtattttaaaaaatttataaggt

SEQ ID NO: 535907 - DNA, 624 bp, Homo sapiens
tccctatccctgtcagggtcagcacttgtgcctgccacagggggcccaagtgcaggctggaccagtccagcttttcccagcttcamcccccactccaagacaaagcatggagaaagaccactgagcatttcatggcccatccatcaagaaagaccactgagcatttcacagcccattccatcaccagggacacctgaacacttctacaagttaacagaagtcagacatatatcctactgcttccatcacagctggctcttacctgcaagtgtcatctactgatctgtaggtccacctgcacagtctgttaaaacatctgctggcacagtatgcagtgcttaggaaaaagataagcttcttgtggcctctgctaccaccaccacccaggccaccctagctagtcaggaggtcatgagctgtcttacttccttggtacaccatactataaccagcacttgagaaagccaccacactaaaggtatatagaaccaagaaatcatacaggatttttgtcactgaatgcaccaagaagcaaagccaaatggccctactcaaaatacatcacagtcccatcctcaagaaaaaaaggtccttccccaatgaaagtaaatttaaaataagaag

SEQ ID NO: 535908 - DNA, 423 bp, Homo sapiens
gctgccctctatgaaatgcacaggtgcacatccaaaatttgcagccagggactggagattttcagggaatarggaccttatgggccacatagatactgtccttcctccctccttcccttttttttctttcccatcagtgtgaaccaggcagcatgctaggagctgaaaatccaacagtgatcaaccggtcagggcccctgtgtgcacaggcatacaatctaatatggggagacagacataagatcacttcaaaacatgaaagacagaaataaaagtacctgcaacaggctaccttaagtaattattataaacactgatactgtttgaatagctcctgggtgccaggtcctgttgagctttgtgttacctacctagcagccatgtgaggtaggtgccatcatcactcccctttttaaagatgag

SEQ ID NO: 535909 - DNA, 531 bp, Homo sapiens
tcccagagttgacggttgtgtcttctagaatgaaaggctggtggacatagaggggcagggttcagaaccaacaccaagaagaaccatcatctgctcagagctgtccagcattgggatttgccgcagcagggagcctcctctctggaacgctgaagcagaggctgaataacaggtgtgactcttgcaggggaggccrcattgttgaacagcccttcctactcttgcgatgctgccctgctgtgcaatccagcccttttggaatgatggccattcctcccactgtcatctccttcccctggaatccatgcccagcctcgcctgcagctcttgctgctgtctctcttctggttttctttctgttaaagatgaagagcaaaccatcagaactaggaaaccacctcctaggctggtctgacacaactggacatttgtctttctagtttatcatttggatatcgaaagatgaggttgttagagaacagtgcatatttgaaataaaggtcattttggacttttgaacgcagaggaagc

SEQ ID NO: 535910 - DNA, 450 bp, Homo sapiens
gggaaactgattgctgtctgagccttttatcagscagcaggtaggaaggacatctgtgaaagaaagaggaggtgtcaaaggatggtgtccccagggagccaacatgactagaggcgaatgccacatgttttaaatccggaggcccaggctcacatccctctgttttcccgcaaagctctagccatgccttccagtcctaggcctactgtccgccacctccttgctgccgctctgggcctgccttcctgagcccttggatgctcccagtttatttgcaaggatgttctttccttcttccagggcttcaggatgtgctttgctctgtccttcaggcataactacggtagactgtcttggagagtggctatcctccctgatccatatttctaagaactatgcatcagccacttcccttgctgccatattattaagtgcacagacactgccctt

SEQ ID NO: 535911 - DNA, 622 bp, Homo sapiens
ctgggcttgttttcaaatttattttagaaactcttaaccagatgttcactgtaaattaactgaaggagataaaatagttgacgcactgaaaaattataagtctccaagtragaaatcttcactacaatcagaaatggggggaaatgcagtcagagagggagagacaaaagctccagtggcaactttaagtccttcctacagtgcactgagaaaagaaatgttttcaccaaatatctaacgtggagataattcactctgtaaagatagtgaagaagcctactaaaaaagattaaaagattaacacgtaaagagctgtacatttccaaaacatttttgaggaagaacataaatatttgggaaagtaacttcattcagaaaaataactcaaaatggatcaccagcctaaatgtaaaatgcaaaactataaattcctagaagagaatcgccaaggagaaaatctagatgaccttggatatgaaaatgaatatcacatcaagatccagtccatgaaagaaagaattgataaactggacttcattaaaattttttttaaaaaatctctgttctgcaaaagacaacatcagtgtagtggaaagaaaagccacagattgggagaagatac

SEQ ID NO: 535912 - DNA, 622 bp, Homo sapiens
ctgggcttgttttcaaatttattttagaaactcttaaccagatgttcactgtaaattaactgaaggagataaaatagttgacgcactgaaaaattataagtctccaagtaagaaatcttcactacaatcagaaatggggggaaatgcagtcagagagggagagacaaaagctccagtggcaactttaagtccttcctacagtgcactgagaaaagaaatgttttcaccaaatatctaacgtggagataattcactctgtaaagatagtgaagaagcctactaaaaaagattaaaagattaacaygtaaagagctgtacatttccaaaacatttttgaggaagaacataaatatttgggaaagtaacttcattcagaaaaataactcaaaatggatcaccagcctaaatgtaaaatgcaaaactataaattcctagaagagaatcgccaaggagaaaatctagatgaccttggatatgaaaatgaatatcacatcaagatccagtccatgaaagaaagaattgataaactggacttcattaaaattttttttaaaaaatctctgttctgcaaaagacaacatcagtgtagtggaaagaaaagccacagattgggagaagatac

SEQ ID NO: 535913 - DNA, 622 bp, Homo sapiens
ctgggcttgttttcaaatttattttagaaactcttaaccagatgttcactgtaaattaactgaaggagataaaatagttgacgcactgaaaaattataagtctccaagtaagaaatcttcactacaatcagaaatggggggaaatgcagtcagagagggagagacaaaagctccagtggcaactttaagtccttcctacagtgcactgagaaaagaaatgttttcaccaaatatctaacgtggagataattcactctgtaaagatagtgaagaagcctactaaaaaagattaaaagattaacacgtaaagagctgtacatttccaaaacatttttgaggaagaacataaatatttgggaaagtaacttcattcagaaaaataactcaaaatggatcaccagcctaaatgtaaaatgcaaaactataaattcctagaagagaatcgccaaggagaaaatctagatgaccttggatatgaaaatgaatatcacatcaagatccagtccatgaaagaaagaattgataaactggacttcattaaaattttttttwaaaaatctctgttctgcaaaagacaacatcagtgtagtggaaagaaaagccacagattgggagaagatac

SEQ ID NO: 535914 - DNA, 610 bp, Homo sapiens
ggatagcagagccaagatcctggcttaggttttcagacatcatggtcaaggtctttcatgtgcctagggcacctcctccctgtgtcacttgcagtggtcttggaaggcttaaggggctggaatcaggtgagaactaccagcctgcattttctttcctgtatggccctgagtaacagacagagaaggtctgtctttagtagatttgcatagggcagagcagaagaagtttagtttctgctctcagaagtgttctttcatagccagaatactctaccctgcctgtctggggtgaaagaactccgcagaatgtataccaacgcttgcctcaatgccaggctcctgttccaagtgtcttgaccctgtcacttggctaaattctcatgattcccaagggccaagacttttttggccagggttcattcagttgaaagtgatcaacmcaaactcaaaccagctatgccaaagaggaggtttctggagggattgggaagccagggtggagctggccaggtccaggaggacatgctgtgtcttgaggacttgatgcctccatctgcgctccttgtgcctgggaacacacactcagggaggtgctctccacacagtggga

SEQ ID NO: 535915 - DNA, 608 bp, Homo sapiens
acacatctcatcttcagggtttgcacaggaaaattccatctgtgaccctcaccccatcacctgcttcagtcccataaataaaagcaggtaaatcaaggatggttcagagagcggatttcctgggacttgttaccttacttagtaaggagtcctgtccyctcacctcagtcttgcagagaaacacatttagaaagcataggccatctgcaatgagcagaaggaaaccttcactccataaggctgaagcaaagcagggaaagagcttctggaggacctaaactacatctggggagtttgaggggcacagagactagggactggcacctgatcctcacctggcagcagaaggttggggccggctggagctgcctgtcagagctacctgggagccccgagtctagtggggctttccctgggataagcagatgtcacaataagagccagattagagttatcttaagaggaacctgccctaaaggactgcttgctgggataaagtgaccccagcagagaagctgggtagggggcatgatcctggagaaggagcttaggagaagtcattggaggtcatccagaagtcctcatgttagagaacactgagggaaaca

SEQ ID NO: 535916 - DNA, 608 bp, Homo sapiens
acacatctcatcttcagggtttgcacaggaaaattccatctgtgaccctcaccccatcacctgcttcagtcccataaataaaagcaggtaaatcaaggatggttcagagagcggatttcctgggacttgttaccttacttagtaaggagtcctgtcccctcacctcagtcttgcagagaaacacatttagaaagcataggccatctgcaatgagcagaaggaaaccttcactccataaggctgaagcaaagcagggaaagagcttctggaggacctaaactacatctggggagtttgaggggcacagagactagggactggcacctgatcctcacctggcagcagaaggttggggccggctggagctgcctgtcagagctacctgggagccccgagtctagtggggctttccctgggataagcmgatgtcacaataagagccagattagagttatcttaagaggaacctgccctaaaggactgcttgctgggataaagtgaccccagcagagaagctgggtagggggcatgatcctggagaaggagcttaggagaagtcattggaggtcatccagaagtcctcatgttagagaacactgagggaaaca

SEQ ID NO: 535917 - DNA, 606 bp, Homo sapiens
ccttgaagaagaagatgacctctgggttagaattcgacatcgacatattgcggttgtgttagagtatgtgaactcattttaatttttgttccataatttttagacactatgtgatagtacattttgtaaccttaaaatagttctgtaaagaattacatcttagaaatttaaagaattctctcacaatttgacagggaaattcccaagcttatgaaagaaatttcatcaacaaagaaagcaacagaaggaaaggtaagagtcttacttaactttcaaagtaatagtgaaggtgaattttaaagtttgtttaaaatctttattttatttctgtaactttttatttttggaaagttctaacayggaggtagagaatgaactcctacgtacccattgcctagtttcaatagttaacaacatttttgtctgtcctgcttcattaaaatttttttattttattttattttttgagacatagtctcactctgccatgcaggctggagtgcagttgcgccatctcagctcactgcagtctccgcctcccaggctcaagtgattgttttgcctcagcgggattactggtgtgcaccaccacacctgactaatttt

SEQ ID NO: 535918 - DNA, 581 bp, Homo sapiens
tcctgacagatgaattcctattagaggatctgcctttttttggggaggggaaggagtttcactcttgtggcccagtctggagtgcaatggcttgatctcggctcactgcaacctctgcctcctgggttcaagtgattctcctgcctcaccctctccagtagctgggattacagatgcccgccaccacacccagctaatttttgttttttgttkggttggttggttggtttttgttttttagtagagacagggtttcaccatgttggccagggtggtctcgaactcctgacctcagggtgatccacctgcctccgcctcccaaagtgctgggattacaggctgaaggatctgtctttaggcagataaaaggaagttcggagaaagctccttcttgcaattgccttccccaagcaccctcagtttgaagtaaccagcctgccaaagcagcgtattttggagcagcattttctgaactccttcataagtaaatactcaaaggtcatgtttaaaaagccagtcttccgagaactaaataaatatcacagatttgatgtctgagtcaatgctttctaaaggaaagg

SEQ ID NO: 535919 - DNA, 581 bp, Homo sapiens
tcctgacagatgaattcctattagaggatctgcctttttttggggaggggaaggagtttcactcttgtggcccagtctggagtgcaatggcttgatctcggctcactgcaacctctgcctcctgggttcaagtgattctcctgcctcaccctctccagtagctgggattacagatgcccgccaccacacccagctaatttttgttttttgttgggttggttggttggtttttgttttttagtagagacagggtttcaccatgttggccagggtggtctcgaactcctgacctcagggtgatccacctgcctccrcctcccaaagtgctgggattacaggctgaaggatctgtctttaggcagataaaaggaagttcggagaaagctccttcttgcaattgccttccccaagcaccctcagtttgaagtaaccagcctgccaaagcagcgtattttggagcagcattttctgaactccttcataagtaaatactcaaaggtcatgtttaaaaagccagtcttccgagaactaaataaatatcacagatttgatgtctgagtcaatgctttctaaaggaaagg

SEQ ID NO: 535920 - DNA, 541 bp, Homo sapiens
ttctttttaagccatagcgatcactgaatttgtaactgccaatcaagctctcagcaatactataacttaagtctctatttgctacaaggaagaccttagtatttgtggtttctgtctatatttactgaaataattcatcaactacacactaaaaatattattgtaaccttgytctggaatcattagattgtttttaccagaaatgctattgcttttgtttgaaattgacatgaaagctttgtggtggactgacacttagatgatccccccatgatcactgcctcctggtgttcaagcctttgtgtaatcctctccctttaagtatgggtgggacctgtgtcttgtttctaacaactagaacatagcaaaggtgacgggatgtcactcccatgactatgttatcacgtttgccaaaggcgaagggatgtttctcctgtgattgtattatgttataaaagactcccattgctacagcagatttgcattagagccttgctctccttgctggctttgaagaagcaagctgccatgagtgctgcag

SEQ ID NO: 535921 - DNA, 615 bp, Homo sapiens
cagtatctctatgcatatcactgtaaaatagacattattcttcacagtcattttacgttgttcaagttcactgcatgcatccaaaatgattcttctcataaaactagaattcggatgctttccctgacaccccaccccagaacatatctgaatacaagwtgtcatgactctactattttatgtttataaaacattttggagaaagttagagattaatctaactgttgaaaccaccagatctggcattgagttcattctgatatattttataacttatttttttaaataaattatccctttggaggtgaactgtccatatgggggttctccttgcatcacttttctgcatttcatttctaatacatgtggttgatgaggcagaaagaagatgagttcaaatctaatgtttaattacagcttagtagcccaggtatgatactgattatgtttttattttatctatgttctttttggtgccaattaacattattatttaaaagctcatgggctttgttttcatattgatccacctgagaagcaaagtttttggttcaaaataaccctagaatatgtagggaacttatttgaatttgcttagtatagtaagactaagaa

SEQ ID NO: 535922 - DNA, 615 bp, Homo sapiens
cagtatctctatgcatatcactgtaaaatagacattattcttcacagtcattttacgttgttcaagttcactgcatgcatccaaaatgattcttctcataaaactagaattcggatgctttccctgacaccccaccccagaacatatctgaatacaagatgtcatgactctactattttatgtttataaaacattttggagaaagttagagattaatctaactgttgaaaccaccagatctggcattgagttcattctgatatattttataacttatttttttaaataaattatccctttggaggtgaaytgtccatatgggggttctccttgcatcacttttctgcatttcatttctaatacatgtggttgatgaggcagaaagaagatgagttcaaatctaatgtttaattacagcttagtagcccaggtatgatactgattatgtttttattttatctatgttctttttggtgccaattaacattattatttaaaagctcatgggctttgttttcatattgatccacctgagaagcaaagtttttggttcaaaataaccctagaatatgtagggaacttatttgaatttgcttagtatagtaagactaagaa

SEQ ID NO: 535923 - DNA, 541 bp, Homo sapiens
ttctttttaagccatagcgatcactgaatttgtaactgccaatcaagctctcagcaatactataacttaagtctctatttgctacaaggaagaccttagtatttgtggtttctgtctatatttactgaaataattcatcaactacacactaaaaatattattgtaaccttgctctggaatcattagattgtttttaccagaaatgctattgcttttgtttgaaattgacatgaaagctttgtggtggactgacacttagatgatccccccatgatcactgcctcctggtgttcaagcctttgtgtaatcctctccctttaagtatgggtgggacctgtgtcttgtttctaacaactagaacatrgcaaaggtgacgggatgtcactcccatgactatgttatcacgtttgccaaaggcgaagggatgtttctcctgtgattgtattatgttataaaagactcccattgctacagcagatttgcattagagccttgctctccttgctggctttgaagaagcaagctgccatgagtgctgcag

SEQ ID NO: 535924 - DNA, 614 bp, Homo sapiens
tgcttatggatgagtctactgttacaaaaccagcaaacaaagggaaaaactggttcagagaagctgcttcaggaatatacagcttgcacaagttctctccacaagccaccagttagttggaaatatgatgggtacccatcctaataacatagcaagttcccctccaatgatgtggctggcaggctcatgccggccggayggcgggcagcctgctatccatactcaaaaaggtgattctctctagtagactttaagaaagggtcagactactgttttctcagattagaatcatgagctgccaactggtagtctaatcaaatccagctcactgacatgatcatttggccaggccaaaccttgaaagctttagacaaggcatctgctctgagtttgccaaagtttccaccactcccaattgtctcacattgagctacacacacttacatggcctgcctggctcctgaaagcatttgggcccaagtcagcagaatggcctgctgacctctcaaatcccttgcagactcatgactctataaagaaagggtggtatgtcttaatacagcatagaaagggggaaaggtataggttggatcttaatgagctgttcttatagg

SEQ ID NO: 535925 - DNA, 589 bp, Homo sapiens
gaggctctgtgggcagattataaaagcatcatctgacacctggggagccccattgccagaggatgcctgtgtatgagaccgccctaaagcctcatcctctcactactgacccagctctggaaagggtcagaaaagagctggtgagagaagaaggaggaatagaagatcaactgcaataaagctaaccacacccacctccttcactgcagacttcaggagggaaaacattttagctttggaggaaattcrgagttttgattattagaatgtattaggttggtgccatcatggcaaaaaccgcaattacttttgcaccaaactatgcaagtctgaatattttaattgctgaaatgagattaaaatccttttaatcacaggattacaagggcatggaaaagccataagatctatttatggtttcatctagagacagttaagaactaatcctcgggatgactttaagggaggagaaaggtgagaaatcatacattttttttttctttttgcccctattaagttcagcttattcgataaaatggttacaccatgaaaaaaaaatccgcctcaccaaattcccacagtgatcatc

SEQ ID NO: 535926 - DNA, 618 bp, Homo sapiens
tatctatatccatccacctaaatcaatctatctatccatatctatctgtcatattggttctatttctctgaagaactctgactaatacacgctttctccagaagtctttcaggacatcctctctgtcccctccccacttcccactgctgattgggttagagtctttttcttgatgccactataattacttacacagttttctacctcacccctcatcacatagtgctaaattgtctgttcttacatctgttttctgcactctactgtgagacctttgaaggcagcaactgtcttagtcacctttgtaacttgctactagtgcaagtgtccagtgaataatctttaaaggaagaataaactgaattgcccaactatttccttgcctgtactaattactgacagttccctttgaggagcgtatttgaactaattatttcattttctgtcctgcttcgttattctctttccaaagagtatatggtaaatttctccatccaaaaatatactgtgcatttctagcatatatctcatgttagttgcaaacttttctagttccsttgtacaatattttgactattctccccaagtaataaaaaatggataaatatggccgggcgc

SEQ ID NO: 535927 - DNA, 499 bp, Homo sapiens
gctgctggtatactggggaaacctaacaaaaatcaagtcagccaatggactttccccctgmttttttctttaaaaaattaggaagtaactaaactcctttcaaatggattatttaaaggagattcagacttcatttattgttcttctggattctcccaggtttcagtttcacaagtataagactcctgtgttcagactctttctgggaaccagagtatgatccctgtagctcctttccttttccaaatcacattctagacaagaaattggctccaaattattctatgcaattctagaatcatttttctatggcttcaaaaaccctattcagtgctcataaacttggtctatggatatttaaactccacaaggaaaattgatgcaaattgactgtgtctgtttatgtaatatgtccatctaggaatgggtttctctgccttctgagtttgtttggggtatgggtatgagatcttggctgaggtgctccgcagcaaacata

SEQ ID NO: 535928 - DNA, 536 bp, Homo sapiens
ttggaagctgactggtttctttttatgtgtgccaagattattggtattatctttacaggaaaaggtggctgtggccattaccaagttattaaaaccacagagatcttgacttgtatggactgagatgaggcttccatcagcatctcgcataaataacataacactgatgcagcagatgaacatggaatcagtgacatccacaaggtaagaccttttcttctttgccttgggctcatctagacccctgtggcaggagattctgaagcgtggaacattactgattctgaaatgatacaatttatgccctgactaagcaaggtccacctttggttataaacattggatccatcataaagttattaagccaagatcatgtttttggaccctgaagaagacaataggcttggaggagaaacagaccttgacttcaagacacaacgcagagggaaataycgctgatacaaagcttgaagatgatcatctatgtacccatcgggacatttttaaagggacaagtggaatgagcgaagactttg

SEQ ID NO: 535929 - DNA, 553 bp, Homo sapiens
aaggcctcaccttccttttgatgcggttacaagatggttcatttgctaccttgcagaaatagctttgaagaaaagtactgtaagctgcgtggttgtaattggatttaagtactgttgaatataatataaaagtgacgcatcctcctaataattaaagttgycatctccaggttttattcaacatttgaatcatgctcaaacttgcagacttgacttaaagcttagatgcttcatctccaaaagaagctggccatggagtacaacaaggaatctagtagcagtctggagttttcctctagaaagtgctgtggtctcaaaatgcagtcctgggtatctggacacaatcccacaaagggtgactgctaaaaagaaaagatttcaggattgaggaacatagctccttcttctaatgcacactatgttgggatggtgggatgaaggccgaaattttccaggttggagtcttttggtggtttgtttgcttatcctgtatctggagttgagaagaaaccaagtttgagatttaggatgtggacaggaggtaggagttttg

SEQ ID NO: 535930 - DNA, 600 bp, Homo sapiens
ggggttttaaagtcacagagacttgaatcaaagttctgtccccctcctcccattccttaactatgtatgtaggacttgaatgagctactggaactctctgaaccctgttgcctcatgtttcaagtggaggcaataatatttaactcatcacttttaactaatgtttattgagcacttactatgtgccagatactgtgctaagagctttccaygcatcattttattttacccttatgatttccttattctataggcatgagaactgacactcacagcattcacacagcatgccaagtggcaaatctggaacacaaacatcgctctttatgactccagagttatcatcctgctgctgtgagtatgaaatggcataagacatgtacagggtagggctcatagtagctacggaaaagaaccaacactaagaacctgtctactgtgtgccataccctagatgtgttttcctttccaaggctgtcattttgcttgtgcatgcaaggcttttgtggatgtgacagttctagtagaggatcacagggacatgtgcacctctgactaagattgtcctcctccaccatgaacacaactttcagaggatgt

SEQ ID NO: 535931 - DNA, 557 bp, Homo sapiens
acaaaccaaccaacagccaggtatgggaaaggaatggggtttggaaatcagaaggaaaggtaaagagaggcagaccagtctttaggaatctgagggatttctgagtaagragcagagcccatctctcctgggtgagcatttatttagcacctacaaggtgccagccactgtgctaggtgcttatgaatatctgttccaacttcaccacagtcctgcaaagcaaacagtataatccccatttacaggtgaggaaagcagggctcagagccacattgccaccaaacagtaatagatcccttttttcagttaaaaaaaaaaaggcagcagatgagacttgggcacgttagtgcatgtgtagtctaccttcataagaaagaaaaataaagttatgaacttagaaaacaggcagcagagaaacgattaagctataaatggaaagaaaaagttgaagagtttctgaggacacagatttggattgaaaagtccccaggaggaatcttggaagttccttgagaaagagtaagtagtcctttatgaactaacaggaacctgaaaag

SEQ ID NO: 535932 - DNA, 645 bp, Homo sapiens
aacagcatattggttaagggcacaaacttcgaagagctagattgttatttaccagttatacgcactgagggaggtgacttaatcattttgaaccttatctgtaaaacaggaataccagtaccctcctcacaggactgctgtgtggataaagtgagataatttatgtattggkttacagtgcttggtggagaacaggtactcaataaatttacttaagtatcactaggtctatgataatcatgaattcttaggaattgctaggtttttttaaactgcaatgaagtacctgcctccttctggttcttttaagccaggatatatgacacactgcttggcctcctgtccagcatctgcaactgtctgggtgtttgccggtctgcctcagttttaacttgctaccctgtgtgtgtttctgaatcgattatctgagtatctgtttacctcttcttgcccaacgattcccagcttccttcagtacactgtagattttctttctggtcctggcttccatcatacctttgctttactacctatggttcctgtgatgacacttgactcccatgcaacacatggattacaaagcctaaatcaaattcactcttgagatcacttaagttctatctcttccatgaagacaccaatctg

SEQ ID NO: 535933 - DNA, 645 bp, Homo sapiens
aacagcatattggttaagggcacaaacttcgaagagctagattgttatttaccagttatacgcactgagggaggtgacttaatcattttgaaccttatctgtaaaacaggaataccagtaccctcctcacaggactgctgtgtggataaagtgagataatttatgtattgggttacagtgcttggtggagaacaggtactcaataaatttacttaagtatcactaggtctatgataatcatgaattcttaggaattgctaggtttttttaaactgcaatgaagtacctgcctccttctggttcttttaagccaggatatatgacacactgcttggcctcytgtccagcatctgcaactgtctgggtgtttgccggtctgcctcagttttaacttgctaccctgtgtgtgtttctgaatcgattatctgagtatctgtttacctcttcttgcccaacgattcccagcttccttcagtacactgtagattttctttctggtcctggcttccatcatacctttgctttactacctatggttcctgtgatgacacttgactcccatgcaacacatggattacaaagcctaaatcaaattcactcttgagatcacttaagttctatctcttccatgaagacaccaatctg

SEQ ID NO: 535934 - DNA, 645 bp, Homo sapiens
aacagcatattggttaagggcacaaacttcgaagagctagattgttatttaccagttatacgcactgagggaggtgacttaatcattttgaaccttatctgtaaaacaggaataccagtaccctcctcacaggactgctgtgtggataaagtgagataatttatgtattgggttacagtgcttggtggagaacaggtactcaataaatttacttaagtatcactaggtctatgataatcatgaattcttaggaattgctaggtttttttaaactgcaatgaagtacctgcctccttctggttcttttaagccaggatatatgacacactgcttggcctcctgtccagcatctgcaactgtctgggtgtttgccggtctgcctcagttttaacttgctaccctgtgtgtgtttctgaatcgattatctgagtatctgtttacctcttcttgcccaacgattcccarcttccttcagtacactgtagattttctttctggtcctggcttccatcatacctttgctttactacctatggttcctgtgatgacacttgactcccatgcaacacatggattacaaagcctaaatcaaattcactcttgagatcacttaagttctatctcttccatgaagacaccaatctg

SEQ ID NO: 535935 - DNA, 566 bp, Homo sapiens
aagagaagttgtcaaaattctaagtatccatccataggagagtgggtaaataaattatttcatgattttactagcaaaaactgtgacattatcaaaaaacaaaaagaggcaggtctccacgtaccaccaaagaaaaatgtccttggtatattacraaggatgaagggtgtgggtctgtgttgtgtactaacccattttgtctacaaagaaacaagcctgtgtgcacctgattcgataattggaaattgtttggaacttaatattttgcccttgttttaaaacagcttttagaaattaactggacaggactgacgaatcttctggatgtccctggattgaagtaagtctcgtgtctggtcccggaggcttagcgttcgagggcgtgttgtgcattttggatgtcttgacaatagtgtgagaatggttaagacctgcgtctgccaggtgaatgggtgccttctccacaggctgtcgtgagaaacaagcagagggtacaggggctttgttctgcctgccgggagctgctgggaggcgatgggccagggcgggagggctctggagtgcca

SEQ ID NO: 535936 - DNA, 566 bp, Homo sapiens
aagagaagttgtcaaaattctaagtatccatccataggagagtgggtaaataaattatttcatgattttactagcaaaaactgtgacattatcaaaaaacaaaaagaggcaggtctccacgtaccaccaaagaaaaatgtccttggtatattacaaaggatgaagggtgtgggtctgtgttgtgtactaacccattttgtctacaaagaaacaagcctgtgtgcacctgattcrataattggaaattgtttggaacttaatattttgcccttgttttaaaacagcttttagaaattaactggacaggactgacgaatcttctggatgtccctggattgaagtaagtctcgtgtctggtcccggaggcttagcgttcgagggcgtgttgtgcattttggatgtcttgacaatagtgtgagaatggttaagacctgcgtctgccaggtgaatgggtgccttctccacaggctgtcgtgagaaacaagcagagggtacaggggctttgttctgcctgccgggagctgctgggaggcgatgggccagggcgggagggctctggagtgcca

SEQ ID NO: 535937 - DNA, 562 bp, Homo sapiens
gggatttgaattcacagtcatctctcaccaaattttttctttctactacaccaatggttcttagactttagtatgcatcggaatcaccaggaagggcttgccgaaacacacgtggcagggcctcactcctgagtttccaattcaggcggtattggttgtggctgaagaaaattgcatttgcaacragttcccaggtaatagtaaaatcactgttttaaaaacaagaatttgagaactcctattctacactatgatgcctctcagatattgctgaaaggagaaaagaagcaggctcgcctaactcacctacctcagagaaagacgcttactcattaaaaacacaattcccggagccacaccgccttaatttgaatcctgattctgctacttacaagatgcatgtctcttcttttgccccagtatcctcctctgtaaaatggagatagtaagagtttcaacctcatatggttgttagaattacaagcatcaatatgcataaaatgcttagagatggacctgatatatagcaaacactcagtaaatgttaactattattatcaca

SEQ ID NO: 535938 - DNA, 636 bp, Homo sapiens
tacaatctacaatcattaatttatctcaaaacataggcattatattgattcttcttagatatgatatgaacttatccctcattcattaatgggattacaaattgactgaagttactggcaactaaacacatgaaggattaatttggcttcttagccaaccaaaagagtgactgtaatttctttaaatccttcttattctatggaataatttargcttggtagtgatttgtttaacatgcattaagactgtgccatttttaaaaagctcttaagagaaattactttttacaatgaaagtaaatttgaacaaaaaattgcattttaaatttataactgaccatatctatattacaactttcttatttttgcagataaattctcaaaacacataaatcaatattaatggtatcttatcctatgagccttattatatgagcatcatttatctgcaatctgtgttcatatacacattctactgggacattttttaaatggtgatagtagacagcctaatcttattgccttgagtcgagttgagtctaggtaataagttttaccaataaaaactgtggttattacatataagacataccagttaccaagtaaattctgcatgtagagtatagtgcttactgc

SEQ ID NO: 535939 - DNA, 588 bp, Homo sapiens
ctgtggatattcgtgtcagctaagagaactgtcagttttcttggcttccttcttgaagatggtcatgggcctggcagctcaaaaatgctgcactattgtcacaccagtaaaagcccaagatgtggtcagcttgacagctctcttgctcattgcttcagtttcaaagttcttactttgctgctgcctctggccattggtagattgccgtttataactgaggaggttttcttgyatgccacagacctctaagtgaaatggagtagcccctggtttcttagaagtgactgaactgtgactgccattttattaaaattcctccacatccatggcagcacttttacccttcagcagagctgtggggatatatgttggtccaatttggtaaaggggaaagctctgcactaaaagtgataaatctggattcaattctgtctctgctactcatttcttgtgaaagccagttcccctaacctctctgaaactctgttttgtaatgtgtgtaatgagcataattacagattacgctcattaccatatacagacagatatgtggtgacactaagagatgatgtatatgaaagtacattg

SEQ ID NO: 535940 - DNA, 588 bp, Homo sapiens
ctgtggatattcgtgtcagctaagagaactgtcagttttcttggcttccttcttgaagatggtcatgggcctggcagctcaaaaatgctgcactattgtcacaccagtaaaagcccaagatgtggtcagcttgacagctctcttgctcattgcttcagtttcaaagttcttactttgctgctgcctctggccattggtagattgccgtttataactgaggaggttttcttgtatgccacagacctctaagtgaaatggagtagcccctggtttcttagaagtgactgaactgtgactgccattttattaaaattcctccacatccatggcagcacttttacccttcagcagagctgtggggatatatgttggtccaatttggtaaaggggaaagctctgcactaaaagtgataaatctggattcaattctgtctctgctactcayttcttgtgaaagccagttcccctaacctctctgaaactctgttttgtaatgtgtgtaatgagcataattacagattacgctcattaccatatacagacagatatgtggtgacactaagagatgatgtatatgaaagtacattg

SEQ ID NO: 535941 - DNA, 637 bp, Homo sapiens
gagggggcagccacagtaaggagcacaggacgggagccagcctgctggggcaatgggaggaagttggaaaggcaaatctactcgaatgtgaaattgagatagctgtgagaggagaggaggaaggcaagggggtaatcaatggagccctggcccaggaagaatttcttgtaaggtgagaaagtcctggatgtgtgcatcctcggggagtaaagggccactgagcagggagagggtcagggaggtggagaggacttctgatataggtcacwttctagagaagttgggatggagaatgatttagagtcccatttaaggagctccctccccatccttctacatacaggagggaaaggaggaaagaccgccagaaaaaatgtctatatcctggtttctatgcgcaggggtcaagattacggttttgtagaatccagaaaaccctggaggagctatgcaattcttggtcacttttatctaccagcatccaaaacccttcctactggctctggttccttttcactgtggaaataagacacagaaattccttctcctcacacctgtgcagatggaggacagccatgtgacctcagcacttgagcaagttgcttacccttggactctctgtgagatgggtgatggc

SEQ ID NO: 535942 - DNA, 594 bp, Homo sapiens
tcccatagattctttccaacaaatttattttatactcaaggttttctacccatggtcacattttgttgtttgcaatcaaaggaccctcatgttatgacttggtggtggctatagagaccattttccaaaagtaaggtccagakaggtgaagtaaatagcccatgaacaaacacatgtaaatggcagatctgagcctggaacccagacctcctgactcctcatcaaccccctttccattgccctgggatctatcttgcccagaacataaatctggattcctgtgatggcagcaaaatgcacagtgtcacctccatgcatcgattttgcccagaggaccccgcgcctgcattgggggctcaaagcaaggatcgatgtggggcccagatccttggctgtaaatcacagcagagagagcacagcagagctattttctggcaataaattcacctccagccagcagcccagcttttctcctttcatgattctacctcgtagatcacactgtttgaaagagagagtgggaccattccttgcttcgtttattttcccctaatacttttaaagaaacttttaattttgaaaaagaatttagat

SEQ ID NO: 535943 - DNA, 612 bp, Homo sapiens
ttaaaagtggaaatattttatacctgtaagacagatatatggttaatatccttaattattaaaataaatccattcaatctacatatctaaagatctaaaaatgaatacatcattggaaaacatgagataaagatctgggataaaattagacatttaagtaagtaacaaatataggaaaattatttatttcgctagttatgcaagatattgctagctgtttaccaacacgcatttccctctttttcttgagcacaaaggtagcttacattcccagtatcctccaaagttaagtatggctatgtaactgagttcttttctatggaatgtgagcagaaaatgatgtttctccttttaagtcagtagcagtcttttatcagtgtcaacatccagtttacctgtatatgttttactttgtttcaatttattttarcccatgaacaccttttcttttataatcttttctctttatgtctgattggtatggcaaaatccaggataaatttataagctatgcattcaagacgccaggtccttgaaaccatacataaagaacatgtatgcagtgactaggaaccacattctgtgctatttcgtgaatgaaaaattaacttc

SEQ ID NO: 535944 - DNA, 477 bp, Homo sapiens
aaatgactagtgcagaactctcatcctcctaggtaatagtrcatttattccaagggataatagaagtacacaaacgtgaattgaccaagagcatatataaatgccttgataatctctagtgcatttaaattatgtatatacaaacaacaatcgattcattcaaacatgctttttattatagctttcaagtggataaaatttaatttctaaaaggagtgttaaaagaaattgtttacaagacctgtgatgtgtaatcttgttttaaagtcattgatgtactcaaataatgtacctttaataaattcattggtacagagcaagcattcaatagatgtttgttgagagaattgctttttcacaatcatttcagccttcatcttgtactcacagcttcagttgtaccattagaaagattaacaataaggtgacacttcatagaatccagagtgctttaggtaaaaaagaaattatttacta

SEQ ID NO: 535945 - DNA, 477 bp, Homo sapiens
aaatgactagtgcagaactctcatcctcctaggtaatagtgcatttattccaagggataatagaagtacacaaacrtgaattgaccaagagcatatataaatgccttgataatctctagtgcatttaaattatgtatatacaaacaacaatcgattcattcaaacatgctttttattatagctttcaagtggataaaatttaatttctaaaaggagtgttaaaagaaattgtttacaagacctgtgatgtgtaatcttgttttaaagtcattgatgtactcaaataatgtacctttaataaattcattggtacagagcaagcattcaatagatgtttgttgagagaattgctttttcacaatcatttcagccttcatcttgtactcacagcttcagttgtaccattagaaagattaacaataaggtgacacttcatagaatccagagtgctttaggtaaaaaagaaattatttacta

SEQ ID NO: 535946 - DNA, 561 bp, Homo sapiens
ttgcttccatgctagaatgtgttgacagagctttcaagttttcaaaagaagccagaaatccagaattgtatataaaatctactgtttaaatactggcagctcaatttgagtggtgaagatttatgtgggccaaacaaaaacaagtctgtgggccaaattctgcccacaggctgccagtttgggacctgcgccgcagayacttttgaacagaagatcttttcagcaaagaggaggagaggactggatgatatcctataaaaagggatgtgagcccaaagcggagaggttccgatctgggatgtcggcatggcaatggcccaggaagaccttccctctcaacttggaatgagacacctaaattgaacaccaggttcagtttgagtcttgtcaggtaaacacagcaaattcagcaagcccaaagacaagcaataaaattcagacctggggaaaaatctcaaaggaggtgaagctaaagaaaaatgactttttgtgtctttaggactagacacaatgacctagtcattataaggacagaaacctggtcaatctgaggatcgaatc

SEQ ID NO: 535947 - DNA, 561 bp, Homo sapiens
ttgcttccatgctagaatgtgttgacagagctttcaagttttcaaaagaagccagaaatccagaattgtatataaaatctactgtttaaatactggcagctcaatttgagtggtgaagatttatgtgggccaaacaaaaacaagtctgtgggccaaattctgcccacaggctgccagtttgggacctgcgccgcagacacttttgaacagaagatcttttcagcaaagaggaggagaggactggatgatatcctataaaaagggatgtgagcccaaagcggagaggttccgatctgggatgtcggcatggcaatggcccargaagaccttccctctcaacttggaatgagacacctaaattgaacaccaggttcagtttgagtcttgtcaggtaaacacagcaaattcagcaagcccaaagacaagcaataaaattcagacctggggaaaaatctcaaaggaggtgaagctaaagaaaaatgactttttgtgtctttaggactagacacaatgacctagtcattataaggacagaaacctggtcaatctgaggatcgaatc

SEQ ID NO: 535948 - DNA, 483 bp, Homo sapiens
ggttggtcatgccagcgaaggcgtagatgaggtgggtgcaaaggctggggtccaagtccttgggcaggaagcgagcctccccctgtctgtactgggcccagttggtgaagtagcagaccagttttgcagcagagcctggcccgttggagtaaagaaaagggatagctgtcagcaggaccttctggggactggtcaccctccatctggggtaggcaatgtccttggacctccctcttctacacctggagtcagtggagggacccgacaggcagaaatggcatttgcttttgtgtggatggagtctggcagttgggaaagcattttcagaggccagacatgggatcctcagaacactgagtgggcaggaccatcatcttctaagccttcttttccygggaagcaagttgaggctcacgagcttggggcccgtccccatcagcatggctgctaagagggcagagcagaggtgctgcgacccaagtc

SEQ ID NO: 535949 - DNA, 546 bp, Homo sapiens
caggtgtatccatgtgccaagtaccctatcatttaatacagccattcccctattgcttgcatactcgccatcctttgctagcctgaaacatgcaccctctcccagtcgaatccatcctcctgcctctgaagaggttgttcagaccttcatcatctcattcctggatgaccatcacactgttctgtgcggtctccttgcctcagctctcaagtccttccctgcccagctgggcctcctcccctctgtgcaagtttgtctcaaatcacccccttacctgaaccccaagctccatacaaacagcctacccaacgtccccttcccctgctcccctctcctcatctgaatcctaccagttctccaagagctggcccagcatgctccccaagccttctgcagagcaccagtcttcagcagttttggcttcccaaaaattcccraaacgcttttgaagaaactactggtttgcaattgattaaagcccccatgtttgctgtagaatcaacatagctctcccttgtcttgtaatccagctttcacatgtcaacc

SEQ ID NO: 535950 - DNA, 426 bp, Homo sapiens
tggtgtagtagcagaccagtttgtatgcagagcctgaaggagaagtctgggrtggggcccgggccaggattcggcaagagacctcaggctgagcccagagctgagcaccaatggggtgtggggttgggtagggaggagtggggtgcagattgtgagcaaagtcagaattcttaaatgaaaggagctggttcaggtccccctgcctctggggagttccctgactggtgaaaataaggcctattctgaaaatgcttagaaaagatccaatgcaggggatgaatacgctacaggcactgtgtgggggaagggtaggagctggggaataaggatgaaatgggacttggtgccagcacagcaggcttcctggaagcagtggctttgtgggaggggaaggcccaagatagcctgtgtcacagatggccctgg

SEQ ID NO: 535951 - DNA, 562 bp, Homo sapiens
tccatgccccactgaaagggggagtgtttcccatctaggctgagcctgcttggggcatgtgagacttgcttcttgccatcacatctctggcctttcccacattctgatgtttgttctgcagcctctgggctttggggttatctggtgttgtctctccagttctccccagtggtgatggagtgtgctcccgccaccctctgccatctccccagactcaggtaactgaatgcctccaacccctctctgctcacccatagcatcctggcctcttcctccttgtcctgacataactgtttattgagcctggggtttggtgaacaagtgtaccctgctttgtatcttaagggaasatagagatgtgtgtgttctcccctctggccttttgctcagcattttgtacatatttacaaatcattcatcttctcagcaactccacaagtcccctagtatcatccccattttgtagacaaggcactcaaggctcagagaagttaacagatttgtctaacggacacaccagctactgccagaggcaagattcaaacccaggcctggcacaccc

SEQ ID NO: 535952 - DNA, 491 bp, Homo sapiens
gaaggaaagacatgagaagccactgggcgcagtggctcatgcctgtaatcccagcactttgggagaccgaggcggggatgggggggatcacttgaggtcaggagttcaagaccagcctggmcaacatggtgaaaccccatctctactaaaaatacaaaaattagctgggcatggtggcgcgtgcctgtaatcccagctactcgggaggctgaggcaggagaatcgcttgaacccgggaggcggaggttgcagtgagccgagatcacgccactgcactccagcctggtgagcaacaaagcgagactccatctccaaaaaaaaaaaagaaaagaaaaaaaaagaaagaaagaaagaaatgaatgagaaggctacagaggggggttggcagggaacaccggcaggggtttcctggctgctggcggcacacatcagaaatcaaaggcaagggtaccagggaccacaagggcaggagtgagggggaggggcctcag

SEQ ID NO: 535953 - DNA, 491 bp, Homo sapiens
gaaggaaagacatgagaagccactgggcgcagtggctcatgcctgtaatcccagcactttgggagaccgaggcggggatgggggggatcacttgaggtcaggagttcaagaccagcctggccaacatggtgaarccccatctctactaaaaatacaaaaattagctgggcatggtggcgcgtgcctgtaatcccagctactcgggaggctgaggcaggagaatcgcttgaacccgggaggcggaggttgcagtgagccgagatcacgccactgcactccagcctggtgagcaacaaagcgagactccatctccaaaaaaaaaaaagaaaagaaaaaaaaagaaagaaagaaagaaatgaatgagaaggctacagaggggggttggcagggaacaccggcaggggtttcctggctgctggcggcacacatcagaaatcaaaggcaagggtaccagggaccacaagggcaggagtgagggggaggggcctcag

SEQ ID NO: 535954 - DNA, 491 bp, Homo sapiens
gaaggaaagacatgagaagccactgggcgcagtggctcatgcctgtaatcccagcactttgggagaccgaggcggggatgggggggatcacttgaggtcaggagttcaagaccagcctggccaacatggtgaaaccccatctctactaaaaatacaaaaattagctgggcatggtggcgcgtgcctgtaatcccagctactcgggaggctgaggcaggagaatcrcttgaacccgggaggcggaggttgcagtgagccgagatcacgccactgcactccagcctggtgagcaacaaagcgagactccatctccaaaaaaaaaaaagaaaagaaaaaaaaagaaagaaagaaagaaatgaatgagaaggctacagaggggggttggcagggaacaccggcaggggtttcctggctgctggcggcacacatcagaaatcaaaggcaagggtaccagggaccacaagggcaggagtgagggggaggggcctcag

SEQ ID NO: 535955 - DNA, 628 bp, Homo sapiens
gtcgcctcaaatcctgacatgccttagctaaatataacaggcataaacactacacattggaggctctgccctaaatagaaaagcttccaagcacattatttttagcragagaaaataacttgaacctatcagaaaacatgctaaagactggactgaaagtgaaacctagaaattttctggttttacaagcctggctggagctaacatacattcacggcagatgcacacgtgacaaagattaggtctgtgctgcactcagagagaacacgaatcaaactttggcatggcatgttccaggcagtgtctactggactccagcctgtggtacaggcagtattggtcaagcctgtgcccagcctctgacagccccttgctggggccagcaccccagagtccttccaggtcttgctcctagaacccacagggaattcccccggtcacagggaatggctgttggctcaggcagcaccaagtgcaatgtttttgccccaatcccttctcatcacctttcaaacctcagcctcctccaggaagcccacagacatgttctatcctcttagcttctccctccctgactgtcagcaggcttcagctggctccattatgagcagctgggaacagagtttgg

SEQ ID NO: 535956 - DNA, 628 bp, Homo sapiens
gtcgcctcaaatcctgacatgccttagctaaatataacaggcataaacactacacattggaggctctgccctaaatagaaaagcttccaagcacattatttttagcaagagaaaataacttgaacctatcagaaaacatgctaaagactggactgaaagtgaaacctagaaattttctggttttacaagcctggctggagctaacatacattcacggcagatgcacacgtgacaaagattaggtctgtgctgcactcagagagaacacgaatcaaactttggcatggcatgttccaggcagtgtctactggactccagcctrtggtacaggcagtattggtcaagcctgtgcccagcctctgacagccccttgctggggccagcaccccagagtccttccaggtcttgctcctagaacccacagggaattcccccggtcacagggaatggctgttggctcaggcagcaccaagtgcaatgtttttgccccaatcccttctcatcacctttcaaacctcagcctcctccaggaagcccacagacatgttctatcctcttagcttctccctccctgactgtcagcaggcttcagctggctccattatgagcagctgggaacagagtttgg

SEQ ID NO: 535957 - DNA, 625 bp, Homo sapiens
ggtgggatgtgaacttgcacagcaactttagaaaaactgtcctgcaagctgcacatacacagaccatgagccaggccttccactcctgagcacgcgccagcagcagcgygtacatgtgttcaacaaaagaacgttcagagcagcagcactgtgcataattgtcaaaaatgggaatgacccacattctcttccaggtagaataggtaagtaaaccgtgagctactcagccagtggaatactccatgggatgaggataaaaaagctatagctacagtgcagcaacatggctgaaactcacagagaaaacgctgagataaagaagccagacacgaaataacacacctgtatgattctgtttctgcgacgttagaggcaggcaaagacaatctctgcggcggttgctttgtggggagatagtttcctgggaaaggcatgcaaatcccgcagtgtcctgtgtctgacctggaagtttgctctgcacgtcttcactttgccacgatccattgaacggtggcagtgtgattgtgtgctttgtctttgtgtgttatccttcaataggacatttaaaagaaaacccccatgagctttgtcttccctagctgaagttccttctctgacttggcac

SEQ ID NO: 535958 - DNA, 625 bp, Homo sapiens
ggtgggatgtgaacttgcacagcaactttagaaaaactgtcctgcaagctgcacatacacagaccatgagccaggccttccactcctgagcacgcgccagcagcagcgtgtacatgtgttcaacaaaagaacgttcagagcagcagcactgtgcataattgtcaaaaatgggaatgacccacattctcttccaggtagaataggtaagtaaaccgtgagctactcagccagtggaatactccatgggatgaggataaaaaagctatagctacagtgcagcaacatggctgaawctcacagagaaaacgctgagataaagaagccagacacgaaataacacacctgtatgattctgtttctgcgacgttagaggcaggcaaagacaatctctgcggcggttgctttgtggggagatagtttcctgggaaaggcatgcaaatcccgcagtgtcctgtgtctgacctggaagtttgctctgcacgtcttcactttgccacgatccattgaacggtggcagtgtgattgtgtgctttgtctttgtgtgttatccttcaataggacatttaaaagaaaacccccatgagctttgtcttccctagctgaagttccttctctgacttggcac

SEQ ID NO: 535959 - DNA, 625 bp, Homo sapiens
ggtgggatgtgaacttgcacagcaactttagaaaaactgtcctgcaagctgcacatacacagaccatgagccaggccttccactcctgagcacgcgccagcagcagcgtgtacatgtgttcaacaaaagaacgttcagagcagcagcactgtgcataattgtcaaaaatgggaatgacccacattctcttccaggtagaataggtaagtaaaccgtgagctactcagccagtggaatactccatgggatgaggataaaaaagctatagctacagtgcagcaacatggctgaaactcacagagaaaacgctgagataaagaagccagacacgaaataacacacctgtatgattctgtttctgcgacgttagaggcaggcaaagacaatctctgyggcggttgctttgtggggagatagtttcctgggaaaggcatgcaaatcccgcagtgtcctgtgtctgacctggaagtttgctctgcacgtcttcactttgccacgatccattgaacggtggcagtgtgattgtgtgctttgtctttgtgtgttatccttcaataggacatttaaaagaaaacccccatgagctttgtcttccctagctgaagttccttctctgacttggcac

SEQ ID NO: 535960 - DNA, 615 bp, Homo sapiens
caagcaggactgagtgctcctctgggctccacagggaagcagtgttctcgggctgactaagggtaggtgtgcrtgttcccctggatctacagactcctctggagtcacaggggttgcggacacttttccctcagtggcatccagctctttggagcctttcctgagagccagttctgaagggtgaaggcctggagtgcccatggtgaggatgggaacaacggggtgtggtggcatagggaggggaaggcagcttccacccgctcaccattctgtctctttgttgagagcctccgtccacagactttggcacctgtacagggtagcctgactttggaaagcttgctgggcatggcaaggctgtggcgggagacggcagggagaggctgctggtatgtttcctttcctctctatccaaccccatagaccctacattactacacctggcctggctatctgatttgcaacaggggaagtggctccaagaagcgacatctcccaagctattatttgcctcccattttgtgctgggtggagaaggggaaaacatccttactgtggccagaaatggaccacatctgtcaggccaccctctatccttccattactggaactcag

SEQ ID NO: 535961 - DNA, 477 bp, Homo sapiens
tgcaagcaggactgagtgctcctctgggctccacagggaagcagtgttctcgggctgactaagggtaggtgtgcgtgttcccctggatctacagactcctctggagtcacaggggttgcggacacttttccctcagtggcatccagctctttggagcctttcctgagagccagttctgaagggtgaaggcctggagtgcccatggtgaggatgggaacaacggggtgtggtggcatagggaggggaaggcagcttccacccgctcaccattctgtctctttgttgagagcctccgtccacagactttggcacctgtacagggtagcctgactttggaaagcttgctgggcayggcaaggctgtggcgggagacggcagggagaggctgctggtatgtttcctttcctctctatccaaccccatagaccctacattactacacctggcctggctatctgatttgcaacaggggaagtg

SEQ ID NO: 535962 - DNA, 565 bp, Homo sapiens
atcatcctctggacagcaggatgcccctgtccactatctccatcctggcatcatcgtcataagaaccatcatttactgagagtgtactatgtgccaagtgctgttcacacctcagtgctcgtgctgatgacaaccctgtgagctagtcctagtttttccgcatttcacaggtgagaaaatgcacacttaggaggtgtagcaacttgctcaaggcctctcagaagcagcatytatacccaggcctgcccacttccaaggcccaagctccacaaagcctctgtggctgagtgtggggctggttctccatgtggtgggagagctggcttttatcaggggtcccccaggagcgtgctctaccctcaaagcccctctttccccaggagggtcaggaaagaggaatgttgagatgagactccctataccctgaaacccctagggcaaggagcagggtctctaggttctgggctaggaataccaccagcacatttaggccagaacaagaaagaatctcctgatcaatggctcttgttggatttgaggaagggggtccagggggctttctggg

SEQ ID NO: 535963 - DNA, 565 bp, Homo sapiens
atcatcctctggacagcaggatgcccctgtccactatctccatcctggcatcatcgtcataagaaccatcatttactgagagtgtactatgtgccaagtgctgttcacacctcagtgctcgtgctgatgacaaccctgtgagctagtcctagtttttccgcatttcacaggtgagaaaatgcacacttaggaggtgtagcaacttgctcaaggcctctcagaagcagcatttrtacccaggcctgcccacttccaaggcccaagctccacaaagcctctgtggctgagtgtggggctggttctccatgtggtgggagagctggcttttatcaggggtcccccaggagcgtgctctaccctcaaagcccctctttccccaggagggtcaggaaagaggaatgttgagatgagactccctataccctgaaacccctagggcaaggagcagggtctctaggttctgggctaggaataccaccagcacatttaggccagaacaagaaagaatctcctgatcaatggctcttgttggatttgaggaagggggtccagggggctttctggg

SEQ ID NO: 535964 - DNA, 541 bp, Homo sapiens
actccactgccacttaacagctagtggactttgagactattttcaatcttgtgcctattttatacagtaagagggttaagctagatcgtcacttcagccctaaaatttctatatgactgctagaatcactgtcccactctcttaactcacactaatacccccaatatcaatgtcatttctcttctctatttgaatctttcctattctctaccccagtagtcagcaaactggttctgtaatgagcttgatactaaattattttatattttaagtgttgcaaagcaaacattctcctttacaactactcmtctctgctgctggagtacaaatatagtcagttattgtgtaaacaaaggaacatggctgtgttccaacacaatgtaattacagacaccaaaacttgaatttcatataattttcatgttcataaaatattctttaacaatttttaaaatgtaaaaatcattcttagcacaaggaccatataaaagcaggcaagagccagatttggcttgcaggccacaatttaccaatgcctgct

SEQ ID NO: 535965 - DNA, 541 bp, Homo sapiens
actccactgccacttaacagctagtggactttgagactattttcaatcttgtgcctattttatacagtaagagggttaagctagatcgtcacttcagccctaaaatttctatatgactgctagaatcactgtcccactctcttaactcacactaatacccccaatatcaatgtcatttctcttctctatttgaatctttcctattctctaccccagtagtcagcaaactggttctgtaatgagcttgatactaaattattttatattttaagtgttgcaaagcaaacattctcctttacaactactcctctctgctgctggagtacaaatatagtcagttattgtgtaaacaaaggaacatggctgtgttccaacacaatgtaattacrgacaccaaaacttgaatttcatataattttcatgttcataaaatattctttaacaatttttaaaatgtaaaaatcattcttagcacaaggaccatataaaagcaggcaagagccagatttggcttgcaggccacaatttaccaatgcctgct

SEQ ID NO: 535966 - DNA, 663 bp, Homo sapiens
ttccctcaccctctccactccagtctctgcctccacctggagggatagaaaaaaaaaaccccactttattgggggtatttcttagtataaactgctcacattcaaaatacatacatatatatatacacacttgacggactttcacacgtgtatacagccatgtaaaaggctcatagatcaagatatagaacaattgcaacagcccaggagtttgattgtgccttttccagtcagtaacctgcccagaggtaaccactattgaggcttggatccccagggttaatttcatctaaccttgagcttcatatgcatggacccatttagcacacgctcacttctgtctgccttctttccttcagcattcccactgtgagatccaaacatatggttgcaygtatccgtaatttcttctttgtcattgctgcatagtatttcattgaatgaatgtaccatgatttgtttatttattctacaatagatgggcattagagttgttttcagttttgggttattacaaataaagctttgaggaagatttttgtgcatgtcatttggcagtcacttgctttcatttctcttgggcaaatacctatggctggaattgctggatcatatgcaggcatgtgcttagcttcagcaaatattgccaaatcatttcccaag

SEQ ID NO: 535967 - DNA, 536 bp, Homo sapiens
ggtgcctgccagcccgggctgtcaggccgaggactggcagagagggagctggcacagctctgcggggaccagcctctgctcacgtcagctccctggatgctgtccacctgcccgtctacccgtctgactcccctctcaggactggctgggctctgaggatgcagagaccaccrccactgtcctcacgttctcttgggctctatttccatccttccagttcccagccatccggcgtctctgcaaggcctttgtgagtctggtgtggagccagacggaacccacagctcctgcctgctctgggggccctgcccttggctcagcctctgtggtgcactctgcctgggctcatgcactcctctcaccacccctcaactggaccagggtagccagagggctgcctgggtggctcagtgtccctgggagcattggcagtgagccttcatcaggatagtcacgtgcctgagcaggactggggagggcagggaaaggaaatggggaggcaggagctggattctggggcactgaaaatcagcggg

SEQ ID NO: 535968 - DNA, 368 bp, Homo sapiens
gttgggtggacaaagctgttagcgagtatcatcagtttcttccccctgcatttatggatctcagtgcaagagctcatgatgattagccttgtgctacttgaccttgtatgcatggagaataaaacttttccttaggagacacaagtatttgggggttgcctgtttttgaaacatatccgagcccatcttgattgatacattatgtctcagggtctgatttaarcattttaggtatatggagtcatttactttttacaaacacactgcagagaaggtactagtatctccattctatgcatgtgaaaaccaaggcacaggctgggaaaagtggctcacacctataacttcagcacattgggaggccaagg

SEQ ID NO: 535969 - DNA, 568 bp, Homo sapiens
tggggccctgctcccagccaatgactgagtgtggcagaggcatagggcagccccattcctgggagagatggggctccctgacacctgatggcttaakgacacctaggtggccttgccaagtcttccttagacctaacagcaatgtagttcacttccattccaccttcttttcctcttgcctaaatctaggtcagacttgcatggtagtctgatgattcccccacccttccagggctccgtctccattttctctcatagtcattgcccttaaaaaaattttctatgtttaatctcaccttgtcatcttcttctcagaaacctggacaaaagcaacattcacatgttgcatataattgaaattcattgttttgactgctgcataatatttaattatgtgaatatactaagaaagtggataaatacattgtggtatatttatacatagtcatgtactgcataacgacattttggtcaacaaaaaacctcatatacaacagtggtctcataaggttataatggagctcaaaaattcctattgcatagtgatgtgtggtagccatggtaacgc

SEQ ID NO: 535970 - DNA, 568 bp, Homo sapiens
tggggccctgctcccagccaatgactgagtgtggcagaggcatagggcagccccattcctgggagagatggggctccctgacacctgatggcttaaggacacctaggtggccttgccaagtcttccttagacctaacagcaatgtagttcacttccattccaccttcttttcctcttgcctaaatctaggtcagacttgcatggtagtctgatgrttcccccacccttccagggctccgtctccattttctctcatagtcattgcccttaaaaaaattttctatgtttaatctcaccttgtcatcttcttctcagaaacctggacaaaagcaacattcacatgttgcatataattgaaattcattgttttgactgctgcataatatttaattatgtgaatatactaagaaagtggataaatacattgtggtatatttatacatagtcatgtactgcataacgacattttggtcaacaaaaaacctcatatacaacagtggtctcataaggttataatggagctcaaaaattcctattgcatagtgatgtgtggtagccatggtaacgc

SEQ ID NO: 535971 - DNA, 597 bp, Homo sapiens
ttctctaaagacatttttcttgggtctttgagtcttttttattttttgacctctcatagattttgttctgggtactgaagcagcctgaaatctggacacagacagaaataagcccttaggaagccagagtctctggaaagggaggaccccatcggtctaaatccttttgtctttatcggccctactccaggcaaacaccagcaaagaattggttccccctgctactctcactggtagctgaggtggtccctgaggggcagagtcctgttgagtctctctgccctacaccaggcaaatgccagcaagaggcagagcttcttcccttcctcaccagtacagcagaccctataggtaggataatgcctcagctttctagccagacatcaggaaggggaaaccctaaaggccagagactgcaggatagagtggggaattatgaagaaggtgctggagaaaaggatcctttaaagctgtgtataagraagtgttgagcttactcctgaactgagcatgtgtgaagctgagcggaattagcacagtaaggactttaagcgctgaactatggagtagaccattgcccaggtttcagacgggcag

SEQ ID NO: 535972 - DNA, 562 bp, Homo sapiens
aggagttaggaatacagaaagggtttaactaaaaaaaggcagctggagggaaatctttgggatattcaaattgttctctatcctgactgtgatgctggctataggaatctatgcatgtgtgaaaatttatagacgtgtacataaaaaagtgaatttcactctttgtaatttttataactaaagawatgattaggccgggcacactggctcatgcctgtaatcccagcactttgggaggccgaggcggctggatcatctgaggtcagaagttcgagaccagcctggccaacatggtgaaaccccgactctactaaaaatacaaaacttagctgtaagtggtggcgggtgcctgtaatcccagctactcgagaggctgaggcagaagaatcacttgaacctgggaagtggaggttgcagtgagctgagatcatgccactgcacttcagcctaggaaacagagtgagactgtctcaagagaaaaaaaaaatgtttacagtgttcctattatgtaccataaactctaaaaataaaaagatgatttaatgcttgaaaggggatttaa

SEQ ID NO: 535973 - DNA, 498 bp, Homo sapiens
tggttagagctcatctccatttcttattaactatgatctttagagtgttgttatagtttactgagactttttgcttctctgcaaaatggggctaataatggggctaataatttctgccctacctgcctcataaggttaatctcataaacaagtgaggaacatttgggcatgagaaaacctttcaggaataaaattataattttttacaccagcagttggcaaactctggcccacaggtcaaatctatctcactgaatgtttctgtatggtccacaagctaagaatagtttttacatttttaaatggttgagaagaagcatatattatgatgtgaaaattrtatgaaattcaaatttcagtgtccaaatgaatgagtataaatgttcacttgtttacctattatctatagcttatcttatgtcttaacactaccatgttaaagttgagtatggcccataaaatattttcagtctggccctttacagaaaatatttgtca

SEQ ID NO: 535974 - DNA, 632 bp, Homo sapiens
caacccctgctctacacaagtgtgtaagtcaaggttttccagagaaatagaaccagcaggagatataggttaggctgttcttgcattgctacaaaaaatacctaaggctgggtaatttataaagaaaataggtttaattgggtcacagttctgcaggctttacaggaagcatggtgctgatgtctgctcagcttcttgtgaagcctcagggagctttcaatcatggaagaaggcgaagggggaacaggcacaccacatggcaaaggcaggagcaagtgagagggtgggaggaggtgccacacatttttaaatgaccaggtcttgtgagaactcactatctcgaaggcagcaccaaactacgagggatccaccctgatgacccaaacacctcccaccaggccccacctccagcactggggaatcacagttcaacatgagatttgagtggggacaaatgcccaaactatatcaaggtatatctctatatatcctagtataggataaatacatacatatatatatatatawaaatatatatataatatatatattatataatacacacacacacacgaggagagacagagattatgggaactggttcatgctattatggaggccaagaagtcccc

SEQ ID NO: 535975 - DNA, 628 bp, Homo sapiens
attatgcagttaaaaagtaaagaagtcagggttggaattgtgaaaaaattgaggagtgttccttattcactgagacttgtcttagatgggggcctgggccctgacaggtaagagataggttttacactcatattttgactgtttttccagaagtagagtcagcaagagatttttcaatgtacacaatatactgtcaaataccagtatgtttatgtgttggggtggatcrgggagcagccagttttcaaagggcaaactgaaaattaaagtttgagacagagctaacgtggactgagacgggatggacaagggactgatgagaagagcagaaccaaatggggacacgaccaaggaagaaaccagaaggtgataacagaccaccagtattctgccctgagcatgtgccaggcactgtgcatggcatgtgtggagtcattatatcatgtgatactcacaaccactcatgagataattactattgtccctctcttagagattagcccaaggtcacatatataggatgtagcggcattaggtaaacatagaattccaagttcttaaacactgtttctctccagtggtggttggatgttatagaccaggacccaaaggtgggacatgggggtgg

SEQ ID NO: 535976 - DNA, 628 bp, Homo sapiens
attatgcagttaaaaagtaaagaagtcagggttggaattgtgaaaaaattgaggagtgttccttattcactgagacttgtcttagatgggggcctgggccctgacaggtaagagataggttttacactcatattttgactgtttttccagaagtagagtcagcaagagatttttcaatgtacacaatatactgtcaaataccagtatgtttatgtgttggggtggatcggggagcagccagttttcaaagggcaaactgaaaattaaagtttgagacagagctaacgtggactgagacgggatggacaagggactgatgagaagagcagaaccaaatggggacacgaccaaggaagaaaccagaaggtgataacagaccaccagtattctgccctgagcatgtgccaggcactgtgcatggcatgtgtrgagtcattatatcatgtgatactcacaaccactcatgagataattactattgtccctctcttagagattagcccaaggtcacatatataggatgtagcggcattaggtaaacatagaattccaagttcttaaacactgtttctctccagtggtggttggatgttatagaccaggacccaaaggtgggacatgggggtgg

SEQ ID NO: 535977 - DNA, 588 bp, Homo sapiens
cacataaagttgccttcaaaatatatgctgaaatatctactattctctaccagcagtaatagytgtgggcttgaaaagatgatcacacttctgaaacacaataggctttactcagcaccaagtttatgtagctttaataatagaggacaacgaatacagcacaatcaacagaagagcggaggtctcatgactttcagagaagcttctgaacgtcctcatgactcagctatgaaacacaagtgatcaagataattggagccaagtggatgcggaacatctcagcttaagaaataatcatttttgacatcccttcaagcttcataccctctgattagatagtcccatcagaagtacatgactagcccccactcgctagtgaagggccatcccatcaattgttcattattcattaatttctggtggttaataaacaatctcaacaaccagatggctacatggcaaactcaacaggatggtctttattttgtatctggtatattcctatatatcacttaaatacgttttgtaagattaaactaagggtcaaattctcaaatacccttgttgtcagagaaaagacttaccagg

SEQ ID NO: 535978 - DNA, 599 bp, Homo sapiens
gctgggcagctgctcactaggaaggtgtcttttcttcttatctgcttaagaatcccacaacaaaaataaaataaaattaaaagggctttatttagacaaatatctgagaacagaatggtgccatcttgccttttgtcccaataaaaagttagcaagaggaagctactaacccctggtaaaacctccacgtcttgctttcgccaggagctctccccctgtttcaagtctgttcctgtctttcgaccagtccggatctggacggctctctcctttttgcyaatgaataaccaaccagcagaggctgttgcctttaacattctgagctatgaacagactgtaataatttccccttacttcctggtttctttctgtctgtgatctaaatggtattctgacctctttacccctcccatctcccacacccaagatagaccagatcctttaccaaactgttaaagcagccgctaaaatctatattccttttgtttcatcctggagaaacaggctagcccaggtagctttttgtcttgttatgttcccagcactgaaattcacggcagagatttttttccctgacaaataggagtagaattgttttg

SEQ ID NO: 535979 - DNA, 610 bp, Homo sapiens
ggagacttcctatgcataggacagattctagattttccttrtgatacagagaaatataagacataaacttgtcttcaaagacagggcaatatgcttggggaaacaacacaattacatataagcagatattagactacataagatataataaactgtgttctaggagaatgacattcattagatttcactcaacatatatttattgagtgtccattaagtgttaggcattgtgtcaatataggaacaaaagaacactacattaagtacataaagagatcagaatcacacatggaataaatgacaaaaatgggtataggttatgctgggagggcacaaatgagagagtggtcaattctgtctaatgaagtagttgggaaagaattaataaagacagagacattttattcgattcttaaaagatagacaagaacccatatttatctggcaaataagttggaagatggttaatgtaggaaaagggagagaagttggggtcatcacatcaggcaaaagaaggggattgagcaaaggtcaacaggtatgcagaagaagtgcacatttgcagattatatgggttcacagcaagagtttggaggaagactatgtggtg

SEQ ID NO: 535980 - DNA, 623 bp, Homo sapiens
gataatggtgtgagaagagctttgcctaaggatttgatgtgctaaagaaaattctgttttcaaagctctggctgtttgtgctgctgagaataaagacatggaatagatgggccttaattgagcagaacaatttaagaagtgctggggtatacagagggagacccagaatctagtttggagtaagggttgggtaggaaatcaaactgctttgcatacagaaacatggagaattttgttgtaaaatccctggcacagagaaaggaggargaggagtggttcctcagcaacctattagggggccctagacataagggaaaaagttttgggaaattccctcttcagcagaaaggacattaaatttcaatgaacagaaatttctggtatctgtttgaacttgttttctgctctgtattgtacttaaagctttgctcttcacaaattttatacagcatttggattgaatttgtaatgttttgtaagggttgaaaataaagaagtggggtccagtgtgaggcagtgtgaggcagagtggactggagagaaaaaggtgcaaggtgggctatggcaggatgactcaggatttaggagaagatgttaagagaaagtccccctcttctagaaac

SEQ ID NO: 535981 - DNA, 693 bp, Homo sapiens
ctgtttcaggctttctttttgagaacaagctgctctgtggrtgtgttcagtttctactatttcaaagtccagtgggtggcatttacatgggttttaaactatctttagttattaacattggtgttattattggtaattattcatgatagtaatgcttagtgagtatctgggtatacagggctaaattattaaaaagaaagaaagaaagaaagaatgaaggaagaaagaaagagaacgtgtgtgcttgttctgacctgtagcagaccaggtctcacaccttgactccctgggggcacctgcttcattttaatccccccaaagcagtaaaactagtacatatctgtacatccatgttggtatctgcagctacacacacacacacaaacacacacacacatccatccactcattcacatatatgtgtgtgtgtctctgtgtcatgtatggattaagattagacagtatagtttttaaaattattttttattggtacataaaagatgtacatattctctgggtacatgtgataatttgatacattaatataatctgaattggaatatccattaccttaactatttctcttttcttcatgctaggaacattcaaataaggaacagtagattaatgttaactatagtcaacctactatagagattgtgctctgctgtactttggcctcctttagccaca

SEQ ID NO: 535982 - DNA, 631 bp, Homo sapiens
tagtaattctttcttatgtttagtaagtgtgccgtgtcatttgattatcttttcatttgtgcatgtatttccatatatctccaaaaggttttaagtcagcatataatgctgaaacataatataaaatatagctaaacataaaaaagacaaaatcaatgaaaaagaacagagatatagatcatgctgagtctctaacagaagataattatcacagtttagaaatcagtttagccaggggttctctggcaggtaaggcaaaaagggaaacacattgtgcttctcactggcttatgtataagaggagacacattataattttaagcattaagttcaaagagaaatgagttcatgagktctttatggaaagaatatcaagtatcataccagacagtgtcttcagcaaaatgtgcagacattgtctttaagttgttaattctcatactgcttttctaaaaaagctggaagcattatgtgtatgtttttattttaaaggcagtataactttattacagttggtttggaaagcagagggagtaaaacatccacaaatctgccaatctaacacaattattttcatgttggcaaatttaatcatctttgcccatatacaattatggtttccacaaggaac

SEQ ID NO: 535983 - DNA, 508 bp, Homo sapiens
caaggaataggggcctcagaaatgaagtccactgacaacctgtgagtttggaagaggaccagatgagatcacgatctttgaatttgaacgatgagaccctcaacagaggacctagcctgggctatagaaactataaaataaaaaaattatgttgttttgtgccactacagtttataataatttacttgcagcaatagaaaactaataccaacaagaatctggtttgatccatgaggaataaatttaactgaaaacattcactcttctcatttaatgaaatctggctgcaaacttacaatagcccacaaaacatgatatcattcatggcaaatgaaaawaatcatgtagccccaagtaatactgctaattaaaaaggaaaacaagagtttcataattttgcttccttctgttcttcggatagatgccattatcgttgacaatgacactaccaatcattctcagatgactttgcaagaaattggctaggcatgtctcacaattgtcttca

SEQ ID NO: 535984 - DNA, 260 bp, Homo sapiens
gagaaaatgttactcctttgatctaaggttaaaatctgtgtttgaytggtaaagttcacagcaatgagtatattttagagttagtcagaaatcactttttaaaaattattattcatttgcttgtttgactagatttgaagcagaatgggtagctaggaatgaagccattaaatccgtatgagagcaaatcatctcaatttcacatttcactatttaacctctctgggtctcttccctcatctgtaaaatgagaaggttag

SEQ ID NO: 535985 - DNA, 377 bp, Homo sapiens
ttccaagtatgacttatttcctttgctctgggaagaggttcttgagctgtaagaatcactgtcactctcagagtctccagattggctactacttgccaayacagggactctctgttcagtaactttatttctcacaaaaccattttgaggattcacagtctgatccccagggcctgtgtagtgcctgatgatttccacaggtttctctaacccctctttaatataatgttcataatcctctaccaattcagcaaaagtcaacgtgtatggctgatggattttaaaggaagacagacaaggaatctgggggagtgacacaggtaaagcttctttgacctggtgctgactgttggtggagttttcaacgggagtctgaa

SEQ ID NO: 535986 - DNA, 377 bp, Homo sapiens
ttccaagtatgacttatttcctttgctctgggaagaggttcttgagctgtaagaatcactgtcactctcagagtctccagattggctactacttgccaatacagggactctctgttcartaactttatttctcacaaaaccattttgaggattcacagtctgatccccagggcctgtgtagtgcctgatgatttccacaggtttctctaacccctctttaatataatgttcataatcctctaccaattcagcaaaagtcaacgtgtatggctgatggattttaaaggaagacagacaaggaatctgggggagtgacacaggtaaagcttctttgacctggtgctgactgttggtggagttttcaacgggagtctgaa

SEQ ID NO: 535987 - DNA, 645 bp, Homo sapiens
actgaccctcctgcaaagaagagaaaattcttcctgcctgactgctttgagctgggatattggtcttttcttgccttcggactctaacagaaacatcagctctccttaggtcttgagcctgctggcttctgtactggaactacacaccaactctcctgggtctccagcttgccactgcagatcttgggactactccgcctccatcatcatgcgagccaactctgaataataactctctttctctctctctacatyctattggttctgtttccctgcagaaccctgactaatacaagtaccataaatatttattggtagggacctggcttggaggttggtaggttgggtttttgcatgtaaccggtggttctgagtcaaagtgtttacattcttgcctctcagcttccagggacgactcaaatggcccctgaaatacagccttgaccaggaaactcagcatgaaggcacttctctggccaaatatttctagatatggcctgtttttcaaagcttgaaattaaagtccatgctcagagctcttcattctttccaagctctgcatgtgctatggggctgaaaagagcagagagcagcttactggagtgtctagatgcaagagagtctggggaaaaacaatggctgaat

SEQ ID NO: 535988 - DNA, 490 bp, Homo sapiens
gctgccttacctctcctcttggcacttgtatttcctgtctctgctttcactcatgggcaattccaaccgtcatctgcgtacacatctgttctcatagcaacatacactacatatgcatgtcttccagctttgctgtacacttaggcaaactacttaaccactctgtgccttagttttcccatccraaaactggaaataatcatacaggctaagtattcctaatcccaaaattccaaatctgaaacacttcaaaatctgaaactttttgattgctgacatgatgcacaaagaaaatgctcagtggagtattggatttgggattagggatgctcaaccataagtttaatgtgaatattccaaaatctaaagaagtccaaaatccaaaacacttctggtcccaagccttttggataagggatactcaacctgtagtaccagcctcatagggttgttggagattaaaccaggtaattaatgtgaagcacttaga

SEQ ID NO: 535989 - DNA, 601 bp, Homo sapiens
gaagcaagccaatcaacaaataaaataatataaaaaataaataaataaataaaccagagctgctgaatgaattgtaataaatggtctcttgatatagtttatgtcctaattaaatacagaaacaaactacawatgctgaataacacaacatgttgcattacaatgattctctgaataaagccatgaagaaatagaggcaagtgacctattctatctatgaaggtagagaaagtgctagaaaggatatgacactcttgctgaagtctaaaataagagtataagacacaggccttgaaaatcatgttcagctaggtctcttatgcacacttttgctcatgtttgtaggttcaagtccaaactgactagccttggaataaaatattctatacagtctggcccaaaattatttttccagttttatctgttttattccatcttaacagcctttagaatttttgttgttgttgttgttgttgtttgttgattgttttgtgagacagtttcactcttgtctcccaggctggatgcaatggcacgatctcggctcactgcaaactgcctcctgagttcaagagattctcctgcctcagcctcccgagta

SEQ ID NO: 535990 - DNA, 639 bp, Homo sapiens
tgttcataccacttactcatcattagctgtaaagttcaaggtagtgagagaggatattggctagattaaacaaaaggtaggaagagaggtgtgctgtgaagagaaatgggagagargcagacttcactgttgaaacttcactgtgtttaatgacactgcacacaagtgaaagtgcattcctcaaaagccagcccctcctcccttgtaggacctcatttcacagcagagttgaccctcagttaatcataaaatggtataaataaggagcctgaatctcccaatcatgtctgttaatttgagcattaccctgcccgaccctgttggctctttggagtcgcccccctttagaaactatttcagattcttaggcaacactttaagagattgtattgtgaagccactaagcaaaaattatatgccacatttacaaaaagaaaaaatattttcaactaaaacagtaacaaacatctataagcaaatgtttgcattaaattagtggaggtggtttccttttgtaagtaaaagcacacagcattaaaagtagtaacactgataagttaaagatccattaaacttttagccctatccatgttaacatgaactttattgtaatttaattacatatatttagttcctatt

SEQ ID NO: 535991 - DNA, 639 bp, Homo sapiens
tgttcataccacttactcatcattagctgtaaagttcaaggtagtgagagaggatattggctagattaaacaaaaggtaggaagagaggtgtgctgtgaagagaaatgggagagaagcagacttcactgttgaaacttcactgtgtttaatgacactgcacacaagtgaaagtgcattcctcaaaagccagcccctcctcccttgtaggacctcatttcacagcrgagttgaccctcagttaatcataaaatggtataaataaggagcctgaatctcccaatcatgtctgttaatttgagcattaccctgcccgaccctgttggctctttggagtcgcccccctttagaaactatttcagattcttaggcaacactttaagagattgtattgtgaagccactaagcaaaaattatatgccacatttacaaaaagaaaaaatattttcaactaaaacagtaacaaacatctataagcaaatgtttgcattaaattagtggaggtggtttccttttgtaagtaaaagcacacagcattaaaagtagtaacactgataagttaaagatccattaaacttttagccctatccatgttaacatgaactttattgtaatttaattacatatatttagttcctatt

SEQ ID NO: 535992 - DNA, 639 bp, Homo sapiens
tgttcataccacttactcatcattagctgtaaagttcaaggtagtgagagaggatattggctagattaaacaaaaggtaggaagagaggtgtgctgtgaagagaaatgggagagaagcagacttcactgttgaaacttcactgtgtttaatgacactgcacacaagtgaaagtgcattcctcaaaagccagcccctcctcccttgtaggacctcatttcacagcagagttgaccctcagttaatcataaaatggtataaataaggagcctgaatctcccaatcatgtctgttaatttgagcattaccctgcccgaccctgttggctctttggagtcgcccccytttagaaactatttcagattcttaggcaacactttaagagattgtattgtgaagccactaagcaaaaattatatgccacatttacaaaaagaaaaaatattttcaactaaaacagtaacaaacatctataagcaaatgtttgcattaaattagtggaggtggtttccttttgtaagtaaaagcacacagcattaaaagtagtaacactgataagttaaagatccattaaacttttagccctatccatgttaacatgaactttattgtaatttaattacatatatttagttcctatt

SEQ ID NO: 535993 - DNA, 447 bp, Homo sapiens
gagttaatagaatcccccaggtaaaaatagcagatgaagaagaccaaatgggaaagtaaaaaggtgggacaggcactgaaagaaacgctaaagctataaaataagaattggattatacagtgagttagaaagaggaagtattaaatttagtagaaagaggaagaataagcctgtaaaataaaataggaaactgatgaggaaaagagacccaacacaaaatataacacttaactgacttcacaaaacttctacaaactggagacaatccaattatcccagtcaactgagtgccaaaaatgtttataggaccaaatgagaaggttgtctccctcccctgsgctccagcatttttacaaagcaaacggtacctagtgtttctacccctgagctgataggacatactcttctaagtcacaagaggagtaagaacacagttcgagcctcaca

SEQ ID NO: 535994 - DNA, 509 bp, Homo sapiens
gtaccctcaggatatttcccagagctctgcaagaagccactcaccaccagcagaaccaggtgggcacaggagtcaacatctgtcycttgcactgttctatgctgcccccttgaatggtttaacaacctaaaatcccatgctgtgccactttgatcccatgctttattaccgttggattctccatagaattcaagaacaagatggcagacaaattgctaaactcaaaaaaactaacacattttacccgacttgttgagcctaattccaatatctgccttcatttgacagcggatattcagaaaaggacttaaaaaaatacaaaagaaacaaacaaaatccagtggatgtggaaaagacacatgcctacttttactttcctgggtcagaaatggaagtgaaagcaggcacttcaccaactaccattctgcaggaaaagatgagtgcaacaaagaaaccccaaatggcattcattaaggctacagaaccaaactgaataatgtgagattaga

SEQ ID NO: 535995 - DNA, 509 bp, Homo sapiens
gtaccctcaggatatttcccagagctctgcaagaagccactcaccaccagcagaaccaggtgggcacaggagtcaacatctgtctcttgcactgttctatgctgcccccttgaatggtttaacaacctaaaatcccatgctgtgccactttgatcccatgctttattaccgttggattctccatagaattcaagaacaagatggcagacaaattgctaaactcaaaaaaactaacacattttacccgacttgttgagcctaattccaatatctgccttcatttgacagcggatattcagaaaaggacttaaaaaaatacaaaagaaacaaacaaaatccagtggatgtggaaaagacacatgcctacttttactttcctgggtcagaaatggaagtgaaagcaggcacttcwccaactaccattctgcaggaaaagatgagtgcaacaaagaaaccccaaatggcattcattaaggctacagaaccaaactgaataatgtgagattaga

SEQ ID NO: 535996 - DNA, 543 bp, Homo sapiens
aactcactcagtcctctggcagcctaaaaccactgctttaaatcccttcagcatttatgatgacacaaggttattgtaaacaggaaatattctatcaccgttgtaaatggaaagccaatgcctttaccataaataaaaagaaaccctaagaaacaagcaaaacaaaacaaaacagggacaacaaaacaatggaattaaattctatttgtgtgctgtcacctgcataaagacccccagatttgagttgtcttggttgtaaaaggaaagaccaagtaargggagttgaagtcagattagcctgaaagtgaatgggagacctgtgatgtccatgaagtgttgtggggtcaccttgattatagcccaagcagagagagggaaaggaaggagaagcgaacagagtttgggccctcagacaagaagtcattcatgtaaccaggaaacacctccccaaagccagagtcaacctcccttgcaggcgggcccctcatggtcccttggaggcttggccaggggcccttggcaggacgaggcaccttgggtgac

SEQ ID NO: 535997 - DNA, 543 bp, Homo sapiens
aactcactcagtcctctggcagcctaaaaccactgctttaaatcccttcagcatttatgatgacacaaggttattgtaaacaggaaatattctatcaccgttgtaaatggaaagccaatgcctttaccataaataaaaagaaaccctaagaaacaagcaaaacaaaacaaaacagggacaacaaaacaatggaattaaattctatttgtgtgctgtcacctgcataaagacccccagatttgagttgtcttggttgtaaaaggaaagaccaagtaaagggagttgaagtcagattagccygaaagtgaatgggagacctgtgatgtccatgaagtgttgtggggtcaccttgattatagcccaagcagagagagggaaaggaaggagaagcgaacagagtttgggccctcagacaagaagtcattcatgtaaccaggaaacacctccccaaagccagagtcaacctcccttgcaggcgggcccctcatggtcccttggaggcttggccaggggcccttggcaggacgaggcaccttgggtgac

SEQ ID NO: 535998 - DNA, 543 bp, Homo sapiens
aactcactcagtcctctggcagcctaaaaccactgctttaaatcccttcagcatttatgatgacacaaggttattgtaaacaggaaatattctatcaccgttgtaaatggaaagccaatgcctttaccataaataaaaagaaaccctaagaaacaagcaaaacaaaacaaaacagggacaacaaaacaatggaattaaattctatttgtgtgctgtcacctgcataaagacccccagatttgagttgtcttggttgtaaaaggaaagaccaagtaaagggagttgaagtcagattagcctgaaagtgaatgggagacctgtgatgtccatgaagtgttgtggggtcaccttgattatagcccaagcagagagagggaaaggaaggagaagcgaacagagtttgggccctcagacaagaagtcattcatgtaaccaggaaacacctcccsaaagccagagtcaacctcccttgcaggcgggcccctcatggtcccttggaggcttggccaggggcccttggcaggacgaggcaccttgggtgac

SEQ ID NO: 535999 - DNA, 278 bp, Homo sapiens
cctgctgtgtgcaggaggccctctccagtgagtccccatgtcagagggccgtgattagaagcaggcgtagagcgggggacatgccccrgccatcagaattgcaccagcagtgtgaagcatgtctcttgccccatgcaaggaaaggaggagagaggcattggtcagggtgaaaggtatgattctcatggatgccagagagagagagagagagagagagcagatcttctggattatagctcactgtgttgcctctctcctggggagtgggtgctggacag

SEQ ID NO: 536000 - DNA, 593 bp, Homo sapiens
tgcctgctgtgtgcaggaggccctctccagtgagtccccatgtcagagggccgtgattagaagcaggcgtagagcgggggacatgccccagccatcagaattgcaccagcagtgtgaagcatgtctcttgccccatgcaaggaaaggaggagagaggcattggtcagggtgaaaggtatgattctcatggatgccagagagagagagagagagagagagcagatcttctggattatagctcactgtgttgcctctctcctggggagtgggtgctggacaggctagggagggggaccygagggccttagaagtcttgccgagcccagatatggcagccctggggtgccaggaacgacttctccaaggacagccccttgcggtagcctcttttgaaaaaatgcagaggtcacagttaccagaagactggaccatgagcagatttcttaattttcaaagaaaaggaggagaagaatgctgcttctgtgagtcagagagcagtgtgctaatcctgcagcctctagcctcctagaacatggatagcttggggggagattggtcagcgctgggagcctgtgtccacctgaaggtcaccc

SEQ ID NO: 536001 - DNA, 587 bp, Homo sapiens
ctattagcaagagcaggcaggttgcacaatgtggctggtgtcacagcagatctgtgtccctcctcacaatttaactggcaggggacattgccaagggatccgtgttcagagggacttcgtgagagcaggtgtctcacctggcacctgtccaggcygctcttcctcccttactgacagatctgcaaatcacttacttctcttaatcagcagcctctactgcagaaacagggtgatgctgcctcatttgccctggttcttcaccctgcatcagatgaacctcctgagggccctttttgcttctaggaacgatgattccataccttaccaggtccccttgcctgatgaaccagaggttggagaatgaagagagacaggggcctctgacttcccctgttgctggagggatggcaataaggacacaggaagataaatagacagacctggagtcctgagaatgaggcagtgcgtctctacctctgaggtgggagaacaggcccagaggcgcactgcacccttgccagcagaggcaggagcaaagcttcagtgagagggcctttcaaggaaactggctcatggggagtgaatcc

SEQ ID NO: 536002 - DNA, 644 bp, Homo sapiens
accacagttagactcctgcttttaggagctcacattggctgctccgctgagaatgaactttagggagacaaagtggacttaagttgcccacttaataagttgccctagtccaggaagaaaaggatgaaaccccgagggaaagggcaggcggcccctgatgggagactctaacgctggtattgaggggcggattactgtcttggggttttaaacaactgttaaaagagatcctttgatttgggagctggagaatcttctgcaacattctcagtgtgtgtttcttcttggatgaggtgataacctttgggttgaagcatttatcttgccttggctataaaaatctgcaamcgctgttataaccaatcacttgctttctgcagccctggggcgtgcatttgtcactaagtaataaggcttcggttaacactcagaagcccctatgatgcttatcagggcagtgctccaagtggatctacaagagcaggtccaagaaaggatcccgacaacttcccctccagccaggtgggaactgacccagggtttttagacactccctggtgcaaagcacccccagcagaagcactcctgccctgcccttgccctatccctcctaccttgcccaaccacagtgattgctagaggtg

SEQ ID NO: 536003 - DNA, 644 bp, Homo sapiens
accacagttagactcctgcttttaggagctcacattggctgctccgctgagaatgaactttagggagacaaagtggacttaagttgcccacttaataagttgccctagtccaggaagaaaaggatgaaaccccgagggaaagggcaggcggcccctgatgggagactctaacgctggtattgaggggcggattactgtcttggggttttaaacaactgttaaaagagatcctttgatttgggagctggagaatcttctgcaacattctcagtgtgtgtttcttcttggatgaggtgataacctttgggttgaagcatttatcttgccttggctataaaaatctgcaaacgctgttataaccaatcacttgctttctgcagccctggggcgtgcatttgtcactaagtaataaggcttcggttaacactcagaagcccctatgatgcttatcagggcagtgctccaagtrgatctacaagagcaggtccaagaaaggatcccgacaacttcccctccagccaggtgggaactgacccagggtttttagacactccctggtgcaaagcacccccagcagaagcactcctgccctgcccttgccctatccctcctaccttgcccaaccacagtgattgctagaggtg

SEQ ID NO: 536004 - DNA, 589 bp, Homo sapiens
agtaactccacggagatgactctccctaaaaggtggcgttattatttttggagtttctgctttgatgtcgcctgtgctctctggcagaatccgtccgtaaggaagtcagcagccttgtgcaccaacagccaacttcatggctcagcaagtgaccaggcatctgcccgggtcccggagggcaacccattgaatgctgcccttgagtcatccccaccagtgtccccaggcataggacatcacagccccagcaggcagagctcacgggaagcctgctgctcccagggctttggtgtttttccagaagaaaaaggaggaggaaatgaaatggcctttcctcatttgctgtgcagccctttatccaagtgtaaatcaaactcctccaacacacacctgcacaacagcttgtaaactgcaggagggcgtggagtttktctgtcttgttcttcagtatgtccttggtgcctaggacagtgcctggcatggaataggggtctgaatagtaatcgtgataatgatgacaatgcttactgggtaggtaccgcttactatgtgacacaccctacccttatcactatgttaatatgatcac

SEQ ID NO: 536005 - DNA, 589 bp, Homo sapiens
agtaactccacggagatgactctccctaaaaggtggcgttattatttttggagtttctgctttgatgtcgcctgtgctctctggcagaatccgtccgtaaggaagtcagcagccttgtgcaccaacagccaacttcatggctcagcaagtgaccaggcatctgcccgggtcccggagggcaacccattgaatgctgcccttgagtcatccccaccagtgtccccaggcataggacatcacagccccagcaggcagagctcacgggaagcctgctgctcccagggctttggtgtttttccagaagaaaaaggaggaggaaatgaaatggcctttcctcatttgctgtgcagccctttatccaagtgtaaatcaaactcctccaacacacacctgcacaacagcttgtaaactgcaggagggcgtggagtttttctgtcttgttcttcagtatgyccttggtgcctaggacagtgcctggcatggaataggggtctgaatagtaatcgtgataatgatgacaatgcttactgggtaggtaccgcttactatgtgacacaccctacccttatcactatgttaatatgatcac

SEQ ID NO: 536006 - DNA, 589 bp, Homo sapiens
agtaactccacggagatgactctccctaaaaggtggcgttattatttttggagtttctgctttgatgtcgcctgtgctctctggcagaatccgtccgtaaggaagtcagcagccttgtgcaccaacagccaacttcatggctcagcaagtgaccaggcatctgcccgggtcccggagggcaacccattgaatgctgcccttgagtcatccccaccagtgtccccaggcataggacatcacagccccagcaggcagagctcacgggaagcctgctgctcccagggctttggtgtttttccagaagaaaaaggaggaggaaatgaaatggcctttcctcatttgctgtgcagccctttatccaagtgtaaatcaaactcctccaacacacacctgcacaacagcttgtaaactgcaggagggcgtggagtttttctgtcttgttcttcagtatgtccttggtgcctaggacagtgcctggcatggaataggggtctgaatagtaatcgtgataatratgacaatgcttactgggtaggtaccgcttactatgtgacacaccctacccttatcactatgttaatatgatcac

SEQ ID NO: 536007 - DNA, 589 bp, Homo sapiens
agtaactccacggagatgactctccctaaaaggtggcgttattatttttggagtttctgctttgatgtcgcctgtgctctctggcagaatccgtccgtaaggaagtcagcagccttgtgcaccaacagccaacttcatggctcagcaagtgaccaggcatctgcccgggtcccggagggcaacccattgaatgctgcccttgagtcatccccaccagtgtccccaggcataggacatcacagccccagcaggcagagctcacgggaagcctgctgctcccagggctttggtgtttttccagaagaaaaaggaggaggaaatgaaatggcctttcctcatttgctgtgcagccctttatccaagtgtaaatcaaactcctccaacacacacctgcacaacagcttgtaaactgcaggagggcgtggagtttttctgtcttgttcttcagtatgtccttggtgcctaggacagtgcctggcatggaataggggtctgaatagtaatcgtgataatgatgrcaatgcttactgggtaggtaccgcttactatgtgacacaccctacccttatcactatgttaatatgatcac

SEQ ID NO: 536008 - DNA, 537 bp, Homo sapiens
tggtctactggtaggttggtttgtaggttggctgactttagctactgaaccaagaaaaatatcttggggaatctactgattctgctacacattagtgttgttcattgtgaagcccctggctgggggaggggtcacacaaggaggtgctcatgtttgtgggaccctcacacagcgttcccaaatgaggccaccagggactgatctgtgctggtgtctgctctccttgctgttttcattggagtcaaaagttgtaaaatctttctctagttgctaaactaaaattgtggccatgtccaaaaccccatataaacccagacttgtcactttcctcagtgctagaatagaagcaagcaaaaaagaaaaagaagcaagaaagaaatattatctccaatatccccagccaccaactgaatttatgtggcaaccagcaatagcaattaaaagggagaaaatgacaagaaagccatttttcttattyacagctcgaactctaaacccagtatttcctctggttcttgatctactctttctaggtga

SEQ ID NO: 536009 - DNA, 537 bp, Homo sapiens
tggtctactggtaggttggtttgtaggttggctgactttagctactgaaccaagaaaaatatcttggggaatctactgattctgctacacattagtgttgttcattgtgaagcccctggctgggggaggggtcacacaaggaggtgctcatgtttgtgggaccctcacacagcgttcccaaatgaggccaccagggactgatctgtgctggtgtctgctctccttgctgttttcattggagtcaaaagttgtaaaatctttctctagttgctaaactaaaattgtggccatgtccaaaaccccatataaacccagacttgtcactttcctcagtgctagaatagaagcaagcaaaaaagaaaaagaagcaagaaagaaatattatctccaatatccccagccaccaactgaatttatgtggcaaccagcaatagcaattaaaagggagaaaatgacaagaaagccatttttcttatttacagctcgaactctaaacccagtatttcmtctggttcttgatctactctttctaggtga

SEQ ID NO: 536010 - DNA, 652 bp, Homo sapiens
tatcacagagcttttactgaagtgggagtatttactgcttcatccactgttagaaattaaaatgaaaatatttaaaatacacgaattggaaaagtcctactttccaatacgcattacaactgttactcattaaccatgaaaattatgacattgtgacatgtcatgagtctgaaaaattttagtttacactttttagaaaatatcagtaaataggagaaataggaaaaacattatgtgaactattaggcccccggtgtatttgttgaacttcagagatgctcagatcagaagctagaacaagaattttcaaaaatgcataaggttttaaagtgccaaataacaaatgggctcttgtatatgaaataatgtctgaagttgcacctctgagtcttttctctctttttcttttttaaaaagatataaatcaaacaaaatcaaamttttgtttataatgaaaagagttggttacagattcattctgtgtctcatggcactgtgctctctttttccctagagaggatctagacttttcatctgtttacatgggaagaagtagttcagtttatggtctcatttctcatataaactgtgaaaattctccacggcttcacatgctagttcagaagatattgatgccttgagaataaagcat

SEQ ID NO: 536011 - DNA, 586 bp, Homo sapiens
ctttctgtctcattatttcccgtttatattttctacttattcaattcttttgatgaatttggctacattcttgagcttgattttgcttttattacttatctatttagctgtacctaattatcctttggcttatcaacttagattttaattttatagatgaatttacatttcttccataagtatttaataattttaacttttgaacctatatttcctaattttattttctcaggttcttagggcattaagtcgacttttgattgtgtctgttagatttgacttataaataattctttccttgtgtgtcttctatttcagaattgggagctcatgttttgttgtgcatgatttgtgagaccttgtgtactttgaagatggtatattcttccagagaatatatccatctccttatgtatgaattrtcaccatcttggaactatttgtatgctgatttctctccctctgggttatcagatgatattagtagtgtaaattcaaactctaaactgtatgaacacaggcatgagctctcaggggagaatttttttcttcaccaaaatactaactttaggcaaacaagagatct

SEQ ID NO: 536012 - DNA, 488 bp, Homo sapiens
aatgactattttattccatgagaaaagaaaccagcgggaataaaaagggaaaatctgaaaacaatccctttctgcactggagtctgatgacattggagaacaatgtttgaagaaaagagagggaattacactagaaaggctgtttccatgccttgtttggcatgccactgaaagctcttctttgaactaagatgtgttccttatgatagcttgcatcgaagaggataatttcttcttaaaaccagacttattattttatttgcyttcattttatcacccatcaggcatattgaaaaatctcaaagagcagaattgcgttgcgactgtacccccgttacttgatagtatctaggttgagcttcattttcttatataatgtttgccttattttcaaataatattcagtcctgtttgtaataaggtttttgttatcttaaggaagaaggcgaaaggccgcatgcagaaaaagagaagggaagaacacgtgc

SEQ ID NO: 536013 - DNA, 579 bp, Homo sapiens
ggtcttcccatagcatagataacycctcataaacatattgatctaatctctttcttatggtcacaagtttcacaagaaagtctaaggtgtgagtagctacgcatgctttaccaaaaagcttgctatataaaggatgttctctggagggcaagggcaagggcacatcacctcttggctgcctgagacattgcttctgttcataagtccctattaaatgtattaaaagaaactgcatttatcagcctttttcttcatcttctcaacttcttagccttttgagggtaggtttgcatacacctgatcacagtggaacgtttaaagatccgcaggttggcttagacagacaacttagtttctagatcagctgcagtgactcagctgtacagtctcattcacaagcccaagctgactgggacagcagctatctgaaaaatgcttttctcatggtaaagactggaagtttttgcagggatgagtgaaaacactttctgcctcttcagatctgggtctgatttcaacatcaatgaggcatgcaatgtactcttatcatgaagctggaaacaggaataaatttttgct

SEQ ID NO: 536014 - DNA, 620 bp, Homo sapiens
actgtgaggtaaatgcaaagctcccagaaatcccagtgggggagcagaaagagttattattcagaaagagttactgggtcaccactgaacatggtccataatatttctcctcaaactcaaatgaaaattcaacttgttttatgtaagttatagaatatgttctagcacctatatgattatttctctctctctctctctctctccgtgtgtgtgtgtgtgtgtgtgtgtgtgtgtgtgtgtagttttatggaagaatggagacttcatgtaatttgaacacaagaacctcattatgttctgttttgcataacttaccctgtctcctcagtaggtcaggaatgaagttaagaaaagaagcaggatttcatgtcatgcatgtagaattccaagctcagtaactgctgtctttctgtttcttctgggaattcttatcaatctgatgggcttgtttatagtgctaaatcagagtcttaaaagcctctatatgctttactgaaacatggagtgcttctgaactttaaaatcaattgcatcgattcaattctagaacrtaagtgaagactaatggtttttatgttcattaacttctaatttacataagatagaagatgttaatatgg

SEQ ID NO: 536015 - DNA, 623 bp, Homo sapiens
tgttacttatgtgcattttgtcattacattccagatttaggttaagtaaacagaagaattagaaattatctctcagctaccagatctaaatatcttgtagaaattattgctgatgtcagatgatgccagtggtgtagtatgtctatttgtcattgtttttttaaatacaactataaaattccctgtcaatattttttcctgaaaacactaaatcagtttctaaggattgatctatgtaatttcatattggaaatcaccaaagaaaactcccccccaaaattaattgatggaaaaataataaagaacgtatttctaaacaaggcatgataaaatcaaaggcaccaagttataagacagagtarggtatgatgtgaactctatctccacatttttagcatgtgatttgtaagacgaggtgttgaaagaggtgaagctataagttagtaaggtcttgacatggagcatcttaaaggtctcatgaaaaaacatgatctttgacctggatatgatcaaagttgactactgaaggttggctttatttataacgttaaaatatgttcaattaatatgttaaaaatatataaatctgtctaaagacttagaggaaacagaagttgcccatt

SEQ ID NO: 536016 - DNA, 592 bp, Homo sapiens
tgatatccaaataattcatttacacgtctttctacttctatacaggacatcacagcttgtcaaatacaagaaatcttgaatcttaaaagwctcaatctgtgctctaaacttactgcccagaaggtttagagtgggctgttaaacttggcaacattttcgcttccattcaagccccaaaccttctgagatatatttgacactgagtttcatgcagcttaatttagttcaacttaaaaaaaaaaatctctaagtagggcaagagtttaagtgatgaatactatcgtgtgacaattagtatgttaagggtgaaaacttaccatacatattttctgctaaaggaagtgtcttattatgcaaagaacataagctttcatgtcagacagacatagattcaaattctggttctctgcctgccagttgtgtgacctcgggctggttactaactgatcttaaatttcctcatctaaaaatagccaattattttaccagattgtggggaccaaagagctattgaatataaagttttggggtatagcaggtgctccatcttctcatcaaatctagctgtatatgaggatgataaaataacaga

SEQ ID NO: 536017 - DNA, 438 bp, Homo sapiens
tgaaggcaaaatccagggcagatccatctgtgattccagcacctaaccctgggcctcacaggcagttgggctaatgagatgtttgttgaatcagtgaatgtcctcccrcacccgtctttccccttcttgactggcttcctcctctctccaccctgacaagtgccaagacgccagcacccaggtgagcacgccaggagaggccgctccatcaggaatttcctgagcaggggcagcctttttcttcctccactcagctttctccaggtagatgggacaaagcccaagacaagcgctgcctccatcacaggaatagtctggggcctggcccagccaagtctatgggccatgcatttttcctgtattttaccctcggtggctggagcgtgtggcgggatgaggaggttggcaggcttgcctcagtgccccaactgggggcct

SEQ ID NO: 536018 - DNA, 618 bp, Homo sapiens
gctaccacggtcattttatcttgctatttaatcatcaagattcttgaagtaatttatctycctggcaacattgtagcattgagaggaaaataactacagggcaattatgtttttcattagcatattccacaaattttctttcttcataaaataaaaatacagtagataatacttttcttgacagtgcctcaacagttaacttttcatgcaattctcacacttttacaaataaatgtctaaaattgaccattaacagttaatgaggcttaaaagtacctgctacaaattggcttgattttctccaaagaacatttaaaaatcaatgtatctacataatagctctctatattgtttgccatacatcctgctgcccatctggccttctcacaaatgaagggctgcccacaggacaccacagcggctgctctgtatggttatattactcattccaccaccatagtttcacttactttgtttcctcacatgatataccctatcttcttttcccctttatcaaaatcttagccaacctttaagactcaagttttactttcttcctgaaatcttggctattccaggtgttattaaattattacaactataaattcctataacata

SEQ ID NO: 536019 - DNA, 618 bp, Homo sapiens
gctaccacggtcattttatcttgctatttaatcatcaagattcttgaagtaatttatctccctggcaacattgtagcattgagaggaaaataactacagggcaattatgtttttcattagcatattccacaaattttctttcttcataaaataaaaatacagtagataatacttttcttgacagtgcctcaacagttaacttttcatgcaattctcacacttttacaaataaatgtctaaaattgaccattaacagttaatgaggcttaaaagtacctgctacaaattgscttgattttctccaaagaacatttaaaaatcaatgtatctacataatagctctctatattgtttgccatacatcctgctgcccatctggccttctcacaaatgaagggctgcccacaggacaccacagcggctgctctgtatggttatattactcattccaccaccatagtttcacttactttgtttcctcacatgatataccctatcttcttttcccctttatcaaaatcttagccaacctttaagactcaagttttactttcttcctgaaatcttggctattccaggtgttattaaattattacaactataaattcctataacata

SEQ ID NO: 536020 - DNA, 544 bp, Homo sapiens
aaaatgtgctggcagaaatgcctcaaggaatatttttttgctggtagcttcaaaattccccctttcaccagagggtgaaatttttgacttcccttccaatagcagaagagaacagagtggaattttccaaactggagaccttagggagctactgatacttttatgacrtataatataaaaacaattgtatctgtgcccagaaaccttttaaggcatgaattccagaatccaattttatttggttttggaaatttaataaatgggtgacacaacctagatcttgttctttaaataaaatttagagatttacaattaatagcggcaaaacaaaaatatcagcagtgctttacagggcggtggagtgtgttgtgtctcaccaaggagccaggcaacaagtgggcattgtgttaaagtttcagagaagggacacaggcatgtgtctgaatgacatcttattaaagtcaccaagcaaaggctactgagacagcatgcatataaccaatcaccatttttcctctttgctggagcctcatgaaaactgcac

SEQ ID NO: 536021 - DNA, 478 bp, Homo sapiens
tgaagtggtgtccagagtacagtggaaatgctggayatggttcatgaattgtgtccaaagaaaaggcagaacacattggtagattcggtgacagataaattagctctcttgtgatttcttctattttctcagtaagaatgcgacagacgggcatagttttggaggtttaagtagagatgagatgacataaaatagttgttctggagactaagagagtgacttgaccagaatttgcaataaaattgcagagtaacattgacagctcatctgagatttgtggtcattagtttagaatgagctcgagttgtttgcttgactattattattattattatttttgaggcagagtcttgatctgctgccaggatggagtgcaatggcacaatctcggctcactgcaacctctgcctcccaagctcaagtaattctcctgcctcagcctcctgagtagctgggattacaggcacacgccacagtg

SEQ ID NO: 536022 - DNA, 623 bp, Homo sapiens
tggcaggaggttcactagccatccttttcatcttaaataacaataccattgccttgtaaaacttctgctgaacttattccatcttctagtaattcttggaggaaaataatttacaagactaacctacctggcagcaccattctctaaaattctggaattccatctggactgtggccagcattaagggatcagagaaatttgggccaaacagaggacgatgtttcttagctaactctctaggctatgaagtacatttgagaaagtcttttaggagatttgaatcactcagttttcttcaaaatttaaaggattaaggaaaacaaacaaactaaaaaagcacaaccctacctagaygaagtaaagatgaaagatgcttgcttttcctccaccaaacacagttaactctctaccagttgcatgtagactgcacttatgtaattcccaaatacccctcagcataacacaatttcacctatcgctgttcttaagatcagacattgcaaacaaaacttagtggccacgtagctgaaacagaactaggaacacagagtttttgcaaaaatgtagtggataccactgataagtacactccctctataacatttcttcacatcacttccaga

SEQ ID NO: 536023 - DNA, 595 bp, Homo sapiens
atatctttattcacataactgccygacacatattttttaatccagaaataattagtgtggagtctgtgggcatatgagtatttcaagagctctctcaagttgattaactcactcatcataaggtaagtttatctgcatagatctttgagatgcaatgtgcttttcctctctggagactccttttgcactcttgaatatgttgaagttttctttgttataatagcccttgttctaataaagagaagctactcactcattggctcaggagaccctttattcacagtagccagtattgaacagaagatgcttatttggcaggagcccaattttaaaataataataataataataaaatcaagtcatatttcagcttccagattgcaaaagattgatatgactgagtcattatacttgattcttgactttaagatgtacaaataaagaaaaggtcctgggcatgtctaaaaagagaggttcttaacccaagtcttcatgattttagaactataattgtgagtcaagctttctgtatacaaaaagactgccctagccttgtgtattctttcaggaaggactgcccggctagaaagaaaaa

SEQ ID NO: 536024 - DNA, 508 bp, Homo sapiens
ttttcacaataactgttaagatgaaaatactacactcagtacaatttccagattacttttgtagtcctaacatgagagagtcatcaacagatccaaataatcttcctgtgtttattatttcaaatcttagctctcatattatttaattctatgtgatgtttaattcactttttaaacacaggatttaaaaagatttacttgattacaccttttattgcatcattacagataatgaactgccaaactagaacaaccggaatttttgtaaaattgaaactccagactttctycactggccatctccacaaaattcaataaagttcccataaaatgaaaacattgttcgttaaagccatttttcctgagctctgatcatatatttgataaatcattatttaaatatatattttccacctttgtgagatacacaaaaaacattaaactatcctcaaatactgaatttcatgtttcaattgaaatatataaaactattaaatatgaaagtcaa

SEQ ID NO: 536025 - DNA, 615 bp, Homo sapiens
ctggaagtattaggatgaaattctgcccgtgtgtttagtcagacagcacagttgcaagaaagccacacctgtttacttttctaagagcaaaaatattattaaatgtggttttgatttactgctatttaggctattaaatcattccttagtccttatgtgtctgtggtatcgagagataatcagctttaagtaacttaatagtatacatgtatgtctgtgtttctttctgtctaataatattgatcatgacatccacatattaaggcaatcttttgctacttatgcratttttgtggccacatagtcaaaacaccgatggaaagggtgaaaaagaaaaataataaatattagaatatgcatttgctttgaaaaattctaagtaatgttttcagatttttaatatttaagataatcctctaagccttactcattattcagtgtcttggaatttttgacaatatacagcagataaatgattttaaatagcttcacttaagtactttaataaataacattgttttatggtattcttaataaatagtaaatatgcaaaaaaggaaagtttaaagattaagggataatattaatgtagaataatccttcaattatggccat

SEQ ID NO: 536026 - DNA, 625 bp, Homo sapiens
ccactgcactccagcctgggcaacacagtgagactctgtctcaaaaataaataaataaataaataagataacataagataaaataaggctgggtrtggtggctcacaccagtaatcctttcactttgggaagccaaagtgggttgatcacttgagcccaggagttcaaaaccagcctgggcaacatagtgagaccctgtctctacaaaaaataaaaatatatatatataataataaaaaaagcatttagccaggcgtggtggtaggcctgtattccctagctacttgggaggctcaggtcagagaaggacttgatcccgggaaattgaggctgcaatgagccatgattgggccactgaactccagtcttactgacagagaaagaccctgtctcaaaaaacaaacaaacaaacaaacaaacaaaaccaaaaagataacttgaaatagtgagactctgaagaaagcgagtctgcaaaaatggatgaacagtgttggtacaggaaatgagagtgcaataatttttacagagggtcaaggaagcttctccacagaggtagattgaagctaaaacccaagtgtttaaaaacaaaaccaaaaataccccagcaaggtgttgatgggagtga

SEQ ID NO: 536027 - DNA, 618 bp, Homo sapiens
tctgatcttgtagtttccccatcatatctcctcaactctcyctatcagccatcatcatcattccgaaccccactgccacatttctttgctttcttttttatgtagttgtatacatcttcatgctttcctacatggttttgtttttaattatttttaattttacacagattgtatttgtttgtataaaatcttttagatcctatttttttgttaatattatattactaagatctgtccattctggttttcatactagtatatgtgaacacactacagttaataagcccaatgtctattttacagatcttgggttatttattttttttcttgcacaatagcccatgttcaatatttgtcagtgtttttcctggatacataaaaagggactgaaattagtggtgtctaaaacacatgactgctcaactaaataaaaatgaaagaaagctacaaaaggaccaaaggtgaaaacatcattatccaaatattaaaataactactactgcatgcacccaacttccatacaatttctgatttaacaagtagctttcacttcctcttctaaaattaagatcttgtttaactccatgaaatatttacttgtctagaggaaaaggcaaa

SEQ ID NO: 536028 - DNA, 618 bp, Homo sapiens
tctgatcttgtagtttccccatcatatctcctcaactctccctatcagccatcatcatcattccgaaccccactgccacatttctttgctttcttttttatgtagttgtatacatcttcatgctttcctacatggttttgtttttaattatttttaattttacacagattgtatttgtttgtataaaatcttttagatcctatttttttgttaatattatattactaagatctgtccattctggttttcatactagtatatgtgaacacactacagttaataagcccaatgtctattttacagatcttgggttatttattwtttttcttgcacaatagcccatgttcaatatttgtcagtgtttttcctggatacataaaaagggactgaaattagtggtgtctaaaacacatgactgctcaactaaataaaaatgaaagaaagctacaaaaggaccaaaggtgaaaacatcattatccaaatattaaaataactactactgcatgcacccaacttccatacaatttctgatttaacaagtagctttcacttcctcttctaaaattaagatcttgtttaactccatgaaatatttacttgtctagaggaaaaggcaaa

SEQ ID NO: 536029 - DNA, 618 bp, Homo sapiens
tctgatcttgtagtttccccatcatatctcctcaactctccctatcagccatcatcatcattccgaaccccactgccacatttctttgctttcttttttatgtagttgtatacatcttcatgctttcctacatggttttgtttttaattatttttaattttacacagattgtatttgtttgtataaaatcttttagatcctatttttttgttaatattatattactaagatctgtccattctggttttcatactagtatatgtgaacacactacagttaataagcccaatgtctattttacagatcttgggttatttattttttttcttgcacaatagcccatgytcaatatttgtcagtgtttttcctggatacataaaaagggactgaaattagtggtgtctaaaacacatgactgctcaactaaataaaaatgaaagaaagctacaaaaggaccaaaggtgaaaacatcattatccaaatattaaaataactactactgcatgcacccaacttccatacaatttctgatttaacaagtagctttcacttcctcttctaaaattaagatcttgtttaactccatgaaatatttacttgtctagaggaaaaggcaaa

SEQ ID NO: 536030 - DNA, 669 bp, Homo sapiens
gtttatagaacttgactgattataaatgggagataaaggaaagagagaagctgactgtaaagtcaagatgactgagagagtaatgatgccatctgttgagacaggaaacaggggaagtattaatttatctggaaggtggagttatgcttgatttttgacacattatatctgatgtatcattagaacatacatgtctagtacacagttgggaattcttgcttagacctcagaaacaactcagaactagagcagtygatgagaaaatcatcaacatttagatggaaatatatagcgatggcatgaacaaaactgctcgaggagagtgagattgaggagagacatccacattcaataaggaaacttcagagagggagactcaggagtctgtgagagaggggcaatggaagtgctaagggcccaggccaggtgcagagactggccttgagtaggaggatagtctccctttgaactgtatgagatggggagtggggttacatgggaatagcacagccagtgtcttttctcctctctgaacaaagtaggagtcaagggcatctttagaggtgacggtctggaggcaggaatgccaccttgataagaatataattggaagttctgctgtgggaagtgattcagggaagggagaacataactaggactgagttacag

SEQ ID NO: 536031 - DNA, 654 bp, Homo sapiens
attaaaaaattcactgttgtaagcatggcaggactgtgtatattacacgtacattatatattacttggtcttgacttttaaggagcttatagtttagtggaatttattcaaggatcctggaaatattgtttcaagcttggacaattgaatrtcctttcctagaactttggaacttgagcaagtgggacaggaccaatgagtggcagtcctttgaagttcttcataacctagagcctcttctatctacaggatggactaaagttcctgcctctttgcttcctggagcttggttggtttccatctatttccaaacctggttttccaggcttttattgattctgtgtgccattgaaatcctttgaaatcattcccctttcttatattagtcagagttgatttctttggcttgccttccttatgtgctcatatttcagctttcttatctttggtttttccacatcccaggagggtgagtctcctgcctgttccatggagcaggaggctgggtctacagtgcagtttggttagctgcagtggtacctggggagctcccaccccagctcagaagaggcaggggtcccacttgtacctggctcctgcctgctaggaggagcaggagacctgggtctgcagccggggattgggtggctgcag

SEQ ID NO: 536032 - DNA, 654 bp, Homo sapiens
attaaaaaattcactgttgtaagcatggcaggactgtgtatattacacgtacattatatattacttggtcttgacttttaaggagcttatagtttagtggaatttattcaaggatcctggaaatattgtttcaagcttggacaattgaatgtcctttcctagaactttggaacttgagcaagtgggacaggaccaatgagtggcagtcctttgaagttcttcawaacctagagcctcttctatctacaggatggactaaagttcctgcctctttgcttcctggagcttggttggtttccatctatttccaaacctggttttccaggcttttattgattctgtgtgccattgaaatcctttgaaatcattcccctttcttatattagtcagagttgatttctttggcttgccttccttatgtgctcatatttcagctttcttatctttggtttttccacatcccaggagggtgagtctcctgcctgttccatggagcaggaggctgggtctacagtgcagtttggttagctgcagtggtacctggggagctcccaccccagctcagaagaggcaggggtcccacttgtacctggctcctgcctgctaggaggagcaggagacctgggtctgcagccggggattgggtggctgcag

SEQ ID NO: 536033 - DNA, 654 bp, Homo sapiens
attaaaaaattcactgttgtaagcatggcaggactgtgtatattacacgtacattatatattacttggtcttgacttttaaggagcttatagtttagtggaatttattcaaggatcctggaaatattgtttcaagcttggacaattgaatgtcctttcctagaactttggaacttgagcaagtgggacaggaccaatgagtggcagtcctttgaagttcttcataacctagagcctcttctatctacaggatggactaaagttcctgcctctttgcttcctggagcttggttggtttccatctatttccaaacctggttttccaggcttttattgattctgtgtgccattgaaatcctttgaaatcattcccctttcttatattagtcagagttgatttctttggcttgccttccttatgtgctcatatttcagctttcttatctttggtttttccacatcccaggagggtgagkctcctgcctgttccatggagcaggaggctgggtctacagtgcagtttggttagctgcagtggtacctggggagctcccaccccagctcagaagaggcaggggtcccacttgtacctggctcctgcctgctaggaggagcaggagacctgggtctgcagccggggattgggtggctgcag

SEQ ID NO: 536034 - DNA, 654 bp, Homo sapiens
attaaaaaattcactgttgtaagcatggcaggactgtgtatattacacgtacattatatattacttggtcttgacttttaaggagcttatagtttagtggaatttattcaaggatcctggaaatattgtttcaagcttggacaattgaatgtcctttcctagaactttggaacttgagcaagtgggacaggaccaatgagtggcagtcctttgaagttcttcataacctagagcctcttctatctacaggatggactaaagttcctgcctctttgcttcctggagcttggttggtttccatctatttccaaacctggttttccaggcttttattgattctgtgtgccattgaaatcctttgaaatcattcccctttcttatattagtcagagttgatttctttggcttgccttccttatgtgctcatatttcagctttcttatctttggtttttccacatcccaggagggtgagtctcctgcctgttccatggagcaggaggctgggtctacagtgcagtttggttagctgcagtggtacctggggagctcccaccccagctcagaagaggcaggggtcccacttgtaccyggctcctgcctgctaggaggagcaggagacctgggtctgcagccggggattgggtggctgcag

SEQ ID NO: 536035 - DNA, 625 bp, Homo sapiens
ctagaatataaagcatgcagaaacatgtgaaaatatgagactggcctagcctcccaggctacatctttctcctgtgctggatgcttcctgttccccaaacaytggactccaagttcttcagttttggaactcggactggctctccttgctcctcagcttgcagacgacctgttgtgggaccttttgatcatgtgagttaatacttaataaaatcccctttatatatgtatatatctatcctattagttctatccctctagagaactctgactaataccataggctcagatgggtggatttaaaaggcttgttagaaaatactccgtattctctaggtaactcagtagtcagcagaatgattctgtaagtatcaaacactaggaaggatagtgtgatggcctctgaggcagtcactgaggtctctaaattagtttgggagcagaaggcaaagataaagaaaaataattagatctataagcaaatttaagactctcattataaagtattaacctgataatagcttataatgagaggttataaggtattatcttatttgtactttctttaaacagaaagtgatagaagattgattttagatttggtataaaattttatcttaaatcca

SEQ ID NO: 536036 - DNA, 565 bp, Homo sapiens
aactatgcagccacaaatagaaaggagatccttgtgtatatggcaggaagagaattcccagttttcatcataactaaaaaaattctgtgactcgtgagttcagccagaaaggtgaggtgacttttctgtctctccataagtcagtccccaataaactctctccatacctgctgtattagtcagggttctccagagggacagaactaataggatacatgtatatatgaaagggagtttattaaggggaattgacacacgcgatcacaaggtgaagtcccacgataggccgtctgcaagttgaggagcaaggaagccagtagtggatcagtccragtcccaaaacctcaaaagtagagaagctgacagtgcagccttcagtctcgggctgagggcccgagagcctctggcaaaccactggtgtaagtccaagagtccaaaagccgaagaacatggagcctgatatttgaaggcaggaagcattcagcatgggagaaagatgaaggccagaagacttggcacctctgctcattccaccttcttctgcctgctttttctagctgcactg

SEQ ID NO: 536037 - DNA, 578 bp, Homo sapiens
atatccaagctacaacaggaatatttaagcacaatcctgggagagcttcaacaagcttaagaaagctctgacccaaataatttagtttggttttaactaattgtgtagggtgtgtgtgcatgtgtattgaggtgggggggtagaaaaagagagcaaggagcgactgagaatggagcactgtaaaattttcttcaaaccaacatcctgaataaggatgaatgaagaacagcataattgactgatgaaacggttttatttaattcagctagacacacataacccatgcttttgaatttttgttttaaaaagcttgtgattctcaattcattgatttttaatttacaatatcagaaagaaagaatcatgttatagaattgaattgaagatctcgttgggaaaatcctgtcttggcaacctaagctaagaaagagggtgtgatgctggggcagtgcattttgttgttgytgttgttacaaaagagaaaattgttcttccagctatagcaatagtgcctaacagcaactgcttcctgtgaaattgttccaagcacatttccataaagaagggttctattctac

SEQ ID NO: 536038 - DNA, 506 bp, Homo sapiens
ctgaaataggcatattgggagtatgagtcatctacccatacaaattacttaggccttcaggatctcttcaaatctaatcttgtgtataccacttgctctgaattatgaaatgctgttgtatgtccaagtttatgtcttagtgaatcaaattacacctgtctcatgatgattagctcaggtcatattagtacttgatgtggagccaagatcagcaagttaggagctgtttctcaaagagaaaacgatgacttgccaaagtaaacaaactgtgttccaaaaccctttgggtctgcattgagtttcttcttgctacaggaggtttattccaggatccatcctgcatcccarcatgccatgggcacatttcatatttatgagtctactgggtcataagatccaagtgtcagagcaacttgtttgcagctttcatttgctccaggccccgttataaaattttttgttcctagccttacaacatgggctccactagtatagagatctttaac

SEQ ID NO: 536039 - DNA, 506 bp, Homo sapiens
ctgaaataggcatattgggagtatgagtcatctacccatacaaattacttaggccttcaggatctcttcaaatctaatcttgtgtataccacttgctctgaattatgaaatgctgttgtatgtccaagtttatgtcttagtgaatcaaattacacctgtctcatgatgattagctcaggtcatattagtacttgatgtggagccaagatcagcaagttaggagctgtttctcaaagagaaaacgatgacttgccaaagtaaacaaactgtgttccaaaaccctttgggtctgcattgagtttcttcttgctacaggaggtttattccaggatccatcctgcatcccaacatgccatgggcacatttcatatttatgagtctactgggtcataagatccaagtgtcagagcaacttgtttgcagctttcatttgctccagkccccgttataaaattttttgttcctagccttacaacatgggctccactagtatagagatctttaac

SEQ ID NO: 536040 - DNA, 584 bp, Homo sapiens
  misc_feature (1)...(584): n = A,T,C or G
ttcagtcatactatttgagaaggtgctcatctctctctcttaaatgtgaagctcagtgctagctagacaggtaggctcaaagccccattacatctcttggcctttcccctagcgccaccagcaaatttctaatttccatacatgctatgtgcttcaactgtaaatagttttcttttacaaactcagatacckcttggcaggttaacactgttcaacataccactctggacaaccccagcctctgcaccctctctactttcttattatttttattaatttttattttatgagatggagtcttgctctgtcacccaggctggggtgcagtggcactatctcggctcactgcaaccaccgcctcccaggttcaagcaattctcctgcntcagtctcccgagtagctgggattacagccatgcaccactatgcgtggctaatttttgtatttttagtagaaatgcggtttcgccatgttgcccaggctggtctcaacatcaagtgatccacccccctccgcctcccaaaaggctgggattacaggagtgtgccaccacacctggtccactgctttcaaaataactata

SEQ ID NO: 536041 - DNA, 631 bp, Homo sapiens
ccatgtctatgtgagccactggcctgggagagggactcatgcccagctcatagggattgcctgaatcaagtgggctctgggtggggaggctctctgcaggctgcaaagtagatgtgattcaagggaacatcgtatatggctctgttcctcctgtcccaggaaaatgtgtgagcaaggccagcctctggccctggcttgccactgactgactgcccaaggttacgtgtccttgggcaagtcacttcttcttctggtccagagttgtctacagaaggtagatgattatctgtaaggccagtttttagctcactaaggtgttagcaactgattccagggaatttcagacattcctgggagcagttgytcaacctaaaagaatgaatcatggatggtggaattttaggcatccatgaagatgatgttgggtggagtttttgtgtggtcacaccaagtggaaaaatgtccactgcacgtaggagaccaagtggggagaggggcagcctgggcacggtacccctacttcgcacctccaggacctctgccatgagagggctacagagatcccgctcaggggcaagaggttggccacatttgagagctgggtcactggaagggctccaggcagaggaag

SEQ ID NO: 536042 - DNA, 619 bp, Homo sapiens
atactaaagtttctttatttaaattcttatgtttttcaaaatccgtaaaaagaaactgtctttgtagatgacaatttcaacttataaaagacgaattcctacatgtaaggtgacaatataattaagagtgtcaaatatttgtaattgaaacagtgctttccaaataacatacctcatactacagtaataaaaacatacagagtatgaaaactcgcattttctttgcatcttcattaattttattttgaaagtgaaacagtgccaagtggggtggctcatgcrtgtaatcccagcactttgggaggctgaggtgggcggatcacaaggtcaggggtttgagaccagcctgaccaacatggtgaaaccccatttctactaaaaatacaaaaattagccaggtgtggtggcacgcacctgtagtcccagctactcgggacgctgaggcaggagaatcgcttgaacccggaaggcggaggttgcagtgagcctagactgcaccattgcattccagcctgggtgacagagcaagactccgtctcaaaaaaaaaaaaaaaaaaaaaagtgaaacagtttctctggtgcttattgtccagcagtcacagaccaaatctactctgat

SEQ ID NO: 536043 - DNA, 619 bp, Homo sapiens
atactaaagtttctttatttaaattcttatgtttttcaaaatccgtaaaaagaaactgtctttgtagatgacaatttcaacttataaaagacgaattcctacatgtaaggtgacaatataattaagagtgtcaaatatttgtaattgaaacagtgctttccaaataacatacctcatactacagtaataaaaacatacagagtatgaaaactcgcattttctttgcatcttcattaattttattttgaaagtgaaacagtgccaagtggggtggctcatgcgtgtaatcccagcactttgggaggctgaggtgggcggatcacaaggtcaggggtttgagaccagcctgaccaacatggtgaaaccccatttctactaaaaatacaaaaattagccaggtgtggtggcacgcacctgtagtcccagctactcgggacgctgaggcaggagaatcgcttgaacccggaaggcggaggttgcagtgagcctagactgcaccattgcattccagcctgggtgacagagcaagactccgtctyaaaaaaaaaaaaaaaaaaaaaagtgaaacagtttctctggtgcttattgtccagcagtcacagaccaaatctactctgat

SEQ ID NO: 536044 - DNA, 641 bp, Homo sapiens
ctgtggttagttagcatgtacttcttcccattgttgatatacagggaagaagattgacatctatcatgctctaaatacatagagttagataaggattttttaatttatttgtcttcagtatttgtagtgtgttttctcaggwctcaagaaaacgaaagaatattttagtgcagtgagatttctccagtatgaaatctctcctacatattaagcaatatgtgaattctgcaagggtgaacatcttctattctatccctgtatattatttcatcatggtctcagagaagaaacttttgcattgataaaatatgcacttattaactttgcgtgtcatgagaggtattcggatgtctttctgttcagagactgtatttactgagtagcatgaacatcttcaatttactaggtcgtttttgagtgataggaatcctttgtacgcaaattctttatgagatacgtgttttctgaatattttctccttgagagaatttacctattcattttcataatggtatattttgctgagaagaagcttttaagacgaatataaagtttttgcttttatgcttttttactttctgtgtcctgtaagaagtctttgacttctcccaggtcatgaaaatagtatcctatgctttatt

SEQ ID NO: 536045 - DNA, 296 bp, Homo sapiens
ttgggattcaaacacaggtctctcccatttcaaggcctctactagttacatttaatamcatctcatcttcccaatgagactgccacttcaaaatatttattaaacatccagttcaatgttttttggacttaaaaagagaattagacagatagatccttcccctccaatgaactgaagatactttagacttagcgataaactatagtaacaaatagaatacggaagccaccatcttttccactgaaaaaaagaaggtggggggcagtagcccaaaactatcttggatttctacagtt

SEQ ID NO: 536046 - DNA, 639 bp, Homo sapiens
taggctgaggcatatctgcctcaactgagatacagacaatcccagcactttgggagccgagacgggcagatcacgaggtcaggagatcgagaccatcctggctaacacggtgaaaccccgtctctactaaaaagacaaaaaattagccaggcatgttggtgggcacctgtagtcccagctactcaggaggctgaggcaggagaattgtgtgaacccaggaggcggagcttgcagtgagctgagatcatgccactgcactccagcctgggkgacacagcgagactccgtctcaaaaaaaaaaaaaaaaaaattaaatgaagattgtgacaagccaataagatttacattggtttcccatctcaacagaagactaatataataaatgattccctaagtctggatattctatcttatttacatcccaatatgtattgtaacactacaaaaatacataaagtctttctaggagaggcattagtacctcaaaaggaaatctattagtgtcagaaaaattggagtctcagtgaaaataacccattgttttccagttctgtcttataagaacccaaataattactggttttgaacaacattttatatctctggaccctaagtgaaatactagagaagatgatctct

SEQ ID NO: 536047 - DNA, 639 bp, Homo sapiens
taggctgaggcatatctgcctcaactgagatacagacaatcccagcactttgggagccgagacgggcagatcacgaggtcaggagatcgagaccatcctggctaacacggtgaaaccccgtctctactaaaaagacaaaaaattagccaggcatgttggtgggcacctgtagtcccagctactcaggaggctgaggcaggagaattgtgtgaacccaggaggcggagcttgcagtgagctgagatcatgccactgcactccagcctgggggacacagcgagactccgtctcaaaaaaaaaaaaaaaaaaattaaatgaagattgtgacaagccaataagatttacattggtttcccatctcaacagaagactaatataataaatgattccctaagtctggatattctatcttatttacatcccaatatgtattgtaacactacaaaaatacataaagtctttctaggagaggcattagtacctcaaaaggaaatctattagtgtcagaaaaattggagtctcagtgaaaataacccattgttttccagttctgtcttataagaacccaaataattactggttttgaacaacattttatatctctggaccctaartgaaatactagagaagatgatctct

SEQ ID NO: 536048 - DNA, 473 bp, Homo sapiens
agatgtggtagttcttgtagcatgtgggaaataacttctctgttttctcaatacaagggcaaacatatttctataagggctagtggtaatttgagatctgaggcatgagtagggcatatgcagtaagaggagaaagaaagtaaatcaaatgtagtctaatgcttggtagcattaatggtccatgtggcatgactgctyatgaatttagagtcaggtcaatcagtattgctgtatgttcccaccctcttatttcagaataattttggtttttccaagcaagtacaagaaaatgggagagagaaaagtaaacaatagaatagaggagtatgattataatgaataaccatgaaatttaagctggaatagtaaggtaaattaagaactggagggaaggaaggataatgataggaaccatgataggtagggcttagagaaagagaaggattgctgttctgggatttcaaaagggcatg

SEQ ID NO: 536049 - DNA, 490 bp, Homo sapiens
gccaggctggcctcaaactcctgaccttgtgatctgcctgcctcagcctcccaaagtgctgggattacaagcgtgagccaccgctcccagccaattgttcctttcttttcctgagtgagccttcacagaagggcaatacttatcatggctgctttcaatggcagacattccctgggaaatattgactacttaataaagaaatagatgccagcgctttcaaaatctcagtcatactaaggtttctcaccactgaccgacagtagagtgagctggtaagaggatcagctctctgctctgtcacgtcctacccctgctctgtgaccttcaacaggtcgtttaaatgtagtttctccaactgtaaagtggraacaataataagagtacctggctcatgggactatttgatgatactgagataacgcatgcaaaatatgaacacagagcctgacacatagcaaacatggcatagatgccagccagtgtattatcc

SEQ ID NO: 536050 - DNA, 549 bp, Homo sapiens
accgcatttttctctggactgattctctttcttcctattgagggtgatggaaaaaagaacttgatatttgtgatgcctcaggcctggcattaggaatttatatgaagtccttaaggtaccatctctttcttgctaaaaaaggatggaggaacagcagtgagaagcagagagtcakaaggtggatgagtgctttgtacccaggccatccccagggcagtattaggatgaggcaaataaaatagaactggcaggattttctgtcagccttttcaagaagtacaatttgcaggccccctgcttccaaaatgttaagaggagagaaggaaagaggagtgggcaggcaaccttgaaaagagccgacagcaggatgttttccgccaacacaggcgcctcctaaggagcctgtgtggaggatccccaggaaactaccccttgaccggggaagccaccgtgggaagctttgtggtgaacaacatctggtcccatgaaccaaagacttaaaacgttatcacaactcttagcttctatggaattctcgtagcacaaatt

SEQ ID NO: 536051 - DNA, 549 bp, Homo sapiens
accgcatttttctctggactgattctctttcttcctattgagggtgatggaaaaaagaacttgatatttgtgatgcctcaggcctggcattaggaatttatatgaagtccttaaggtaccatctctttcttgctaaaaaaggatggaggaacagcagtgagaagcagagagtcataaggtggatgagtgctttgtacccaggccatccccagggcagtattaggatgaggcaaataaaatagaactggcaggattttctgtcagccttttcaagaagtacaatttgcaggccccctgcttccaaaatgttaagaggagagaaggaaagaggagtgggcaggcaaccttgaaaagagcygacagcaggatgttttccgccaacacaggcgcctcctaaggagcctgtgtggaggatccccaggaaactaccccttgaccggggaagccaccgtgggaagctttgtggtgaacaacatctggtcccatgaaccaaagacttaaaacgttatcacaactcttagcttctatggaattctcgtagcacaaatt

SEQ ID NO: 536052 - DNA, 586 bp, Homo sapiens
agaacagggtgtgcattccagttcattcaaccacttctttgacatgtaatttctcacaagtcggttaatccttctaagcttcagtttcctcaactgtaaaatgatgatattagtctgacttgcagaatttgtataaggaatagagayggtacacatggagcactcaccttgtatatggcaggtgttcagtaaatgttgggtattattattattactattgatccaatgaactgatgtttgtgtatttgatgtactatagaaccatagtgctgagtaatttctgttctttacagttatacagctctgctgaatttgggagaagatggcagcttatccaagaaggggttgtaccaaacaggttctactggtaagtctcactttatcttgtagcacattaagatatgacctagtcagatatgacctagtaaatgcccattggaatcttgttctcaccagtgctctcacataaggtctgttcttattgggacatgcccacatcccctcagggcaggatgtgacattagagtaagaaacactttaagagaatgttaaaaaatgtgtcacagtcttcttgaaaaacctcaaa

SEQ ID NO: 536053 - DNA, 520 bp, Homo sapiens
caatagaaacaatgaaaaatattgaaaggatgggcaagagaaaggaactgagatgagaacayttcccatgtaaatggtacatatatacagtgttttctatgtcaccagaggtcttatttatgcattattataacctgaacagacctcaccactgcttccgccagtgctaattgcaatattttctttcctattccttgaagaaggaatcttctatgtgaaagcttgatcagcaaagctcttctaatcaaaagccataaaattatttttataaaagccattacacattattgtatgtgaattctgattgatgtgttaagtaaaataaataaaacctccttcttttgtttttgaatacagacatatcttgcccattcacgtcttagtagtgcaacaagcactacttaaacttaagctatttaatcctcataacaaccttctgaagtaagcttctcattatcatcattaacagatagggaacctatggcatagagaaggtaagtaatttggctaaagttaccca

SEQ ID NO: 536054 - DNA, 633 bp, Homo sapiens
catgagggacaaatcttttctcaagtcctactttcaaatgactgcaaatatctgtacatggtgcccagaactagagggtaggaagtagggcttggcagaagttggttcctaccaatagaaacaatgaaaaatattgaaaggatgggcaagagaaaggaactgagatgagaacacttcccatgtaaatggtacatatatacagtgttttctatgtcaccagaggtcttatttatgcattattataacctgaacagacctcaccactgcttccgccagtgctaattgcaatattttctttcctattccttgaagaaggaatcttctatgtgaaagcttgatcagcaaagctcttctaatcaaaagccataaaattatttttataaaagccattacacattattgtatgtgaattctgattgatstgttaagtaaaataaataaaacctccttcttttgtttttgaatacagacatatcttgcccattcacgtcttagtagtgcaacaagcactacttaaacttaagctatttaatcctcataacaaccttctgaagtaagcttctcattatcatcattaacagatagggaacctatggcatagagaaggtaagtaatttggctaaagttacccag

SEQ ID NO: 536055 - DNA, 512 bp, Homo sapiens
gagaagaactcagaaagcccttttctttgagaatggactttgttcgctcttcttttacactttccctaattctctgaggcagtctcttctaattctgagcccctgccctctgagtagaatcctgtatggtttggataaggagcagggagaagtggcagagaatcttcccagagatcccttcccaaggtctactgaggcgtttytagtgcctgcactaggagtgctagataagaaaatttttattaccttgagaggcgtggtatttcttcttctttttttattgttaatgatctccacatgaatgctgcttgctaacgcttttgcacctcctccgcattttttttttttttttttttttttttttttttttttgagacggagtctcaccctgtcgcccaggctggagtgcagtggcactatctcggctcactgcaacctctgcctcacagtttcacgccattctcccgcctcagcctccctagtagctgggactacggcgcccgccaccacgc

SEQ ID NO: 536056 - DNA, 419 bp, Homo sapiens
gtcagcaagatacctgatgtgtaaaatgtctagtgaaaatgtgttttatttttaagggtataagagggaggagagaaagaactgcctggatgttctctggaggtctatgtggagtattgtttgtctgttttgaaggactcagtgagcaggtgaaatggggaggggagggagaggctgttcaaggcaatgacctgctggtgggaggaagagattgctaaatccagctcagaggacctccacagatcacagaactgttttacttctagacctttctgaattgctcagctaaaccgacaaaaatgggtctcttgttttaattacccagctcattgctccagtttcccrttttgctttgtcagcaagaacctttcccatatacatacaagcaccgcccacattcgcatgcaagagccatctgt

SEQ ID NO: 536057 - DNA, 631 bp, Homo sapiens
ctgtttgtggtgggcactttcagatgcaaatgtaatgttggtcgctcattgctaatctcacttgctattctagttgctcctctgtccaggagagaattggctggaacaccaatactacccccacaacatgcagtgtcacgtctctgcgcctactgcacttaaaaaaaataaagaaaagaaaaaagtcttgatagcatttccccctcccacagggccaattagctatggactttcttttggcttgatactattcagtgaaaaccaaccacatggaacccccaacccctcccctccctgaagttttctaagaaattcacaatgcacaaaccaagggagcgtctttcctagggtgagtttttctctctcaatctgtggacgaaaatattactgcagcatttatgcttctgagccttagcttttccctccctctkgcacagaagacaattgcattcgtcctcctgagcttggaggagaagaaaatgttcgccctagttatgtttggaaattctctccttgagtccttgagctggatttggttctgatcatggacagatttgcaatgtgagtttgagtggtcttcagggctgtcagcaaaataatatcactcctttgtgaaacagtgacaggctat

SEQ ID NO: 536058 - DNA, 521 bp, Homo sapiens
cgtctttcctagggtgagtttttctctctcaatctgtggacgaaaatattactgcagcatttatgcttctgagccttagcttttccctccctcttgcacagaagacaattgcattcgtcctcctgagcttggaggagaagaaaatgttcgccctagttatgtttggaaattctctccttgagtccttgagctggatttggttctgatcatggacagatttgcaatgtgagwttgagtggtcttcagggctgtcagcaaaataatatcactcctttgtgaaacagtgacaggctatacaaagagtgtggcctattttatctcctcatgctggctgccaactttctaaaaaaaaatttaaatattttcccatagaatatatgctaattgaaaaaatacatgtaacataaataagccaaataaaggagcagaaaggatcaaacctaattcccctacttaacgtaaccactattcacacttgatgtgtctatctcgtctcttatttacatgtgatttttcttttt

SEQ ID NO: 536059 - DNA, 438 bp, Homo sapiens
aaaaagtattgtcgagttcattgtatggcctaccaattcaaagttaaattttctggtaccataaatccaatgtctccatttactgtagagaggcttcttctctctggatgaaatgtgtgtttcatcttgcacagaaatacttatttgcagggggtggggacagacttttactcaccaatcaggtatgtttgtattgtttgttacatacagaagaaagggcttatgagtctcatttagagacatacaaacacacacacatacacacacacatatatacacacacacacatttatccactaattagagctttgtaaagartgagtatgttaaaataagctaaaccattttcttgaccattatagtgatcaaaccaatcatgtgtgcagagaatgtttctgtcattagatcaaagtttaatgttttttctttggggtaagt

SEQ ID NO: 536060 - DNA, 604 bp, Homo sapiens
caaaccaatcatgtgtgcagagaatgtttctgtcattagatcaaagtttaatgttttttctttggggtaagtgtggagagggaccaaaatttgacttttataaaaatcygatggccttagattttgtaaaagtcaaatttgttgtgcatgaacagcccggaacaggatacataagtatggaaaataaattcacaaaaggacaaaaaagacaagtggattcactcctgctaatgcctccagatggtgctgagcacagagcacagccctgtccttgacatatcttgcatatgtatgtctcatgtttcagagcgcttatgaatagccctcctgtgttcttgaaaacttctgtgtagtaaagtaattcctaagacctttacatcaaaaagggagttggagccatttcctttaagctgggcctctcttcgctatttgcagttacttttacttgttctcttcaccaatgccaaagagaacacttacgtgctgaagatcagtgacaggttgagagagtatctctacaatccctggggatatgttgtacctcaaagagactccttttccagctgctcttccaaattggtaaccagatctgagcaccaccact

SEQ ID NO: 536061 - DNA, 604 bp, Homo sapiens
caaaccaatcatgtgtgcagagaatgtttctgtcattagatcaaagtttaatgttttttctttggggtaagtgtggagagggaccaaaatttgacttttataaaaatccgatggccttagattttgtaaaagtcaaatttgttgtgcatgaacagcccggaacaggatacataagtatggaaaataaattcacaaaaggacaaaaaagacaagtggattcactcctgctaatgcctccagatggtgctgagcacagagcacagccctgtccttgacatatcttgcatatgtatgtctcatgtttcagagcgcttatgaatagccctcckgtgttcttgaaaacttctgtgtagtaaagtaattcctaagacctttacatcaaaaagggagttggagccatttcctttaagctgggcctctcttcgctatttgcagttacttttacttgttctcttcaccaatgccaaagagaacacttacgtgctgaagatcagtgacaggttgagagagtatctctacaatccctggggatatgttgtacctcaaagagactccttttccagctgctcttccaaattggtaaccagatctgagcaccaccact

SEQ ID NO: 536062 - DNA, 604 bp, Homo sapiens
caaaccaatcatgtgtgcagagaatgtttctgtcattagatcaaagtttaatgttttttctttggggtaagtgtggagagggaccaaaatttgacttttataaaaatccgatggccttagattttgtaaaagtcaaatttgttgtgcatgaacagcccggaacaggatacataagtatggaaaataaattcacaaaaggacaaaaaagacaagtggattcactcctgctaatgcctccagatggtgctgagcacagagcacagccctgtccttgacatatcttgcatatgtatgtctcatgtttcagagcgcttatgaatagccctcctgtgttcttgaaaacttctgtgtagtaaagtaattcctaagacctttacatcaaaaagggagttggagccatttcctytaagctgggcctctcttcgctatttgcagttacttttacttgttctcttcaccaatgccaaagagaacacttacgtgctgaagatcagtgacaggttgagagagtatctctacaatccctggggatatgttgtacctcaaagagactccttttccagctgctcttccaaattggtaaccagatctgagcaccaccact

SEQ ID NO: 536063 - DNA, 604 bp, Homo sapiens
caaaccaatcatgtgtgcagagaatgtttctgtcattagatcaaagtttaatgttttttctttggggtaagtgtggagagggaccaaaatttgacttttataaaaatccgatggccttagattttgtaaaagtcaaatttgttgtgcatgaacagcccggaacaggatacataagtatggaaaataaattcacaaaaggacaaaaaagacaagtggattcactcctgctaatgcctccagatggtgctgagcacagagcacagccctgtccttgacatatcttgcatatgtatgtctcatgtttcagagcgcttatgaatagccctcctgtgttcttgaaaacttctgtgtagtaaagtaattcctaagacctttacatcaaaaagggagttggagccatttcctttaagctgggcctctcttcgctatttgcagttacttttacttgttctcttcaccaatgccaaagagaacacttacgtgctgaagatcagtgacaggttgagagagtatctctacaatccctggggatatgttgtacctcaaasagactccttttccagctgctcttccaaattggtaaccagatctgagcaccaccact

SEQ ID NO: 536064 - DNA, 518 bp, Homo sapiens
gctagccttcattgactactgtatcattgaccaagggggaaggatgagaacagctccaaactgaaatgtcacagatcccattgttcctaccaagattcagtagtttttcttaaataaatgtatttcaatttatctatgtgtttggttattttcagagttctgaaatgactgcttttgataattttgctagttttatcagtgctttctaaggtaggatttgccaatgtcctcactccaccattcagaaagtgactagccctcttaccacctttgtttggcacttggtgctataattaattataagaaaactccagccacaaaaaccaggtgaatgactgcttggtatggcagcaaaataattgcaattaaaagtctatttgcatgacctaaaaactaattaattcagtgtgaaacatatgtaagcaagaagttttccagatttttcaccaaaaagtgttcaataactaccctccttttggaattyctatgctattctttgcatatctcagtcagtgcag

SEQ ID NO: 536065 - DNA, 616 bp, Homo sapiens
ctgcatatacacccttgtggaaattcgcatccaccatcactctgaacagcacctctcacatctgcattgtcagtaacctgtttgcattatagtttccccagatgttcctccccattcataagatctcacttttcctattttatacatgagaaaactgagagccagaaaagttaactgacttgcccagagtcacacagttatgaaggttgagccaaggactgtcagactcccaaaggccaggttccttccactatagtatatgtgyatgtatatgcatgtgtgtacatagatgtgcaaaaacattgcttctcagtaggagcctggggtttcaagaaacaggtttggctggtgcagtggctcatacctgcaatcccagcactttgggaggctgaggctggaggattgcttgagcccaggagttcgagaccagcctgggcaagatggtgagaccctgtccctacaaaaaatttaaaaaaaaaatagccaggcatggtggtgcatacctgtagccccagctactcgggaggctgaggtgggaggatcacttgagcccaggaattcaaggaggcagtgagctatgatcatgccactgcactccaacctgggccacaaaacg

SEQ ID NO: 536066 - DNA, 597 bp, Homo sapiens
  misc_feature (1)...(597): n = A,T,C or G
tgcctcatgcacaggctccaggctcctctgcacagattcctagcacaaacatcttctagtgtacacacaccccatatacacacacctncagccctcatccgtctgcacatagatgtgcatgcacatgaacacacacacacacacacacacacacacatcctctataaaagaatagcaaatacaaaatttatagcrcttactatatgcgctggccactgcattaagcactttacctatattatctcattttatccacacaaccctatgatttaagtagtattattattattaatttatttattttgagagggagtttcactcttgtcacccaggctggagtgcaatggcatgatctcagctcactgcaacctccgcctcctgggttcaagccattctcttgcctcagcctcctgagtagctgggattacaggcacccaacaccatgccaggctaatttctgtatttttagtagcgatgggttttcactatgttggccaggctggtcttgaattcctgacctcaagtgatccacctgccttggcctcccaaagtgttgggattacaggggtgagccactgcacctggcctaagtattat

SEQ ID NO: 536067 - DNA, 581 bp, Homo sapiens
gggagcccaaggaagaagctaagagccctaagtgcccccgagcttattccttctgcagggacaagccctcccagggaagctgcagtggctggggcagagcggacaaaagccccagtggtggggggtgtccaagatgagggtttggcaggattcatctctrcagacctgtgtggctccacctggcctcagggtgccttgggggctggaggtgctgctgaccatgccctgttctgtgcctacagtgaaggtgactggtgggaggctcggtctctcagctccggaaaaactggctgcattcccagcaactacgtggcccctgttgactcaatccaagctgaagagtaagtagggattggggcaagaccagccctatggacaggaccctggagtccagactccaaggccacctcttggacaagtcattgctccagtccgagcctgtctccttatctaataattttgtaaggtcattgtgagaacaaaagaagattgtactgataataataatagtagataatagagcatgtactatgttctgggcactattcaaagtactgtctgtgtattaacggggttagaaa

SEQ ID NO: 536068 - DNA, 638 bp, Homo sapiens
ttgaatatttagattgtttccaccttttggctatgactaatgctgctgttaggctggagcattcattcccaatcttccccctcactcccagtatatccatacatccactccctgccaggccagtgattacattcttctatctgtggccacaactcccaagagcagcccctttcccaaggctacaggtcttgctggttctgggaacagctctctttccctgcctttttagctctagagatggtactggcctcccattgtttctaattacaacacrtttgccactccttgctgtttcccttaaccctgctcatacctctgtaaaaagtcactgagggaatttaaatgtaaccttttcagtgtaccattcctgttgggatcctggggatatagtcatcctcctgaagattcccttcacatctctccagtgttgcaccatcttttctcattaagccccctgctttggtcagacatctttcaaaagctctcatcaaatgagtgcatgtaaatttgggagacccggcatttctcaaaatatcattattctctttttttaacttttattttaggttcaggggtacatatgcatgtttgttatctaggtaaacttgtgtcatgggggtttgttgtacagattattt

SEQ ID NO: 536069 - DNA, 582 bp, Homo sapiens
aaaactccatggcaatgatcttcttattctctcasaaaatttttgcagccaatcagactgccaaatttatttaagtctgtacacttatctcagaacacccttgggtttattcttgggcctataaaataggaagaaatgtaagagaccatgggctattttgccaaatcagcatagtgttaagactcatgggaaggaggccatgggtttcccttccccatctagagatggagactgttctgctaagggaagatcaatatccagttagagaaaagagaacacaaatctgaaaagctaacactccatgggtaagcctggctggaacaatttagcatcaacagagcgtcaagtgccaaccccacacataatgcctacagagaccctcctggctgattggctctatgaagccaaggaactggctggcttttcccattcccccacttcagtttgatctgactgctttgctttgtatctcctcagcatctgcccatgcttttatctgggcacctcaaacactttaatgctcttgcttgttttcttaaagcccttggaaaaacggacaggttttatcttttcactgtattc

SEQ ID NO: 536070 - DNA, 496 bp, Homo sapiens
ctgacttgccccccactgtgtgatgctgctatgtgtttctgcttttcttcctattgtttttgcatagtaaaggggagtcctggttaacttggatgcccagtcaaatatctctatgcactctattctttaaataaagaaattaagttgactggagaggctagtgaaaagtgagagatctttcatccaaaaatatgaaagatactaaaattagttaatcayacaaattttaaagtagtgaaaagccagagatcacaaacagtgtctgaaatgtttgccaaagccaaaaggttaggaactgacactgaaggccagattaaagtaccagatatttgtatgcctatgggggcatagtctgtgggagggttggcttcatatgaaggggtagaggtaggatagatatcttaggtgaaaatacatacaagaacatgcatttctagactcagtgctctagatatgataaccgtggtgagtactaacaaaatatagttagtcattt

SEQ ID NO: 536071 - DNA, 643 bp, Homo sapiens
tctttttgcacaggttgaatgcatgtgctctgcctttgacattgtgcatttaaatgccagcttgtgcaatttacagtacaaaagggcaaggatacgtgggggaatgaggaaaaaagaaacctcttttctcttctcattggctgacctttgtgatttcgctttataaaggcattgaaagagcccctttgaccatatttctgatcttcaaaacaatcacagaaatagccctttataatgttatttatatacattgctaccagtcttcctgcattagaatataaagaataatttgtatccctggaactgaacacggaaagccattcctatctcagttagctgaaagtaaaaccaaattgcactctgtgattttggtaatagggatcaaaaaattttatattgtaggattttaggccaataatacctgaatctgaaaggtagacttaatatgcttmcctcaaattaatttagaaaatttcaaatttggagagatcataacataataattttatgagacagatataaagggagatgcaggactgagagtgaccttggtggtatgcaaatcctcattcttgagaaatgatttgtatagacttaatgattctcttattctccttaggtattccttcattaattcatttgt

SEQ ID NO: 536072 - DNA, 589 bp, Homo sapiens
tgtctttttgcacaggttgaatgcatgtgctctgcctttgacattgtgcatttaaatgccagcttgtgcaatttacagtacaaaagggcaaggatacgtgggggaatgaggaaaaaagaaacctcttttctcttctcattggctgacctttgtgatttcgctttataaaggcattgaaagagcccctttgaccatatttctgatcttcaaaacaatcacagaaatagccctttataatgttatttatatacattgctaccagtcttcctgcattagaatataaagaataatttgtatccctggaactgaacacggaaagccattcctatctcagttagctgaaagtaaaaccaaattgcactctgtgattttggtaatagggatcaaaaaattttatattgtaggattttaggccaataatacctgaatctgaaaggtagacttaatatgcttccctcaaattaatttagaaaatttcaaatttggagagatcataacataataattttatgagacagatataaarggagatgcaggactgagagtgaccttggtggtatgcaaatcctcattcttgagaaatgatttg

SEQ ID NO: 536073 - DNA, 634 bp, Homo sapiens
taagtggcagaaccaagattccattttcccaacctatttcccttcacccgggtcatatcccaaggtctggatagaatgatcttggtctccttcttagttctgtttccgaagtatggctaatttgaatatttggatttcttagaaaygaattcccacaaatttaaatcttttcttcctaggacacagttcattagcattttgctcatcaataataggtatctatttgaaacagccttgcttcccactctgcacacggctttcactcctgtcaatcatattgtaatcttgaaatgaaatcttctcagccttaatgtttgtcaaacgatcttttggaaaaaataaaaattgtggagaatatttataccaactatgggtacaatacaaccagaaccaacttcgatcttgtacacagaattttgtaagcactcctatgaaaaggtattatctaacgtgtggctgtgggccctcttactagaatagaactactggctttagtgttatgtgaacagtaatgctaaagatgaccttaggacaagttcttttggtgtatgaagagtcggtttttgggttttataatctgactttaaaagcaagctcatttcctaagttttgtgaccttgggcattacttaaaa

SEQ ID NO: 536074 - DNA, 634 bp, Homo sapiens
taagtggcagaaccaagattccattttcccaacctatttcccttcacccgggtcatatcccaaggtctggatagaatgatcttggtctccttcttagttctgtttccgaagtatggctaatttgaatatttggatttcttagaaatgaattcccacaaatttaaatcttttcttcctaggacacagttcattagcattttgctcatcaataataggtatctatttgaaacagccttgcttcccactctgcacacggctttcactcctgtcaatcatattgtaatcttgaaatgaaatcttctcagccttaatgtttgtcaaacgatcttttggaaaaaataaaaattgtggagaatatttataccaactatgggtacaatacaaccagaaccaacttcgatcttgtacacagaattttgtaagcactcytatgaaaaggtattatctaacgtgtggctgtgggccctcttactagaatagaactactggctttagtgttatgtgaacagtaatgctaaagatgaccttaggacaagttcttttggtgtatgaagagtcggtttttgggttttataatctgactttaaaagcaagctcatttcctaagttttgtgaccttgggcattacttaaaa

SEQ ID NO: 536075 - DNA, 553 bp, Homo sapiens
ggtatagtgatgaatacaaaaaactaatgaacaatttctgctctccaagcggcatcaacatttttttccacaacaatctaggggacgaagcagaaaataataacgtaataagtaaactatacagtaataataccacttttataagtttttctttgtctttgggtttccaacagttgtgctatgattgttacgtatgtggtatggctgtgtttgtgtgtatgtgtgcgtgtgtgtgtttagtgtttataaagaaggtgattagtttgacgtcttttgtcagttttattttgttttcaggaagtattttctcaaatratgtttaccatttgctgtgggattgttgtgcagctatgagccagcccttgatagctgagtttctctatgaagtgactacttcaacagaattataggtttatatattcattattcatatatcttggcccctcctcagtcatattcaatcaaaattaccaatattattaatagccatctttacaccaatcctctgagtcacaaattatgttttttagaactataaattatttcctatgtt

SEQ ID NO: 536076 - DNA, 519 bp, Homo sapiens
agcatctttctttaaaaattatatatatatggatatacgtgtgtatacacacatacactcatatatatttcagtaaatgtatagtaagcattgatttttcccatttatgaagtttaataagttaaaagtctgtgagtaaagtagcattatttattaaaatcatagatttttcatgtcatgttagtcagaytgtcattctgtatgccatacagcatttccaaaacaaatcatggttagccatactttacctcctcttttcccctgtcaatatgggtacatcagtaaaagttatacagtttaaaaactttcagttttccagctttcttttctcaattccatatctaatattgagctagaatatttagtagttcatcattttctgatctcttgttacctgagtgaccaactgggaaataaaagtgagatgaaatgaaactgcaagataattgaagtttcccctgttctcctgtcagtttgagagaatatttgaataatgtattgttaaatattgtattgttt

SEQ ID NO: 536077 - DNA, 667 bp, Homo sapiens
acaggcatgcaccaccaaacgcaggctaattttttgtattattagtagagatgtggtttcaccatgttggccaagcttgtctcraacccctgacctcaggtgattcacctgccttggcctccctaagtgctgggattacaggtgtgagccaacacacccagcctcaggtatttccttataccagtacaaaaacaggttaacacaatatcatacaatatgaccaagtggtatttatttctggaatgcatgaatgtttcaataaatgaaaatcagtcattcttatatgccacattacagaatgaagaaaagcacattaccgttttaatgcaaaagttatttgacaaaattcaatatccttttataatatcactcaacaacctacagatctaggaaaagtgcttcaacaaataaaggtcatatgtaaaagtgggtaaatgattaagaaaatgggccttgattttaaataaatatgggttctcttttactgatagttacttgaacaaatcatttaccatcactttcttcatccgtataatgcatataatcaatgtacctatttcactgtgggcagtttaaatacaataatacatgcaaaatacctggtacttttgaaacagtcagttaaagttagttataattattagtcattattgttttgaacatactc

SEQ ID NO: 536078 - DNA, 667 bp, Homo sapiens
acaggcatgcaccaccaaacgcaggctaattttttgtattattagtagagatgtggtttcaccatgttggccaagcttgtctcaaacccctgacctcaggtgattcacctgccttggcctccctaagtgctgggattacaggtgtgagccaacacacccagcctcaggtatttccttataccagtacaaaaacaggttaacacaatatcatacaatatgaccaagtggtatttatttctggaatgcatgaatgtttcaataaatgaaaatcagtcattcttatatgccacattacagaatgaagaaaagcacattaccrttttaatgcaaaagttatttgacaaaattcaatatccttttataatatcactcaacaacctacagatctaggaaaagtgcttcaacaaataaaggtcatatgtaaaagtgggtaaatgattaagaaaatgggccttgattttaaataaatatgggttctcttttactgatagttacttgaacaaatcatttaccatcactttcttcatccgtataatgcatataatcaatgtacctatttcactgtgggcagtttaaatacaataatacatgcaaaatacctggtacttttgaaacagtcagttaaagttagttataattattagtcattattgttttgaacatactc

SEQ ID NO: 536079 - DNA, 651 bp, Homo sapiens
tgcgttggtagatatatattatcccattgagtaaaaaaagtgaatattgaagaaaagcaatgcctacagagagtgacaactcttccatgcaggtagatgctttttgtgctatcctatactttgtatggatgcacacagggtttcattgtggagctctcagcttatgggctgggactacagttttgaaatacagtattagtaagatgctggggaggatcttaaggcagaaggtagatgttacttctggtctaaagtcagtggactttagaccaaaatcttgtaaactggagctctctggctagcattccattaatattcagttcagaagaagctggtaagtcaaatttctgcaagtttttacatcagaaagagcttagctcacaaggtacttttttctyatctgtattcagttatttttccctgatcagtgtcagtctccttccaaccctcacttcccatcttggggagtacccttaggggcaggtcattcctctcttctttccctggcaggctggactcatccatgtgacctgagattggccaatcgacagtggctgctggccaagaccttgcctcttgagtgagtgactcaaagacaaagggatactaagattgaatcacagcagtggtgcgcagtgttgctgggggcag

SEQ ID NO: 536080 - DNA, 647 bp, Homo sapiens
cttatgtttatgcttttagccagatctagtatctttctctgggttattctttaggcaggtttttgctaacttygttaaacagatcaacaaaatattatttctcctgtgtctactatgtaaattatctctacctcctcttactaaaagaggatggaactttttgttcacatattttgaaagaagaaaaatgttagttttaaattttaattttaaattacaaaaattacaattttacaaacacagagctgtgacaagtccctattttaatacttttaaaaggcattatagttattccttcatctttaaattttatatttaaaaatgttttccaggctgtgtaaagtttgaaggcactgtatttgctgaaacagtcaaattttatcttggcagtaattgcttctttacgacttgtctgcctgacagtgtagtagatgatctcttgatatgtagtctgaggttgcagactcctaaagctgtctgtggctactcacagaattcctcgcacctactccaccactgcttctgtgaaattatatgttccttaaagtgtgtcatgtaattgtccttagttcttcctttgctcatggtctttgtgagaacaaacttcaaatgtattcaatggaattgatgtggctaggaaaatgtat

SEQ ID NO: 536081 - DNA, 603 bp, Homo sapiens
aaacatcgagtttgggaaatttaacttagagagaaagcactgctactttccatttgagcaaaattttttaattctttgtatctacatattctcagacttcatttcctctccactcctcagatatggtcatacatttagtccttggcattctaactttcttgttctacatttttttatcacaaaattctcatacaaattcttagcttcactatttacatctgctactctgagatttagtccaacacctccaactgcctgctagacaattctacttaaacttaagatgtcataagccaagctcatcatctttcacctaccccacccacagagacattatcagtgcaatagactagatgtcagccttcacttaacactttctgtgttgactggttcaaatggtaatcragtgctgttggcccttaccatgcctactatttcacaaacctatccttatccatcaacattcctttaatcttacccaccaattgtgtctctgctgacaccacagttcatggatttttttgctctttaacctgaaccaggctctcagtactgctcatcaacattttgtttatttgtagttgaattgctctttaaatcctc

SEQ ID NO: 536082 - DNA, 559 bp, Homo sapiens
ctgttataattattctggagaagaagtgtgattagacacacatggtggtatcagcaaggggccagattgcttctaagtatcttagtatacgctttcctcataggactggaaagaaggkcaccctttgtctgcccctggtttactctggagcagaggagagctggtggcagctgtggcagccttctgtgactgaatgccctggattgagatagagcccagagtcctagaaatgcaggagctgcctcctgcttacaaacaataggcgtataggacatgacttcctcattgccaggcaaagctagctgctcctcttcctgatgtgatgcaccacccatcctgttgccagaaattctgttattagaggctctagctttaagaatgtcttattgaattgtaaacacctctccctccagaagtgactaagcctcttttatctaacatcttattgaagcttcctttactcatgaaagatttattgagcacttttatgattccaggtgttgggctaagccctggggacacagagacaaattcaacagccccagcttagtggagaaat

SEQ ID NO: 536083 - DNA, 559 bp, Homo sapiens
ctgttataattattctggagaagaagtgtgattagacacacatggtggtatcagcaaggggccagattgcttctaagtatcttagtatacgctttcctcataggactggaaagaaggtcaccctttgtctgcccctggtttactctggagcagaggagagctggtggcagctgtggcagccttctgtgactgaatgccctggattgagatagagcccagagtcctagaaatgcaggagctgcctcctgcttacaaacaataggcgtataggacatgacttcctcattgccaggcaaagctagctgctcctcttcctgatgtgatgcaccacccatcctgttgccagaaattctgttattagaggctctagctttaagaatgtcttattgaattgtaaacacctctccctccagaagtgactaagcctcttttatctaacatcttattgaagcttcctttactcatgaaagatttattgagcactttyatgattccaggtgttgggctaagccctggggacacagagacaaattcaacagccccagcttagtggagaaat

SEQ ID NO: 536084 - DNA, 538 bp, Homo sapiens
ttatcctcaatttgctctagttatgggtatttactctccaaarcattggtggaatacattagaagcatatatttatctgcataaacacttatgactctacctaaatgcagaggtcttttcttactatgataaattctatcgatagataatgcaactatgcctttgatggcagtcaaggattaatgaattagtaaaatcacccaaccggtttccatctgagcaaagatctgtgcctttgcttgctttaatattgtttatcagtatcagaggctatcttaacatttgtaatggccccatttctgataaattggataagcctatcaaaataaaaatttatttataaatacagatcttaatatatcaataatagtttacatttggacaattatcccccatcagtgtttttaggactttggagtaaacacatatgaaactatatcatagtcaagaaccaaaagtagactttgtaggcttataaaaaatgtgtccaaaggaacttagcagctacccacactcaattctcataagccactgaaca

SEQ ID NO: 536085 - DNA, 622 bp, Homo sapiens
ctcttacaaacaaacctgagagcaacaggcctccagagaccgccgatgaaggtgagagcagagccggcttcttaatatttcatggaggcttgagcagcttgcctctcacatggggagcagggaaggtgttccagcagtactgatcgcaccaagcgagtgatgcctgaacgcaccgagatgaagctgatacactttgctttcatttagaaaaggcccattttgtacatgatttgtactctagtctattaagggaagaattggtaatgtttagctggaaatagaattctccatgctgtctgcatccaattataggcaaaaatgttactgtcatagagtatattaagccagccctaaaagttgtttatgagagtcttttcctttctgtaagtgcataacatgtatttaaaaataaatattcgyccttctgaaaatcgttaacaaaaataatgatgggatctttgggttggaagggtctttggctttaggtatggacctgtctaatcaatattagcagatacatgagcctccactgatttagaccctgtgaggacataaccaaggcactggactgtgttagctttgaccttttcccccacacaagtatttttctattttagaaaag

SEQ ID NO: 536086 - DNA, 587 bp, Homo sapiens
acttttgggagggggacatggattcctgtaggaaaggtaaaaactatggatatatgtctacgtataattttaggcagttcactgaccagcccttcctccaagccagttcatggaccaacttaatgacaccctacatacaatccgaagcattcaccaagtgttttctaacacgacatatcattagggaaggggcactatggcgtatggtgggaagatcagtacctttgatgccaagcaactgatgatcaataactttcataccagtaactttgatgcaaggcagatgtagatttgagaactggctctgcaactaagaaaggtatggcatatgcccttggaacctgtctcttcatccataagaggaggatcatgatatccatttggcagtgttcttgtgaattattagaaataatgtaaagaggcaaccacgtaagagctgcatacatcatagataataacaaagaatgcatttcagcccatagtgcagtgtggctcacagggctcgtgatgactcattttgcctgtgacatagcsactgtaaatcaacatagctcacgtaccctcagcagctatcactctggtggcag

SEQ ID NO: 536087 - DNA, 513 bp, Homo sapiens
ctggccaccagtcacacaaccaggaagaaagggcctcatctattctttaagtaatttatttttgcttgtggaggataggtaggaaatgctaatgtgtggagctcagggaaaggacccttcttatctgggcctaaggtattacctgaggatatccctggcaagctaccatagattatccaaaatttgtatagccaggcatggtggctcatgcctctaatcccagcactttgggaggctgaggtgggaggattccttgagcccaggagttcaatatcaacctaggcaacatagtgagaccccatctctacaaagttgttttcagaaaattatccaggtgtggtgacatgtgtctgwggttgcagctacccatgaggctgaggcaggagaatcacttgagcccaagaggccaaggctgcagtgaaccattgtcacgctagcctgggtgacggagcaagaccctctcaaaataaataacttgcataacccatcagacaacctgcctagccaaaaatg

SEQ ID NO: 536088 - DNA, 513 bp, Homo sapiens
ctggccaccagtcacacaaccaggaagaaagggcctcatctattctttaagtaatttatttttgcttgtggaggataggtaggaaatgctaatgtgtggagctcagggaaaggacccttcttatctgggcctaaggtattacctgaggatatccctggcaagctaccatagattatccaaaatttgtatagccaggcatggtggctcatgcctctaatcccagcactttgggaggctgaggtgggaggattccttgagcccaggagttcaatatcaacctaggcaacatagtgagaccccatctctacaaagttgttttcagaaaattatccaggtgtggtgacatgtgtctgaggtygcagctacccatgaggctgaggcaggagaatcacttgagcccaagaggccaaggctgcagtgaaccattgtcacgctagcctgggtgacggagcaagaccctctcaaaataaataacttgcataacccatcagacaacctgcctagccaaaaatg

SEQ ID NO: 536089 - DNA, 513 bp, Homo sapiens
ctggccaccagtcacacaaccaggaagaaagggcctcatctattctttaagtaatttatttttgcttgtggaggataggtaggaaatgctaatgtgtggagctcagggaaaggacccttcttatctgggcctaaggtattacctgaggatatccctggcaagctaccatagattatccaaaatttgtatagccaggcatggtggctcatgcctctaatcccagcactttgggaggctgaggtgggaggattccttgagcccaggagttcaatatcaacctaggcaacatagtgagaccccatctctacaaagttgttttcagaaaattatccaggtgtggtgacatgtgtctgaggttgcagctacccatgaggctgaggcaggagaatcacttgagcccaagaggccaaggctgcagtgaaccattgtcacrctagcctgggtgacggagcaagaccctctcaaaataaataacttgcataacccatcagacaacctgcctagccaaaaatg

SEQ ID NO: 536090 - DNA, 554 bp, Homo sapiens
gattgcaatggcttaaggagtggaagagggttagttttattttcaagttgcttaggtgaaaaggaagagagctagggtgttagytagtggtggcatacaatcaacggaagattgttttgtttttacatttggaggagaaggagccaataatggatatgcctaaaaacaaagcaaccaaatcaactaacaagcaataaaataggagaagaggataatagcagataggttgattcccacagtgcaatataaggagaaaccttaatcaagcaacacctctcttcaaacctgtcctaatctctctaccagtcaacatagtaaaatggaggcatatataattattatttgttgaatagagctttatattttctataaagttaaaaagcaaatggtgtatatgtgttttatttccaaaagacttaagttaatcttgcctttgacttttgtatagcttatgactgatgagttataaaaactaatttctttccttgttgatgggtggtcctgggtagataaaacttgagtaactcctgcagtggcattattccccgacctcc

SEQ ID NO: 536091 - DNA, 552 bp, Homo sapiens
ctgaacctgggttccattacatttatatttggtagaccaatagaacacatccctttaactattagagtttctcacctggcttccactggcagtggttgctttaattttcccccaccagtggcagggccaccctcccaagttccagaaccgagctgagtcctgggagtaaagctgtggtcaatctatatagccaaggccatgggatttttaaaataaaaaatcatgaaagattttagagatatagaactgtatgaaaaaatataaacatctatgcaaagcacattaagcataagaagtagcaaattatttgaggttcttgtataamcttcaccaattgcattatttcaaggtcatctctccaaaatgtgcccattatatggattcactgttatcactgttgggccctttgtgtcactgtaaagaaataactgagactgagaaatttattttaaagttatttaaaataaattaagtttatcttaattggctcatgcttctgcagtctgtacaggaagcaagttgctggcatttgcttctggtaaggcctcagga

SEQ ID NO: 536092 - DNA, 552 bp, Homo sapiens
ctgaacctgggttccattacatttatatttggtagaccaatagaacacatccctttaactattagagtttctcacctggcttccactggcagtggttgctttaattttcccccaccagtggcagggccaccctcccaagttccagaaccgagctgagtcctgggagtaaagctgtggtcaatctatatagccaaggccatgggatttttaaaataaaaaatcatgaaagattttagagatatagaactgtatgaaaaaatataaacatctatgcaaagcacattaagcataagaagtagcaaattatttgaggttcttgtataaacttcaccaattgcattatttcaaggtcatctctccaaaatgtgcccattatatggattcactgttatcactgttgggccctttgtgtcactgtaaagaaataactgagactgagaaatttattttaaagttatttaaaataaattragtttatcttaattggctcatgcttctgcagtctgtacaggaagcaagttgctggcatttgcttctggtaaggcctcagga

SEQ ID NO: 536093 - DNA, 488 bp, Homo sapiens
gctttatgaaagtacgatgcctggatcccaacctcagagactctgatttaattgatctgaataatttttaaatagctcctcaggtaattctaatacgcagtyaggattgagaatcactgcatcaaattagcctccattatactagcgacagttctgaaaatccctgtgatgaggcatcaaaacagagggttttaaggggcagggatagatcagaagagtcaagtgaggctggggttccaaggtgcagcaatttgaggctgaacccttctgtatttctggcattcctactgtcttgcctgtccaatgagatagagtctgggtctcaggactctggccaaaagatcaaaattgatttctacctctaaggagcctaggccctggagcacattttattcatttccagaagaaagaaaccccttctcactgcaattcaagctcctatgggtgtgccattatgggagtaagtgtaaaggggtagactgattcta

SEQ ID NO: 536094 - DNA, 606 bp, Homo sapiens
ttaaattttaagtgtatgaattcacaaatagctaattctatgtttagtttggcgagtmgctttgctaagaaatctagtcaagtttctctgtgtttctttctacgcttctctgtttttcattttctttttctcttttaaagcattatatcagtaaagctcatatttcatggaacatgacacagacaggattgcttcttaacaaaaatggattggcatgggctatcagtaaagcttctttcaagactgaatttgagcagagctcatcagataatctgaagatcacagaaggctaatcacagagttagaaagctcttcattccatatcttcatttcccatccacctatgtttccaaaagccaaaaccaatgtatgtgttttcaattttagtggcagagtggactcctttgatttgggttgagcctcctcgcctgctgagtgttatttcactttctgtggtcagaaaaagacagaagacaaactgaagtttttacctctcagcagtcctgaatacagccggttccacagaggctgaagggttgagatgagggatttctcttgagagtcaggcatctttacctgcattttttgttcccatacctctttgtt

SEQ ID NO: 536095 - DNA, 606 bp, Homo sapiens
ttaaattttaagtgtatgaattcacaaatagctaattctatgtttagtttggcgagtagctttgctaagaaatctagtcaagtttctctgtgtttctttctacgcttctctgtttttcattttctttttctcttttaaagcattatatcagtaaagctcatatttcatggaacatgacacagacaggattgcttyttaacaaaaatggattggcatgggctatcagtaaagcttctttcaagactgaatttgagcagagctcatcagataatctgaagatcacagaaggctaatcacagagttagaaagctcttcattccatatcttcatttcccatccacctatgtttccaaaagccaaaaccaatgtatgtgttttcaattttagtggcagagtggactcctttgatttgggttgagcctcctcgcctgctgagtgttatttcactttctgtggtcagaaaaagacagaagacaaactgaagtttttacctctcagcagtcctgaatacagccggttccacagaggctgaagggttgagatgagggatttctcttgagagtcaggcatctttacctgcattttttgttcccatacctctttgtt

SEQ ID NO: 536096 - DNA, 605 bp, Homo sapiens
ttgcaaggaccctgaaccagtcctctgaaagtggctgctgggaaagccacggcaaagaaaagcaggatgcacttagggagcctgagaatctggccccagaactggaggaagtccaaatccagatytcctggagagcaaggaatgcacaccctctgtatgagagatttcaattaataggccatggacctcagcttactagagttgcattttatgtggcagagagagagagagaaaaagagagagagagagaaagagagaaagtatgtgagtaaataaattacttgcaatgtatacaaatctacattattcatataaaaatctagatttctagcttctgttttaaaaaatctgatgataatgcagagactgcctttacacgtgactgcattacctgggaggtaagtagcaaattcccttatggatgggacatggacttcctttgggcacagccccatcactccctaaattcttcccctgccactgagactgtcagttgtatttaccagagtgcttttgcttttgcttttcttatattctgcttcactcatttacattccctgcctaactgttgtcaacctctgcatgggtagcccctgatttatgga

SEQ ID NO: 536097 - DNA, 593 bp, Homo sapiens
taatagattggaagccaatgcagataggggaatgtcacttcagcaacagcactagcattagagaacttgtgtccctgttaatgtgtccaaattttcacagatactataaataaagagaaacaaatggaatgatcccagaaacttctgttgattggcagtgacttctcctggagtctatgcttcaggcattttcttgatgtttcagtatckactgaacatgatgcagaacttaatgctcttcagaactgggtactcctagtgtccagtcaagctttgtgtttgattcacaggtaggtggcaatgtggagattacacctgttagctggatgctatgagaatctacctttctgcctgttcgctacagtggataaattatgtaggagaatgttctacccaagagccccttaatacacacagtttctctaaatactcacacacagacacacacacacacacacatttaacacatctatgtgtactatatgaatataatataaaaacatatgtataagccacatatataatcatatataggtttttctctttttctaaatgcttctaatatatatacatacacacacatatgtatgtgt

SEQ ID NO: 536098 - DNA, 593 bp, Homo sapiens
taatagattggaagccaatgcagataggggaatgtcacttcagcaacagcactagcattagagaacttgtgtccctgttaatgtgtccaaattttcacagatactataaataaagagaaacaaatggaatgatcccagaaacttctgttgattggcagtgacttctcctggagtctatgcttcaggcattttcttgatgtttcagtatctactgaacatgatgcagaacttaatgctcttcagaactgggtactcctagtgtccagtcaagctttgtgtttgattcacaggtaggtggcaatgtggagattacacctgttagctggatgctatgagaatctacctttctgcctgttcgctacagtggataaattatgtaggagaatgttctacccaagagccccttaatacacacagtttctctaaatactcacacacagacacacacacacacacacatytaacacatctatgtgtactatatgaatataatataaaaacatatgtataagccacatatataatcatatataggtttttctctttttctaaatgcttctaatatatatacatacacacacatatgtatgtgt

SEQ ID NO: 536099 - DNA, 620 bp, Homo sapiens
gctccaggcttcggatgtgctgtagagagcggggtttactttgtgttggctccatcagccccttgaaagctcagggtcatggcttctgtagggggctctctctctttagtactcagggttgaagagacccttgggccactcagggggccccagagtcctgctggagacccagggaagctgtctcagtcccaaatgaacctggtcatgtgtcagctccctgtccacacggctgagggcaaactttctcagagctcagctctggctctgctgcaggatgtgagttggggggttctggttctctgagttctygaggagggtctggatgagggtggggtttctattctgatctctgttctggttcctcttactcattcaaccctggctgctgcccaaacacaggcagcctctgccctggggctggagccacaatgtggcaggtggagggatgggaggtggactattggagccagacagctgcttcctatccctgccatgcacatgcacacacacagtgaggaaggggcagggcacgtgagctctggaaggagggagggccaccaggggctcattagggtgagtatgggcacatttgtgtctttgtgagtgtgcacgctggagat

SEQ ID NO: 536100 - DNA, 620 bp, Homo sapiens
gctccaggcttcggatgtgctgtagagagcggggtttactttgtgttggctccatcagccccttgaaagctcagggtcatggcttctgtagggggctctctctctttagtactcagggttgaagagacccttgggccactcagggggccccagagtcctgctggagacccagggaagctgtctcagtcccaaatgaacctggtcatgtgtcagctccctgtccacacggctgagggcaaactttctcagagctcagctctggctctgctgcaggatgtgagttggggggttctggttctctgagttcttgaggagggtctggatgagggtggggtttctattctgatctctgttctggttcctcttactcattcaaccctggctgctgcccaaacacaggcagcctctgccctggggctggagccacaatgtggcaggtggagggatgggaggtggactattggagccagacagctgcttcctatccctgccatgcacatgcacacacacagtgaggaaggggcagggcacrtgagctctggaaggagggagggccaccaggggctcattagggtgagtatgggcacatttgtgtctttgtgagtgtgcacgctggagat

SEQ ID NO: 536101 - DNA, 599 bp, Homo sapiens
gcaggatgaagggagaagttgctctcatgaagcctccagcagagagaggctcctggttaggtgttaycagggacgcgcggagaccttaccaccatcattttcacaagcccagtttccacccagggaaactgagcgaaagaaaggctgggactgggatctgcaaggccaccacccttccagagggcaggaaggtaaataccagcctccctcctgccttcccagactgtccctgcgtgacttccccatctcccacactgaaacacattcattcagattgttttccaagcagggtactgagtcttcataatcaagggctctctgaacacaccaatgaaaggagctttctgtgtgtattggtctgaattataaaaaacatcaacctccccagtgcttgcctgtccattaaaactgagtatttatcttaaaaaaaaacaacaacaaaaaactcactccgactctatgctcccaacccattaaagaccttgatgaccatcagagatacctgattcaaatctgatgcataggtccagccaattttttcttttggcttgggggatgggtactttgtaaataagcaatgtgttgttatgaagaaaaat

SEQ ID NO: 536102 - DNA, 615 bp, Homo sapiens
tggcaggatgaagggagaagttgctctcatgaagcctccagcagagagaggctcctggttaggtgttatcagggacgcgcggagaccttaccaccatcattttcacaagcccagtttccacccagggaaactgagcgaaagaaaggctgggactgggatctgcaaggccaccacccttccagagggcaggaaggtaaataccagcctccctcctgccttcccagactgtccctgcgtgacttccccatctcccacactgaaacacattcattcagattgttttccaagcagggtactgagtcttcataatcaagggctctctgaacacaccaatgaaaggagctttctgtgtgtattggtctgaattataaaaaacatcaacctccccartgcttgcctgtccattaaaactgagtatttatcttaaaaaaaaacaacaacaaaaaactcactccgactctatgctcccaacccattaaagaccttgatgaccatcagagatacctgattcaaatctgatgcataggtccagccaattttttcttttggcttgggggatgggtactttgtaaataagcaatgtgttgttatgaagaaaaattaccaatggtctga

SEQ ID NO: 536103 - DNA, 618 bp, Homo sapiens
caagaaggagggcttccacctgggaggtcaggaaaggtttctcaaagaaaaaggcagtaaattgaattgtgaaggctaagaacatatttaggaagcagaaatagaggaaaagaattctgaggagcagtcatattctgagcaaagttatgcaagtctgtgatgggttagaggaaaagtgtgaactggaatttgatgcatctggatgtgtaaggtgtcaagtctggacagggaggtgaaatagatctgtggaaagatcacaaaaggattaggaaagcatcagagaaggggtgatttgagatgtgagggaagggaawtgggaggaatagatttctgctcccgaggaagatgagtgtcaagattgatattgtctgactgaagattggttgggtctgaagaaggcagggactgagggccagaaaaggtttctctacaccctttaaaatcaaggttatggatccagatttctacataagattgagatattaatcatatccttcaatatttaaggggaagtaggatggaaagttgtcattgcaaacatttctagaactggaatgttgatgtttgcaccccaactcacttttcacatcagactaaatgagtttaagtgatttgccc

SEQ ID NO: 536104 - DNA, 614 bp, Homo sapiens
ctgctgctgccctggcctgatggcacagtggtgagggctgtctcaatatctgtcccatgtctctttcatagaataataccctccctcagccccttttccctgtatcttcctttcaagggttgctgtgtagttaactctgcctcaggcaatttatcttatctgtacttttctcttcctcattcctcttctcttttccagtgcttgtccagtaacctcaaggaaatctgttccaacccttctttgctgttggtgtattcctattcatgagttaaatcccaaacaaaacatactctaatcagggcagtcgaacttgaaaagagtcagtgagaaatctgaaaggaggaaaagcctggccacgaggctccaagtgaaatgaaagccataaacaccagcttcgtcaaccttgaaagcttctaaaagtgcccctaagcctccttttgaatcactaaaagttttcacttacctccctgtctttctcagataaaatttcctctttctcagccatgagtcttaaaaaacaaagcaaaacaaaacacttcacacctgcttcttattcagttttacactagtggaaagagaaygggatttagagttggaaggccaacgtgagcgtc

SEQ ID NO: 536105 - DNA, 662 bp, Homo sapiens
cacaaggtggatttatcagacagtgattttgtaaactgcaaatcaccacctccccaagtatctctrtttaactgaggcagagggattgtgagctctagaacaaagtctccttgggggggaaaaaagttcatcttcaacccaaattcatttcaagtattaaatggcacagagatatcagttgtctctggaactagggagtaagtccactgacagggcccagcaattaagctcttccaaggagcctgtccctgtctatacaccatatagccagttagagctaccgccagttccttcctgctccctgaaatgaccagtgcctccctaaggacaggcacatcaggtctcagccaaccttcccttccaaacataactcagccagacccctctggtctctaaatagtatctcttctctttgtctttttctgtttcaggcctccagttaccaactcctgtctggtttcatgtccttttctatctggcagtgggaataatgtttttagtgaacactgttctctgggtgacaatacgtaaagaactgaaaagaaagaaaaagtggaatttagaaatctctttggattctggtcatgagaagaaggtaatttccagccttcaagaagacagacatttagaagaagagctgaaatgtcaggaacaaaaagaag

SEQ ID NO: 536106 - DNA, 662 bp, Homo sapiens
cacaaggtggatttatcagacagtgattttgtaaactgcaaatcaccacctccccaagtatctctgtttaactgaggcagagggattgtgagctctagaacaaagtctccttgggggggaaaaaagttcatcttcaacccaaattcatttcaagtattaaatggcacagagatatcagttgtctctggaactagggagtaagtccactgacagggcccagcaattaagctcttccaaggagcctgtccctgtctatacaccatatagccagttagagctaccgccagttccttcctgctccctgaaatgaccagtgcctccctraggacaggcacatcaggtctcagccaaccttcccttccaaacataactcagccagacccctctggtctctaaatagtatctcttctctttgtctttttctgtttcaggcctccagttaccaactcctgtctggtttcatgtccttttctatctggcagtgggaataatgtttttagtgaacactgttctctgggtgacaatacgtaaagaactgaaaagaaagaaaaagtggaatttagaaatctctttggattctggtcatgagaagaaggtaatttccagccttcaagaagacagacatttagaagaagagctgaaatgtcaggaacaaaaagaag

SEQ ID NO: 536107 - DNA, 373 bp, Homo sapiens
ctgctccctgaaatgaccagtgcctccctaaggacaggcacatcaggtctcagccaaccttcccttccaaacataactcagcyagacccctctggtctctaaatagtatctcttctctttgtctttttctgtttcaggcctccagttaccaactcctgtctggtttcatgtccttttctatctggcagtgggaataatgtttttagtgaacactgttctctgggtgacaatacgtaaagaactgaaaagaaagaaaaagtggaatttagaaatctctttggattctggtcatgagaagaaggtaatttccagccttcaagaagacagacatttagaagaagagctgaaatgtcaggaacaaaaagaagaacag

SEQ ID NO: 536108 - DNA, 201 bp, Homo sapiens
tgtccttttctatctggcagtgggaataatgtttttagtgaacactgttctctgggtgacaatacgtaaagaactgaaaagaaagaaaaagtggratttagaaatctctttggattctggtcatgagaagaaggtaatttccagccttcaagaagacagacatttagaagaagagctgaaatgtcaggaacaaaaagaaga

SEQ ID NO: 536109 - DNA, 306 bp, Homo sapiens
gagaaattatttgcattcctggagcctgcaggagcgagaaatgagctgtaggagtcggtgggcagcaacggcggcaggcggatggaagagagcaaggggtcgccgttcgtgtcccattcgcccgagtcaaggggcggccccccaaaatcccaacgtcattgtttcctcggggccggcaggtgtgaaaacccggcggcagaatggaagttcggtagtctgcgagggcccgcggcctccccrggcgcgtagctgagtccctccaaccccgccccgggcccgcctgctctcgggccccggcgtggcgcc

SEQ ID NO: 536110 - DNA, 655 bp, Homo sapiens
ctgaacaatttgggagtctgtattccctagaaagactgttcacatacccrtcagactaaattaggtgaaatctctttggccttaatgaatgttgaaggattttaaagggctaatggaaattcttctagaagtaacaattcccattctattggtgaggcagttctaaagaaagtccctgaacctcttaggttattttgtacagcaaaagaaccagcattgggttttctttgctaatagatgacagggagaatgtagacacttggaatacatggagaatccctaagttgcattttagccttcatgttatgtctcctttcctaacctttttaccagagctgatcacaggaaacagcatgatagatttgcatgacctagctccctgccttctcctgccattcttttagaaagtggtgagtggctgcctgccaggtaaaatctgggtgacaaaatccaaagttagattcagagttataagcatagcccccacccaagttgcttccaaagaaaagaaaggaagagtgttgtgtaaaatcttgcttccttgcctttaaattgggtacttattgagttaccacattagaatcgtgcattgtgctagttgttgtactcctgttgattgattaatttcattctacattcatggaacaccaacaat

SEQ ID NO: 536111 - DNA, 564 bp, Homo sapiens
ctgttcacatacccgtcagrctaaattaggtgaaatctctttggccttaatgaatgttgaaggattttaaagggctaatggaaattcttctagaagtaacaattcccattctattggtgaggcagttctaaagaaagtccctgaacctcttaggttattttgtacagcaaaagaaccagcattgggttttctttgctaatagatgacagggagaatgtagacacttggaatacatggagaatccctaagttgcattttagccttcatgttatgtctcctttcctaacctttttaccagagctgatcacaggaaacagcatgatagatttgcatgacctagctccctgccttctcctgccattcttttagaaagtggtgagtggctgcctgccaggtaaaatctgggtgacaaaatccaaagttagattcagagttataagcatagcccccacccaagttgcttccaaagaaaagaaaggaagagtgttgtgtaaaatcttgcttccttgcctttaaattgggtacttattgagttaccacattagaatcgtgcattgtgctagt

SEQ ID NO: 536112 - DNA, 655 bp, Homo sapiens
ctgaacaatttgggagtctgtattccctagaaagactgttcacatacccgtcagactaaattaggtgaaatctctttggccttaatgaatgttgaaggattttaaagggctaatggaaattcttctagaagtaacaattcccattctattggtgaggcagttctaaagaaagtccctgaacctcttaggttattttgtacagcaaaagaaccagcattgggttttctttgctaatagatgacagggagaatgtagacacttggaatmcatggagaatccctaagttgcattttagccttcatgttatgtctcctttcctaacctttttaccagagctgatcacaggaaacagcatgatagatttgcatgacctagctccctgccttctcctgccattcttttagaaagtggtgagtggctgcctgccaggtaaaatctgggtgacaaaatccaaagttagattcagagttataagcatagcccccacccaagttgcttccaaagaaaagaaaggaagagtgttgtgtaaaatcttgcttccttgcctttaaattgggtacttattgagttaccacattagaatcgtgcattgtgctagttgttgtactcctgttgattgattaatttcattctacattcatggaacaccaacaat

SEQ ID NO: 536113 - DNA, 655 bp, Homo sapiens
ctgaacaatttgggagtctgtattccctagaaagactgttcacatacccgtcagactaaattaggtgaaatctctttggccttaatgaatgttgaaggattttaaagggctaatggaaattcttctagaagtaacaattcccattctattggtgaggcagttctaaagaaagtccctgaacctcttaggttattttgtacagcaaaagaaccagcattgggttttctttgctaatagatgacagggagaatgtagacacttggaatacatggagaatccctaagttgcattttagccttcatgttatgtctccttycctaacctttttaccagagctgatcacaggaaacagcatgatagatttgcatgacctagctccctgccttctcctgccattcttttagaaagtggtgagtggctgcctgccaggtaaaatctgggtgacaaaatccaaagttagattcagagttataagcatagcccccacccaagttgcttccaaagaaaagaaaggaagagtgttgtgtaaaatcttgcttccttgcctttaaattgggtacttattgagttaccacattagaatcgtgcattgtgctagttgttgtactcctgttgattgattaatttcattctacattcatggaacaccaacaat

SEQ ID NO: 536114 - DNA, 564 bp, Homo sapiens
ctgttcacatacccgtcagactaaattaggtgaaatctctttggccttaatgaatgttgaaggattttaaagggctaatggaaattcttctagaagtaacaattcccattctattggtgaggcagttctaaagaaagtccctgaacctcttaggttattttgtacagcaaaagaaccagcattgggttttctttgctaatagatgacagggagaatgtagacacttggaatacatggagaatccctaagttgcattttagccttcatgttatgtctcctttcctaacctttttaccagagctgatcacaggaaacagcatgatagatttgcatgacctagctccctgccttctcctgccattcttttagaaagtggtgagtggctgcctgccaggtaaaatctgggtgacaaaatccaaagttagattcagagttataagcatagcccycacccaagttgcttccaaagaaaagaaaggaagagtgttgtgtaaaatcttgcttccttgcctttaaattgggtacttattgagttaccacattagaatcgtgcattgtgctagt

SEQ ID NO: 536115 - DNA, 564 bp, Homo sapiens
ctgttcacatacccgtcagactaaattaggtgaaatctctttggccttaatgaatgttgaaggattttaaagggctaatggaaattcttctagaagtaacaattcccattctattggtgaggcagttctaaagaaagtccctgaacctcttaggttattttgtacagcaaaagaaccagcattgggttttctttgctaatagatgacagggagaatgtagacacttggaatacatggagaatccctaagttgcattttagccttcatgttatgtctcctttcctaacctttttaccagagctgatcacaggaaacagcatgatagatttgcatgacctagctccctgccttctcctgccattcttttagaaagtggtgagtggctgcctgccaggtaaaatctgggtgacaaaatccaaagttagattcagagttataagcatagcccccacccaagttgcttccaaagaaaagaaaggaagagtgttgtgtaaartcttgcttccttgcctttaaattgggtacttattgagttaccacattagaatcgtgcattgtgctagt

SEQ ID NO: 536116 - DNA, 655 bp, Homo sapiens
ctgaacaatttgggagtctgtattccctagaaagactgttcacatacccgtcagactaaattaggtgaaatctctttggccttaatgaatgttgaaggattttaaagggctaatggaaattcttctagaagtaacaattcccattctattggtgaggcagttctaaagaaagtccctgaacctcttaggttattttgtacagcaaaagaaccagcattgggttttctttgctaatagatgacagggagaatgtagacacttggaatacatggagaatccctaagttgcattttagccttcatgttatgtctcctttcctaacctttttaccagagctgatcacaggaaacagcatgatagatttgcatgacctagctccctgccttctcctgccattcttttagaaagtggtgagtggctgcctgccaggtaaaatctgggtgacaaaatccaaagttagattcagagttataagcatagcccccacccaagttgcttccaaagaaaagaaaggaagagtgttgtgtaaaatcttgcttcyttgcctttaaattgggtacttattgagttaccacattagaatcgtgcattgtgctagttgttgtactcctgttgattgattaatttcattctacattcatggaacaccaacaat

SEQ ID NO: 536117 - DNA, 312 bp, Homo sapiens
taccacttagagctcacagtctactactgcgagagtgtgggaaggtrtgataagagctatagtggtcttgccacataatttgcatttgtatcttaaagccagtggggaaccatggaaatattttaagcaggggagtgacatgattcatttgcattttactttttttttttcttttatgagacagagtcttgctctgtcacccaggcttgagtgcagtagtgtgatcatagctcactgtaacctcagactcctgggctgaagtgatcctcttgcctcagcctgttaagtagcagggactacaattgtgcacca

SEQ ID NO: 536118 - DNA, 312 bp, Homo sapiens
taccacttagagctcacagtctactactgcgagagtgtgggaaggtatgataagagctatagtggtcttgccacataatttgcatttgtatcttaaagccagtggggaaccatggaaatattttaagcaggggagtgacatgattcatttgcattttactttttttttttcttttatgagacagagtcttgctctgtcrcccaggcttgagtgcagtagtgtgatcatagctcactgtaacctcagactcctgggctgaagtgatcctcttgcctcagcctgttaagtagcagggactacaattgtgcacca

SEQ ID NO: 536119 - DNA, 428 bp, Homo sapiens
tgtctaggtctcggtctccaaatattgsagcttcccttacaatgtaatttgatctcaaacactttacgtgtcttatttttcttcctcctttttctattttggtaaataagatgttttttacacctactgccagattaatgttgggttttaatttagcccttcaagatgatcaatgacttaaccgaggaaactgctgccagaatgtagtttataatgtaccttttttcctatactcggttttctgcttctgtattttgtacattgtcagtctctgtgggttaagaactttgggactctcaagggtcatcttgacagaggagcttctgcagttgggaattgttacctttctcagagcagtgctattgggaaaaaaaaatctaagcatttttgttctcagcttcacagaggaagtgaagcacattcaaggg

SEQ ID NO: 536120 - DNA, 599 bp, Homo sapiens
tgtaagtaaaaggagatatgaayatatgttcttacccctccacgttcttttacatgaaaggtaaatcattatctaacctgttgtgtactattttgtccttaacagtatgtcttggggatctttccttgttggtacagagaaagctttctcattcgtatatcagagctgcatagtattccattgtgtggatggctgcctcctactttattgaatcagttccttacaaatgtgcacttgagttgtttccagtatttgctattacaagcaatacttcagtgaacaaaggcagctttttaaagggtcgcacagcactgcatatgctacttaaaatgagattattattcttcattcttagaatgccagttggttttgttggttgataaattcccaattactcgtattcatgagtgcaacattgatgatgaatgtgacatcccttcataacttaagaatcattagtatgactgccccatggaggcatactgttctatctcaggtttatttcaataataaaacctttggaaattttaataatgaaacctacttaagaccctttgcttaagaagtctgaatcactgatcactgcaattactgccatg

SEQ ID NO: 536121 - DNA, 572 bp, Homo sapiens
gtagagcaatttaacaggataatagtgaataagataaattacacttcagattcttaatggattgatgtgcagaagtatgcaagggaagatgggggtgggagaggagcrcctttaaaatttcagcacacagtaataaaatagggaactgggccattgtagccgttactactaggagttagtaatctcgtacaaacctctggggctctgtggtgggtagaatgtcctgtttattatagacaacaaattgggttaattctcttgtttgtgtgcctctgtggagtgggtggaaattctaggtgacttgctaattgtcttatttggaatactcccgtttctactaaagaattagtatctttggtataaaaataaggaggcagaccagttttacaaatagctgctggccaggagaataacagtttctgccaggtgagcagttaaaaaaaaggcagactggaaaaataactgtggaatggtgtttcttatttacaaggctaacataaagtctccctgtgtgttggggatgggggaggggacggattggctaagaagtaagtacggtgcttgctttgtat

SEQ ID NO: 536122 - DNA, 590 bp, Homo sapiens
tgcttctggccctcctgaaacaggaggcgagttactgagacagtagagaaaccctsagtctttagaactgtattatctacctgggccttataacctggacatgcccaggggtaaaatatatccaagtagaaatcttccttctcagaacatacccagaaataatgattctctattttgagtactttcttgtgcagtatactaaccaggtgcctactgctataaattaatttttttatttttcgtttttctcttttttgatggagtctcgctccgtcacccaggctggagtgcagtggcacgatctcggctctctgcagtctcaacctcctgggttcaagcgattctcctgcctcagcttcctgagtagctgggactgcaggcatgcgccaccatgcccagctaatttttgcatttttggtagaggtggggtttcaccatgtttgccaggctggtcttgaactcctgagctcagctcctccactcacctcagcctcccaaagagctgggattacaggcgtgagccactgtgcccagcaatttttttctttagtctaagtgtgcacattaatgcataggaaatccccatcttt

SEQ ID NO: 536123 - DNA, 590 bp, Homo sapiens
tgcttctggccctcctgaaacaggaggcgagttactgagacagtagagaaaccctgagtctttagaactgtattatctacctgggccttataacctggacatgcccaggggtaaaatatatccaagtagaaatcttccttctcagaacatacccagaaataatgattctctattttgagtactttcttgtgcagtatactaaccaggtgcctactgctataaattaatttttttatttttcgtttttctcttttttgatggagtctcrctccgtcacccaggctggagtgcagtggcacgatctcggctctctgcagtctcaacctcctgggttcaagcgattctcctgcctcagcttcctgagtagctgggactgcaggcatgcgccaccatgcccagctaatttttgcatttttggtagaggtggggtttcaccatgtttgccaggctggtcttgaactcctgagctcagctcctccactcacctcagcctcccaaagagctgggattacaggcgtgagccactgtgcccagcaatttttttctttagtctaagtgtgcacattaatgcataggaaatccccatcttt

SEQ ID NO: 536124 - DNA, 590 bp, Homo sapiens
tgcttctggccctcctgaaacaggaggcgagttactgagacagtagagaaaccctgagtctttagaactgtattatctacctgggccttataacctggacatgcccaggggtaaaatatatccaagtagaaatcttccttctcagaacatacccagaaataatgattctctattttgagtactttcttgtgcagtatactaaccaggtgcctactgctataaattaatttttttatttttcgtttttctcttttttgatggagtctcgctccgtcacccaggctggagtgcagtggcacgatctcggctctctgcagtctcaacctcctgggttcaagcrattctcctgcctcagcttcctgagtagctgggactgcaggcatgcgccaccatgcccagctaatttttgcatttttggtagaggtggggtttcaccatgtttgccaggctggtcttgaactcctgagctcagctcctccactcacctcagcctcccaaagagctgggattacaggcgtgagccactgtgcccagcaatttttttctttagtctaagtgtgcacattaatgcataggaaatccccatcttt

SEQ ID NO: 536125 - DNA, 411 bp, Homo sapiens
tgtttttgtgtgtggggttggggggtggggtagggggtggagttgaggaagggtgggaaggtggagtgaagaaaattgcctgggttgaaaagccagtgactgatgtgagattaccttgtagtgatgttgctttgggcatatggattatgaccagatacagattaacccgttcctctataattgttttatggcctcatccttctgaaattgcctccttgtggcctgaaatcctttctggggttttccttaggctgggaactctgcttgcagatgagaaataaacctacctctctccagggcatgagttccacagtgaaactgaggagtagatggatgaggartcttcttttattttgtttttagggtggtgcccttcccacagggaagcaagctgcggattctgaatttgtt

SEQ ID NO: 536126 - DNA, 545 bp, Homo sapiens
tttttttcatggaaaaaagtctaggggattcaccgctcagcaggccatcctggctatctgggcataaccaccacccagagtgtaatttcttctaaggcaatcacccaagtctttcacattttataccttcacagccctgacaaaaactgctacataataaacactaaacaaatgcctatgaaaggcaagaaggacgtaagagagggaaagaagcaaagaaatgaacaatcgtagcacctgaggccggattaaagaaaggaaaaaagcttgtawgggtcttttcatattgacaaagctttagtggaacactcttttggtgggttttcaagggatcagaacgtttgggcagaaaacagaaaaatacagacataaagaagagacctaaatatataagcatagcattgggaaaaagccttttcagaactgcaactcatgccttactcgaacatgttctgaacaaggtctcttatccaaagttgtttctggcttcagacagcaggtggcagcagaatcaagctttctggttgcagaaacttctggagcca

SEQ ID NO: 536127 - DNA, 545 bp, Homo sapiens
tttttttcatggaaaaaagtctaggggattcaccgctcagcaggccatcctggctatctgggcataaccaccacccagagtgtaatttcttctaaggcaatcacccaagtctttcacattttataccttcacagccctgacaaaaactgctacataataaacactaaacaaatgcctatgaaaggcaagaaggacgtaagagagggaaagaagcaaagaaatgaacaatcgtagcacctgaggccggattaaagaaaggaaaaaagcttgtatgggtcttttcatattgacaaagctttagtggaacactcttttggtgggttttcaagggatcagaacgtttgggcagaaaacagaaaaatacagacataaagaagagacctaaatatataagcatarcattgggaaaaagccttttcagaactgcaactcatgccttactcgaacatgttctgaacaaggtctcttatccaaagttgtttctggcttcagacagcaggtggcagcagaatcaagctttctggttgcagaaacttctggagcca

SEQ ID NO: 536128 - DNA, 545 bp, Homo sapiens
tttttttcatggaaaaaagtctaggggattcaccgctcagcaggccatcctggctatctgggcataaccaccacccagagtgtaatttcttctaaggcaatcacccaagtctttcacattttataccttcacagccctgacaaaaactgctacataataaacactaaacaaatgcctatgaaaggcaagaaggacgtaagagagggaaagaagcaaagaaatgaacaatcgtagcacctgaggccggattaaagaaaggaaaaaagcttgtatgggtcttttcatattgacaaagctttagtggaacactcttttggtgggttttcaagggatcagaacgtttgggcagaaaacagaaaaatacagacataaagaagagacctaaatatataagcatagcattgggaaaaagccttttcagaactgcaactcatgccttaytcgaacatgttctgaacaaggtctcttatccaaagttgtttctggcttcagacagcaggtggcagcagaatcaagctttctggttgcagaaacttctggagcca

SEQ ID NO: 536129 - DNA, 516 bp, Homo sapiens
cactttgctggttaacttcctaactgccatctataatatttgctgatggctcccaagtgtctatttctagacttgacctctcctgagaacagaaggagaatacaactgccttttccagtaggatgcttygtaggcatttcacgggccaactgaacttcttggtcttctttaatcatttttgtttgtccttctcactggtaacgaataggtgcttggtccctgcttgttgaactaaacttgaaacaatgtgccagtacttatgctaagctgggtcctgcacaaaatgaagtgaactctccagagccagctctacaggaacgtagggtctggattttaatattgatctggtttgttttcaactcgattgtgttggagccttgagaacatacagtgtgcctttgtcctctaagagagtggacatgtttgaactgacatttggtcttttcaggaattgtttggtaggaaatttcttggatttttactctccttgagctttgactcttcttgggctgtcct

SEQ ID NO: 536130 - DNA, 516 bp, Homo sapiens
cactttgctggttaacttcctaactgccatctataatatttgctgatggctcccaagtgtctatttctagacttgacctctcctgagaacagaaggagaatacaactgccttttccagtaggatgctttgtaggcatttcacgggccaactgaacttcttggtcttctttaatcatttttgtttgtccttctcactggtaacgaataggtgcttggtccctgcttgttgaactaaacttgaaacaatgtgccagtacttatgctaagctgggtcctgcacaaaatgaagtraactctccagagccagctctacaggaacgtagggtctggattttaatattgatctggtttgttttcaactcgattgtgttggagccttgagaacatacagtgtgcctttgtcctctaagagagtggacatgtttgaactgacatttggtcttttcaggaattgtttggtaggaaatttcttggatttttactctccttgagctttgactcttcttgggctgtcct

SEQ ID NO: 536131 - DNA, 516 bp, Homo sapiens
cactttgctggttaacttcctaactgccatctataatatttgctgatggctcccaagtgtctatttctagacttgacctctcctgagaacagaaggagaatacaactgccttttccagtaggatgctttgtaggcatttcacgggccaactgaacttcttggtcttctttaatcatttttgtttgtccttctcactggtaacgaataggtgcttggtccctgcttgttgaactaaacttgaaacaatgtgccagtacttatgctaagctgggtcctgcacaaaatgaagtgaactctccagagccagctctacaggaacgtagggtctggattttaatattgatctggtttgttttcaactcgattgtgttggagccttgagmacatacagtgtgcctttgtcctctaagagagtggacatgtttgaactgacatttggtcttttcaggaattgtttggtaggaaatttcttggatttttactctccttgagctttgactcttcttgggctgtcct

SEQ ID NO: 536132 - DNA, 516 bp, Homo sapiens
cactttgctggttaacttcctaactgccatctataatatttgctgatggctcccaagtgtctatttctagacttgacctctcctgagaacagaaggagaatacaactgccttttccagtaggatgctttgtaggcatttcacgggccaactgaacttcttggtcttctttaatcatttttgtttgtccttctcactggtaacgaataggtgcttggtccctgcttgttgaactaaacttgaaacaatgtgccagtacttatgctaagctgggtcctgcacaaaatgaagtgaactctccagagccagctctacaggaacgtagggtctggattttaatattgatctggtttgttttcaactcgattgtgttggagccttgagaacatacagtgtgcctytgtcctctaagagagtggacatgtttgaactgacatttggtcttttcaggaattgtttggtaggaaatttcttggatttttactctccttgagctttgactcttcttgggctgtcct

SEQ ID NO: 536133 - DNA, 537 bp, Homo sapiens
tgtttttttttttggtgttttgttttgtttttttaaacttaaccactaataagtttcatctagtctgtttataatctttttactaaatatataacaacattgccttgtggtgtttagatcagcaacttctttgctccaaaggtacagtgaatgatgacggttgctgggcctcaaaataaggaagacgaaactaagagaacaggccacaggactctccctgatgttgaatggcagcaccttagattgggcaacagtaacatgagttgcatacataggaagtgcccactggttcctgggtgttctctgaatttctagtgctcacgtgaactgtggagggcaaaggaggaggatacggaatgtacagtttcttttacagcaakaagtgaaacttaggccctttctgatttaataatagcccatgaagaaggagctgagtggtttgaagactgttctagttctgcctttggtggccatgtggtttattccacagcttttcaaactgcaggttgagaccttttactaaatcatgaaagcaaa

SEQ ID NO: 536134 - DNA, 537 bp, Homo sapiens
tgtttttttttttggtgttttgttttgtttttttaaacttaaccactaataagtttcatctagtctgtttataatctttttactaaatatataacaacattgccttgtggtgtttagatcagcaacttctttgctccaaaggtacagtgaatgatgacggttgctgggcctcaaaataaggaagacgaaactaagagaacaggccacaggactctccctgatgttgaatggcagcaccttagattgggcaacagtaacatgagttgcatacataggaagtgcccactggttcctgggtgttctctgaatttctagtgctcacgtgaactgtggagggcaaaggaggaggatacggaatgtacagtttcttttacagcaataagtgaaacttaggccctttctgatttaataatarcccatgaagaaggagctgagtggtttgaagactgttctagttctgcctttggtggccatgtggtttattccacagcttttcaaactgcaggttgagaccttttactaaatcatgaaagcaaa

SEQ ID NO: 536135 - DNA, 646 bp, Homo sapiens
aagcttgttagaacctgagcagaatgctgtctgaaaaggtagagaagtcaggagaagcagtgaggccctcaaccctgtgtgtcacaatgcctcctgtcatttcctctctgagtttccagtacaagcttcttggtggctgttttctgcccaagcacatgaactttggaagacctagcactttggacaaagtccctggccctgacacttaatagtttggggaacttgggcaaaatactcaaagcttcctagtctgtaaagtgagaatgayaaaacatctgccttccttgcaggattgttgtggtgatgtgtaagacataaaatatcaagcatagtcagcagtcactgagcttaaggaatgttaagttataatcattatttctgaacttcagtgcccaatatgaccctgttgacacctcctttgcctccttgggacatactctcttctggtggtcctcatccctttccagctatcctctgtctcttggtattctcctaatctaccaactcccatcaatgttcctgcttgcccagggtgcctgtctcagccctcttcttttctccctaacccctgggaagatctcatcaaattccctgcctttcgttttccttatcgatttgctgagggcttactcacaagtttctccag

SEQ ID NO: 536136 - DNA, 646 bp, Homo sapiens
aagcttgttagaacctgagcagaatgctgtctgaaaaggtagagaagtcaggagaagcagtgaggccctcaaccctgtgtgtcacaatgcctcctgtcatttcctctctgagtttccagtacaagcttcttggtggctgttttctgcccaagcacatgaactttggaagacctagcactttggacaaagtccctggccctgacacttaatagtttggggaacttgggcaaaatactcaaagcttcctagtctgtaaagtgagaatgataaaacatctgccttccttgcaggattgttgtggtgatgtgtaagacataaaatatcaagcatagtcagcagtcactgagcttaaggaatgttaagttataatcattatttctgaacttcagtgcccaatatgaccctgttgacacctcctttgcctccttgggacatactctcttctggtggtcctcatccctttccagctatcctctgtctcttggtattctcctaatctaccaactcccatcaatgttcctgcttgcccagggtgcctgtctcagycctcttcttttctccctaacccctgggaagatctcatcaaattccctgcctttcgttttccttatcgatttgctgagggcttactcacaagtttctccag

SEQ ID NO: 536137 - DNA, 556 bp, Homo sapiens
tattgggaaggaaattagttttttttttctgttttcccggtggcggagtagaagaagtatttattgagtaggaacaggggagcgtggcaaacttggctttccttttaacttttggagaagggagtggagtttgaattggagaggaggcaggtggagtttgaagggaacttctcaacggctttccctttctgctgtctaaaggagtcctctacacttcagctcccgccccttcatagcaattccctcagccttctccgatcgtctaatttaaagcttctcctcttttaagacatcccttccccagcattaagcccctcccccggagcgctccggttccctgctgtcggatctcgggctaagcrtccctacccacgcctcctcttcccaggattcagaaactcccttctctttttctgccaggcgatcccggattctcctccgtcccgccccttttctcccggaccttcctccgctctgcgggtccgcgggcccctctcctggcaacccccggccctcagcgtgctcgcgctgtttctctcgcgtcctcccttccctc

SEQ ID NO: 536138 - DNA, 541 bp, Homo sapiens
agctacattaggaaaatatgtcatattgcagggaaaaagcagttgatatgtagatttctggtagtaataaaattagcagttttaacctggtgtcagctccagaattgactttttggggaatctgggaaagttgccttggaagttgttaggtttaaacataagtaataacagcacttaaaagcattttaaaaaattacaaaattaacacccttactgattttacaataatgtgtaggaactctcatatctcccttactctctctaattgtggtagaatacacaggaggttgaccatcttaaccattctagagtacagttcagtagcattaagtacattcacattgttgtgcasccatcactaccatccatctaaatgactcttttcatcttgcaaaactgaaactttatacccattaaacaacagctccctattccctcctgcccctgtctctggcaagcaccattgtactttgtctctatttgataactccagatactgcaggtaagtggaatcatattgtatatattttttgttactggc

SEQ ID NO: 536139 - DNA, 540 bp, Homo sapiens
gattactagttcctagcttcatgatttttaggacatatgaacaaaaaatggctattgttaagtgagttgtcacatagagtctagatgttgattattgtcctgggggaaggatagaaaccagagaatagatagcacaggttcttcctactcccctcttctacttctggtttaaggtttcatctttttttttttttctttgttttcttcttaaaggtttcatctttaaatgacattaattaggctttgtgtttttagccatttttagagtccgttgtgctgtatctcctgatctctctttttcagtgatttgtggttatgtaagttatctcagttctttgctgtcagcaattttaaatcaaacattgaagcattttgggtagatgacgtgttactttgattaatgaggttcttgatctggatattttaaggccagtaacaacacaatatggaaacacctaattctccttaaaactgcartagtgttctcactgccaaagctgaaaccgatttgtgctggttacttctttctaagagtgaatg

SEQ ID NO: 536140 - DNA, 600 bp, Homo sapiens
taaaagagagggagtgtatttgggttttcctgcagtcttccaagtggtattcctaaaagcttagtttttctgtttccaaatgaaagatcaggcaagcaaattcttaastggataactaatctctttctattcatagagagcattcctctgtcactagctggaggagttttagcataattggtggatttactgataaaagggaaactgcaataatcttatgaggaaagttagggaaaaataccattatttcttggtgaatgatattaatgagtgaattcagggagaacctgagagcccctcaagtgggcaggtgaaagcttcagtgtagcaacagtcttaagagacaagacttaagagacaagagcatctgtatagaagaagttgatgcaagtgtgtgaaaccactcgtgcagagggcagatgagctctcagtgacagaggaatgtggttgaaagggaaacagagcctgaatcatacctatgtaattagcccactgtaaatttgcttcagtcacttgcctagaaaaatctatatatcatttatctatgtttacttttcatttgtgggctattcctggttttcttgtaacaaccctattcaa

SEQ ID NO: 536141 - DNA, 600 bp, Homo sapiens
taaaagagagggagtgtatttgggttttcctgcagtcttccaagtggtattcctaaaagcttagtttttctgtttccaaatgaaagatcaggcaagcaaattcttaactggataactaatctctttctattcatagagagcattcctctgtcactagctggaggagttttagcataattggtggatttactgataaaarggaaactgcaataatcttatgaggaaagttagggaaaaataccattatttcttggtgaatgatattaatgagtgaattcagggagaacctgagagcccctcaagtgggcaggtgaaagcttcagtgtagcaacagtcttaagagacaagacttaagagacaagagcatctgtatagaagaagttgatgcaagtgtgtgaaaccactcgtgcagagggcagatgagctctcagtgacagaggaatgtggttgaaagggaaacagagcctgaatcatacctatgtaattagcccactgtaaatttgcttcagtcacttgcctagaaaaatctatatatcatttatctatgtttacttttcatttgtgggctattcctggttttcttgtaacaaccctattcaa

SEQ ID NO: 536142 - DNA, 600 bp, Homo sapiens
taaaagagagggagtgtatttgggttttcctgcagtcttccaagtggtattcctaaaagcttagtttttctgtttccaaatgaaagatcaggcaagcaaattcttaactggataactaatctctttctattcatagagagcattcctctgtcactagctggaggagttttagcataattggtggatttactgataaaagggaaactgcaataatcttatgaggaaagttagggaaaaataccattatttcttggtgaatgatattaatgagtgaattcagggagaacctgagagcccctcaagtgggcaggtgaaagcttcagtgtarcaacagtcttaagagacaagacttaagagacaagagcatctgtatagaagaagttgatgcaagtgtgtgaaaccactcgtgcagagggcagatgagctctcagtgacagaggaatgtggttgaaagggaaacagagcctgaatcatacctatgtaattagcccactgtaaatttgcttcagtcacttgcctagaaaaatctatatatcatttatctatgtttacttttcatttgtgggctattcctggttttcttgtaacaaccctattcaa

SEQ ID NO: 536143 - DNA, 530 bp, Homo sapiens
tgcccagggtgagacgctgatcattgcaactgttccttctatcccctgaacatacaattgtctaatgtagagacatagacatcaaggtaaagcttttaaaaaatcattattccatgtccctgctccctgatagcacataagcaactacttttatcaatgtggcatagcaactactgattactaatcaaaaagcagtctatgttccttaaacacaggcttcccatggttctccagttcacgcacaataatatttctctacaagttacatatattcttctctgttgacctatggaaaactaatctacaaaataggaatatattaacacagtttcttatgtrcatgaatatatatagatatgatacatatgcaacaaaaaacccaagtaaatataactatcatcctcaatttaacagaattgttaaaaacttggaattttctacaatcaagctataacatttattgaccttcctatgggttaaagaaaaagatgcttatttagaggcttaattatagacctacacaaaaataa

SEQ ID NO: 536144 - DNA, 667 bp, Homo sapiens
ggcagagatttatgtctgtcttggttgctcatatatctatccctgaaacagtgcccggcatataccaggtgcacaataaatatttattgaatgaataaatgactgtttcttccacctgctctctggagaatgaattgtagagaggcaagtgggaggcaggcagtgagacaagttagggggcatattcagtttgcacagttaagctgtgatggtgtattggagaagtggacagcagtggagacagagggaagcawtgtggcatccagccacaaatcaatccttagatagagtccatcggcagtttgaattcttagaaactttagaagtgcaagtgtttgcttggaacctcctgtgacagaactcactacctcctccaatcccagcttgagatgggtctgattgctgaaactgccctccttctattgaatggtaatatgtcactttgcagttcccgagttttacccattgtgatctgtagtggacctcttatttttgcccgtccagcatctacctgccctgtcaggtattcccccagttttttgtttgtttgtttttgagatggagtctcactctgtcactcaggctggagtgcagtggcacgatatcggcccactgcagccaccgtctccctggttcaaacgattcttctgcctcagcctcccaagca

SEQ ID NO: 536145 - DNA, 438 bp, Homo sapiens
agcgagccaagatcgcaccattgcactccagcctgggcggcagagcaacacaccctctcaaaaaaaaaagttgctgtctaacaccactggtttccccttgaattctttcctcagcagagccaagaactctcccaggctaagcctcaattttgaggctcayctgccctgcatcagctccagtttttgttgttgttgcttgaagcccttactttcttgcattacaaggtgctccagtctctccttgttcacctggaagtggtaatagaggagagccacttactaaaactgtataagacgttggcgcacaagcggccctgctgagatccctcccaggcaagtgtaacacgagctggtagagggccctcctctacttccacatttggccctggcaggctttaatgttctctcactctttactccccttctctttttttgcac

SEQ ID NO: 536146 - DNA, 438 bp, Homo sapiens
agcgagccaagatcgcaccattgcactccagcctgggcggcagagcaacacaccctctcaaaaaaaaaagttgctgtctaacaccactggtttccccttgaattctttcctcagcagagccaagaactctcccaggctaagcctcaattttgaggctcacctgccctgcatcagctccagtttttgttgttgttgcttgaagcccttactttcttgcattacaaggtgctccagtctctccttgttcacctggaagtggtaatagaggagagccacttactaaaactgtataagacgttggcgcacaagcggccctgctgagatccctcccaggcaagtgtaacacgagctggtagagggccctcctctacttccacatttggccctggcaggctttaatrttctctcactctttactccccttctctttttttgcac

SEQ ID NO: 536147 - DNA, 493 bp, Homo sapiens
cctcccagggtcaagcaattctcctgcctcagcctcccaagtagctgggattacaggtgcccgccacacccagctaatgttttgtatttttaagagagacggggcttcaccatgttggtcaggctggtctcgaactcctgacctcaagtgatccgcccaccttagcctcagcctcccaaagtgctgggattacaggtgtgagccaccatgcccggccgagtcgatcttttaatgcctgaaataactcccattttaaagaacagatttgttgagaaaccttgtgatagttcagtctcttgtaagaagcagctcgacttgttactattaaatagaaaccagraaacagtaccactgagcgaaattaattctgcttaattttatacttgcaggttttacctttgaagtccagaacattccagactttctagaacacacagacaataaggtagtgtgttcaaagattagtttgaaaacttaggagaaaacatgagat

SEQ ID NO: 536148 - DNA, 624 bp, Homo sapiens
tgaagaatcctgactattttggacccctccctgaggggctttcacactccctggcatgtaatgtctatgattccacagctaattaagtgggtgtggagaatagattttaacgggttaggatgctggaattatttagataaaaatgctgagaatgaggtattcagaaggcatttctacttcacaaatatttctgctgattactgattcctagagtgtagtggggtttactaccacygtgaatgtccaatccaaaatggaaaattcagcggggcgccatggctcacacctgtaatcccagcactttgggaggccgagatgggcagatcatgaggtcaggagatcaagaccattctggccaacatggtgaaaccccatctccactaaaaatacaaaaattagctgggcttggcggcacgtgcctgtaatcccagctactcaggaggctgaggcaggagaatcacttgaacctgggaggcggaggttgcagtgagccaagatcgtgccactgcactccagcctggtgaaagagctagactccatgtcaaaaaaaaaaaaaaagaaaaagaaaaatggaaaattcggcggggcctggtggctcacgcctgtaatcccagcactttgggc

SEQ ID NO: 536149 - DNA, 564 bp, Homo sapiens
taatgtctatgattccacagctaattaagtgggtgtggagaatagattttaacgggttaggatgctggaattatttagataaaaatgctgagaatgaggtattcagaaggcatttctacttcacaaatatttctgctgattactgattcctagagtgtagtggggtttactaccactgtgaatgtccaatccaaaatggaaaattcagcggggcgccatggctcacacctgtaatcccagcactttgggaggccragatgggcagatcatgaggtcaggagatcaagaccattctggccaacatggtgaaaccccatctccactaaaaatacaaaaattagctgggcttggcggcacgtgcctgtaatcccagctactcaggaggctgaggcaggagaatcacttgaacctgggaggcggaggttgcagtgagccaagatcgtgccactgcactccagcctggtgaaagagctagactccatgtcaaaaaaaaaaaaaaagaaaaagaaaaatggaaaattcggcggggcctggtggctcacgcctgtaatcccagcactttgg

SEQ ID NO: 536150 - DNA, 537 bp, Homo sapiens
tgagcaatctcacataagtttgtaacctttcctatccttgctacttgtatcctgagataaagaacctaacctctcaggaccstggtaaggattaaataataacatctgcagaacacttaacacacttggcacaaaaaagctcactatgtgttaacttaaaaaagaaaacattctgtttaaatggaataattttaaatgctgttttcccttttaattcagtactaagaataagtggaattgtgggctgtatatagtaaattgcttccttattaaaatagtattgtatatttaacctgtaagatttttttaaagataaaaaatcttttatagtttaaatgtttaaggaaatgtctgttattcaagtatatatacttttttttttttttgagacagagttttgctcttgttgcacaggctggagtgcagtggtgcgatctcgactcaccgcaacctccgtcctaggttcaagcgattctcctgcctcagccttccaagtattacaggcatgcgccaccacgtctggctaattttgtattg

SEQ ID NO: 536151 - DNA, 520 bp, Homo sapiens
acaggcagaatgtcacttactctatttcagatttttcacttcaaactttcacaacyagcttttaaaagtggtcagtgaatcacttcaggtcagccctgaatgctgtcatttgcaacttttcttcagccccaatagaatatataacatattgtattcattttctaaagatgctgcaacaaattgctacaaacgcagtggcttaaatcaccaccattttattgcattatagttctggaggtcatgtagaccagaaatcggtctcactgggctaaaatcaaagtgacagcagggctgagctcctttccagaggctctaggggggaatctattccttgccctttccagcttctagaggcacccacattccttggctcatcatcttctaacatcttcaaaaccagccatagtgggccaggtcttttcacgccgccatctatctggttctgaatcctcttctgcctccctcttctaccctgaagggcccttgtgctaacacaaggagctaatccagagggcgccca

SEQ ID NO: 536152 - DNA, 529 bp, Homo sapiens
tatcatgaacagagtcaaatcttcatcctaacgagtatcaattgtcctgcctcaggttttcatgggtaaactgaggaaaagcatatctccctcacaaggtccgtgtgattatgtaaacaaagggctagcctggaaagaaggacatgcttagttaatagcgattattattttaattgtcagttgattacatggtgatatattcagagaagattgatttatgaagagcaatttgccyttccaggaaatggcccctggactgttaggcatttcgatttcttgggcatgaattaaatagtttctcttcctctcccttgtcaccagttgcatggctggcttgcacctgacttagtgaccctcccttcctttctccctcccttcctcctttttcttctttctctcttcctctttccttatttctctttttaaagtttattgggaacttttctctataaaatgctcattacagaaaatttgaaaaaaagaaaacaaaaaaacagaaagaaaacaaaatcacctatgacaccttgag

SEQ ID NO: 536153 - DNA, 622 bp, Homo sapiens
caggcccagactggactctgctaggaaagtgggggaaggtgggttggaaatgaaagcagtcaagcaactaacagcttttccagccagaaacaagggagccctgttgtagcagagcctcttttgtgggctgagacactgtcagcctggcctttctgcctctcagagctgttggggatcatggaagatgatggaacggtagcaaggcaaaatagacatatatatgtatgtataaaatatatgcctataaatayctcgtgcctcagttttctcctctgtaaaatggacatagcaatcctgccttatccttcacaaggagaaatttcatgtactattttcagtgctcctagagaccagctaggctagccagattgggcttgttttcccccagagaggaatgatgacaactccagccccttggtaccctctccctctcctcccatctcaccctgttctaggttggtcttggcaacatttcctctggaaaataagaaaaacaaattttcccggggttatcaatcactgccccgcttgacacattggggctgggcttcctagatctgaaagggagcacatatcgaagcccacctgagcttgtgtgccaggtctctccaggagccctggg

SEQ ID NO: 536154 - DNA, 573 bp, Homo sapiens
aaagcagtcaagcaactaacagcttttccagccagaaacaagggagccctgttgtagcagagcctcttttgtgggctgagacactgtcagcctggcctttctgcctctcagagctgttggggatcatggaagatgatggaacggtagcaaggcaaaatagacatatatatgtatgtataaaatatatgcctataaatatctygtgcctcagttttctcctctgtaaaatggacatagcaatcctgccttatccttcacaaggagaaatttcatgtactattttcagtgctcctagagaccagctaggctagccagattgggcttgttttcccccagagaggaatgatgacaactccagccccttggtaccctctccctctcctcccatctcaccctgttctaggttggtcttggcaacatttcctctggaaaataagaaaaacaaattttcccggggttatcaatcactgccccgcttgacacattggggctgggcttcctagatctgaaagggagcacatatcgaagcccacctgagcttgtgtgccaggtctctccaggagccctggggca

SEQ ID NO: 536155 - DNA, 451 bp, Homo sapiens
aattcggtttgggtggcaaggggctagcagagatacttggttcctgaggacatagaagggatccagcttctggtttgcagkgcaggggttcctagctcccaagtggtggtggtgggggatggggagatctttaagaaactcctttgtttggttgggcactgcttatggctaataacttcagcatctggttctcctggaaattttgtgagctctccaagagtcttgattaaacttatcttttcccttaaagaacccaatggattctgttgtttgcaactaagaattttactattacaccatttgtcttagttcatcctgctgtaacaggtaccatagactggggtggtttaaacaacaaaaatttatttctcacagtttggaggttgggaagtccatacccaggtgctgacagagtcagagtctggtgagagttattgtcccagtttacaga

SEQ ID NO: 536156 - DNA, 625 bp, Homo sapiens
tttgggaaggctggcagagctcttcagatgagatgctccctcttctctctttctcgtcccttttattatcacatatcacattcctaacgccagcattcaggaacagctggttttatggaggcagaggaaagaaggactccctcaagagataatcatggggcatggctggcttgtgaaagtcccaggggctcagcgctgtgtggggccagagcaggcttagcagggcagggccaaggaggctgaacagtgggccctggaggagcggagtccttgaagygcaagagaagggaggggcccacctgcagggagaaaagagggaaggcacctcggcaaaatggggctctgctgtaccttgttctttaaccctgtgatggttgacaagctatttctgtgcactctgaaggggtgcccttggtttggggaactgacaaaaggcagacactgggggatgaatcaaaggtgtgtggggcaaaggaagggcttcaactagatgggaactggcctcccagattctgcaccatgcagagatccaggggaacctggcctgcaaatcctgtaacttggctgggttttattcaaggtgggcggtctagtcctggtggtaggaggagggaggagaaacaca

SEQ ID NO: 536157 - DNA, 570 bp, Homo sapiens
gcagtgacaggcagagcagcgkcagggaggagctcttcattcatactttcctccaggcccctccagcgtttttcatggctgagaaagggagtctgggctctgtgtggggagcctgactataacttcattgaagaggctagtggcacatttccattccaaactgtatacaaaactggctaataaataatcactgttgatcaagctttggaaagtcctcatcatcatttactgagcacctactatggggaagccacatttaagtattttaccaatagggccccattaactcttgtagctgccactcagggtcagttttattatccctattacctagatgaggaaactggggctcagggtgtctcaagtcacatatctaggaagcagtgaggttcacacagttccaaatccagtttgccctcttcctgcttcttgcaactgcccctcagagctgaggcattctcttaggggtcttcttctgaaagaacagcctgtccccgaaccaaccagaaacagctttctccaccagccacagccccggcataaatcaagtctaggttcctgcccatgggt

SEQ ID NO: 536158 - DNA, 582 bp, Homo sapiens
ctgttaagcaacaggatcaagttgttcaggcatctcataagagagcacaccagaaagacagtcaggacacatggagcctcatgccacttcaagagtggtgagtctttttgagcctgatttcttgatccagtaaagcaggcagagtagatgatgtttaaaggcccttctagccacacttctagagccaagagaccatcacacactatttctcactaagttccaccaaattcctcaagcccagaaccacatgggccacatggaagagcccccgttaacaactttaaggaccagcgatgtggacttcacaggcaaaggagccaaaaccatccccagaggcaaagaccacagctcgctcttcaaacctgtgttctgagtggctggccatgatggaaatctgcaattagctgttttaatccctaaaatagctttgctactattgtatatagtcacgtaggaaaagagaaaaccagggaccatcacagcaaggttggggggaagttggagattcaggcctctgaaygccagcctcttatttgaattgtgtgtggttgcagataatgttctgatttccagagagctgac

SEQ ID NO: 536159 - DNA, 587 bp, Homo sapiens
gtagctgtcctgagaaaaaggagggaatagaggagggattataatgtaatcattattgttgcctaaactaaaaaaactgttcttggtccatgaacagtttagtatttggacaaagacaaacagtgctgttttgcctgttggaaaaaataaatgataaaagaaagcaaaccaatatttatcagggaggattgcttaaatttgtgggaatcagcagctttgaaattttgagtaatctgtttacagcatcaattttagtgaaatggggcaaaaactcttgtgctatttattttgtttatttagacactttgaggtattctgattcttggtattatttacatacgtgaccccttatggataaccctctctttttattagtaaaatagtactttaaaaagaaattatagtatgtttgtataatgaaggctcttttccacatacttaatatgctcagcttagtgacatctaatgaatgccagtggctgtattagtcagggttttccagtgaaacacaaccaataggatacttagtgatatggtytgggtctgcgtccctgcccaaatctcatgtcaaattgtaatcctaggtg

SEQ ID NO: 536160 - DNA, 626 bp, Homo sapiens
taaagaagcccagttgaaacaactggagatgcgggtgtgggatccggagtgagaagcaaggcagagtctgtggtgactctgaatcttcacarcaggcataagtgaaaagaagaaaaggcaggtttgattaggaaaagaatatgcaacatgcctcacatgcactgggtagcctgttctatatatggagtttacctcatactacaaggatgttatgtgtatgttttccacagttatctgagagctcctacaactcactgttcaggtcttcctgtcttttgatttcagaccttacctccccttaatatcctctaccaactaccctccattctctcatcttccaacccttccccctgccctttgactttgtctcagaatgttatggtctattgtacaaaggcacaaaaagagccactgtactcaattttgttggctatatacagctaagtacatcttaaaaaattgttgcatttttaaaagaacaatttacatcctagaaggtatcttcatttatggacataagctcttttaaatgcaatagcaatgctacacccaacaattactttatctgtataaggatgcagcatttggggttacattctataatgatatgaaataaaaaaattatg

SEQ ID NO: 536161 - DNA, 626 bp, Homo sapiens
taaagaagcccagttgaaacaactggagatgcgggtgtgggatccggagtgagaagcaaggcagagtctgtggtgactctgaatcttcacagcaggcataagtgaaaagaagaaaaggcaggtttgattaggaaaagaatrtgcaacatgcctcacatgcactgggtagcctgttctatatatggagtttacctcatactacaaggatgttatgtgtatgttttccacagttatctgagagctcctacaactcactgttcaggtcttcctgtcttttgatttcagaccttacctccccttaatatcctctaccaactaccctccattctctcatcttccaacccttccccctgccctttgactttgtctcagaatgttatggtctattgtacaaaggcacaaaaagagccactgtactcaattttgttggctatatacagctaagtacatcttaaaaaattgttgcatttttaaaagaacaatttacatcctagaaggtatcttcatttatggacataagctcttttaaatgcaatagcaatgctacacccaacaattactttatctgtataaggatgcagcatttggggttacattctataatgatatgaaataaaaaaattatg

SEQ ID NO: 536162 - DNA, 626 bp, Homo sapiens
taaagaagcccagttgaaacaactggagatgcgggtgtgggatccggagtgagaagcaaggcagagtctgtggtgactctgaatcttcacagcaggcataagtgaaaagaagaaaaggcaggtttgattaggaaaagaatatgcaacatgcctcacatgcactgggtagcctgttctatatatggagtttacctcatactacaaggatgttatgtgtatgttttccacagttatctgagagctcctacaactcactgttcaggtcttcctgtcttttgatttcagaccttacctccccttaatatcctctaccaactaccctccattctctcatcytccaacccttccccctgccctttgactttgtctcagaatgttatggtctattgtacaaaggcacaaaaagagccactgtactcaattttgttggctatatacagctaagtacatcttaaaaaattgttgcatttttaaaagaacaatttacatcctagaaggtatcttcatttatggacataagctcttttaaatgcaatagcaatgctacacccaacaattactttatctgtataaggatgcagcatttggggttacattctataatgatatgaaataaaaaaattatg

SEQ ID NO: 536163 - DNA, 626 bp, Homo sapiens
taaagaagcccagttgaaacaactggagatgcgggtgtgggatccggagtgagaagcaaggcagagtctgtggtgactctgaatcttcacagcaggcataagtgaaaagaagaaaaggcaggtttgattaggaaaagaatatgcaacatgcctcacatgcactgggtagcctgttctatatatggagtttacctcatactacaaggatgttatgtgtatgttttccacagttatctgagagctcctacaactcactgttcaggtcttcctgtcttttgatttcagaccttacctccccttaatatcctctaccaactaccctccattctctcatcttccaacccttccccctgccctttgactttgtctcagaatgttatggtctwttgtacaaaggcacaaaaagagccactgtactcaattttgttggctatatacagctaagtacatcttaaaaaattgttgcatttttaaaagaacaatttacatcctagaaggtatcttcatttatggacataagctcttttaaatgcaatagcaatgctacacccaacaattactttatctgtataaggatgcagcatttggggttacattctataatgatatgaaataaaaaaattatg

SEQ ID NO: 536164 - DNA, 652 bp, Homo sapiens
ggggtgtggtcttatcagaggcctgactggggaaagattcactatcaattcattcagttttggcaggatttattttcttgtgggtatagaactgaggcccctgtttgctccctgttggccaagaagaagctctttgcatctagaagcctcccaaaggtctttgccacrcagtcatgtaagaagttacaacatgacagcttatttattcatagcccgtatgggagtctggttagcaaagtgggtactattgcatgtatagtaacataatcatgagagtaatactcatcacctttgccatagaacatacccttactatgggagtgacattcttgcaatgttgcccaggctggtcttgaacttatggcctcaagtgatcctcccacatcagcctcccaaagtgttgggattagaggcatgagccattgcacgtggccaaaaatatatttttaaaaaagaaaagtgaaaaggtatacttatttataagtcttaccatatttaaaagtgcagagttcatggatggaattttttatatattcctctaatgctacagtgtcaattgacatgtagaatcaatagaatagccatggtacttttgtttcctattgtaaagtctggctgtgtctatttttaaaagtgctggatgatgctttta

SEQ ID NO: 536165 - DNA, 652 bp, Homo sapiens
ggggtgtggtcttatcagaggcctgactggggaaagattcactatcaattcattcagttttggcaggatttattttcttgtgggtatagaactgaggcccctgtttgctccctgttggccaagaagaagctctttgcatctagaagcctcccaaaggtctttgccacgcagtcatgtaagaagttacaacatgacagcttatttattcatagcccgtatgggagtctggttagcaaagtgggtactattgcatgtatagtaacataatcatgagagtaatactcatcacctttgccatagaacatacccttactatgggagtgacattcttgcaatgttgcccaggctggtcttgaacttatggcctcaagtgatcctcccacatcagcctcccaaartgttgggattagaggcatgagccattgcacgtggccaaaaatatatttttaaaaaagaaaagtgaaaaggtatacttatttataagtcttaccatatttaaaagtgcagagttcatggatggaattttttatatattcctctaatgctacagtgtcaattgacatgtagaatcaatagaatagccatggtacttttgtttcctattgtaaagtctggctgtgtctatttttaaaagtgctggatgatgctttta

SEQ ID NO: 536166 - DNA, 665 bp, Homo sapiens
aaaagtgcagagttcatggatggaattttttatatattcctctaatgctacagtgtcaattgacatgtagaatcaatagaatagccatggtacttttgtttcctattgtaaagtctggctgtgtctatttttaaaagtgctggatgatgcttttaatgggtaataacttaataacttgctataatcagtttgtctctaccatctccacattagttacctgctatttcatccaaactttctgttccataccagcatctgcactgattttaaaactctttacctccctttccagtaaacaaagaaacaaaaataggaaacaatgaatcacatcacaacaatgtctatgtgtgccctctgcctcagaagagaatagtgatttttaaatgtaagtcattacaatgatagaccccctttctcaggccaaaagaaatkggcctttgccataatagcaaaaagcagattttgtacttacctaagattttaatcagtgatgacagtgattgtattaaaattacttgcacttttagcatgttaaagagttatctcgttatccccttttagtggtttcacaaccatatttaatcagatagcaagtctatagataaaatctggcatttttaaatacaaaattgcttatgcagtaaaggagaagcatgcttctaaca

SEQ ID NO: 536167 - DNA, 602 bp, Homo sapiens
ttaaattaggggaagtgacaacgcagtgataatctgaagatcccaggtcttcagatgaaagctccctcctaaagagccagaatttaactttgagattggcatatattacaactggttacaggaacattgaactaggtatctcccagtggaaaggaaaacagaaagacctgtttaacgttgaagctctgcccccatgttcctgagagcatactgtgataactgtgaccatagagaaaagaaaaagccaatagctgaaatgaatcaggttgttgggggcctgagataagtaagtgcaacttgtttacatgtaaaacatttgtcttgtcaatttgggcattttatctggaaattatccaaagcagcaattatctagagctagcatgctagactgtttatccctagacatgggtgggggatgaggggatagaatgcaggttttcatggcacttatagagtttgggaggtctcttttttttgtatttaagaaaaagaatacaaaattaggcayggggccatggaagtgacctatgcgagtgacggccctaaagctatagttttcctaacttcacagaaaatccacctctgaccctaaacccagatga

SEQ ID NO: 536168 - DNA, 179 bp, Homo sapiens
tgaagatggattggtagaggtgtgtcgatacataaatttcaagtcatttttgcttgtgcagaatcatcccaatcttaacaagactgaatgggcagtcctgtggctttcttccttttccatattcccaacaaggctacktgaagttcaactcttgatgagccgcttacaacagcagttcc

SEQ ID NO: 536169 - DNA, 636 bp, Homo sapiens
cctttttggctgggggttcctgtaggacgctgctggagctgagtggcttcacagcggcagtgacagcagggtgcatctccactgccttacgttttggggccaatttgggggatgacacaactttaaccacagattgcttcacgttcactgtgggtttagcttcaccccttttttccaaggtctgtgctgaccatttcacattcaataatgagtctgcaatccctgaggtttctacctccaccttctgggatgactttgtgggaagctgcttggtcaggtgccatgtgattcctggcacagcagtgagcactggtttctctgccacttgggtattgcaagaggctacatctccctgaagaggtgtcaagactgatttttccctctcctgctgtttctgcatgcgcgtctctctcatgatctcacatctcttgacttgaattttagtgatgtcaactcctgtggtctcaactgaagcctctgtagcttccattctaacacggctcagaaaatcaacttcatttccttcctgaagtttcttctcttctttcctccatgttcttttggtgattcgcagyagcaaccttgcccctggagtggcctcatgttgagacggggagctggtgctgctctcagagc

SEQ ID NO: 536170 - DNA, 614 bp, Homo sapiens
aggtccttctgtcttgagtttagtttgcgattccccatgtttctgactggctctttcaagaagcatttcttctaatgtcttcacatggatctcaccaactttattaactttatctgttgcgtcctcattatttggatcagctgacatgcctaatcgctccttaagagacttggaaacttgagctttctttggtgtttcgtcagtgttagtttctggagcttcaactttcttccctagcctctgtgccaggctrcgctttaatggaggatcactgtcaccgcctgtcgaaaattttcgtttccccagtgtctcagtaaggcccaatctaaccaagggttcttctccttgtttggtggagagagttactgtcctcaccacagtcctgacattttctttttcaggacctggaacaggctcagggtggagtaaaagactggaaactcctgaagaaccctcaccttgctcctcagatttttccttcattttctttgacttaatttcctcaagagtttttattccaaaatgcaaacattcaccttgctttatattgactgcaggtttccggacagaagtcactcgtaatccattgtgaacttcaggagttggttgcaggg

SEQ ID NO: 536171 - DNA, 585 bp, Homo sapiens
gtcacctttggtacatgtagaatagaaaaaaaaatagcagtcttctccttgattaggcatgctgggtagattcttagatcagaagtggcttcttgaaacaagccactgcttcctcaaagcaaggaccaggctccaagtcctcgtgaaatgggtttaatcttccaaatgacaacttgatcacagaaattgtctttaaactgtaatcattagctgattgctctcaacaggaacgtctgtgtcttcactgagttccaatctattacgcctgtaggtcgaaccaacactcaatccatgaattaataataatgaagcagaaaaaattttcctcctcacattgccargaaaacctctcagccacaattcaaacacagcatgtgtttttaaaacatctcccaactactgggagattaagtccattcaaataacctttgtcagactggagacagctagggttagttatctcctcaaaaacaaaacaaaaaaaagagttcatttaaagatgaacttgagagtcaaaggatcatgaaaaaaaatccatcttccatagctgaacaatataatctgaaaaacaaaaaaaatcagttt

SEQ ID NO: 536172 - DNA, 621 bp, Homo sapiens
tatctgagctagtacttccatattactcttaattttcaaaaatattctcaatgccgtaagcttcccatatataatttagagtctacctcttgatgcctttattgagatttaataaactagagattagctcaggaagaattataaagatatgccttcgtattcttgtacaggatatcctgttcatttaggaaggaactttctacaattttcttttcattttcatggaataacaaacagcattatgactaaagcttgcatagtagaggcacagaactatgtaataatcttggcattatacatagggccccgtgtaatctaccaccccaatcagaacactgttaaaagtgaaagagcactattaacaatttacaaagatayggttaaacaaggcctagcacaggccaacaattttttgccatgtggcagttgttttgaatttacctaggtttttttttctttttctgtatgtggagggagaagaggaaaggtattgaagggaagtaactgtattctatgattttatttcaggtaactttgttggaagggtgtttgatatagtaggtaacagttacttgcccagtaaaaaatgcattcaatactcttctgtgaaatagatgtgca

SEQ ID NO: 536173 - DNA, 533 bp, Homo sapiens
ctgctgaccccagcagtggaactggaaggctgaggtttgtcttctgaggactctgggctctttggcctactccaagctgtgccgtgtgagttcaccagcaagatgctctggggaccctgcaagggcattggaggtctcgaggtttttacctgcagcatccccaccttcaggaccgccattcgggcatctggaaattcgaggaacagtgctgcattttgtttacttattccaaaccactattttcctttaaagcagggggtgttatttgtttcagcatatcaaattcctgatttcacgggcatcacgggttaggatgagttgaagtgaatgcaaagatgattgaaagagaaatatgtagcaaacagtggttttggtaggcgaggctgggggaaccggctgaagatggctctcaggggctgcagggtggaccagcatctcagtccatgcctgccctggcaggtggctcagatccactcagccatttacacactgtaccaccttyacaagctgcaccaccactgacgtccccatcc

SEQ ID NO: 536174 - DNA, 570 bp, Homo sapiens
attccgactttgatgcaggaaggttgaaaagccaagagacagaaggaagcggggagtgacttccagcccacaggagcagcaagcacaagtccccgcggtggaagggaccttgagatggtgggttgggttggaggaaaggaggaaggaggaagcaggaaagggagaggggcttgggtcaagacgcctcccgtcttccctgcccacacaccggctggggtggcagaggcatgaccacgctgctgcgggagcctggggcggccacagtgcgagtgggtgggatctrcgaggagcccgagtgtctctgcagggaaatatcagggaccgggcagcaggggttgctctgggaggggacttggacttgcttttcgcagtcgactcttctgtgctgcttgaatcctttactgtgtgccacctgtaatcaacctgtaatcaacgtgctgtaataacgggatccacgcagatgcttggccacaggctcccggctaaatccttccctgcaccgcagtttccgtcctgcactagcttcaaaaatgtcttttctcactgggtcgacctgaggtcagaccctgt

SEQ ID NO: 536175 - DNA, 475 bp, Homo sapiens
tggcaagtgaagggccagaccctcagaggctgcagcagccgagcttcaagagacggaaagcaccaggtccttccttatgccctgctagtgcctcctcttctgggaaggctgcctgtcagacctagggacccccggctctgtggcccctccatccatgggtgtgccccgttcctgggctcacggtgccatgtgtggtcatctgcgtggcttcctcagagtgtgagacccctgggggcaaggactgtatcttactaacctccaccttgccagggtttattacagtgccagacacgtagccggtgatmagtaaacacctgtttaatgcctggctgagggtcaaacggtgggtgcagaggtgagttggttctctgcagccatgacaacccctgcatctcagagacctacagcaatcaccgtttgttgtcccctgtctgggttggcctgtgatctgccccgtgggtctgctgactccagc

SEQ ID NO: 536176 - DNA, 446 bp, Homo sapiens
atgtgaaaaagaaaatttttgttatcaaacgtttttgtgaacttcagttctctattagaatggagaatgcatctgcatgagaatttaatttttggaaatggtggaggccctatgcccacrtgcacatgcgtgcccacacacacaggcttgcacatggggtgccttcgtgggtatgcctggtcagcggtgggtgagcagggccttgcgctcattctccagtcatcaaaagcgaattttatgagaaacagtctttgtgttgtcactgccccaagatttaagttttaaaacctgtcaagaaaaagatgtttgtgttttgtcttttctctgtgctgaacccaagagtcatgaccacacctgtctggtttttcacagtgtcccagctctgggcgcagtagaaacacgtgatgagggggagcgagggactgaggggctgctatgggaatccg

SEQ ID NO: 536177 - DNA, 446 bp, Homo sapiens
atgtgaaaaagaaaatttttgttatcaaacgtttttgtgaacttcagttctctattagaatggagaatgcatctgcatgagaatttaatttttggaaatggtggaggccctatgcccacatgcacatgcgtgcccacacacacaggcttgcacatggggtgccttcgtgggtatgcctggtcagcggtgggtgagcagggccttgcrctcattctccagtcatcaaaagcgaattttatgagaaacagtctttgtgttgtcactgccccaagatttaagttttaaaacctgtcaagaaaaagatgtttgtgttttgtcttttctctgtgctgaacccaagagtcatgaccacacctgtctggtttttcacagtgtcccagctctgggcgcagtagaaacacgtgatgagggggagcgagggactgaggggctgctatgggaatccg

SEQ ID NO: 536178 - DNA, 446 bp, Homo sapiens
atgtgaaaaagaaaatttttgttatcaaacgtttttgtgaacttcagttctctattagaatggagaatgcatctgcatgagaatttaatttttggaaatggtggaggccctatgcccacatgcacatgcgtgcccacacacacaggcttgcacatggggtgccttcgtgggtatgcctggtcagcggtgggtgagcagggccttgcgctcattctccagtcatcaaaagcraattttatgagaaacagtctttgtgttgtcactgccccaagatttaagttttaaaacctgtcaagaaaaagatgtttgtgttttgtcttttctctgtgctgaacccaagagtcatgaccacacctgtctggtttttcacagtgtcccagctctgggcgcagtagaaacacgtgatgagggggagcgagggactgaggggctgctatgggaatccg

SEQ ID NO: 536179 - DNA, 645 bp, Homo sapiens
aaagatggaagcgcaaggtgtaatttttctaagacctttagctaccggattaagcatggctgggataagaaaatcagaagccttttagagattcttgccctgcccacttatttcaatttttagaggtgggtggctctcccaggaatgcctttgcttaaagtcatgattgtccttcatagctgtcacaactctatactcttggacaggaaagaagatgacacggtcctagcccagaaacaccacarttaacgcacagctcctctcaggtgcatgtccttattggccaaaacactggaacccagtaacatgtcctctatgggtttaagttttcaaatgcatgcaactgagcaacatggatttacaggaaggcatcttttagttcaaagccaaacaacattgactttcaggtaattcaagtgataaaaacaaacaagagcctacataaaaaattctacagggctcaataaattgtgatttttatcctaaatttctagccaaccaagagtcttagaggtcctccctccaaatttagccacagaagtaacaatctgtctacctagaggcattatttataaatcattaactcacggtagatacatgagtgcatttatttttatctctttacttataatcatcagcaagtta

SEQ ID NO: 536180 - DNA, 572 bp, Homo sapiens
cacaaattctttccatttttgtttccttctgcgatgtgacttgaaagctccatcaatcaagatatggcagctttatccatgtggcctgacttggttaatagatatcatcacacatgatgaaaacagaggcttgaaaagtgcttgctcaagaagscttgcccactggctgcctttggaactgagcttccatgtgaagaagcctggaatagaagacacggagcagttgaggcaccttatctggttcccccaagaccaacctacctgccaatcaccagacacataagtgaggccatcctggaccatccagctcccaccaggccataaacacctgaaagatcctggcagatatcagtgaagccactcaacctacccagagaattgtgaactaaactaaattgttgctttagattactaagtttagggttagtttgtcagtttgttttgcagtgaaagctaattgatacagacatagattctaaaacagaatgaaataatcaacatacctgcaccatcaaggcagcagaaaatgatttctgcatttgcatgccttcaagatctcaaactcataacaa

SEQ ID NO: 536181 - DNA, 654 bp, Homo sapiens
atacgtccttgccatgttacatataccaacaaattcattttaaagcagtgtttaaacaaatctgctaactacttcttccctgaaaacaagagttcttccttcaaaagcagagccttttgtaaattttagttttggatataacaaaggtccccattttcctctcatactgtcttggagtctggctacctaagggaagaaagggacaaataaataactgtgtggactcatattctgaacccattcaagaaaactctggttcacawcatcaaatacagataatattccctctccttacttccccacctcccaccaggggccaggtcctgtgagctgaaggaacctgttatgctataaaggggaagagagaataagtgtgttctgagcatgggacccatctaggcaatatgccatattggtgaactcaacttgctgaatttattcattttccaaaatattacagagaccattacccttgctgtttcctcatgagatcccagaaagcagcccctttccaactgagtggaaagctcctttaaatgggtccctctgtgctggaaaggagccacagtgccccgtgcctgtccacaccagctctgaaggagagcagctcctgtcactctgaccatgtctttcataggctgacagcaggaggtc

SEQ ID NO: 536182 - DNA, 654 bp, Homo sapiens
atacgtccttgccatgttacatataccaacaaattcattttaaagcagtgtttaaacaaatctgctaactacttcttccctgaaaacaagagttcttccttcaaaagcagagccttttgtaaattttagttttggatataacaaaggtccccattttcctctcatactgtcttggagtctggctacctaagggaagaaagggacaaataaataactgtgtggactcatattctgaacccattcaagaaaactctggttcacaacatcaaatacagataatattccctctccttacttccccacctcccaccaggggccaggtcctgtgagctgaaggaacctgttatgctataaaggggaagagagaataagtgtgttctgagcatgggacccatctaggcaatrtgccatattggtgaactcaacttgctgaatttattcattttccaaaatattacagagaccattacccttgctgtttcctcatgagatcccagaaagcagcccctttccaactgagtggaaagctcctttaaatgggtccctctgtgctggaaaggagccacagtgccccgtgcctgtccacaccagctctgaaggagagcagctcctgtcactctgaccatgtctttcataggctgacagcaggaggtc

SEQ ID NO: 536183 - DNA, 621 bp, Homo sapiens
agtggattggatgcaggaagaagtggtatgacctcaggaagtacaaagttcaaagaagtgagtgggtaaatatataaattaaataattccttctctgtcattctctcaactgaggtttcggcatagcaagacttgggacagtttcagtcgtggattatttaagagaattaagaggcttttttctgcccccccgtagatagtcggaagccatatttaaccaaattacatttaaccttcctcttctttttcctcagagagctaaaataatagaagtgacagcagttgtaattatacccatctcaattcacctgcattccttctgcatgtagtaaggtcatctgagcagtttcttcctttaattaagtggttgtgaccttcacaagttcttctcaaaatgatttctccrgtacccaagtgattaaacatagaactctgttccccctactcttgacagcctgagagcccaagcgtcctacaggaaaatgctttctccttggggactggctctcgagaggcttgcttccatacaggctgggctcttggaaatgtttcctgactgcagagggactttcactctgtttggtaagttggaacaggattcaaggtcctgctgagctaatc

SEQ ID NO: 536184 - DNA, 647 bp, Homo sapiens
cctgaacctaaaataaaagttaaaaaaaataaaaagaaagaaaagcccggtgtgatagctgacgcctgtaatcccagctctttgggaggctgaggcagatgaaccacacttgagcccaggagttcaagaccagcctgggcaacttggtgaaaccctgtctctgtaaaaaaaatttaaaaaataggccgggcacggtggctyatgcctgtaatcctagcgctttgggaggccgaggcaggcagattgcctgagctcagaagttcgagaccagccttggcaacacagtgaaaccccgtctctactaaaatataaaaaattagcccggtgtggcagcatgcacctgtagttgcagttacttgggaggctgaggcaggagaattgcttgaacctggcaggcagaggttgcagtgggccgagattgtgccactgcactctagcctgggcgacagagcgagacttcatctcaataaccaagaacaaaaccaaatccagaagcaaataaaaccaaaaaacaaaacttgaacacacaattagcttgattctccagttctatttctagcaattaatcctaggaaaagagcctggcaattaagcacacattacaagcatatttgttgcataactcttaactattaattggtaaaaac

SEQ ID NO: 536185 - DNA, 608 bp, Homo sapiens
attttggctggattaagttgggccaggctgaactctaagccttcaaagggaccaggtctgctccatgtgtcttgattctaggaagccccaaggctcaggctctcctgtggggaatggagcatcaagaatgcttttgggaatttgccgtggctctgaagagcttgtcttggaactagcacacaattacttccacccacattccactggccaaagcaagtcccatggccaagtccaaagtcagtgggaaagtatattctatgcatggcaagaagccatggcaagggagagatggaaagaattgagggaaaacaatataatctaacacagtccagagtctctgacgtattcaagctatcacccattcccctgtttatgcttctagaccaaaactgtcctagaaataagaacttgttggtactctcctcctcagccctgtagggtcccaaccacatttctacaagcaggaggctgctaactatggagacatcatagtctccatagaagagaatggatagaagagaatccaaagagagttctcaytgaaagaattcttaaacattacctcaccctaacaattcattgtacggatgggaaaactgagacccaga

SEQ ID NO: 536186 - DNA, 473 bp, Homo sapiens
ccaagaggagccaggggagaggtgttggcatttcccaggcatcagcctccaggcctctcctgggaaacatacccactcagtggggctggatccctcctcttcyggaagaagccattccagcagcctgtgtgtgctaagtcccagggaaatgagagacttggctccaggaaggaggaagtcagagtgtatcccaaaaggtcacccggctgccaggattcaagcccacgtctacctggagccaaagccgaggatgctccataaagcagcaggcatcctccagcagcctccccagttccctcccaactactgaatggaaggaaggttctgctctcccagttggcactgagcaggctactctcacctgcaagagaattactttaaactcaggaaatgcaaaccagttttggcatccatcaaaataaaagttcccttcccccagaaataaaggacataatctcttaggccgccttgag

SEQ ID NO: 536187 - DNA, 418 bp, Homo sapiens
agatgaaaaagccacaaacctgccttgagaggctggtggtctggaaggggagaggacacagagaacagacaatggaatcagtgcaggagtgatgagggaaaaaggaaggaccacctgaggctgacaagccctggaaccccaaccctccatttaccgagaagtgcctaaaggtcatgggtggcatcctgggtggtgaagcacctgttacttggaagtactaatgctccatggtcgtcatcaccttgccaagcctagctcctcctaggtccatggttggatctgcatgtcccaggtaagacaggggatctgcacagatgtcagccagggttccctggccccagaggccaggcagacagtaaaaataaagaggcctggagggttttctgcaagrttggcatagattgttaatttaggggta

SEQ ID NO: 536188 - DNA, 639 bp, Homo sapiens
tagcctggagccccatcgtgccaagttgcagctrgtccacagacccatgagcacagagtaggtgctgatgttagccattgtgattgtgggttgatatgcagctttattgcaacaaaacctgactagtttgatgcatacacttatgggcacagagaatcttagaatctcaagtttcgaagaaatgactttttattaatgataatgaccatcattgatcgagggcttattaagtgccaggctctgtactagatcatttatatgcagcatcattttctattgggtaaatggaaactcagaggggtcaggtagctcgcccaaggtcacttaactaattagtgatagaatcggaatgtcaatctcaggtctggctggctccaaaagccccactcatccacgctgacctcacttcttggggttggcccacctcaaccttccctgctccaggcctctctgacattgactcatcctccaagatccttgccaaggtttccatcagtgtgctttggagtcctttcattaaataaaaaggagcttatctcctcccccacgaagggcacttcacctttaagcatttctggttattggaaattcttccttgtattgaaccaaaacctttccctctgaaacatctgttctttg

SEQ ID NO: 536189 - DNA, 625 bp, Homo sapiens
ttgccttgggcttcaccactgatagtggtaacgacaatataggaaaacaggtctgtccagctctacagcctgggcccctaacaaatgcactgactactcctaagtaggagcacaggcccccacaaatacagcccaactttggtaagtccagtgctaactggtggtgactctgagtgccccaagagagaagtagccgggctacctgggagatctgagagtgcctcaaaccagccacctacaaaatgctgccaaggagaggccctgctgaaccctccttcatgaacacatcaaataccctccaattagcatctccctgggcatcaaaccagccacccaaagctatgcagaattgtagtatgggctcacacaggcagtggggaaagaaagctgggccctggggttggcaggagcgggtgttcatggagcccctttgtgtaccaagttctgagctgctgtctctgcatcactgattcctcatagccactcaaagctgtaggtattgtccttcttrtattagtaacatggggctcagaaatagcaagtaatttgactgcaattacagagccagaaagcagggtggaggaggaaactggactcctctattggcacctatcgctggtaccag

SEQ ID NO: 536190 - DNA, 467 bp, Homo sapiens
acttgaacatatattcttcaaaaccattaaaagtggtttaattggctgttcagggatgtcttccactctcctcttcaaatggatcatccctctctgtctctcccaagaactgggaactagaagctcctcgcctggatgatccatttccctggatttatttatcttgctctgggccccagaagcattaggcttcgcctagcagatccagcctctcttcgctgctgcacatccaaatcctacttcagacacccactgtagcaaaactacagccctggatgaagkagcaatgccagtcagcatcatccaaggagaaggtctgctcttttaaaaaattcaaactatatcttgataaaacatggtgatgaaggcagtcaagggaggacatcaaggaagaaatacagagacagccacctggggttatgcaacacagcagaaacacaatgaccttgggaatctgtgagtcctga

SEQ ID NO: 536191 - DNA, 610 bp, Homo sapiens
acccattccagaggttcttaacaaacagtatgacaaccacgtcatygactttcttttgcccttaagctatgtcttaaagataatgtccacaatttggaattcatcctaaaactttgcattttaatgtccagatatttgaaatgataaagagatttattttttaactttgtaaatcttagaatatatggactgtatatattccttatcaattatatttgcaaattgttttcctgatttcagtttttttcttaatgtaacttatcaaattcacctagtagccatcaactaatattttcaatattaagcttctaaaccacctggcagaatgttcaactttattaagaatattttctgtcttccaatttaccacaggtaagagagagatttaccaaatattttgccaccacataaaatggatttccactttcctagcttcaaatcagtgttttctcaccgattactaacagtcctaaagacaagatttgagacatctgttacgttaacactttactttcagtaccaatttctttatcagtcaactattgcacaataacattacatattacatcatgccaaagtgtcaaaagattacaacaacaagtacttattc

SEQ ID NO: 536192 - DNA, 488 bp, Homo sapiens
ctgagtggccttgttccttgctgtagaagactggatattcagaggtcccttttccttcagagctgtctctgtgctttttagtctagactgatacagtttcagctttggatygcaaaaagcaactaatgggtactaggtttaatacctgggtgatgaaataatctgtacaaaaaaaccccatgacataagtttacctataaaacaaacatgcacatgtactgctgaacttaaaagttaaagaaaaatctaatagatcaggtgcattcagggtggtatagctgtagacaatgtacaaaactcagcagcatttctacacaccaataataatattcaagctaagaaccaaatgaagaactcaatcccttttacaatagcaacatttaaaaaataaaatacctgggaatacatctggccaagcaggtgaaagatctctacagggagaactaccaaacgctcatgaaagacacgaacaaatgggaaaacatctc

SEQ ID NO: 536193 - DNA, 596 bp, Homo sapiens
ctgcaatgcaacccaccgagtgtgtagctgcaatctggacccatcacatcactctgtgggccttggggccaagggaattggtactactatgccaagactcctattcattgctgctgtgcaatgattaatatcctgtcttgtattgatccactgagtctcattgtctgcttctgctctgtattattactccttgctctatgaaattgttttttttttctgataccatccaaccaatattccaatttctgcacctcaaaaattacctctctctggaccttgcaaccgtgctgtcataagatcagaaaatcaaaaccccgccactccaaagatacattctctagcttttttctccacagatttcctaaatttattccttttatctgaggacttattcatctcagayaggtcatcttataatttagtgattgcctgtttagggttgaagtaagagagcctggatttgaatctaagcagcactacctgaaatcgttatgatttgaatggcttcttaatatcttagtgacttgttctcctctgatataaaagtaggctagtagtagtaactaacttatggggttgcatgagtattatgtgag

SEQ ID NO: 536194 - DNA, 591 bp, Homo sapiens
gtgctgaagctatatttagtagagagttttcttctccagcaccaaccttacatgttattatatgctaatttttagaaatttaaatctaaagacttgtctagtaaagactctttttgagttgaatgaagttcttgggcaatagaaattgcatatttcacttttttttagttgcctttctaaatttacttacataagataaaattcactctgtttggggtagattactgtgaattttgacaaaggctttcagtcttgtaaccaccaccacaatcaaaacacagagcaattctgtcacccctaaaatttgtgctacccctttatagtcaatctctctctccatccccagcccctgacaactactgatctattttttgttcctatagttttgctytccacactgttgtatactagttcgttaatttttattgatgaatagtattccattgtatggaatatcatagcttttatatcctaaaaacttgcatttgtgatgtgatgatggcaatgataataatagtgacatctgacattatgtgaatgcttattgtgactcaggcattgctccagctctgtcaacatgctacctcataa

SEQ ID NO: 536195 - DNA, 625 bp, Homo sapiens
atgctatcaagataaattatatgaaaacttatgaagagaaatgttcccattcgagcctaagaatagaacatctagacataagtgaatagtaaagtaattcattcagttgtacatgtctgtgattttattttagtttagacatatttaagaatgtattatttgactatatgttaaataatatgaaaaaaatttatttccatttcttagaaatgacttagactattttaaaggcccttatttatcaacattgatgtctcaacacctgctttcttctgtgccttaactgtaatttaaggaattataattccaacactgcacattttcaaattaaatgttttaatcatgtttactgttaatgttcaatactcatttaaattgtaaacgttatttcagatggtttctctatatctatcatcttaattttataatggaaatcatctattttactttaatctgtggctatgtgtgccaagaatgtttgaagtaagtcaatagccagagccattgycattcacatccatcttttgagtcactctactgaagagtgatgccccttgaaggcacagatttatatatgccaaggatcttccatggcagctggtacagagtactcaataaatgatgc

SEQ ID NO: 536196 - DNA, 557 bp, Homo sapiens
gagagaggatcaaaatgggaaagagtatacctatagaacagagtgtggttgtacagtatgaggatttaatctttctagtaaagatgtggacatacagagctaataaattcctgcaggcatgaacscagggaggaaggctcattctattcaacattaggctcatggccctaaactgcctggatctctgggtaaggaaagggaataaccagaaccactgggattccctgatgcttcagagagagaactgaagacattaattcatcaagtgctcacataattcttgggcttccaaattatttctcagtgattaccagacttacataaattaatggttcatttaatttacatccttttctcttttaataggaaagattaaaaagtctatagttggctgggcatggtgactcatgcctgtaatcccaacacttagaagtctgaggcaggagaatccctcgagcccaggagtttgagagcagcctgggcaacatagtgagagcctgtctctacaaaaaaatgtaaaattaaccaggtttcatggtatgcacctgtagtttcag

SEQ ID NO: 536197 - DNA, 623 bp, Homo sapiens
tgctgagtcccaggtttcttgctactgggtcagtcccacccacaactgggacagcctatgtcgagcaacgtccatggccaggagggctcagctcacatgtggaaggccctcacctacttcattgtgctccccaaggtggcaataagcttgctgaatgtgttcctgaagtcgcaccaccatggagagtacgagacccgaggtcatcacctacccccatctccacatcacgtccaagccctttccctggggagatggtaaccattctctattccataaccctgtgttaatccacttccaactggctacaaagataaaaagaatctggaccactatccgggcactgggacctcagcaccggtttggaccattactcggctcacagaccagaaaagtatacaggaccttaagctcgccttctttacttgtaacaaatcatgactagcrtactgatcttccatccctttgcttgtggcaggatgtggcttaaataaataacttaaacttagaaaaagaaataaaagctataggcatttgattattattctaaaatggaaacagtaattactatactgaaactgcctcttagtaaataaaggttatccacagttttatgattacctaaa

SEQ ID NO: 536198 - DNA, 626 bp, Homo sapiens
tttggtcaatcaacccaatttacaaggtaaagggctaagatggaaatataagaataaaactaaataatctagaatctagagcacataagatgtcagaagcatcttttcagaagttttggaagcaactgaagacatgatcgcctgtccaggcatcactgtactttgcacaggcacagagacatagataatatcctgaggaagcagccccaagatatatcaatcttatctttmtaaagtaaacaggcatccttgtgtgtgcaatgtggtctgaaagagtgcagaagtattctattcctaaaacctcacttccaacgtatatccacctggcaatttaactattggttcatttcttttaattaatcttatttgttttcaaattattttgaagaattctctaagaaacaatcgtagactgagaaaataactacatggtgaaatggaaggtacctgggactagtagccaaattgatggtggtgacagcctgtctggagtggctgctgtgaggatgccagctacagtggaggaggcacagtcaaggttgtgccctctgtggagcaggcgggacctgggaacaggtgagagccccaccctctagcaggagtccacactcccacacacagccaca

SEQ ID NO: 536199 - DNA, 465 bp, Homo sapiens
catgactgcaaggtcagtccagatggcaatgtctagatgacgatgctaggagaggtccttgacttacaactttaaaaagcatcagaagtgactacttaaaaatgtctgtttcatccagcctggctgtgagcatggaaaatgtctataagtggtcccttctgggaattgatgttttaataggtctgtaaggacaatggagcttaagatgttggcaaatgtagtgaagtgatggacaacagactctataaaggctaaagaggaatttctacatttgagaaagtaattctattcagtctgtacttggaaaatatttgrtctagtggaatggaaaatttttccctgatattttggcatttgttgaaatattttctaggcagtgatccttcagccactgcgtcacattgctgtgggttgctctgaacaattcagaggtatgtagacatattttacccaacatgcatgcac

SEQ ID NO: 536200 - DNA, 465 bp, Homo sapiens
catgactgcaaggtcagtccagatggcaatgtctagatgacgatgctaggagaggtccttgacttacaactttaaaaagcatcagaagtgactacttaaaaatgtctgtttcatccagcctggctgtgagcatggaaaatgtctataagtggtcccttctgggaattgatgttttaataggtctgtaaggacaatggagcttaagatgttggcaaatgtagtgaagtgatggacaacagactctataaaggctaaagaggaatttctacatttgagaaagtaattctattcagtctgtacttggaaaatatttgatctagtggaatggaaaatttttccctgatattttggcatttgttgaaatattttctaggcagtgatccttcagccactgygtcacattgctgtgggttgctctgaacaattcagaggtatgtagacatattttacccaacatgcatgcac

SEQ ID NO: 536201 - DNA, 656 bp, Homo sapiens
ctgcttctgagatgctgcagcaagcatggcttggggctaaaatgtgacagacttgtattgacttcctgtcacctaagatttcatttatagctagtggcagcctccaaggcctctggcttccctcttgtattcatatgaattaatgcaacatcagccccccaaatgtaaatactaaagttttgaaacccaggtttaagttactagaaaagcttctcctttagcatcatcacagaaattaattgacaaatgatagcatttctgtagcaacagaagtaaaattctgggtatatatacagtatgttggcaacacaaattcgttcattcctaccatcagacatggctctaaaatgtttaatgtctccttctctacctatcttagacccagcttacttcttatcatgatgactatgacctcttactaaacaaattcagccatattgattgctttgcctactggattctgaaagtactcaatatttcagtcctatagctttaccctcagttataatattatatatatatatacattgttttatacttaaacagtgttacatgtatggattctttccctagtgagagtaagagtgtgaaagtaagtaytataccttctacctcttcagtatcctctatattatcttgcatggatctaggaaatg

SEQ ID NO: 536202 - DNA, 502 bp, Homo sapiens
gtttctgtccctgtcccttccccagtgcccccacacagtggtcttaaaaccatggtaagctgtcattgcttctcccagatagaacggggaccagaaaggaaaagtcagggatgacaaagttcttactttactaggattactgtgagctcacataacactttctggtgtggcttgttaaattaaatttagtccaaagctgcctccttacatattttgagtttgactcataggtttcttcwtacatagtgaactgtacctaacaggatatataaatagactgtaacctactctcataccaatcactgagtttggccaatcaaaagtggtcaactgtcaaactccattcaaaataatgcaaatgctgagctgtaaccagtacagctgtttctgtacctcatttctgttttctatacattacttccctttttctgtgcataaatcttccaccaaatggctgtgctggagcctctctgaacttattctggtttgggggctgtctgac

SEQ ID NO: 536203 - DNA, 510 bp, Homo sapiens
ccccatctctactaaaatacaaaaaattagccaggtgtggtggcacacacctgtaatctcagctactcaggaggctgaggcaggagaatcactttaacccaggaagcagaggttgcagtgagccaagattgcgccgctgaactctagcctgggtgacagagtgagactstatctcaaaaaataaataaataaataataattaaaaaaatgaaaccagtcttgacttccaaaggactttactaagttcgtataacggaacctctcatcactatattcttaagaagaaacccttttttgaacccccacccctatatttccatgacgcttcagggatgaaaagcactcgtttgattactgagaggatagctggagaagtgaagaataatgtgatgttcagctcaaactccttgggggaattcggttgtgaaaatggaattacccaagttggattccgcccaggatgccaagcttaagttattgggtaagtgcacattagaaaaatgaattttg

SEQ ID NO: 536204 - DNA, 564 bp, Homo sapiens
ctttggaggaaaaaggcttgagaatggagttacgtggtgcctttatgtaggaagagggagagaaaaagggggaagaaactggggggagaagtgaagraaaaaatcaaaatgaacaagagaacctcatccaaaatgcataaaagtgagaaaagttaatattctaaaagctgctataagaattctcagaattcttagaatgaaatcatttatggaaaggaaaatgtctaagtgaaggaggaggagagggacacagaagaatgagacactgagagcaagggtcagattaagccaaggtacaaagagacagctaaactgcctactttacattggagtgaacaggcttggaagtaggaggaggtgaatcaggagagcacggacaggttagaagggaagaagaaaattaggtcaagccatacagcaggtggctggagtatatgctcattatttctattttgagatagaaatacctttcaatctttctcaaatctttagtaaaatctgctacacacacacacacacacacacactcacacacacacacaccagccacaccttttatgaatg

SEQ ID NO: 536205 - DNA, 620 bp, Homo sapiens
actgaagacattcccatgatgacatgcatgtagggagttttgctactaaaaagtgtgttagtctcaaaaggttacatactatctgattttacatggcattctgaaaaataggacagagagatgaggacatagaacagatcagaggttaaaggctgaggttggcgggttcattgcaaaggtcagcaccaggaattctttggggtgttgagattcttctgtatcctgtttgtagtggtggttacaagaacctgtgcatattagaaaactcaaatatataccttgtttagataaagagtgtattcttgaagatgggagggctaaatgctatctaatattaacattacgctaccagcttttttgggtatttgkgttatattatcttttaatctctatttttactcttataatttttttaggtttctgccttttgaatttttaaaaatccaaactaatcacccttttctttttataagtgaacttaatccattattttgctcactcatatttggatatttggacttatttctagatttttcattttcatttatacttttcccttctccttcctgccttctgctgcactgctcattttttctctatctcctatttcccacccaacc

SEQ ID NO: 536206 - DNA, 570 bp, Homo sapiens
tgagagtgaaattcattgcttgtaaagtgataacatttagctaaaagtaggctaatttttgttattgctttccctgcaggagatttcttctatcttacaggaactgaaaagagtagaaaagcagctrcaaggtaaatttactactgaattaagtataaagagctaataatttagaataagtgccttctgagtggtatttcttaaaatattgttaggatgttatttgattaaatgtaatgacatacataaaatacagagttcaaacattcacattattcataaaaaggaatttttttaaacccagtataaaaatttaaaatgtaataaagatatatgttgggcatattttagttcataggtttgacagtaggctagatgtcataaactaattgaaattttttatgtattacatataaataatatgtgaaaaatatataataaagttgtgttaattagcattatttgtgtgatttgacagttcttaaattatgttggtggtgtaacctgaaacaaacttacattctaatagaaataatagttgtttggttgacaagaaatgagtacatattg

SEQ ID NO: 536207 - DNA, 570 bp, Homo sapiens
tgagagtgaaattcattgcttgtaaagtgataacatttagctaaaagtaggctaatttttgttattgctttccctgcaggagatttcttctatcttacaggaactgaaaagagtagaaaagcagctgcaaggtaaatttactactgaattaagtataaagagctaataatttagaataagtgccttctgagtggtatttcttaaaatattgttaggatgttatttgattaaatgtaatgacatacataaaatacagagttcaaacattcacattattcataaaaaggaatttttttaaacccagtataaaaatttaaaatrtaataaagatatatgttgggcatattttagttcataggtttgacagtaggctagatgtcataaactaattgaaattttttatgtattacatataaataatatgtgaaaaatatataataaagttgtgttaattagcattatttgtgtgatttgacagttcttaaattatgttggtggtgtaacctgaaacaaacttacattctaatagaaataatagttgtttggttgacaagaaatgagtacatattg

SEQ ID NO: 536208 - DNA, 570 bp, Homo sapiens
tgagagtgaaattcattgcttgtaaagtgataacatttagctaaaagtaggctaatttttgttattgctttccctgcaggagatttcttctatcttacaggaactgaaaagagtagaaaagcagctgcaaggtaaatttactactgaattaagtataaagagctaataatttagaataagtgccttctgagtggtatttcttaaaatattgttaggatgttatttgattaaatgtaatgacatacataaaatacagagttcaaacattcacattattcataaaaaggaatttttttaaacccagtataaaaatttaaaatgtaataaagatatatgttgggcatattttagttcataggtttgacartaggctagatgtcataaactaattgaaattttttatgtattacatataaataatatgtgaaaaatatataataaagttgtgttaattagcattatttgtgtgatttgacagttcttaaattatgttggtggtgtaacctgaaacaaacttacattctaatagaaataatagttgtttggttgacaagaaatgagtacatattg

SEQ ID NO: 536209 - DNA, 570 bp, Homo sapiens
tgagagtgaaattcattgcttgtaaagtgataacatttagctaaaagtaggctaatttttgttattgctttccctgcaggagatttcttctatcttacaggaactgaaaagagtagaaaagcagctgcaaggtaaatttactactgaattaagtataaagagctaataatttagaataagtgccttctgagtggtatttcttaaaatattgttaggatgttatttgattaaatgtaatgacatacataaaatacagagttcaaacattcacattattcataaaaaggaatttttttaaacccagtataaaaatttaaaatgtaataaagatatatgttgggcatattttagttcataggtttgacagtaggctagatgtcataaactaattgaaattttttatgtattacatataaataatatgtgaaaaatatrtaataaagttgtgttaattagcattatttgtgtgatttgacagttcttaaattatgttggtggtgtaacctgaaacaaacttacattctaatagaaataatagttgtttggttgacaagaaatgagtacatattg

SEQ ID NO: 536210 - DNA, 602 bp, Homo sapiens
tcttggtgtactcaaggtaaagaattccatcttggtaattcttgtacttcttactagagaaaatacttggtagagcactttacatagtggatccacacgaagtgtttacaaaatagaattatttgctgtatgagtggcagcctaggtacatcaatgtggcagccacattttcttcattagaggttctttaaagacctttyccacaacattctgtgatttcaaattatcccgttgctcatatcacaaatacaagatatacaggccaactcatttctttatttctctcatttaaagtacaaacaaaacccttatacttttttgagcagtgaaatgtatgctgcaaatactaagaaagtatattgggtaacaaactgtaacactgtttggtaaacattaagatctaaagaataattctgctccaggccctgaagatagccatcatttaggacttcacttatcctaggcaaggtaggctattaccttggaactgtcccatggttcggaagactgctggttctccttcttttaaagttttaagcattatttgcagtttatttgaggcctcctgactagctgtgatctatggcatttttaatcagtat

SEQ ID NO: 536211 - DNA, 712 bp, Homo sapiens
ttgggctcatgtgcaatgctgagctacccagaggacatctgtgtgagttccagcagcagcagccaatcagctaatcatcctttttccagtgccaggcgaggttgactgggaccctgagtttggttctaccgtttggaaataacacagaggattacttcttggggtctctcagccaaccaaagtcacttcttaagactgggcctttctacagaggaatcttaggagcagaggctcttagatcagatgagaaaagggtgatggagaatctggttttccttctcagatcgttcctttcaagtcccatcctaaagacttcaccaacgctgaggtccaactatcctgatcagaattcaaaccaggttcccatgagcactggctcatccacaaagttagtaggcttggtaatggccaggccttgaattcccagagtcttggattgacccaaccagggagtagttggagagacacatgacaagggccatgccctggaaagctgggccagagcacctatcagttgatcacaattgcagggcatgaggtgagagagaaaagtaacagagtaaccaagaagtcgccctcctaarttggagcaaggtaccaaatgacctaaagtattggggtggcaggactgactgtgcagggcaccctgtctggggctgatggactggacatagaaggatgaggaagttgtcagcaccagagagttgatgct

SEQ ID NO: 536212 - DNA, 668 bp, Homo sapiens
caattcaaataggtgcttataaacatggaggctgggaagaattttaatagtttaaggctaacttctgtgttcattagacaagaagatgaaaagagaagaaaggggcattgagacccccttttcttttcatttcagcaggagcagcgtagcgtgcgcacacgcacacacgcccttcttctaaaacaggtggtttaggcaaaaggctactgacagcctggcatctctctggtgaggctgcgataactgggacttccttgtacacgttcctctgtggggtgtggcacagcatcagcctttgagttgctactcctggggattcctggcagtgcrtgactttgagggaagtgaggcgaggattcctgccctctgttaagccatcctcattcatgttctcccctaatcagagctgcatttctctgtgtgtgtttttcagatttgagtcctgctttcaaaatataaatattctaacttagttacccattcatgccttagcaggatatttaaagggataagatcttggagacccagaggattggagacagagaaggaggggaggcagcagccaatatgcctgctccaagagtgcccaggacaagtcctgagtggtgcctcagttttgtgggggcccagactcacacccccaaagctcccagctctggcagatgcag

SEQ ID NO: 536213 - DNA, 398 bp, Homo sapiens
aatcttgagttgaagaagtttacctgacaggtgattccagaaggtacacctgagtcagtgaggagagtgaaccagagagggagaaaaacaatrtaaaagtgagttagtgagtgggttactactgtaggccacagagcccagttccaccttctgagtatcctgcagaatgcacgtcagaactgtcccaataaagaatagagaagcggggaattcatccatggactcccatcttttattactttccctggcccttccagtctccctgtacaaggctgaagactagagagagggcgaatcctccttacgccaagaagcagaaagacttgggcatttaagactctagaaggtacagtgaactcacaggtggctgctgggataggcaacagaacagcaatagt

SEQ ID NO: 536214 - DNA, 656 bp, Homo sapiens
taaataaattttagaatgcatactgtaaggagattaaaataatgtaaatataataccattaatttattcactttttcgtaagttataaaaataagaaaatcatgatgctatttctgggtaatttataaatacttttaagctaaaattgtaagttatgtttgaagcgaggtatatgtatttctttggtatgtgtgtgtatatacttattgttcgtgttctgctttggtgaataattaaattacaaycaaatttaaatataatacataacaccattcatttctagacctcaggataatgctttccccagtatgtaaaaaggcgaaaactacctaatgctaaaactcatcagtctggaagaaagcacgtaattttatttatttttttgttcataggaatagaaagcattaagaattttataagtaaaattagatgaagataaacttcaattagaatacatgtttaaagatgtgcttttataatgtggattttaactgctttatcaaagtgcacacaccaaatctgacagaaattatgaaagtattttatttgtggattttatctaatttactctgggaaatttgataattccagaagacattttagatgtgtttaaaagaatcagagtcatcaacatactcctttggctagcccaaggt

SEQ ID NO: 536215 - DNA, 628 bp, Homo sapiens
ttggcttttcaccatttacctctcacgtctcttaagcaggctagctcaggcatgttataattacagaggcagggatccaagagctgatgcagaggcaatgagagttttatcaaacctctatttgcattgaatttgccattaccctattgactgaagcccatcacaaggtcaagtgcagaatcagtgtgggcatatactaacaaagaatgtgaataccaggagctgtgaaaaattggggtaatgaatatagcctaccacaatgcaaaaacagcatgattttgattctgcatagtattttactaaaattcattaatctgaccccagtgatagacgctgaggatgcttctagtttttactgttacaaacattgctgcaaggaatatccttttgcatgtatatttatatctacatttaattttttttttttttttttttttttttgagaaggagtctcactctgtcgcccaggctggagtgyagtggcacaatctcggatcacttcaacctctgcctcccaggttcaggcgattctcctgcctcagcctcctgagtagctgggattacaggtgtgcgccaccaagcctggataatttttgtattttcagtagagacgggatttcaccatgtt

SEQ ID NO: 536216 - DNA, 386 bp, Homo sapiens
tatatcttttacctagtgacatttaaaattttcacatctttattgcattatttacatgtgcctagcaaagttgatatgatggtaatccctcattaatttcatttaattaacaattgaattgaattgtttgagyaactgctgtctgccaggatactgtgctactatgctggcacctggggattcaatagtgaaaaagtcaaaatcctgctgcatctttttttttttttaattttcacactgaaacagaagaaatttaataggttaacaatcgtatatttaaggggaaaaaaacaagcaaatatctgattttttcaaagtcagatatatttattgtaatattttgccatcttataaaattttactatgtgtggttaagatgcacaata

SEQ ID NO: 536217 - DNA, 386 bp, Homo sapiens
tatatcttttacctagtgacatttaaaattttcacatctttattgcattatttacatgtgcctagcaaagttgatatgatggtaatccctcattaatttcatttaattaacaattgaattgaattgtttgagtaactgctgtctgccaggatactgtgctactatgctggcacctggggattcaatagtgaaaaagtcaaaatcctgctgcatctttttttttttttaattttcacactgaaacagaagaaatttaataggttaacaatcrtatatttaaggggaaaaaaacaagcaaatatctgattttttcaaagtcagatatatttattgtaatattttgccatcttataaaattttactatgtgtggttaagatgcacaata

SEQ ID NO: 536218 - DNA, 512 bp, Homo sapiens
ctgcaataaacatacatgtgcatgtgtctttatagtagaatgatttataatccttcgggaacagaagagcaaacaccacatattctcactcataagtgggaggtgaacaatgaaaatacatggacacagggaggggaacatcacacatcagggcctgttgggaggtggggggcagtgggagggagagcattagaacaaaaacctaatgcatgcagaggtcaaaacctagatgatgggttgatagatgcagcaaaccaccatggcacaagtatacctatataacgaacctgcacattctgtacatgtatcccagaaattaaagtaaaattaaaattaaaaatgaagactgggacactaattcaagggkattgcgtgtgcaaacttttggatggcagccataaatggcattgtaaaaatggcaataggctagaaggtaaaattgtttcatatattagggatatcttgacaacacaacaaaatcaaagagaccagtgttttgaaattccacacta

SEQ ID NO: 536219 - DNA, 634 bp, Homo sapiens
agtaggcatttcgtggtaggcagcaggccctctgtggctcccaagggctctgcagcttagccttcacttgtcactracctgtgagccacagctcaccactcactacgctgtgggatagtccacctctaacatgaacaagggcccaccaaccagggtaggccatccgttgagctgaggcgaggggaggcatcccgtgcgctagaaaactgtgtccctgattttgctgtgccaatagaaggtgacattacttatgcagttaattaggggagtggaaagagttcatggcagtccctagatcaagcctctccaggcaccacttggctctacagcacagctagagggtcaaagcaggctgtgccacagccctgtgtccacacaagatcctctcaggacaacgtggtggccagtccctggtggggctcattaccccgatttcaagtttccttctgctgcgaggaagcctggtcccacctacaaagaggctgtctgccttgctggattgagcttcttgaagggactgcgttttcttaatctttgtatccccaatagctcaccagtatccagtatacactaggggctcagttgtcgtttgtcttgtgtttttgttgactcgactctactctcacttagtaca

SEQ ID NO: 536220 - DNA, 634 bp, Homo sapiens
agtaggcatttcgtggtaggcagcaggccctctgtggctcccaagggctctgcagcttagccttcacttgtcactaacctgtgagccacagctcaccactcactacgctgtgggatagtccacctctaacatgaacaagggcccaccaaccagggtaggccatccgttgagctgaggcgaggggaggcatcccgtgcgctagaaaactgtgtccctgattttgctgtgcsaatagaaggtgacattacttatgcagttaattaggggagtggaaagagttcatggcagtccctagatcaagcctctccaggcaccacttggctctacagcacagctagagggtcaaagcaggctgtgccacagccctgtgtccacacaagatcctctcaggacaacgtggtggccagtccctggtggggctcattaccccgatttcaagtttccttctgctgcgaggaagcctggtcccacctacaaagaggctgtctgccttgctggattgagcttcttgaagggactgcgttttcttaatctttgtatccccaatagctcaccagtatccagtatacactaggggctcagttgtcgtttgtcttgtgtttttgttgactcgactctactctcacttagtaca

SEQ ID NO: 536221 - DNA, 634 bp, Homo sapiens
agtaggcatttcgtggtaggcagcaggccctctgtggctcccaagggctctgcagcttagccttcacttgtcactaacctgtgagccacagctcaccactcactacgctgtgggatagtccacctctaacatgaacaagggcccaccaaccagggtaggccatccgttgagctgaggcgaggggaggcatcccgtgcgctagaaaactgtgtccctgattttgctgtgccaatagaaggtgacattacttatgcagttaattaggggagtggaaagagttcatggcagtccctagatcaagcctctccaggcaccacttggctctacagcacagctagagggtcaaagcaggctgtgccacagccctgtgtccacacaagatcctctcaggacaacgtggtggccagtccctggtggggctcattaccccgatttcaagtttccttctgctgcgaggaagcctggtcccacctacaaagaggctgtctgccttgctggatygagcttcttgaagggactgcgttttcttaatctttgtatccccaatagctcaccagtatccagtatacactaggggctcagttgtcgtttgtcttgtgtttttgttgactcgactctactctcacttagtaca

SEQ ID NO: 536222 - DNA, 555 bp, Homo sapiens
caggtctgttggagtacccgaccgtgtgaggtgtcagtctgcccctgctggggggtgcctcccagttaggctgctcaggggtcaggggtcagggacccacttgaggaggcagtctgcccgttctcagatctccaggtgcgtgctgggagaacsactgctctcttcaaagctgtcagacagggacatttaagtctgcagaggttactgctgtctttttgtttgtctgtctagttcattttctaaacttatttgaacaggtatagcttttcatcaagtgcctcttaacatctcaaaaaaacaaattagtgtttcaaaaaaacaaaatttggaatgtttttgatctaaagtttacacagtatattttaaaatacagatatattaaaatttattaccaagaataactcaaaaatattatattgaatatgcttttttcaaactatgtaaatataaccccctttctccctaggaaataccatcctcccatccctaattgagaggcattgtctcagatactccagaaatatgggagagagcaaaagttataagaaaacctga

SEQ ID NO: 536223 - DNA, 629 bp, Homo sapiens
ctttctccatcctccatccttcatcctccatgttgatatcatagtaatcttcctaaaatgcaactttgattgtattgatttctgttcyctataagatgaagaccaagttccttagcatagttgtaagtaaagggtcaacaactcttttcctttctacatgagaaactgatcttgaataagtgcttctagttcttttcccctgaagactcaataaaagtggaatgtccagctgtgttactgggccatattacaaatggcaaaaattgcttattgacacactgcacctgctcaaggagcattgcaagtgggaaaccacaggattgactccttcagtgtggtgatggtttcattggggcatgtctctttggatccctaaaagctgtgtctacaggactgttataagatacattggttcctattcggggtgtggagctactaaatcgatgtggctcccacatccagataccattccttagtactcaagtgctagctggggttggggataaagaggattgggctgtgggttgcagtgagaactcctgctgaggaaacatgcctgacactgacttgctggcatgttgcagtcctttaattaatttcatgccaagtgcagcctattagtattgtgg

SEQ ID NO: 536224 - DNA, 485 bp, Homo sapiens
gccttgcacagaatacaatataaaggaaggcatcaataaatcttggtttaatggaataaaagtcttgtaatcaagcagatagcatttgactgtaaactgagcatccaaatagaaaagtctaagaaggaattagaaaaagcagaatttttaaagtttcttaagtagagaaaggcctgtatactgagatttttgctttcagaaaagagtctcatagttgtctgcagaatgaactgggaaagaaaaaataagccagaaggacatttagattttcctgtgttaactcaaaatcttcaatttcccaagttttacatctttaatatgatttatataaaacacttcaatccattatcgaagtggtattacttggttcattatgaaaatgaaattagtactttctacatgtgaggctgatgccgaagttacatcagttataagataaaatcagcrctgtagatactgtcagaaagaaggatcttagaacagaa

SEQ ID NO: 536225 - DNA, 576 bp, Homo sapiens
tgtgattttctaaagtgaaatattagaccaaaataattatcaattacataagaaaacaagatatcttgagagtcagtaaaaataacaaagagattcagagccccaatacacagaattttatgttaataataatttaatatcattttataatagatatttaacacaatttaatacattaatatagcataatgttatatactattaataatacattaatatattgatattaatataaatatgtaatatatcaatctaattaaaattaatgttatcatattaatattayattatcataatgataatatattcattatataattatcattatacagttataatttattaatatgttattttataataatcataatgtaactgtataattgcattatggtaataatttttattatcataattatattatgataatatgttattataacatttaattatttaaaataattattgtaaggtaattataaaatataaagtaaggatatttttatattattaatattaataccattttatattataatattctagtactaatacatggaagtttatattaatact

SEQ ID NO: 536226 - DNA, 637 bp, Homo sapiens
gccatcctggggccccttccccaccattctggggctcagagccaaatacaactaatgccaaggattcaattcctgaaatgcagtgcataacctcagtgttctgacggtgacaacaaaagccagcccttggggcttcagaagaaggaagcaggcatttgtctggcaggcagcgaggccagcccgtggatggggagtggggcaccagattcagttcttcagtgaggacacttgagctcagacaggagctgagggggatggggactagagttgtagggagtgcagtctctgggcagagactgtcctcagagctgtgaggtcagagatgagggcagacacaggccctaccctcagaaagccccagtctgatggaggaggcacagccttgtcctgggggaaatcctagtctttcttatttattttttatttttatatttttgagatggagttttgttctgtygcccaggctagagtgcagtggcgccatctctgctcactgcagcctccatctcccgggttcaaatggttgtcgtgcctcaccctcccgagtagctgggactacaggcacacaccaccatggccagctaatttttgtatttctagtagagacagggttttgccatgttggccaggctagtct

SEQ ID NO: 536227 - DNA, 577 bp, Homo sapiens
ttcagcctctatttcagtagtggcaccagtccatgaaatatgacataattaccatgaaatacattttcaaatattttgatttttgtccgctgctttttaaaaaacataggccgccttctaggtctccgagtatgtgttggcatttcccaccttctgggaaaaacacattaaaaagaaaagccaaagtccccgaagatgaagttggcccccctccctgccctcccctcctcctatctcctcacccctcagagttctctgccctccccctccccctcccttggctcagagataaaattgaaaaaaggcagacagaggagaggggacacaggcgcccacctccaaagcctgaaatttatctaagttgccacgcttatctgcagaatcgcatctgttggttatcacgacgccaactgctccaaccctccatcccgctcttctctggaaatggctcccccatccctcctaccaatgcattccccccygcctcaacctgcactcttattttttaattatttttccattgtgttatctctttgtggctggagatggaaggatgaaaagccactgcctgtggctt

SEQ ID NO: 536228 - DNA, 577 bp, Homo sapiens
ttcagcctctatttcagtagtggcaccagtccatgaaatatgacataattaccatgaaatacattttcaaatattttgatttttgtccgctgctttttaaaaaacataggccgccttctaggtctccgagtatgtgttggcatttcccaccttctgggaaaaacacattaaaaagaaaagccaaagtccccgaagatgaagttggcccccctccctgccctcccctcctcctatctcctcacccctcagagttctctgccctccccctccccctcccttggctcagagataaaattgaaaaaaggcagacagaggagaggggacacaggcgcccacctccaaagcctgaaatttatctaagttgccacgcttatctgcagaatcgcatctgttggttatcacgacgccaactgctccaaccctccatcccgctcttctctggaaatggctcccccatccctcctaccaatgcattcccccccgcctcaacctgcactcttattttttaattatttttccattgtgttrtctctttgtggctggagatggaaggatgaaaagccactgcctgtggctt

SEQ ID NO: 536229 - DNA, 527 bp, Homo sapiens
ctagtaaagaaaagaggttaccattaaggtcactacatagcaaatgcttttatttcttgagtattttaagtttggcttcctgacatgatttttatayatatctgtgtctaggtttttgtctgcctttgtatatctgccgaatgccagttctttttcacaaagtctctggctgatgtcgttcatgacattctgtggtggagatttattccctgaccttatactttggaaaggacagcctgaaatactcaagaaattgtgggccttagtagattatactatgagctatttctcttccccagaggaagtattaccaaccaaagcagaggccaaaagaggaactcttctgattgccagtatccttgcaaagagccatttgggtaggacactggtttagattttcagtttgaggctaagatggtggtcgtgatacagggatagtgctttggcaacttttcatccattgttgaaaccttgtgataccttggaagacagtgaatctaaaaaggcatcagcatgtaaaattaaca

SEQ ID NO: 536230 - DNA, 624 bp, Homo sapiens
aaccatacacacccagagtttccaaatcactacctaccttgaagattttaaatatgccgttttagcaaggagattttaatttatgctggtaatatctactagtaaagaaaagaggttaccattaaggtcactacatagcaaatgcttttatttcttgagtattttaagtttggcttcctgacatgatttttatacatatctgtgtctaggtttttgtctgcctttgtatatctgccgaatgccagttctttttcacaaagtctctggctgatgtcgttcatgacattctgtggtggagatttattccctgaccttatactttggaaaggacagcctgaaatactcaagaaattgtgggccttagtagattatactatgagctatttctcttccccagaggaagtattaccaaccaaagcagaggccaaaagaggaactcttctgattgycagtatccttgcaaagagccatttgggtaggacactggtttagattttcagtttgaggctaagatggtggtcgtgatacagggatagtgctttggcaacttttcatccattgttgaaaccttgtgataccttggaagacagtgaatctaaaaaggcatcagcatgtaaaattaac

SEQ ID NO: 536231 - DNA, 314 bp, Homo sapiens
atacctgggcagcccctttacagtcaacctatttcacagtgaaagaggacacaggactgtacaggtaaatatgattatgtctatggaagactaaacatgtaaatgcttccgtatgaatccatcaactccactagaaagacatcatagaaagtcaggaaattggccaggtgcagtggctcacacctataattccagcrctttgggaggccgaggcgcgtggatcacctgaggttaggagttggagaccggcctggtcaacacagcagaaccccgtctctactaaaaattagccagatgtggtggcaggtgcctgt

SEQ ID NO: 536232 - DNA, 513 bp, Homo sapiens
gccacggaagactggtctgcagctcccrctgctcaggccactgaataagtagcagcaaccactgaatggtcttaagctgttcttacctgggctgttaagtaacatggaaataaggctgatggaaaataagcgtcagtttcttaaaaaaaaaaaaaaaaagtttccgtaaacattcatggcaggtttttgtgtagacataagttttaattcatttgggtaaatagcaaggaggggattgctgtatcttatggtaagactgtgtatcttgtgagaaactgccaaactatcctccaaagctgctgttccattttgcattcctaccagcagtgaaggagagttcctgttgttccgcatccttcccaacatttgtttggtggtgtcagtttcagattttagccattctaataggtgtatagtggtatcttgttgtatttgcaattccttaaaaacatgataattttgagcatcttttcatatgcttacttgctatctgtatatcttctttggtgagga

SEQ ID NO: 536233 - DNA, 513 bp, Homo sapiens
gccacggaagactggtctgcagctcccactgctcaggccactgaataagtagcagcaaccactgaatggtcttaagctgttcttacctgggctgttaagtaacatggaaataaggctgatggaaaataagcgtcagtttcttaaaaaaaaaaaaaaaaagtttccgtaaacattcatggcaggtttttgtgtagacataagttttaattcatttgggtaaatagcaaggaggggattgctgtatcttatggtaagactgtgtatcttgtgagaaactgccaaactatcctccaaagctgctgttccattttgcattcctaccagcagtgaaggagagttcctgttgttccgcatccttcccaacatttgtttggtggtgtcagtttcagattttagccattctrataggtgtatagtggtatcttgttgtatttgcaattccttaaaaacatgataattttgagcatcttttcatatgcttacttgctatctgtatatcttctttggtgagga

SEQ ID NO: 536234 - DNA, 620 bp, Homo sapiens
ctcagtgccaaatttatttaagaggtaggcatgaaaatttagtttctaatcacgcaggtaatctatttcttcccaaaatggcacccaaaatgtgttctttacatacctacctacataaggcctggcctccttccatgttttctgtttgattccacaagtatccactcattccctaactggtagtcagatagccctgggccaaccactagcctctgccagtagaatatatattaaatgccacagagcaacataatatcctatgtagaaaatctgggagggaggatgcaagatatcatgtataatctaactttcttatttcacttgcattcatctacttttttcaggccttacacacatgccggtttccatagacataagaatatggccctttttttttttttttarctgtctcctggactaaatagtccttcttgccaaggcagaagaataaagcattttccccatcacataataatctgttttgagattggggagatttttcctcattctatggtttttgcttttattgttgcttgatttttaatatttcatagacaggtagttacaagcaaggaagctggagccaggtgggttggaggcacagttctgatgcatagcag

SEQ ID NO: 536235 - DNA, 557 bp, Homo sapiens
tcttataccaagttccctcagacatatccttgtcaaggatgagggtgctggtaggttaactgggaggtgactctaggtaacagccataagacagtgaggaagggagaagggaaggaaggaagatamcagagtctgtgttctcaagcaggttatggacacagacaactggggctcaatcctgccagggaaatatgggagacagagtagaccatgcctcagaattatccccacctagagacaagagagctggggtgtttatccaccaactcctgccagtcttacctgggcctgctcccaagtggcctgccccctgtgtgggtgcagggggctcccacagccagaggaaaccctcgggcagagtcacaggtgctgggccttgagaaccataaggttttgtgcaagcaaatgatgaggtggcaaggagtgggggaagagggggaccagcagtatctgctatggccactaggttctccccatgtattcccaagggacttggagagaatggtgagtgatggagctgcagagacagggagagaaaggaggttcttgcagcccag

SEQ ID NO: 536236 - DNA, 624 bp, Homo sapiens
gtcttgcagtctctgcattttagtctctcttcttcttcttctttttttctttttgtgagacagagtcttgctctgtcgcacaggcaagagtgcagtggcacaattttggctcactgcaacctcggcttcccaggttccagcgattctcccgcctcagcctccctagtagctgggattacaggtgtgcaccgccacgcctggctacttcttgcatttttagtagaggttttgccatgttggccaggctggtttcaaactcctgacctcaagtgatctgcctgcctaagcctctcaaagtgctggttttacaagcataagccaccatgcctggccaagaaatttcctgaaatttcttactcactaacatggatcataattagcccttcccattctcaattatattttgctgtattaacctttttattcttttactttccttttagtgttctctgaaaagggagaaaaaaataacacacgctcagtccagcatcctgaagagaatgtatattcttcctctacctccatcttgcaagactagcagaaaatttgatctcagtcagttttgggtcctctttaattctcatagttacatcagcttstaggagattttagaggtggccaggg

SEQ ID NO: 536237 - DNA, 469 bp, Homo sapiens
tggactcttaatgggctacaaaaagccttaaagtgagacacttgactagctcccctaatgataaaactttttagaacctgctaaatgctagaaaaagaggaaatactggggtcagcaagaaagttctacaaaatggttaatccatttacagatcactgggaatggtttgtgttatgctaacttggcagtctggtatttttttgcgaaagtacatgattcygtagacaacagtggaagatgttttgtgggcagacatagctttgtgctccttttgctagcttagccttaactcaacaaagtcttgatacacacagacatattaagaaaaggatatgcaggaaggtgttaagcaaaacctttgaattagagaaaaagctttgcacccctcccccactctcaagtgtggtcatggtttgagactgaaaatgagaggacaagtgtagtgggccacagtttactgggacttcct

SEQ ID NO: 536238 - DNA, 415 bp, Homo sapiens
aattaacaagtacaacggattagaytggtttctataaaagggtacgaggcagttgtgatgttaatggacttgcatggagactatccagatcactgtttgttgaacacctcctgtgtgaaaggtacgtatttgacctcatttactccccacaaaatccttgtgacatcagtaagtctctacgttgcaagtaagaaaattgaggcctagagaggcggaataacttcgagtcttaaaattagtgagtgccaaggaaggaacttgaaccacaattgcaggctccacgtcagttcttctctgactagtgatcaggcacaaagtttaccctagggaggatgggtccagaagattaattctgtaattccagggaattacaagatgtaggaatcatagtctcaaaagtgaagctcatgctcaa

SEQ ID NO: 536239 - DNA, 415 bp, Homo sapiens
aattaacaagtacaacggattagattggtttctataaaagggtacgaggcagttgtgatgttaatggacttgcatggagactatccagatcactgtttgttgaacacctcctgtgtgaaaggtacgtatttgacctcatttactccccacaaaatccttgtgacatcagtaagtctctacgttgcaagtaagaaaattgaggcctagagaggcggaataacttcragtcttaaaattagtgagtgccaaggaaggaacttgaaccacaattgcaggctccacgtcagttcttctctgactagtgatcaggcacaaagtttaccctagggaggatgggtccagaagattaattctgtaattccagggaattacaagatgtaggaatcatagtctcaaaagtgaagctcatgctcaa

SEQ ID NO: 536240 - DNA, 546 bp, Homo sapiens
cccctccagtcaccccacctgacagttagccctctgaccacaccaaactgcacaagctaggcagtccatgctcctagggttttactcatgccatcccctaagactcaaatgccttccccaatcctgcaatctcctatcctggttcacaactaatcagccttcaaactggtgcctcctctctggtctcgtgacatgtgagcccaaagaaaaaagctctgtgcctgtgttgtagaaggagtttcttactcctgtcttattcctttagttcaatatcttaggcccaattccttctagactcacttaaagagggtggacgtgatgcctcagataacaacccatctgtagctgattagaccttgcttgccagttcactcagggctgtgtcccatcctgagycagggtggagatgcaccctgtgcaactgcaaccagaatcactggagtgtgacgagtaattaaaaagaaagaaatatgctaattgcagtttgagaagggactgagatctgcactatgctctcacagaagaccaataaaaatgatggattgc

SEQ ID NO: 536241 - DNA, 546 bp, Homo sapiens
cccctccagtcaccccacctgacagttagccctctgaccacaccaaactgcacaagctaggcagtccatgctcctagggttttactcatgccatcccctaagactcaaatgccttccccaatcctgcaatctcctatcctggttcacaactaatcagccttcaaactggtgcctcctctctggtctcgtgacatgtgagcccaaagaaaaaagctctgtgcctgtgttgtagaaggagtttcttactcctgtcttattcctttagttcaatatcttaggcccaattccttctagactcacttaaagagggtggacgtgatgcctcagataacaacccatctgtagctgattagaccttgcttgccagttcactcagggctgtgtcccatcctgagccagggtggagatgcaccctgtgcaactgcaaccagaatcactggagtgtgacgagtaatyaaaaagaaagaaatatgctaattgcagtttgagaagggactgagatctgcactatgctctcacagaagaccaataaaaatgatggattgc

SEQ ID NO: 536242 - DNA, 599 bp, Homo sapiens
ccaaattcatacttgaatctgagtatacaatttttaaattcaagrtcttgtttacctaatagttactaggattttaaatgagtacctaaaatctttgtacaccaaattgccaaaaattaaaaatctagagcttttacagataatttccaaggaatcgccaaaagtgtgtaagtattgcccttggattataaatagcaattacagtgacctgtatgtgatcttataggcttaaagtgaggtattcaatttagattctttgtgtgtgttggagtcatgtctactgctctctgagtattagtttcataaatataataattcctttctaagtgcaaccatctgctgaaagcagatacaactcaatagagtttccctgggtagccactccaggctggctggcatcctttcgcgggttgacggggacgtctgccctagtggaggaggcggacctctggcaacgctgcaaaaagtctcctgatcaaaagtgtttcctacatgttctagtactcacacctcagcactgaactacagaccacacccatattgagggacaactagcaaaataactggccaaaactgttaaaaactgtccccttatgggg

SEQ ID NO: 536243 - DNA, 494 bp, Homo sapiens
ctaccagtgtaattgctattgtgtgactcagatgatggtcttggacacaaaatttgggaatagggtggtcagcaatctagtgcttatttcagcttgtgtctccagcttggcctcttctttgtctctcaaagaatggaacccctggaaaacccaaggcagcttagtagctatcaccactcactagttgtaggtggagcaatacattagcccatcagataatctgagttctcttcttaagtcccctgctatgaccacagatcatttaggtttttctataaaacaatacaatttgggagattggttgtcttccccatcattcaggaaaaaattataagagaatttgttttacctaygtatgtgtacattcaaaatcccatcattttcatagggagaaacaaatcatccttatttccttatttcttacaccacaaacactggattaagaaaggcaaataattgtaaaacctagtacactttgaaattataatgctttc

SEQ ID NO: 536244 - DNA, 669 bp, Homo sapiens
agccgctggcctgagaggattagcaaggttttagagactaaggtctctacgggagctggtgaatgtggaatgaaattactcttygggaaacatggatgatttttatcacagctaaggagttggggctgagcagtttttggaaggctgtggttaggcatatgtgaaaacctgggccggtaatggaatctttggacccccagttattattccaaaatagctcttgtagaagcacccgtgtgcactcctcacttgcaggaaatcatgggttctttctgacagcctggggctcaccggcctgtgggcgttcctctcaccaagtgcgagtccagtcaatggtggttgaatggacccacctccctcgccagtgcctctgattggctgctttccccctacctgacgtcatttcccctgtttttgaggatcaatcaagatggacacaaacgatgcttccttactgtcctttgcctttctctgagtactacatagttaagaatatctgtaatatgattgctagctataaaagatacctctttttctattatttccctgtttgtctactttttaaaaaatgtatagtttgtttttaatgtaaacatcctggttactaaaacttcatacgtttatatgttggaatattttcttctatacaagcactggtcttttaacttg

SEQ ID NO: 536245 - DNA, 669 bp, Homo sapiens
agccgctggcctgagaggattagcaaggttttagagactaaggtctctacgggagctggtgaatgtggaatgaaattactcttcgggaaacatggatgatttttatcacagctaaggagttggggctgagcagtttttggaaggctgtggttaggcatatgtgaaaacctgggccggtaatggaatctttggacccccagttattattccaaaatagctcttgtagaagcacccgtgtgcactcctcacttgcaggaaatcatgggttctttctgacagcctggggctcaccggcctgtgggcgttcctctcaccaagtgcgagtccagtcaatggtggttgaatggacccacctccctcgccagtgcctctgattggctgctttccccctacctgacgtcatttcccctgtttttgaggatcaatcaagatggacacaaacgatgcttccttactgtcctttgcctttctctgagtactacatagttaagaatatytgtaatatgattgctagctataaaagatacctctttttctattatttccctgtttgtctactttttaaaaaatgtatagtttgtttttaatgtaaacatcctggttactaaaacttcatacgtttatatgttggaatattttcttctatacaagcactggtcttttaacttg

SEQ ID NO: 536246 - DNA, 558 bp, Homo sapiens
atatattgggaagtgctgtgtgtgcctttgactcatttttttctgcacagcatgttttatattattaaattgagccctgcacacaagcagcctggaagactatgattttccaggtaacagcagagctagagaaaaggcctgagctctttgctttctgttcaggctcttgttctgcctgtgtctcaggttgcattattgcttttattagtttgggtgactgaactcttgaattttgccctatctgtggcatatactctttcctatctgggagcagtcctttatacatcckggtggtccctatagcacaatgcttatgcagaacagatgcttttgcagaggcctaggttagccagagaggcttccagtcctgggagctgtgtgttgttttggagtgtgacagcctctgcctggtcacaggtccttacctggtccagaccacatggttaactacgccttctctgatagccttaacccaattgtctctcattctccttcaacactcgttttataaatccctgattctagatcaagctcacaacctgcctgcattggttttcc

SEQ ID NO: 536247 - DNA, 591 bp, Homo sapiens
gactattatttctcctgaaaataatttttatttaagcacataatgtagaaatctacatcgttatgtgctcttatgtcctgttatatggagggcaactgcaagacatctcattgcattaggctgcagaccattaactaaaatcatcagaacctacccattcttttttatcagaatgtaataaaggcatatattctcccacaggttttggttgttctccaaatatttcctctctgatatatagtgttttaatttgcatttccctagtggcatatgatgtcgattatcttttcctatgcttgttttctatctatatatcttctttagtgaggtctatcgatctattgcccatttttaattggataatttgtatcccagatgtttagttttaagaggtctttgtatattttggatgcaagtcatttatcaaatatatgttttgcaaatattttctatcagtctctggcttgtcttttcattttcttaacagtctgtttcwcagagctcaagtttttaattttaataaaatccaacttctcagactgtagtttctgtctttcctacttagcggctggtggtgaatttttggacttt

SEQ ID NO: 536248 - DNA, 627 bp, Homo sapiens
ggcttaaaatctctaaggagagaatgtgcttgtagggtttaagaatcacaaaagggggacctagtttgtgtcaaaggragaatgggagaaggataactagatcagatcagagaggcattaaggacaaaagatgtaagtcttgttggcagtgtaaaggtttaggttttgacattgaatgagatgtgaactcttggaaggttcagctcaaatagggaacatattttgacttccgtttttaaagtatcatgctgattgctgtattgaaaatagaccatagtggagcatgtcaagtagaagtttgccacattttatgagatgattgcaataatccaagcaagagatcataaaaatttggaccagcctgtaagtagcaaaaatatgaaaataatgtatgtttgtatttgagcaatgatggggcaaaagtatgatcttggagcaagtgctttattttgtagcccacctgataatgggaaaactaatatgctgacctaaaaacttatcttacaacaactaacaaagtgcctcaaggatgacttgaaatctgtggaatatagaatagttggaatttaaaagaggtcaaggggacaagatatgctcaaagagtaattattaaagcgattatgcaca

SEQ ID NO: 536249 - DNA, 594 bp, Homo sapiens
ctgggtacatcacttcctctccataacggcacttcatcttccagaatgctagtttatactcatttatatggatatagggttccaagtccaacaagagagtaaaccctagtatgcaaatactttttgcaagtgtctgtctgcattatatttgataaagttccattggcyaagcaagtcacattggagagcataacaagcaggtagtgaaagattttagtttttaaagatgttttatacctaacaattcattctttattatttgccgttaagatacatggacactaaggaaaaacatggacaatcttctatttttttcttaatagtcacataaaaaagaaaaacaaataatatactgaaaattcaaattttgattactttttcagagttaaatggttagcaatcaaacaattgattagaagcttgtatcaggtaaaaataggatatttagtgtaaatatgattttctttacggtccttgatacatcttttcaccattttcaactgaaatatatatgtaaacatagggggtagggaccacaatcaactgcagagaatcttcatgtaatcataagatcgactgagttaaataaaaaaa

SEQ ID NO: 536250 - DNA, 453 bp, Homo sapiens
cggtaactaccagtcaggccgtggtattcccctgatgagcacagttgactgcatacaatattagcatctgatgagaactctctgcaaccatgaagacaatttcatggtcatgactgaacaaagataaaaacaaactctatttaactactaaatattaccaaaatctccagtttccaatttatacaagtgactgctacttctttcatgataactctagcctcatctgcttttcttgacccttacagacaagatcccatacaccaattttttggtagcacccagtccagaagggaccccatcgtccttcaacattctgctaaattaaattctgtaataacaagccttttctaactccctttaatcaaggtgcctcaatgtttcaccttgtgayatggctgcctcttttgccacagtagacttaataaacttaactctttttttttaatcacaggt

SEQ ID NO: 536251 - DNA, 547 bp, Homo sapiens
gtctgctaaagcaaattgaaaaccccacaaaaaataaacaaattcatctctatctagtgttaggattttcaacattgctcacatttttgaaaataagtaagtggtacgtgtgtcacaaaactcaaaaggacaaagagccaaagtttatctcccttgtcacgtattccctcaccaaagacaaccacagccagtgatttttgcctatctttccagaggtagtctatgcttatagaagtgcagaaataaaaggtctctcttcccccacctcctttcctctctgttatctcggtatggttgcatttgcaagaaycacatcccagttaatctgtaaatttcacgcacccgattctgccttccctgggactggatctacagtctaggggtctcccatgatgtgtatggggaggggtccagacagaggcccagattgtcacgggtcctcctgggtcactgctgaaacatccctcatcctgccccaatgggaccacatggtctgccaggctcagtggctctttctgatgccccttagccatgttgtgaggctgcc

SEQ ID NO: 536252 - DNA, 547 bp, Homo sapiens
gtctgctaaagcaaattgaaaaccccacaaaaaataaacaaattcatctctatctagtgttaggattttcaacattgctcacatttttgaaaataagtaagtggtacgtgtgtcacaaaactcaaaaggacaaagagccaaagtttatctcccttgtcacgtattccctcaccaaagacaaccacagccagtgatttttgcctatctttccagaggtagtctatgcttatagaagtgcagaaataaaaggtctctcttcccccacctcctttcctctctgttatctcggtatggttgcatttgcaagaatcacatcccagttaatctgtaaatttcacgcacccgattctgccttccctgggactggatctacagtctaggggtctcycatgatgtgtatggggaggggtccagacagaggcccagattgtcacgggtcctcctgggtcactgctgaaacatccctcatcctgccccaatgggaccacatggtctgccaggctcagtggctctttctgatgccccttagccatgttgtgaggctgcc

SEQ ID NO: 536253 - DNA, 577 bp, Homo sapiens
agttacacttgcctcaggaggggattgtctttcccattatatagataaggaaactgaggcttggagagagtaagtactgtaaggtcatacattcagtagatgataaagcttctatttcaaggccagtgatctgattacaaagccaattctgctaaactgtgtatagctagtgcttatacatggaacttagactccaagttagactgttacctgggatagggaggcatgggtgatcatgtcttttgcctcttatyttatcttgtatattgtattagtctgttttcatgctgctgagaaagacatacctgagaccaggtaatttatacagaaaaagggtttaatggacttacagttccacatggctggagaagcctcacaatcgtggcagaagggaaggaagagcaagtcacatcttatgtggatgtcagcaggcaaagagagagcttgtgcagggaaactcccccttatagaaccatcagagcacatgggacttattcactatcacgataacagcacagtaaagacctgcttctatgattcagttacctcccaccaggtccctcccacaacacgtggg

SEQ ID NO: 536254 - DNA, 444 bp, Homo sapiens
tgccctgtgggtggacaccctcctttgtaggacctgccctggacaagactgagaggtagaagacacttgcctttccatttctccccaaggttccctccgttcggggccatccacagatctttctccagctccatctctctctgaagctggcagrcagggacagcctctcttcatgtgttccacgtttccttgtgttacaatctggacttcagtgttaatccattatttcattaaacacccactcattgggacacctctgggctgggcttagaccctggggataagaagatgaagggcatggaggttcaggccatttcggaacttccaggtccctcagggagggcagagaagtggacaggcaagcccaggaacccgtgaaggctgccgtcctgctgtcagttatgtgtgttgtgcaaccaagactcatagattttcatcccagca

SEQ ID NO: 536255 - DNA, 444 bp, Homo sapiens
tgccctgtgggtggacaccctcctttgtaggacctgccctggacaagactgagaggtagaagacacttgcctttccatttctccccaaggttccctccgttcggggccatccacagatctttctccagctccatctctctctgaagctggcagacagggacagcctctcttcatgtgttccacgtttccttgtgttacaatctggacttcagtgttaatccattatttcattaaacacccactcattgggacacctctgggctgggcttagaccctggggataagaagatgaagggcatggaggttcaggccatttcggaacttccaggtccctcagggagggcagagaagtggacaggcaagcccaggaacccgtgaaggctgccgtcctgctgtcagttatgtgtkttgtgcaaccaagactcatagattttcatcccagca

SEQ ID NO: 536256 - DNA, 485 bp, Homo sapiens
gttgcatccatcaggctcgtactggttgtaggatttgatttttaaaaggcacatgtttatgactacgtggctttcttgtcccactctatagcaagctaactgaaagcactttcccccgtgtcaatcagttaaagagaaggctagcaaatatgtctgtgacagaataatcttggtgtttcctaatttccacttcatggcactgtggaaaaagacatctgaaggtgctgtggaattatatggacaaggctgcaggcagatggcraggccgtggagagattcgacttggaacctattgggaggatatagggtggagacgcgtgattctggatcatgtgaacccaggatgcacgtgaatttcctgcatcacctaaggaggaaagtggggaggctgttgagcgaaagcagcttgaaattcttctcgggatccacgttcacgtaattgattccttccttccttgctccttttttgcctttcttttgttgat

SEQ ID NO: 536257 - DNA, 571 bp, Homo sapiens
aacgtggaaaaaaaatcacacatggatgaaaactggcataagttaaatcacctaattcccttagtccttaattaagggaattgcagaagtgttcatttaattacatttaaacacctaactgaaaatcagaagtcccctaacttctaagttcacaaagagtctgtgataaaagtttcataaggccccatttcaattttatgaactgaatccttgcttgatacgttggggatctcgtatatttcatagagtcattttttgttttgatggtgaatatatgttgttatgggatcactagcccaattttcattctttcagaaattaatactataactttgaaaggtaaagaagagaccacacaggaaccagggaaaaagctacctgagaaaccaatttgtagtgtcatgggctttggaggagctggcccgacctgccaaccaaatgaytgggccaatgcactcaaaccccttcaagctaccctggcctggtgctgggtggccatgtcacaagctggtggcagggccctgattctgcaggtgcaggacattaaccctgatttgtgctggggcagcag

SEQ ID NO: 536258 - DNA, 526 bp, Homo sapiens
ctgatcgactgaggcaaaattaggggtaggtcactgcaggacagtttagatggttaaatgttgtcttttcttcaatacttactactatttgcagtttattccagaggttattcttgattcatgctgtgtcactcctyatgtgactttccgtataaaattgtcgccatgagttattagttaggcgagcagtttaatcatttctcaccatttgtctctgttcagggagaactagcataactatcatgcatttaatgaactctctagataattatactcaatgtcttgcaggaggtgggggaactaaagatccagggctaactctattcttatatggtaattaatcacttggacaatcttccagtaaaagaggcatgaactttagttcctgcaaaggccaggaactgagggaggggaatgaggaaggatggagcactttagagaatctttctaacctcaagtacacccagggagcactgagtcttgggcattacaacgagaaaaatgattaagaagccacagcaaatgc

SEQ ID NO: 536259 - DNA, 624 bp, Homo sapiens
ctgatcgactgaggcaaaattaggggtaggtcactgcaggacagtttagatggttaaatgttgtcttttcttcaatacttactactatttgcagtttattccagaggttattcttgattcatgctgtgtcactccttatgtgactttccgtataaaattgtcgccatgagttattagttaggcgagcagtttaatcatttctcaccatttgtctctgttcagggagaactagcataactatcatgcatttaatgaactctctagataattatactcaatgtcttgcaggaggtgggggaactaaagatccagggctaactctattcttatatggtaattaatcacttggacaatcttccagtaaaagaggcaygaactttagttcctgcaaaggccaggaactgagggaggggaatgaggaaggatggagcactttagagaatctttctaacctcaagtacacccagggagcactgagtcttgggcattacaacgagaaaaatgattaagaagccacagcaaatgctctctcagcgctattttgcttttatttatatttggggggaggaatgaagtcagaattatttttaaataagagagatgataaaaaccaaaccattaaaa

SEQ ID NO: 536260 - DNA, 567 bp, Homo sapiens
tttactaaaaagtcatgtgaatgagaaataaacaccttaaaagatgctcaccatcattcataatttggaaaatgcaaaattaattccataatgtgataccaatacactcccactgaaatagctaaaattaaagaaaaaaactgaayactctaagtgttggcaaggatgtggtacaaatggaacatgcattacaggtagaaatgtaaaaaggtacaagaattttaaaaaacagtttggcagtttctttacagttaagcatatgcttaccatataaccaaaaattctactccaagatatttacctacaaaactgaaagtgttatgtccacattgacctgtatacaaatgcttagagcagaatcatttataatactcagataaccatgttgtgatttgaatgtgttgcggcaaaagcatgttagaaacaatccgctatgcaacagttttggaatgtggggcctaatgggaagtgcttttgtcacgagggctccactctcatgaatagattaatgctgattataaaagggcttgagactgtcagtttgagccctcacacacttactataaa

SEQ ID NO: 536261 - DNA, 567 bp, Homo sapiens
tttactaaaaagtcatgtgaatgagaaataaacaccttaaaagatgctcaccatcattcataatttggaaaatgcaaaattaattccataatgtgataccaatacactcccactgaaatagctaaaattaaagaaaaaaactgaacactctaagtgttggcaaggatgtggtacaaatggaacatgcattacaggtagaaatgtaaaaaggtacaagaattttaaaaaacagtttggcagtttctttacagttaagcrtatgcttaccatataaccaaaaattctactccaagatatttacctacaaaactgaaagtgttatgtccacattgacctgtatacaaatgcttagagcagaatcatttataatactcagataaccatgttgtgatttgaatgtgttgcggcaaaagcatgttagaaacaatccgctatgcaacagttttggaatgtggggcctaatgggaagtgcttttgtcacgagggctccactctcatgaatagattaatgctgattataaaagggcttgagactgtcagtttgagccctcacacacttactataaa

SEQ ID NO: 536262 - DNA, 537 bp, Homo sapiens
ggagcagcgagccaagaacactcgggactgctattcccattcccctgcacatcgagcaagaatatccctctgggaaaagcaaattagtatttctcccacaggctccagggtagtaatataaatgttgtatccgggaggacaggcaggttttataaaaggggagcttgaagccctgtctgaggagattgtattatttataagaaaacctaaagaaatttatgtttaaaggtgttattgaaaacaatggtgacaagcrattaacagagtctgatagttccaagatactagtacaatagcctctaattatccatggggattatattgcaagatctccagcagatacctggaattgcacatagtactggattttataacaaaggaatcttctttgttgtttctttccctagttctgcctataacatttctagctattctcttttttctgaggaaccccaattattttcagtctaacattgttagactttataacaaaggtatcttctttgttgtgtctttccctagttctccctttgacaa

SEQ ID NO: 536263 - DNA, 624 bp, Homo sapiens
tgaaatcctgccattaacagcaacatgaatggaactggaggatgttaagtgaaatgagccaggaacagaaaattaaacactgcatgttcttacgaatatgcagcaggtaaaaaaaaaatgttgatcccattaaagtaaaaaggtagaacaaaggatataaggagctgaaaagggtaagaataagaggccataaggagagatttgttaaaagatatgacattacagctagataagaggaataagttccagtgttctataacactataggatgactatagttagcaataatatatactttcaaatagccagaaggagaatattgagtattcccaacacaaataaataataaaagtttgagatgatgaatgtgctaagtaccctgatgttatcactatacaytgtatgtatgaaaacatcattatataacccataaatatgtacaattattatgtgtcaattaaaaaataaaatacaaaaaaattttaaagcacttgatggatttagaaaataaatgtaaataacaataacaatggaaataaatatatttatatttatattatttatacttatttatattgccattgctatttatatttatttgtatattcttgtataatctggata

SEQ ID NO: 536264 - DNA, 614 bp, Homo sapiens
ggtaaaaatattattttctctgacccatggcacacatacatgcccaacttccagaatgccaacactgttctgtttagtattccttggacaytctccctaacagccatctattccaaaccgctagatttttctttagttctcttgatcttggtcccatacgtttttcaactttgattactacccactctctcaattccaaaaagacctagataacctatagtaataactgtctatctcatgggatacaaatcaccaattttggaaccaaagcccatgtactaagcccttgccaaaacttggtggtattctgatcgtatacctggacttgggacctacaggtatgcttatgataacttgggttacatcatcgaaccacggattaacttgtagcttattttccaagggctcatttagtcttcaagggtccaggatgttattgtggggctatgctgctaaagcaggaccttctctttgtctcaggctgtgaggtatataagtctggcctaacaattagattttaaagtcaatagtatgtaggtcattgctgaattctactaagcagctctcccatggagaagagatgtgaagaaagaattctgaataacattattatt

SEQ ID NO: 536265 - DNA, 614 bp, Homo sapiens
ggtaaaaatattattttctctgacccatggcacacatacatgcccaacttccagaatgccaacactgttctgtttagtattccttggacattctccctaacagccatctattccaaaccgctagatttttctttagttctcttgatcttggtcccatacgtttttcaactttgrttactacccactctctcaattccaaaaagacctagataacctatagtaataactgtctatctcatgggatacaaatcaccaattttggaaccaaagcccatgtactaagcccttgccaaaacttggtggtattctgatcgtatacctggacttgggacctacaggtatgcttatgataacttgggttacatcatcgaaccacggattaacttgtagcttattttccaagggctcatttagtcttcaagggtccaggatgttattgtggggctatgctgctaaagcaggaccttctctttgtctcaggctgtgaggtatataagtctggcctaacaattagattttaaagtcaatagtatgtaggtcattgctgaattctactaagcagctctcccatggagaagagatgtgaagaaagaattctgaataacattattatt

SEQ ID NO: 536266 - DNA, 614 bp, Homo sapiens
ggtaaaaatattattttctctgacccatggcacacatacatgcccaacttccagaatgccaacactgttctgtttagtattccttggacattctccctaacagccatctattccaaaccgctagatttttctttagttctcttgatcttggtcccatacgtttttcaactttgattactacccactctctcaattccaaaaagacctagataacctatrgtaataactgtctatctcatgggatacaaatcaccaattttggaaccaaagcccatgtactaagcccttgccaaaacttggtggtattctgatcgtatacctggacttgggacctacaggtatgcttatgataacttgggttacatcatcgaaccacggattaacttgtagcttattttccaagggctcatttagtcttcaagggtccaggatgttattgtggggctatgctgctaaagcaggaccttctctttgtctcaggctgtgaggtatataagtctggcctaacaattagattttaaagtcaatagtatgtaggtcattgctgaattctactaagcagctctcccatggagaagagatgtgaagaaagaattctgaataacattattatt

SEQ ID NO: 536267 - DNA, 624 bp, Homo sapiens
ttcagtacaatttactgaccagctacgtggggacggagtggtaaaacctggttaataaataaaaacacactgtttttcttctctgctctcataccatttctctgatcttgagctttatttgaaaaagcttgagaaaacatggtttacataatgaaacatggagaatctgaagttgctgtggggcttctcttacagcatgtgatgatcttggagtgcacatgccatatcatgtcttacttggctgatgtcacgaatgccctgagccagagtaatggtcaaggcccaagtcatctctcagtggatggggaagagcgggccattgaagtagactcagactgggtggaggagttggcggtggaagaggaagattcccaggctgaggattcagtaagtactaagtaacctcgaagttaacctctcaaggtaatgactaactggcatggtaccaagcttttggctctkttttccagcctcctgtgagcttcaaaacttcctagtccttgttgctgccaggccccaattttctaggccttcagagcaaggcatggggatctaatctcttgtggaaaggactttttcataagctttttccagagtcacttgtcctgctttgtcagtctttaa

SEQ ID NO: 536268 - DNA, 542 bp, Homo sapiens
aaggccctgataaatccatgtattatcctggagaataaatgactctcaagtagaacaaatgactctcaagtaaaataaatgagtgcacaggcaaaaaaagacagcttcaggaagaacttccgggggtagcagtaagtgggagtggtacttgctgagggaacgtgctgatcatcactgtagctatgactggctttgttttagggaaaggatcactagttcagtcttagaggagaaagaaggtgaatatctctgtttctgtctctttcgccactcaggctggtcttcagrattctgtctctggtatttggccggctgggactgttttggggaaatagcaccctctagaggaaagagtatgttttattttgcgggggtgccccggggtggtggggtgcgcaacagatgatttccagagctttggctcgattccttccccaggggcctggccagcttgggggtggagtgtagctgattgtttatccgcttctgactctggccaccgcagagaacaaagctgcctggctgtgggaggtggcacaaca

SEQ ID NO: 536269 - DNA, 519 bp, Homo sapiens
taaataacatactcaagatcagacagctaatgaatgaaccagaactcagacccagttgtgttgaacttcaaatctcatgcccttcaatccctcagactcctctctatgaagtggaaggggaggttttgccaattgaatagaagttaggggctcctcacagccccactaactccacttctyatccagggaactcaacttgaaaaacatcccttttttcctatcaaaaaagatttcaagtaagagttttgcctttatagcaggtcgaataactcttgatttgataaaacttttatcaagcttaagatacaatttttaaaattctcatagttcttttgtgtctcccaaacagatccagtgattcccagaagtctgcagaccccaccccaattaagaaattcaagcaaatttcagacaggtggccacatgcacaataatatggcatatagtgacatctattggtcaattgtgatattgcatccaacttcctttcacaggaaatttaacaggagctggttgatg

SEQ ID NO: 536270 - DNA, 519 bp, Homo sapiens
taaataacatactcaagatcagacagctaatgaatgaaccagaactcagacccagttgtgttgaacttcaaatctcatgcccttcaatccctcagactcctctctatgaagtggaaggggaggttttgccaattgaatagaagttaggggctcctcacagccccactaactccacttctcatccagggarctcaacttgaaaaacatcccttttttcctatcaaaaaagatttcaagtaagagttttgcctttatagcaggtcgaataactcttgatttgataaaacttttatcaagcttaagatacaatttttaaaattctcatagttcttttgtgtctcccaaacagatccagtgattcccagaagtctgcagaccccaccccaattaagaaattcaagcaaatttcagacaggtggccacatgcacaataatatggcatatagtgacatctattggtcaattgtgatattgcatccaacttcctttcacaggaaatttaacaggagctggttgatg

SEQ ID NO: 536271 - DNA, 523 bp, Homo sapiens
ctgctgtgacaatcccaggaggagcccttcagccagagatgaggctgcctacctatggccacctctcttcttacttctcatacaccaagacacttctaaggtggttaaggtcaacaaaatataaacttatttcctgtgccaagactgaaaggctttcacagggatgcataatctctgagagaacacttacccattcccatgctggacaggcataagcctcccattgtaaggatgagaaaatggaggaaaatgaccacatatagaaataatggggccaatatgaggagtgccagacaaacttaataaaataatatttatctggatttattctagcaaattagattaagaagkatattattagggtttattaagtagtgttagacattggtaggattcataataaaaatacatacatggcttaaactatgtgaagcatataaacccttagaaaaatctcttattataatgtattaaatttagagaagtcacaggataatatcaatagatattgaagagtcatttg

SEQ ID NO: 536272 - DNA, 477 bp, Homo sapiens
tactgtatacaaggatttaattgcaaggatatcattttttttttgaagcattgtctcactctgtcacccaggctggagtgcagtggtacaatcatagctcactgcagccttatctcccaggctcagtctcccaagtagctgcgactacaggtacacaccagcatgcctggctaatttttgttttttaatagagacaaggtatccgtatgtttcccaggctggtctcaaacttctgacctcaagcaatcctcttgtctcagcctcccaaagcgctgggattacaagcgtgagccaccacagccagccaggatggcattattgacacactagcagaacacaaaaacaaaaacaaaaaccagaaacaatgcgaacactgataaatagctaaattcgtacattcatactgtgaaattcttggcrgtcatttaaagtctgtagaaagtcttgaagaatatttattattattaaaagataggg

SEQ ID NO: 536273 - DNA, 628 bp, Homo sapiens
ttttgctaagtagtttgctaagtgaatgacatttgctaaataagtgaggttttccactgtaatcacctgtcattgtatagcactaaaaaggacttgcaaaaaaaaaagattagaatcagaaratctggggtcccaccccaatcctgccattaaccagctatttggccttggaaagtcacttgtttctgagttcagttttcttatctgtaacatacaaataaaaatatcctctaccttgccctactgcccctccatttcacaaatcacatcattgtggaacttaatggggtgttatataacactttatcagtggggtgtgtttctgtttctgtttttactgttaactctccaagagcataaactgtctattcatctattacagaacttgacacagggcctggatctataaataactgccaaaaaaaatgaagagcaaaggttatacatttcctttgtaaaaagaactgagcttcaaatattcatgctccaaattatttttaaatagtcactgtaagtgtcatttcactttgtctagcagacatagcaattagcagagtgcctgagcagctataaatgttctcatttagtctggtttttgttcaggataatgaatataaatgcttgtttt

SEQ ID NO: 536274 - DNA, 628 bp, Homo sapiens
ttttgctaagtagtttgctaagtgaatgacatttgctaaataagtgaggttttccactgtaatcacctgtcattgtatagcactaaaaaggacttgcaaaaaaaaaagattagaatcagaagatctggggtcccaccccaatcctgccattaaccagctatttggccttggaaagtcacttgtttctgagttcagttttcttatctgtaacatacaaataaaaatatcctctaccttgccctactgcccctccatttcacaaatcacatcattgtggaacttaatggggtgttatataacactttatcagtggggtrtgtttctgtttctgtttttactgttaactctccaagagcataaactgtctattcatctattacagaacttgacacagggcctggatctataaataactgccaaaaaaaatgaagagcaaaggttatacatttcctttgtaaaaagaactgagcttcaaatattcatgctccaaattatttttaaatagtcactgtaagtgtcatttcactttgtctagcagacatagcaattagcagagtgcctgagcagctataaatgttctcatttagtctggtttttgttcaggataatgaatataaatgcttgtttt

SEQ ID NO: 536275 - DNA, 574 bp, Homo sapiens
ttttcattaaaaatacgtcattttgttaacatgcaaaaattaataattatttcatgtgtcccagtgttcatttctaacacagtaaatgttcatagatagaacccacacaaaccaaagctctttggagtcttcagtaactttttagaatgtaaagtggtcctgaggtcaaaaagtttaaaaaccagtgctctagactctaatacactcaccctctcctcttaccagttgcccatatcttttttatcacagggtcaaccgggaggtttagacacgtggagaaggagtgtgcctggctctascagttggaactgggatcagaagtggagctgaggaggctggtccagggagaatgcagtgctaagaggtcagacctataccccacttgggaggtgacctcacatgtctgccaccttgcaagcccctgctcagaggtatgctcaggacaatggggctgcctcagactagactctgacctttatccccctttttcattccagacgatgctgctgacaagcccggcctcaggctggagtcagactgccctggtgaggggagaaaggctctctggggccta

SEQ ID NO: 536276 - DNA, 536 bp, Homo sapiens
cctcctcagcacccttaaacaaggccatctctcacatgggggccctaaatctcctgtcattatctccctcccacccaggcagcctaaagcagtcccagtggggagaaaaaaaattcaaacaccacagcaagagcagactggccagacatctttagtcagaatttgtattggtaagcaacagargcaggctttaagcactggcctctttggggtccaaatctgcaccagcttcttccccatctgcctcaccctgcctggggcactcactggaattaaacttcaagacaccagaacccaccctcactttttcccagtgttgtccttctacccattcctgggttcagctctcctcccccaaatcaggaagttccatccttcatctgttccctaacacaggtgccctgggttagttctgatgagaggagggatggaatgggaaggggcgtctccatctggagggtgagtttatagaacccaatctgcccttctcactctagcagaagtggccctgctcctttccttctggaaatcccagt

SEQ ID NO: 536277 - DNA, 431 bp, Homo sapiens
ctcagcctagggcgtggttgggtctgggtgcccgtaacttgcagtccgtcatctgcacggcctggcaccgctgacctccttagcagttccactctcggcagggatgtgcgtgagtgacaggcaggtgagccaggcaggtaggtgagtgcttgagtracaggcaggtgagccaggcaggtaggtgcgtggatgagtgacaggcaggtgacccaggcaggtgcatgtgtgagtcgcaggtgagtgtcccatttccatcggcccgggcttccgtccagcctccggagcagtctggtggagaaggcagagacttccctggcagtcctggacctgggtgtgccatgcgcctggccgatgggtcaggccaaggtttcctgccacatcccctaagcaggaaagagctgtccagacaaagagggacgggtgagggacgc

SEQ ID NO: 536278 - DNA, 627 bp, Homo sapiens
ttatactgaagttgaggcttagttaacattacaaatatgcaaatacagggctggagctttgttctgggccttacaatctaatctgggagttcaactataaaatcagagcataccaggaatgggcctcaaagtgagagacggccattggggtctggagagggccaggagataaggaaagcatttcgtgacaactgacatcaggaggtcccagagctgttcttattcacygatgctgctgccgctgccgctactaccgacttgttttctaatagacattatcctaattatgtattaaatatcaatgggcaatctgatttctcttatcgtcagcttaactggacctatatctattctatagaaagagaaaaacctttctacacaaatatattcaccaaatcacctaactgggtaagcaatgttatgaccacctctcaaggctaatttttaacattaaccttctgttccagcttataatgccatgtacatttcttccttcttgcaaaagcagtgattttattctagttcctttcccgtgactcagggcttcacagacatggtatggcacccagatgcctcatcattgtatggcttttgcacgtccctgctttaaaccacagcatctactgc

SEQ ID NO: 536279 - DNA, 627 bp, Homo sapiens
ttatactgaagttgaggcttagttaacattacaaatatgcaaatacagggctggagctttgttctgggccttacaatctaatctgggagttcaactataaaatcagagcataccaggaatgggcctcaaagtgagagacggccattggggtctggagagggccaggagataaggaaagcatttcgtgacaactgacatcaggaggtcccagagctgttcttattcaccgatgctgctgccgctgccgctactaccgacttgttttctaatagacattatcctaattatgtattaaatatcaatgggcaatctgatttctcttatcgtcagcttaactggacctatatctattctatagaaagagaaaaacctttctacacaaatatattcaccaaatcacctaactgggtaagcaatgttatgaccacctctcaaggctaatttttaacattaaccttctgttccagcttataatgccatgtacatttcytccttcttgcaaaagcagtgattttattctagttcctttcccgtgactcagggcttcacagacatggtatggcacccagatgcctcatcattgtatggcttttgcacgtccctgctttaaaccacagcatctactgc

SEQ ID NO: 536280 - DNA, 517 bp, Homo sapiens
gctctgctgattgcatccacacccctaactcctatgcatccttcaagaatcagtctgcatattgcctcctctggaaagctctcctggctttgctcctcatctaccttagactaaagatactttatccaaggacttcacacatatattggcattgctagattccctagcccatcactaactgtcatgcagacaatgtacatgaccatattcatttccacatctgtatgttagtagcatttattgtttctgactacacatgacatatattattaaaaatttggagaatgcaaaaatgcacaaagtagtaagagaaatgacrtatcatcccatactcagaaaacttggtaatattttggtttatgccttcccactttttccccatacacacacatatgcacatgcacacacaaaatacaccctgatgtttctgtatgtttctttttttttttttttacaagaaagggttatctttgatctttacctcctccaactcctctagtcactatcagtgtcccca

SEQ ID NO: 536281 - DNA, 445 bp, Homo sapiens
aaatcattctgccccctccaaagttaaattaatccaaccttgaatctttctagtatcccattttttttctagaaagtcacttggtaggcatttgaaccatatcccagtgttggcctgacccacagaatttagaaaacacagcaaagctcagactcctacagcacaattacatttccagaacccagagcatggaacatgaccagtggtaacaaatgaccatagaagagatttgaaaacttggtgaggaagcaggaaagacagagagcacgtgagaaagcaaaaatacaatttttatttcagtctttacaatgccagttgagtactatcaaatagaatgttgaaaaacagccaccarcaagaggttaattttgcactctgcttcctatatcctgagggaaacaatccgatctatgcattctgcctcctttctctgagaatgaccttt

SEQ ID NO: 536282 - DNA, 573 bp, Homo sapiens
aaatcagccttgcatttcttcaacaagcaagcatgtactggccacctcctatgtgccaggcactgctctgtaccccaggcgaatcttctgctagcactgccactggaaatrctggctcaatatgatgcaagattaaacaaaacacaacccaaatctctgggtccttggtcaggaatacaactgtatttatcaatgtacaagcttggacaagaatttaaaattatgatgtccattaacaaagccaggaagaaatagaattagactgggcttatgggaacagatgtagattaaaattttaaaagttcttacaattggatgacttggagtagctaatcctatcatgggatggaactataggaagcccaagaaagctgctcaagaaatgttatgacccaattacttcaaatcatctagcttcaaggagaggtggaaggatgctaggcaggaatccctcacacccagaagcagtggtgatgttgatttaaaaccttctcaagtctggattatagctactccaccttcccccaagtcatgcaggtgtataattccaaacaattcaatcaatacttattg

SEQ ID NO: 536283 - DNA, 613 bp, Homo sapiens
gtgtttgattcggtggaggacattttctgggcagcgtttatctgctcccctggctgggctttcacagcacccatatcttatccaagcagcatctattttaagccctgtaaagttcagaccayttgcctttaactgaccacacagcagtagaattgcaaggtgcggtggtaggagtattataaagggagttgggagctgctagtcctagtaactcatgtgcccgtgggcaaatattgaatctctcttctagaaaatggggacagtaattcccaccctttatacttacttcaaggactggcttagggcaaatgagaaaataagtcggaaagggattggcaaagcataaattattccacatgaatgcagtatgaaattttgtaagtgataactttctgatttgaccttttttctcctctgatgtgagcagttttctcagtaggtagttcctagtgaggataggttaggacacatttgtcacttttttttctcttctgatggaaaggtgtgcttttgagatggatatagtgttatgcaaggcctaaagacccccttccttagccatggtgagagttaaattatacctccttaagtactttgtgttctcatgtgacaa

SEQ ID NO: 536284 - DNA, 493 bp, Homo sapiens
ctgctgatttgggttttcctgaaccgatcaaaatcatttttctacagatttcmtggcacctcactttaggacacccgagtgaccctgccccatcatggacaggtgggatggggtcttggaggaaacgtcaggtctggagattagcatttcccagagccttgcttggagttctcaagatatctgctgttttgccaaatctgcatcccctgggaacctgtggggagcctgtgaggataacttgtacccaaagagtggtgaaggtggccaaagaaccttccactattgtttgtcatcgaggccccaaacctcggagttggaaggaaactgctctcaggaagaatggaccgctctccttcttgctgctctactgcacaccattctctatcatagcacatataaggatttttttttatacttgtttgtttaaaagaacacaccgaactcaaagtttccctttataaggatacagcatcttcctcatctctgtgtcccc

SEQ ID NO: 536285 - DNA, 627 bp, Homo sapiens
ctgcaaagccacagaacttgaaactagttcaggtaaaaaaaaaaaaaaattatgaattgcttctattatattatggtaggcagtatgtcaccagaacctgacaaggttaggaataatctcataatttacactgcaagagaactcacaaatgcattctgaggttgcgagttcattgaagagrgaaatattttcacttatagtgacctgagttaaaggtttataaatcactataaaagttagcagattattttccggagtatgtcagttcattgaggtaacatttattaacagtatttttcccagttttaggaaattatttaagtgaaaactaagatgaattaggtatcactcataatctgatcacccagaagtaaccaccaaatatattttagtaatttttctataagtatatatatatgcatgtgtgtatatataccatacaaatatatacatacaatacatatatgtataacatcagtatatattgtttataaaacttttttttttaattaaatacatgttgtgaatgtttctcctccttattttataataatagtgctatggactgaattgtagcctttctaaattcatattttgatgctccaatgtgactatatgtgaggatgg

SEQ ID NO: 536286 - DNA, 627 bp, Homo sapiens
ctgcaaagccacagaacttgaaactagttcaggtaaaaaaaaaaaaaaattatgaattgcttctattatattatggtaggcagtatgtcaccagaacctgacaaggttaggaataatctcataatttacactgcaagagaactcacaaatgcattctgaggttgcgagttcattgaagagggaaatattttcacttatagtgacctgagttaaaggtttataaatcactataaaagttagcagattattttccggagtatgtcagttcattgaggtaacatttattaacagtatttttcccagttttaggaaattatttaagtgaaaactaagatgaattaggtatcactcataatctgatcacccagaagtaaccaccaaatatattttagtaatttttctataagtatatatatatgcatgtgtgtatatataccatacaaatawatacatacaatacatatatgtataacatcagtatatattgtttataaaacttttttttttaattaaatacatgttgtgaatgtttctcctccttattttataataatagtgctatggactgaattgtagcctttctaaattcatattttgatgctccaatgtgactatatgtgaggatgg

SEQ ID NO: 536287 - DNA, 556 bp, Homo sapiens
cttcaattttattgaaaaggtaatgttaattggtattgcaaatatttgaatcagagaaaattgtaacaaatcaactagttaactgtgtaaaatatattgctacctccataatgtaagaagatttttaaatatataatttytattatctgatttaatttttctatttacatttaattttgaggtttaaaataagaagtgaacaattgcaaatttacaatcaagcaaataaaagttttcctttatttgtgccacaaaacttagcttttattattaaagatttccatgctttttaataggaaacatcctacaatgttgtttttatttacagccttatataaatataaaacaaacaatggagatataaagatacccattttggtagaagcaaaacaaaacccacattttttaataaaatgaaagaacagatatctgtactgttcattcatactacagtctcattcattctaaaattttatgaaaaatacatctgtaacctcttttgattcagaaaaacagaattcatttgcctaagttgaatgtgtggtttcctcagagc

SEQ ID NO: 536288 - DNA, 556 bp, Homo sapiens
cttcaattttattgaaaaggtaatgttaattggtattgcaaatatttgaatcagagaaaattgtaacaaatcaactagttaactgtgtaaaatatattgctacctccataatgtaagaagatttttaaatatataatttctattatctgatktaatttttctatttacatttaattttgaggtttaaaataagaagtgaacaattgcaaatttacaatcaagcaaataaaagttttcctttatttgtgccacaaaacttagcttttattattaaagatttccatgctttttaataggaaacatcctacaatgttgtttttatttacagccttatataaatataaaacaaacaatggagatataaagatacccattttggtagaagcaaaacaaaacccacattttttaataaaatgaaagaacagatatctgtactgttcattcatactacagtctcattcattctaaaattttatgaaaaatacatctgtaacctcttttgattcagaaaaacagaattcatttgcctaagttgaatgtgtggtttcctcagagc

SEQ ID NO: 536289 - DNA, 456 bp, Homo sapiens
aacatggtgaaaccccatctctacgaaaaatacaaaaattaccgaggtgtagtggtgcacacctgcaatcccagctactctggaggctggggcaggaaaatcacttgaacccgaaagatggaggattcagtgagctgcaatcccaccactgcactccrgcctgggcaacagagggagactctgtctcaacaaaaaacaaaacaaaacaaaaaaaaaccacacacacacacaagaaaatctacactttaaagatagttcattcttccatttacaaataataaccattaacaagaaccacatagcttgtgataggtatgtagagggtcttgggctctgttatagctaatatcaagtgtcaacttgattggattgaagaatgcaaagtattgttcctgggtgtgtctgtgagggtgttgccaaaagagattaatatttgagtcagtggactgggagagg

SEQ ID NO: 536290 - DNA, 456 bp, Homo sapiens
aacatggtgaaaccccatctctacgaaaaatacaaaaattaccgaggtgtagtggtgcacacctgcaatcccagctactctggaggctggggcaggaaaatcacttgaacccgaaagatggaggattcagtgagctgcaatcccaccactgcactccggcctgggcaacagagggagactctgtctcaacaaaaaacaaaacaaaacaaaaaaaaaccacayacacacacaagaaaatctacactttaaagatagttcattcttccatttacaaataataaccattaacaagaaccacatagcttgtgataggtatgtagagggtcttgggctctgttatagctaatatcaagtgtcaacttgattggattgaagaatgcaaagtattgttcctgggtgtgtctgtgagggtgttgccaaaagagattaatatttgagtcagtggactgggagagg

SEQ ID NO: 536291 - DNA, 456 bp, Homo sapiens
aacatggtgaaaccccatctctacgaaaaatacaaaaattaccgaggtgtagtggtgcacacctgcaatcccagctactctggaggctggggcaggaaaatcacttgaacccgaaagatggaggattcagtgagctgcaatcccaccactgcactccggcctgggcaacagagggagactctgtctcaacaaaaaacaaaacaaaacaaaaaaaaaccacacacacacacaagaaaatctacactttaaagatagttcattcttycatttacaaataataaccattaacaagaaccacatagcttgtgataggtatgtagagggtcttgggctctgttatagctaatatcaagtgtcaacttgattggattgaagaatgcaaagtattgttcctgggtgtgtctgtgagggtgttgccaaaagagattaatatttgagtcagtggactgggagagg

SEQ ID NO: 536292 - DNA, 456 bp, Homo sapiens
aacatggtgaaaccccatctctacgaaaaatacaaaaattaccgaggtgtagtggtgcacacctgcaatcccagctactctggaggctggggcaggaaaatcacttgaacccgaaagatggaggattcagtgagctgcaatcccaccactgcactccggcctgggcaacagagggagactctgtctcaacaaaaaacaaaacaaaacaaaaaaaaaccacacacacacacaagaaaatctacactttaaagatagttcattcttccatttacaaataataaccattaacaagaaccacatagcttgtgatagstatgtagagggtcttgggctctgttatagctaatatcaagtgtcaacttgattggattgaagaatgcaaagtattgttcctgggtgtgtctgtgagggtgttgccaaaagagattaatatttgagtcagtggactgggagagg

SEQ ID NO: 536293 - DNA, 531 bp, Homo sapiens
tgagaagcagctagaggagaagctgaagcaaagggaagagctgaccggaaggatccaaacacaggcataactgacatggtctagggaccagaaagacaggagtggggctggagcacgaggaatgagcccgggcaacaggtgtaaagggaggggcaagaataagttcttagagagccaagggccactacgccactcgtgccttctcccgagaagcctggcagccaacccatatgcagacaagatgacattttgaattcacaytgctgtgctctctctcgtatgtgacctttccggctattttctcaaggaagattaggatagtcacaagtttataaaagaaaaaggacgcggtggctcatgcctgtaatcccagcactttgggaggctgaggtgggcggatcacttgaggtcaggagttcaagaccagcctgaccaacatggtgaaaccgcatctttactaaaaatacaaaaattagctgggtgtggtggcacgtgcctgtaatcccagctactggagaggctgaggctgga

SEQ ID NO: 536294 - DNA, 640 bp, Homo sapiens
gctaactcctggggatacacaggcaaagtcccttttctcatgaagttctcagcctagctttgctctgtagaagataaaaatgtaaatcagatgtttgctctgctcttaaggaggctagtccagatgggaaatgcgagatatacatagatataacttgaaataccatagcgatggttaaatgacataagagaggtaaatataaaatgcagtggggaaagcaaaaacaaaagatagtttagtttctgaagtaatttcaagtagaaatgagactagaattcttttgtcgattcctctattcctagatgctttccactgtactgtgtatttttcttaaatcacacttacttagagccagcaaatgtaaattttgctttttgacatatcattacagtgatccactaacacataaggaacaaactgtttttcacctatgtgttcagaacaatcaatgccttttcagcttactatactaattatagaaattatcgtattacatttgttttatttgctatggttgaaagatgctattctacgtattttatgggccacaartaagtactgtagattcttaaattgattgctaaatagaagtaaatagggaaaatcccgcaaatccttaggtgtcatctccatattaaat

SEQ ID NO: 536295 - DNA, 596 bp, Homo sapiens
gtctactcaagttcatatagaaagtaattcaataaaacaaacattgaacgtttaacttggagctaagcttataaaaactacctattaagtataaaccaaggtaatttgcagaacgggtcttttaaataaaagtcagtcatagtacattgaaccaaataaaataacattacttgtacaagtagttatcaattcatgctgctgttagattgagataaaataygaaactgtcataagaaaatgattgtcttttgtcctttattagggaacaggcatgcaagagctctgtcaaaacactgagaattaagttaaagagaagagaggtcagaaaataatcatatgttactctaatgcaatatgtgacctgttctcccaaaacaatattcctgctgaccctgactctcgaaacagtaatacagaggcagattctgaaaggagatcaatacctggggtgggaagtccatgttgagctttcatctcctggccaaagaagtgaaggttggggaaaggacgcatattaatttatgtgaggttagactaacattttaacatgatttatgaatcgacctcagcaaatggcttaggtttgaatagctgtc

SEQ ID NO: 536296 - DNA, 379 bp, Homo sapiens
  misc_feature (1)...(379): n = A,T,C or G
aatgacgcataaccttccagctttaaacatctgaagttttcacgctccttagaatctaacacctatatccagtactttntgaggttttcccatctacgttaatggcctcatgttaagcccttcctctccccaytaccaccaaatctctcagttcnccttaggacaactgcacatgttcacacacactctctttggttgtgttaacagacaatgctaagtagatgacaaaaagaaagtaaaccaacattttggcctgattttctcaatctcgtaatacaaaactagcgataatattgcaagctaatattcattgccaatactacatgcacagaactttattctaccaatctctgccatgttttgtctctggaagatacac

SEQ ID NO: 536297 - DNA, 574 bp, Homo sapiens
tgtatctcttatgccttttccagtgcaagtaatgggaagcacaactacaaatgtgtttaaaccataaggaaggctactttcrcataacaaaaggtccagagttggctcattcagtggctcagtgatttcatcaataattcagattttttcttatgtctttgcctctccattcagtaggtcatctttttacctcaggctatctctctttaaaggtctaaaatctatggctattccaggtacaaaattcagacacaacagtatcctgaagaaaaagaggttcttagttgtctcctccttatgtcttataagtatcaataaataaacacaaaaaactttcctgggatactctttgatatagatatgttagcatagatctgtaagtagagtttcaaagctgtgggatttagaagaatgcacaaataaagcatttattaaaacagcattgtattctctaatgcaagcttgtctaacctgtgggccacatgctgcccaggatagctttgcatatggcccaacacaaatttgtaaactttcttcaaagattatgagattttttgcttttttttttttgtaa

SEQ ID NO: 536298 - DNA, 574 bp, Homo sapiens
tgtatctcttatgccttttccagtgcaagtaatgggaagcacaactacaaatgtgtttaaaccataaggaaggctactttcgcataacaaaaggtccagagttggctcattcagtggctcagtgatttcatcaataattcagattttttcttatgtctttgcctctccattcrgtaggtcatctttttacctcaggctatctctctttaaaggtctaaaatctatggctattccaggtacaaaattcagacacaacagtatcctgaagaaaaagaggttcttagttgtctcctccttatgtcttataagtatcaataaataaacacaaaaaactttcctgggatactctttgatatagatatgttagcatagatctgtaagtagagtttcaaagctgtgggatttagaagaatgcacaaataaagcatttattaaaacagcattgtattctctaatgcaagcttgtctaacctgtgggccacatgctgcccaggatagctttgcatatggcccaacacaaatttgtaaactttcttcaaagattatgagattttttgcttttttttttttgtaa

SEQ ID NO: 536299 - DNA, 574 bp, Homo sapiens
tgtatctcttatgccttttccagtgcaagtaatgggaagcacaactacaaatgtgtttaaaccataaggaaggctactttcgcataacaaaaggtccagagttggctcattcagtggctcagtgatttcatcaataattcagattttttcttatgtctttgcctctccattcagtaggtcatctttttacctcaggctatctctctttaaaggtctaaaatctatggctattccaggtacaaaattcagacacaacagtatcctgaagaaaaagaggttcttagttgtctcctccttatgtcttataagtatcaataaataaacacaaaaaactttcctgggatactctttgatatagatatgttagcatagatctgtaagtagartttcaaagctgtgggatttagaagaatgcacaaataaagcatttattaaaacagcattgtattctctaatgcaagcttgtctaacctgtgggccacatgctgcccaggatagctttgcatatggcccaacacaaatttgtaaactttcttcaaagattatgagattttttgcttttttttttttgtaa

SEQ ID NO: 536300 - DNA, 660 bp, Homo sapiens
tcacagtttctaaatgtctgattctggcccccaattatacattgcttttgtgccaattttaaatgatttactgggatatctcttgtcaacctcagaagggtaattttgttctcttagaaagcacctgaattattcagagtccaatcagaagagagaagccacacagtaaatttaacagtgaaaatgtaatataaagaattactacctataagaagatagaaactttaacgctgtgaagaaaaccttaaagaayaatcaaagtacccaagaaagaaaccaatatagacaggggaggttgctgagaatcagatttccttaaagaaggtgcagttgcagctcacgggaagataaagtctgctgggtcactcaggccagagccaatcctgctctagggaagctagggaaacaggacacattctccctgcagcagagtggcatgaggcctggggtatgtgtgtgccacagcaaggcagtcaccaggccaggtttgttgctacaagctcactgagggactatgtctgctacatgcacacagctccgtccactgtgcagtaccaccaactaaaaacaccacttaggatcacaattcaaccaagaatagatgatccttctttcttaagtgtctctccagtgccctctactgacaaagcttaacactgt

SEQ ID NO: 536301 - DNA, 563 bp, Homo sapiens
acaacatagcaagaccctgtctctaaaaaaataataaaattaaaaatactttgtaaactataaagacctatccaaagtaaatatattcttaatgatgaygacttatgtatttaaagcactgtacagttctttgcatttgctgtaaatatatgatggcaaaatgcttacctagaagtaacagaactacatgtattactgtgtatctgatatcaatatttaaaatagtgggctgttcttctttaaagaaaaacttatctttgcttatttttaatttccttgttagcagtgggtgcttagtacaatactccaaataatatcactcctgagtttggaacagacataagggaggcaggcatcttcttcgttaactggacctacatcagatgtggggaggaccccccatcttcctctggcttttcttcttttgtcatgttttagctttgctgccaatctccactgatgggtatggcttttttctcattgttggcagggtagtttgcttgattagtagtctgcttcataccaacctcctctatcttcaaggacctccttggaaagaaaca

SEQ ID NO: 536302 - DNA, 563 bp, Homo sapiens
acaacatagcaagaccctgtctctaaaaaaataataaaattaaaaatactttgtaaactataaagacctatccaaagtaaatatattcttaatgatgatgacttatgtatttaaagcactgtacagttytttgcatttgctgtaaatatatgatggcaaaatgcttacctagaagtaacagaactacatgtattactgtgtatctgatatcaatatttaaaatagtgggctgttcttctttaaagaaaaacttatctttgcttatttttaatttccttgttagcagtgggtgcttagtacaatactccaaataatatcactcctgagtttggaacagacataagggaggcaggcatcttcttcgttaactggacctacatcagatgtggggaggaccccccatcttcctctggcttttcttcttttgtcatgttttagctttgctgccaatctccactgatgggtatggcttttttctcattgttggcagggtagtttgcttgattagtagtctgcttcataccaacctcctctatcttcaaggacctccttggaaagaaaca

SEQ ID NO: 536303 - DNA, 602 bp, Homo sapiens
ctatgatcatgcctgtgaatagccactgcactcgagcctggacaacatagcaagaccctgtctctaaaaaaataataaaattaaaaatactttgtaaactataaagacctatccaaagtaaatatattcttaatgatgatgacttatgtatttaaagcactgtacagttctttgcatttgctgtaaatatatgatggcaaaatgcttacctagaagtaacagaactrcatgtattactgtgtatctgatatcaatatttaaaatagtgggctgttcttctttaaagaaaaacttatctttgcttatttttaatttccttgttagcagtgggtgcttagtacaatactccaaataatatcactcctgagtttggaacagacataagggaggcaggcatcttcttcgttaactggacctacatcagatgtggggaggaccccccatcttcctctggcttttcttcttttgtcatgttttagctttgctgccaatctccactgatgggtatggcttttttctcattgttggcagggtagtttgcttgattagtagtctgcttcataccaacctcctctatcttcaaggacctccttggaaagaaa

SEQ ID NO: 536304 - DNA, 559 bp, Homo sapiens
acattccatgctcatggttaggaagaaccgactttttattttaatgaaaagaataccaaatgtcagggtctgcttgtatatgtacactgtcaaatatactttcccagagaactaggattgtgtcttactgatttctggatatggggttcccagtaccctgctgggtacaatatgtttattgtatcaatgactgtaaatggtaaatttttttctaatttttttgtaggatttctaatgctaatttttattttttacagatatggagtggaagatgttctgtcttcattgtgtgttaagkgttgtgttgaaaattgtcacagcctgttctttaaaagattttatttatttcactactttcaatatgtacggtgaaaccaatccagccatttctctgaaatgttatgaatttctctctaaatgtcactttttaggtttaactggaaatctttttttaagccatgttattttggctcttggcccatagatatttctatgttttgtagcattaaatcataaaaattttcttcaattgaatgacataaatggaacatacttaaaa

SEQ ID NO: 536305 - DNA, 559 bp, Homo sapiens
acattccatgctcatggttaggaagaaccgactttttattttaatgaaaagaataccaaatgtcagggtctgcttgtatatgtacactgtcaaatatactttcccagagaactaggattgtgtcttactgatttctggatatggggttcccagtaccctgctgggtacaatatgtttattgtatcaatgactgtaaatggtaaatttttttctaatttttttgtaggatttctaatgctaatttttattttttacagatatggagtggaagatgttctgtcttcattgtgtgttaagtgttgkgttgaaaattgtcacagcctgttctttaaaagattttatttatttcactactttcaatatgtacggtgaaaccaatccagccatttctctgaaatgttatgaatttctctctaaatgtcactttttaggtttaactggaaatctttttttaagccatgttattttggctcttggcccatagatatttctatgttttgtagcattaaatcataaaaattttcttcaattgaatgacataaatggaacatacttaaaa

SEQ ID NO: 536306 - DNA, 627 bp, Homo sapiens
ctatccactactgggcctcattagaggcctgctgctctgctgagaaccacaccacatgctacaccctctcttgtctgcatattagcctgttgctgctccttaaattacctggtacaaaggcttgctctatttctccacagagagctaccactcctatccagtctgaagaggctttatatcatgatctctcaaactaattaaggttcgtgggcaggccacaggttgctgtagagggaccttcctgaaggctgatatctttcagaattcttttttttttttggcaaaagattattgctgctgtaccttatgttcaaaagtctgtttttaaaatttaaaaaacttccttgttttaatctagatgatgtatttaattttacatttcaaaagttatttcctgaggaaagtataacatacttttaattaaaaactttcaaaataaaaggtttaaagtattttcwgggaatggagttagtaaatatactagaaatgtatttccatgaaggtttattggaaatcatagattgtaaccagtatttatgttaattgggaagtatctttacttttaaataaaaacatcacagctttctaatttttaagaggatttgtttgcaatttcatggtttaaaa

SEQ ID NO: 536307 - DNA, 593 bp, Homo sapiens
gggaaatgggcaaacgggcgctctgtgtgattcgtggttttttcctgaagggctcagcaacagttcagaattaagagaatgtaggtgaatggaatattctgcagttcagtttgcaaagggagttgaggagttgacaacttcrcagttgcacaggaaaagagtttaccaaagtggtggagaagaagaaagagttctggtcctgaaagccatgatgcatttaaagattgcatttacgtaaggtgggaagaagcttgaaagatgcgagggactaagacatgggaatttgagatttcagatgtgaaacttttctgggtattaataaggtccaagctgtgatcatggatatggattgctgaaatggagcagaggtaaaatctttagagtttaaaatgttaagaacatgtggtattgtagaaaaaagttgtttttattttttaaatggagattgaagtcccaaagaataatggaagaagccaacgtagagggaagaaagtaagcaagtgccaagatcatgagaggcaagatttggaggctggtagatgacaatcatgagaagatttagagggtggtacagaggcatggcatgcttttca

SEQ ID NO: 536308 - DNA, 593 bp, Homo sapiens
gggaaatgggcaaacgggcgctctgtgtgattcgtggttttttcctgaagggctcagcaacagttcagaattaagagaatgtaggtgaatggaatattctgcagttcagtttgcaaagggagttgaggagttgacaacttcacagttgcacaggaaaagagtttaccaaagtggtggagaagaagaaagagttctggtcctgaaagccatgaygcatttaaagattgcatttacgtaaggtgggaagaagcttgaaagatgcgagggactaagacatgggaatttgagatttcagatgtgaaacttttctgggtattaataaggtccaagctgtgatcatggatatggattgctgaaatggagcagaggtaaaatctttagagtttaaaatgttaagaacatgtggtattgtagaaaaaagttgtttttattttttaaatggagattgaagtcccaaagaataatggaagaagccaacgtagagggaagaaagtaagcaagtgccaagatcatgagaggcaagatttggaggctggtagatgacaatcatgagaagatttagagggtggtacagaggcatggcatgcttttca

SEQ ID NO: 536309 - DNA, 629 bp, Homo sapiens
aaatagtggccacctactctgtgccaggtgctgtgctggaatctccacctgcccctccagatttgtcctccacccttctccaccctgtgccayggaccagggggctgcatatggggctaggtcagtaggctccctggcccgctctggcccctcgctgggttaggctgacggggagctgcctcctctggctctctgcctgtggggtccctcctgagaggtggcagtctatttctaaccctggggtactgagctgtcctttggggtccccacactctgcccacatctttgtaaatagccccattctgaaactctcctccaaccacccaacttgtatcatttgtgtctgccttgaccctgtagtgccttcacatttaatccacacagcactcctctgaggtctgtattattagcttcaacttgcaagtagagtagtagaagctcagtgggtaggcaccaagcatgcgtccagaacctggctggcgacggggttaggttcaagtctaggccttgtgggtgcatggagcagacacctgggatcacctgcccagcaccttctcaggaagcacgttctcctcccactgatggagacaggggaggcaatgccagtccaaagcggcctcgcctctggc

SEQ ID NO: 536310 - DNA, 509 bp, Homo sapiens
taaattatcctttttttcctttgtaatatgcttttgggggattactgaatgttttattttaaatttgccagcttattgctaatgagtttttcttaattctatgggattttatcccctgtttatgtatttatttattttattgcttccaagattacaccacagtcatgttccttagtgtgagtcaaaggtcctttctattgttgctagaatggataaagattcagtctcctgacagayggtaaaaaaaaaaaaaaaaaaatactctaaatcagaattcttttcccaatctaatgttttgcatttgacttttatccatatgcaaccaaaaaggaaaaaagaaaagaaaactcttctttagattgcaaataaggttttgtctatttgagtgaatttaattgatctgctcttgtctcaagtaacactcattattctgatctccctagagatgatattcccagtgtctacctagattcggctactgcagtgagagcacacatttgatctgagat

SEQ ID NO: 536311 - DNA, 647 bp, Homo sapiens
attgtttaaagaggaagtaaagtgccaatgagggaaaatataagttggctaataaatatagacgttaaaatgagtactttgctctcagttatttatatatttattatttaattattaatgtagccattcattattattttttttttgtataggcaaattagagagtattctgayccaaggctagaaatcttttactgccctccatactgagatctcaaaagttaaaagtcacactgatctcccagacaattgaatcagaagaatcttctgcttcttccaaggaaaataaatgacagaatctctaattcaggtaacaaatttgaaaaatcaacaggatctctctctctttctctctctctctctgtctctctcgctctttctcttgcttgctcattctatctcatgattcttactatgtaagaaaaattttatccatatctcccttgctatccccaagcttggacttgttttgataatgaccttaattttttatccgacatctatacttgcatctacaacttatggaatgatcttcccaaacatttgcagaaaaatgaattgagcagctacaactctcagacacagggaaaacctatgaagtgtatgagacagagagacctggcttcacatttcaacatcactaattt

SEQ ID NO: 536312 - DNA, 657 bp, Homo sapiens
ctgaaatcattgtttaaagaggaagtaaagtgccaatgagggaaaatataagttggctaataaatatagacgttaaaatgagtactttgctctcagttatttatatatttattatttaattattaatgtagccattcattattattttttttttgtataggcaaattagagagtattctgacccaaggctagaaatcttttactgccctccatactgagatctcaaaagttaaaagtcacactgatctcccagacaattgaatcagaagaatcttctgcttcttccaaggaaaataaatgacagaatctctaattcaggtaacaaatttgaaaaatcaacaggatctctctctctttctctctytctctctgtctctctcgctctttctcttgcttgctcattctatctcatgattcttactatgtaagaaaaattttatccatatctcccttgctatccccaagcttggacttgttttgataatgaccttaattttttatccgacatctatacttgcatctacaacttatggaatgatcttcccaaacatttgcagaaaaatgaattgagcagctacaactctcagacacagggaaaacctatgaagtgtatgagacagagagacctggcttcacatttcaacatcactaatttaa

SEQ ID NO: 536313 - DNA, 572 bp, Homo sapiens
acatgcctatctgaatcacagtgcatttactgcacctcttttctttttttttttgagacggagtctcactctgtcrccaggctggagtgcagtggcatgatctgggctcactgcaacctctgcctcccgggttcaagcgattctcctgcctttgcctcccaagtagctgggactacaggcgcccaccaccacgcccagctaatttttgtattttttgtagagtcgaggtttcaccatgttggccaggatggtctctatctcttgaccttgtgatccacctgtctggaactccaaaagtgctgggattacaggcgtgagcccctgcgcccggcctattgcacctcttaatacaattggcattgtccaaggattcatctaaagagaatgtcacaattgtggatactgtgtgtattcttattctacacaactgaatacaaaggtcagcagcctttagttgagaaaactcccaaatcacttcacttgatcaatcacatactaagctgaattattaatgtattatcagatatttattgagtttataatatgtgaaaggcactgttttaggcagtggg

SEQ ID NO: 536314 - DNA, 484 bp, Homo sapiens
tgggtggagggggcgggacccgggttgtgttggcttgcaaaggtgagatcagtgctgtggcttgtcacaccctggctgactcaagctaagcccaggcccctcgggaactgttcacactgggctgtctagtaaaaatcagctagacaagtcgcctaactgccgttctcttgtgtttacaagttctgagttgtagggcttggaattctttgctcaagttgctgcaaagctgctaattaggaacctgcaatgatattgctcyagggccattccctttctggttatatggtatctgggtgataagagtcagggcagaatttaaatttcttctttgtacttttttgtttgttgggaatgtttagaatgcatccttttttcaaaaccttatcttgaagtgtagtggtggagctggatcgccacctcaaagctaaggctccaggcagcattgatcctgaccatgcccagcaccctaagaggatgaggctct

SEQ ID NO: 536315 - DNA, 632 bp, Homo sapiens
gtactggaaaaattggactgcaactcaaatctcttgatgaccagtattatgctgacttccatatttggttttggaggcactaagtttcmtaaagaataggattttttttaggtcactgctgaatcgtaaatgcctaatagtgggtgttcaataaacattagtttaatgcatgaataaattccttccttccaattctttgaatctgttttaattgctttagtcctaatttcttgtgttagttgattatcttattaatatttgtattttttcttgctcatataggcaattaagactgtgcatttccctctaaatactagtttagttgtatcccacaagttttgatatgtattttcattattattatttatcacttagtcctaaatattttcaaattctaaagaagtttaaatacatgttttttaaaaattatcttttaaaactggatatatattgtaatttaactgcattatgttcagagaacttggtctctgggaaactgattatttttaatatgttagaatataatttatgacctcatatatgcttgatttttataaaagtatacttttcacttgttactacgttttacatataatcagttggatcaaacttatggtgttgtttaaataatc

SEQ ID NO: 536316 - DNA, 522 bp, Homo sapiens
tcatgataatcttatgatgtacatgctgttaaaactcctcttttacagatgagggagttgaaacctgtagtgtatgagttgccacttctctagtttgggtctccattgygtactgcctgggctaatgaaattaccctcccacgtcttctctgaacctttctctgcacacttttaaaaagttaaaatttttcaaattactttacactcagacttctgaataaccttccccaaagcatggtttttgtccttcatttattctttaacacatatttattaaaaactacattccaagcaatgtttttctaatccatcattcacaggtaaatctggtatgtccctagcctacaacaagctcttactctttgggagacactggcacataaacatcatttctacacattgtaaaatgtgtcctgtagaggtacacagaaaaaggcctctaaggtggcatgtaggggcgggtgggaagaatgggtcaaagaaggctaagcacaagctgagaggcttatacagtcagcgagg

SEQ ID NO: 536317 - DNA, 577 bp, Homo sapiens
ctgttacctccatgtctgctgctgatacttgctcaaacacaatcctattgtataagtttgagtcatgtgtgttcaactgccttttagacaactccagctatatgtcccagaaaaacctcaracctgacaacattgagacaatgcacaatgttttactccaagtctgttttattatttttattccccaacccagtcaatggcaccatagcttactaatattttccagattttccagaaatctatctaatgagtgaccagccatatctatccccatctactgaatatttagtaagtccgtgggacctctccaactccacgggaactgtactgtttacccacattatctcatccaggatcactgcaatagcctctaatcttgactgctcccccacccatttcaattcaacttccaaggggctgtttctgtaacctcaagctgaaccacccctccacaatactcatgttacttaaatggcatccccattgctccagataaatgcatatcccactgcatggcatacaatgtccattacaactctgttcattaattgaacaatcctggctccctcgcttgcct

SEQ ID NO: 536318 - DNA, 577 bp, Homo sapiens
ctgttacctccatgtctgctgctgatacttgctcaaacacaatcctattgtataagtttgagtcatgtgtgttcaactgccttttagacaactccagctatatgtcccagaaaaacctcaaacctgacaacattgagacaatgcacaatgttttactccaagtctgttttattatttttattccccaacccagtcartggcaccatagcttactaatattttccagattttccagaaatctatctaatgagtgaccagccatatctatccccatctactgaatatttagtaagtccgtgggacctctccaactccacgggaactgtactgtttacccacattatctcatccaggatcactgcaatagcctctaatcttgactgctcccccacccatttcaattcaacttccaaggggctgtttctgtaacctcaagctgaaccacccctccacaatactcatgttacttaaatggcatccccattgctccagataaatgcatatcccactgcatggcatacaatgtccattacaactctgttcattaattgaacaatcctggctccctcgcttgcct

SEQ ID NO: 536319 - DNA, 577 bp, Homo sapiens
ctgttacctccatgtctgctgctgatacttgctcaaacacaatcctattgtataagtttgagtcatgtgtgttcaactgccttttagacaactccagctatatgtcccagaaaaacctcaaacctgacaacattgagacaatgcacaatgttttactccaagtctgttttattatttttattccccaacccagtcaatggcaccatagcttactaatattttccagattttccagaaatctatctaatgagtgaccagccatatctatccccatctactgaatatttagtaagtccgtgggacctctccaactccacgggaactgtactgtttacccacatyatctcatccaggatcactgcaatagcctctaatcttgactgctcccccacccatttcaattcaacttccaaggggctgtttctgtaacctcaagctgaaccacccctccacaatactcatgttacttaaatggcatccccattgctccagataaatgcatatcccactgcatggcatacaatgtccattacaactctgttcattaattgaacaatcctggctccctcgcttgcct

SEQ ID NO: 536320 - DNA, 582 bp, Homo sapiens
gttttcaggatatttaagaattttttattttaattaattttttttccagaaatcctatggcgtagatattattcttaactcactataaacacatgaagaaaactgaggcataaaaaagttaggtgacttgcctaaaataacaaatttgggaaggagtcaacctggaaattaaactctaattttccctctttctgtgactttaaacaggataatccaaaatgtcctgagagtgaacactgcaaacagtggagtggttttctccttttwtttttttttttttttgagttatgtagattctcttttctctagggatcttgtaaataaaaaatcaagctagattcagttgtgtctgatgtgactcagatatgatcctgtctgacagcagcatgaataataacattttcatttattctcagtgtgaatgaggctgagaggggttatttttattatattaggttttctgcatttgtgtattggtaactttcactgtaatgtattgcattttccccctccctgggtagaagctgtagtgaaaagactagtgtgatggccatagattacactctactccacaagatagta

SEQ ID NO: 536321 - DNA, 582 bp, Homo sapiens
gttttcaggatatttaagaattttttattttaattaattttttttccagaaatcctatggcgtagatattattcttaactcactataaacacatgaagaaaactgaggcataaaaaagttaggtgacttgcctaaaataacaaatttgggaaggagtcaacctggaaattaaactctaattttccctctttctgtgactttaaacaggataatccaaaatgtcctgagagtgaacactgcaaacagtggagtggttttctccttttttttttttttttttttgagttmtgtagattctcttttctctagggatcttgtaaataaaaaatcaagctagattcagttgtgtctgatgtgactcagatatgatcctgtctgacagcagcatgaataataacattttcatttattctcagtgtgaatgaggctgagaggggttatttttattatattaggttttctgcatttgtgtattggtaactttcactgtaatgtattgcattttccccctccctgggtagaagctgtagtgaaaagactagtgtgatggccatagattacactctactccacaagatagta

SEQ ID NO: 536322 - DNA, 582 bp, Homo sapiens
gttttcaggatatttaagaattttttattttaattaattttttttccagaaatcctatggcgtagatattattcttaactcactataaacacatgaagaaaactgaggcataaaaaagttaggtgacttgcctaaaataacaaatttgggaaggagtcaacctggaaattaaactctaattttccctctttctgtgactttaaacaggataatccaaaatgtcctgagagtgaacactgcaaacagtggagtggttttctccttttttttttttttttttttgagttatgtagattctcttttctctagggatcttgtaaataaaaaatcaagctagattcagttgtgtctgatgtgactcagatatgatcctgtctgacagcagcatgaataataacattttcatttattctcagtgtgaatgaggctgagaggggttatttttattatattaggttttctgcatttgtgtattggtaactttcactgtaatgtattkcattttccccctccctgggtagaagctgtagtgaaaagactagtgtgatggccatagattacactctactccacaagatagta

SEQ ID NO: 536323 - DNA, 621 bp, Homo sapiens
  misc_feature (1)...(621): n = A,T,C or G
taattttaaccattcctataatgggaaagtgcttactagaggaaatgtttacaaagattctttgtgcagtaaggatggcccaggtgtccataaaaacatctgctcagcaaaagcacaaccaacattgctgaaatctctaggctgtctccattcaaaatgtttctaggctacatgctagagaagagaatcccttagtgagcccccaaccaaaggnggaaaagagttatttgcataatccttggytattcacagatattggtgactaatctgcattcctgtcaaattgaagggggtctacatacccgtggatttgtggcatcccaggagaagtctgggtccataaaccagtgaatgaatcccattaacacatatatgtagcttcttcatctgtgacatcaatgacattttttacttgcctatttctgaatattctttattaaataataaactcaagaataatttcatacaaatcaccagtgtatgtaagtattatttcctgttatttcaatggtttcctcacaggctaaagtatggctccagtttcagaatcacggctgggtttgccagtatggaacccctttatggcaggtgcagcttccaaggctacttttacaaaaccta

SEQ ID NO: 536324 - DNA, 596 bp, Homo sapiens
ctggagagaatctgtgaataactatgaacttcaaaacatatttctaagtatcagaggcaggtgtgatagggcaggagattcttttgaacagcctaataaatcacctttcagtttttcccaacaccacaggaaagaacctctggtaaaggaattctttagccagaagatgtgcctttcccaacccacctccacgcactggaagaggtgagccattacaactcggagtagcatgctggaagctttaccctccaatccaggctggagaaggaagaggtagtacaaggtttctccaaatatttcaaaggcaaagttgcttccttcataactaaattccagtaaatggctttatatctccctgtgctggactaatcttccccatctctatatctttgatgttaatggtatgatttttattttcagttaggaagttgctttcccattgggttaaatggaataaaactcacctcttctatattgtgtaagacaatgttggtcaagtcttgcttgaaggccatttgtctgacaccattcatcaactaccataatcttatcatttatggtgggggrcagtcaggactgttggtagcaaaactctt

SEQ ID NO: 536325 - DNA, 481 bp, Homo sapiens
cccagccccaattacctgaatctgtatgcccagttcttgtgttaaaggaggactaggggaagacaagagctgaaactgggttcacatcttatcattatttttacaaagccaactcacatgyacctgccacagtggcagcacagtctaggtgtatgtaaagatattgttgttatgggtactatccataaggatacttaaatcaaaagagccactctttatcaagcacatacatgctaggaactgtgctcaatacattacatacattatctcatatttacaaaatattttcaaggtattttttctctgttatggagaggatgtgattgagacttggaggagttaatcagaccaactttacacagctgctatggatacactgggattcaagcccatcccaggtctatcggactccaaatttctcatttttcttcctagttcaagaggtatgtgacatggatttaaaaaactaaaaaagatccag

SEQ ID NO: 536326 - DNA, 631 bp, Homo sapiens
tggcagaagtgatggtgtgtgactttcaaggctaggtcataaaaggcattatagcttttaccttgttctcttgaatcacttgctctaggagaaacagccattgtgccataaggagagggacacatggagaggaaccaatttgccagccatatgagcaagtcaccttggaagtggaacctccagccccaygcaggctttcatttgactgcagctccagccaacaactggtgactgcaaccccctggtgacatgcagccccatgagtgaccatgagccagaattgcccaaccaagctgcttctaaatttccaatcaacagaaatcatgataaataaagtcctcagtattattttaagccatgaaagcttttgttactcaagcgcagataactgttatattccaaataatctgtacagtgatcatcagttagctactgttcaaaacatttacttttgtgagatatgcttttgaatttctgaactcaactaaacatttagtaataagatcacagccagataaaactacatcaggaagttgcaaaaaaaaatctttcatttgactgatattacattgaaaaagtactggtttgaagtgatataatgttggagaaagcatggactttgaagtcagaa

SEQ ID NO: 536327 - DNA, 168 bp, Homo sapiens
tgtgaactaaattttaaaagtagacttttatctacacatatcatctttattttacttaatatttgtagwggactttctcaaacccttctacatagaatgtgaggactgggaagctgtaacccttactgaatagaagaaatagaagcacagacaataagtacagggcca

SEQ ID NO: 536328 - DNA, 638 bp, Homo sapiens
ctttcacttcactttctgccccattctggatcactttcttttcttgtggcctctttcttctggctgccagaaaagctgctgttgacttctcacgaatgacactggctgatctccctggattggaaccaattctaatgcagcctgtggtgcttggagctcaggccgcaaccatgggccaaggaattgggtggaggaccttgcccagtggagagatcatgagtgccctacacagggcaagttcctacactcacctctagatcttcttgrcagtaccaatggacacacaagttattcttttttcttctcttctctgctatatgactgccttagcaccttctcaaaacaaattcaacagtttctccccttgataggcatagtatatcttctcttttccaagaagctttactacttttagttatgctttggtcttcaaagagacatgattcttggtcctgtgaatctcataagtcagcaattaccaaatgatttcttgcagatagcaattcagtgagatggagaaaattgtaccccaggcaaataggtttaggagactgtgccggcttcattctccttcttggagattcacagtagcatagtaaaggctctgagaattcctacactcagaaaattagtttgca

SEQ ID NO: 536329 - DNA, 656 bp, Homo sapiens
ttctcctccctctcttcctttctttcttcctaactgcttaccttcccataagaaaagaatcaagttcatcgatttgcaaccatgatcaatttgtaagtatttcttttggccaggctgcttaaaaaaaaaaaaaaaaagatgatctcagggattagtttatgaccatggttcctaaactttgccacacattggaatcacttggaaagctttttaaaatcctaatgccccagtcacaccccatagcaattagtcaaacatctgagggtgggaaccaggcaatagtattgctttacaatccccaagtgattctagtgtgcttcaaagtttgagagtcactggcaaatgtagggaaatgggcctgtggccagttaatttcatggactggagcctgatgcaaataaggctgaagtgttggattcttgtccagaacatgamagttctttacactttcacagacccataaagcttatcccttctccttcaaccctccatcagcaagctctttataaatgaaccctagacagagtcatcacagtgaattgactctctgagtaccaaaaagcaagtgaaaaagtacatcataaaacactcatatttatggtattttaccatttagaaagtgctttaacacctgattttatttactctttacaaca

SEQ ID NO: 536330 - DNA, 628 bp, Homo sapiens
acttgagtgtcaagtcaccaaattcttaaaacctcatctgtagtttgaacacagataattgctataaagatgaaagaagataaagtacataacaattggttgctgttatgatcatgctactgttgatggcagcacctatataggggcaaagccttcttataatttagggaagaaaattttagtttttttaaaaaaggagattgattatcataaaataaggagaggatgattttcttcattgtctggagagayagattggcaaagttgaaagggcaattgatcatttgtaaggttagctggatgacctgaattattttttacatttgaggtcgtgggctggaactgggaaatggagcctggggagggggtgcacaaggaggaaacagcatgcaacgtccttttggcacactggccaaacgtttttggtatcctatgaatcatcctttttactccacacatttataccactattccaactctgctagaaccatggtccccatctactatgatacagtcttgacataagatcatttctcagttagaaatgttaagagtgccagacataatgccaagggaacatcagaaaatagtggaggttgggagaagaaggctgtgatctacaagatat

SEQ ID NO: 536331 - DNA, 520 bp, Homo sapiens
tatgacttgagtgtcaagtcaccaaattcttaaaacctcatctgtagtttgaacacagataattgctataaagatgaaagaagataaagtacataacaattggttgctgttatgatcatgctactgttgatggcagcacctatataggggcaaagccttcttataatttagggaagaaaattttagtttttttaaaaaaggagattgattatcataaaataaggagaggatgattttcttcattgtctggagagacagaytggcaaagttgaaagggcaattgatcatttgtaaggttagctggatgacctgaattattttttacatttgaggtcgtgggctggaactgggaaatggagcctggggagggggtgcacaaggaggaaacagcatgcaacgtccttttggcacactggccaaacgtttttggtatcctatgaatcatcctttttactccacacatttataccactattccaactctgctagaaccatggtccccatctactatgatacagtc

SEQ ID NO: 536332 - DNA, 530 bp, Homo sapiens
tttgataaaagaacttgaatcaacatgttcaggaagacaaccacagattaagataggtcaagggtcaatcctatctgctctccaaaagagaatgagttamtaattaaagaaaaatcttagctaagatcttgataaaaaaaaaaaaaaaaaactttgttaacagaaccaccatcatggcagagaggggcccagagggcaagactactcacacattttttactctttgaaagcaaagctaagaagataaattacctgtatgaaataagttgtatcttgtgcaagcaaattcttaaaaggttgtaataatttgcactggcagaaatagatgttatcaaaatgatttttctaagtggatcattaattattagcctcttctggaagcactttgactagttacttacaggttaatttgacattcttaatatagccacttccatcacaaccatcatgtgggacaatgaaatcgcagttatcataattatcataacttaattagcaagtaccaattacagttctgccatgtcctggta

SEQ ID NO: 536333 - DNA, 614 bp, Homo sapiens
gcaagtactaactgtgtacttctttctatagaactgatcttcccatgagtggtgtagacactaattactgagggatgttaatggatgctaccataaataaaagggtttcaagatcacatatgtttgggaatccccgaattaaacaaaattaagtgagcctcttcattgcaaaacttctaagaacctttaataaatgaatgcttattgtaaaattctaagaacaggatacagtctaatataatttttccaaacatatttgaccatagatccattaacattatcttagaatgctacaagacagtgtcacattcttcatgccaaagcttggtagctaaaaataactaaaagaatttcttggttaggcatagtggctcatgcttgtaatcctagcattttgggaggctgaggtgagcagatcacctgaggtcaggagttcaagaccagcctgtccaacatggggaaactctatytctactgaaaatacaaaaattagcgaggcgtggtggtgcacacctgtaatcccagctactcgggaggctgaggcacgagaatcgcttgaacctgagaggtggaggttgcagtttgcaatgagccgaggtcatgccactgcactc

SEQ ID NO: 536334 - DNA, 602 bp, Homo sapiens
gctgggagcatcgacaagctactgccttaaaatccgagctccccgaatgcacaatttctgtcccttttaagggctcacaacactaaagatttcacatgaaagggtcgtgattgatttgagcaagcagggggtacgtgrcaggggctgcatgcaccggtggtcagagtgaaacagaacagggcagagagtttcacaatagtcttctatacaatgtctggaatctatgaataacatcggtttctaagttatgagttgatttttaactactgggtttaggccaggcaggcccaggcctggtttcgggcctggtgcagggctgcctgtctttgattttacttccttgtttttttcttaaaacaggtactgagtataaaacaatataaagcgatatgggagggtctctctcttccctcatttcccccttttgagactctcactttttcttagtgggagttctcactcttatttttgctacttattttttttgttcaatagattgatagtgattcatatagtacacttgtgctgaagcattttggtgaactaaggtagcgatgaagattttttatcatttaaagaagcacaggtagcaaacaagggag

SEQ ID NO: 536335 - DNA, 642 bp, Homo sapiens
ggcaagctactgccttaaaatccgagctccccaaatgcacaatttctgtcccttttaagggctcacagcactaaagatttcacatgaaagggtcgtgattgatttgagcaagcagggggtacgtgacaggggctgcatgcgccggtggtcagagtgaaacagaacagggcagagagtttcacaatagtcttctatacaatgtctggaatctatgaataacatcggtttctaagttatgagttgatttttaactactgggtttaggccaggcaggcccaggcctggtttcggggctggtgccgggctgcctgtctttggttttacttccttgtttttctctyaaaacaggtaccgagtataaaacaatataaagcgatacgggagggtctctctcttccctcagagctgttatccccccagttcccttgtgcccacattactcaagttttttatgctctgttgatggaaaaatgaaagtgcaagtagtgttttcattttctaggaatcctcactatgggaaatatttgtatcttaaaaggaaattaaatgtagttaacccatacagcccagaaattattgtaaaatttgaaaatttccaggttgtgtcctctatccatatcctgtgcattcataagctaagta

SEQ ID NO: 536336 - DNA, 642 bp, Homo sapiens
ggcaagctactgccttaaaatccgagctccccaaatgcacaatttctgtcccttttaagggctcacagcactaaagatttcacatgaaagggtcgtgattgatttgagcaagcagggggtacgtgacaggggctgcatgcgccggtggtcagagtgaaacagaacagggcagagagtttcacaatagtcttctatacaatgtctggaatctatgaataacatcggtttctaagttatgagttgatttttaactactgggtttaggccaggcaggcccaggcctggtttcggggctggtgccgggctgcctgtctttggttttacttccttgtttttctctcaaaacaggtaccgagtataaaacaatataaagcgatacgrgagggtctctctcttccctcagagctgttatccccccagttcccttgtgcccacattactcaagttttttatgctctgttgatggaaaaatgaaagtgcaagtagtgttttcattttctaggaatcctcactatgggaaatatttgtatcttaaaaggaaattaaatgtagttaacccatacagcccagaaattattgtaaaatttgaaaatttccaggttgtgtcctctatccatatcctgtgcattcataagctaagta

SEQ ID NO: 536337 - DNA, 642 bp, Homo sapiens
ggcaagctactgccttaaaatccgagctccccaaatgcacaatttctgtcccttttaagggctcacagcactaaagatttcacatgaaagggtcgtgattgatttgagcaagcagggggtacgtgacaggggctgcatgcgccggtggtcagagtgaaacagaacagggcagagagtttcacaatagtcttctatacaatgtctggaatctatgaataacatcggtttctaagttatgagttgatttttaactactgggtttaggccaggcaggcccaggcctggtttcggggctggtgccgggctgcctgtctttggttttacttccttgtttttctctcaaaacaggtaccgagtataaaacaatataaagcgatacgggagggtctctctcttccctcagagctgttatcccyccagttcccttgtgcccacattactcaagttttttatgctctgttgatggaaaaatgaaagtgcaagtagtgttttcattttctaggaatcctcactatgggaaatatttgtatcttaaaaggaaattaaatgtagttaacccatacagcccagaaattattgtaaaatttgaaaatttccaggttgtgtcctctatccatatcctgtgcattcataagctaagta

SEQ ID NO: 536338 - DNA, 601 bp, Homo sapiens
ttaaacaaaaatttaaattaaaacacttaaaacatttttaaacttaaaatatatcaatggacattgctttgctaatcttttgatgaaggttcaaggctttttcttagagtctggattctctgattggcgttctgcttcatttagcttgaaaaatgggaagatgcatcacgtacatttctcaatgtatttatgattgagaaattgactaagaacttagacatttggaaaacaatctgaatgcagaatctgtctagrtttttacatttttgaaaaccaatattttggccgggcatggtggctcacacctataatcccagccctttggggggccgacgcgggtggatcacgaggtcaggagatcgagaccagcctggccaacatggtgaaaccctgtctctactaaaaatacaaaaaattagccgggcgtggtggcatgcgcctgtaatcccagttactcagggagttgaggcaggagaatcatttgaacctggtgggaggcggaggttgcagtgagctgagatggtgccattgcactcctgtctgggcaacagagtgagactccatctcaaaaacaaaaacaaacaaacaacaatatttaaca

SEQ ID NO: 536339 - DNA, 474 bp, Homo sapiens
tgatgtcttatggatcttaaagtgaaaagtcttattgtacttagtgcctttcatttgttaccacaagagaaattgcctgagggtgtctcccccaaagtatcttaagctcccttccatccgagacatggtctctttccttccttcctttctctctgtctctctctctctctttttttttctttcgacagaatcttgctctgacactcaggctggagtgcagtggcacaatctcactgcaacctctacctcccaggcctaatctrtccttccacctaagcctcctaagtagctgggattacaggcacatgctgtcatgcctggctaattttttgtatttcttttgtagagatggggttacaccacattggccaggctggtctcaaagcaatctacctacttcagcctcccagagtgctgaggttataggtatgagccactgtgtctggcccagacacaattttcaaatgaagatat

SEQ ID NO: 536340 - DNA, 569 bp, Homo sapiens
tctttcctgccagtcaacctccacaggtaagccaatccctcaggcctgacgggtcctgaggctccgctgaacaccttccacgagtcttcctatgcctgcagcaaagggctccccggggacttctgacaaaggatggccagaggcacatgctgtctggcagawgaggctgtctgggttcctctaggataaatagaaatcttgagtgcgtctatgcactgagccaggcactggctaagacttctcatacactatcacgtttaatcctctcagcaaactgcaggctgctaattcttgctccagtttcgcaatccaggaacctggcctcagagttacagagttgggttactttcccgggctaccacagccaggcaggggtggagccaggattcagaccttagtctgccagaaacagcccaggatcctcactgggagagcaggaatgcgccatgttcccctgctgtccccatgcctggcacaggctctgcacagagaaggagcttagaaatgcatgttgggctgaactgaaccaaatcaaaagactctagatgagaagaaagagcccgcttcct

SEQ ID NO: 536341 - DNA, 557 bp, Homo sapiens
ctgcgccaagagcaagcttgtgccacctctgcttatccagggactggtctccagagtcccccasgggcgcttctgagggaggcgcagaggaggcacacctgccagccttgctgtctggatctcagcagaccccggttggagcactggtcctttgtaaaggctgccgtagattgaggccccaccgtgtgcggccacacgcccttgggtgcttaacttctgagttctctaatctgtcagtgagccagccgcctgccctccctgaccactgggcacacaggtgtgaggggcttgcccagagccccactgctcgccctgaggaagcactcagttaccaggaagggaaggacgcgagggaggaggcactcccttcttgccaagagccgaggaaccaacagaaggccttttgccccctcttggcaactggaccttacccttgaaccttcctcctctgttcttttcatatttctttttttgggggttggcttcaaattatcttgttttgtttacattacacccaagttacgtggtacaaaagacttgcaggtgcaaatatgtcc

SEQ ID NO: 536342 - DNA, 549 bp, Homo sapiens
gcaaatgtgagttggttatgacgtgttttctcatgacctccctgacatgctctactgtaatggttgaggtttgagctgtatgggccaacatactgcctgggtttctgggtttctatcttgcttctatcaattctttttttctttttcttttcttttttttttttttttttttttgaaacagagtctcgttttttgcttaagctggagtgcaacggcacagtctcagctcactgcaacctccacctcccaggttcaagcaattatcctgcctcagcttcccaagtagctgggactacagttgtacrccaccacacccagctaatttttgtatttttagtagagatggggtttcaccacattgaccaggctggttatgaaactaccatttcttagaaggaataataatagttactgtttagagaattaaatgagcaaataaatgcaaacaaatctagaaaaatgcctggcattgagtaaatctcaataaatgttcctactattagtcttaatttacagatgaggaaactgaggcttagagaggttttggaa

SEQ ID NO: 536343 - DNA, 497 bp, Homo sapiens
ttcatgcatgtctcttcccattagacagtgagctcctgggggcaggccatgcctgagccagtctgcatcyctgtgcaggaggacacggagaaggcacctgagaaatgcccttgacttagattgcaccacaatacaggcatcccacacacaggactgaatgacttgaatgaagtcgaatccatccattcattcactcattcaaccacagatactcattgggtggcaggggtgaacaagatgaagatagcctcacgaagctggctttgcagtgaggggaatcaagcatagacaagcagaagcagacagctaatggcatttcagatagtgatgcctgctaggaaggaaatgaagaaaagcaaaggggtaccagggacaggctggggatgctattttaggtaagtggtcggggggtcacgtgagtagaaagggacatgaaggggccgagtcaggagacgctgtggtggaaggacattccatgtggaggactgtgggtggaa

SEQ ID NO: 536344 - DNA, 567 bp, Homo sapiens
tttggcacagaaaatttgcactctgccagagtataatttatccctgcgtgtacatacataagagtatagagtgaaaaaaaagggggcatattttcctgtcagaccacatcgttcactgcattcccagcaaaatgaagggaagatgggttaaataacacgtaaagcctaggatttccacattcagcagcaaaaataagataagcattaattaattaatccaactaaactttgagtacctcttcaatgccataatctggggttggatttccgaggaagccagttctgagatgggcttcattatgcaggayatttactaagaagtgaccttgagataacatctgcagaaaagagagggaaggaaacaggagtaggcagcaggagaaggtgatgtttgatgcagcccagtgacagccttgtacaaccccacaggatctctgaagctatagctgcccttcagaagtcccacacccctccatgggtgggtaggatcaggcatatgtaatcctaaatcatttactcgttgtgtcttggccaccttgggaagggatgtgactttgagcaaggcaa

SEQ ID NO: 536345 - DNA, 481 bp, Homo sapiens
tgtcaaatcacatcagctcctaggtgggtctgttacctgttgaattcacatgagaacgtcgttgctcaaccctgtacscttgcgtattccttaaaccagtttggctttaattggattgtatctaagcgaaaggtgtatctactcaacatttacgtggagtgctctaaaagaaggcttttcatttcagtcgtattctggtttaattctatctctcaggaaataaggagtcttcttcaagataaccaatactgtttgcatcttaaatctcctgccctctgtgacaagccctactcggtcagctagaattagggagaactactaggaatgcgctctgccctaaaggcagttttaaatgtaggtgggcttatcccctgaattcaaggcgtgatgtagggggactaatcccctgaattcaaggtgtgtcgtgattcttatgctgtttgtccatgaatatgggtgctaagggctaaagactaaacag

SEQ ID NO: 536346 - DNA, 609 bp, Homo sapiens
ccgtacattgaaggatgcgcacagcgtccgcggcaccaaccctcaatatctggtggggaagatcattcgaatgcgaatmtgtgagtccaagcactggaaagaggagtgctttggacttatggctgaacttgtagtcgataacgccatggagttaatgtttgtgggtggcgaatatggtggcaacataaaaccaacaccctttctgtgtttaatcttgaagatgcttcagattcaatccgagaaaggtatcactgcagagtttatagaaaatgaagatttcaagtatgtccacatgttgggggcactttacatgaggctgatgggcactgcaattgattgctacaagtacttggagcctttgtacaatgactatcgaaaaatcaagagccagaacagaaatgggggtttgaactgatgcatgtagatgagtttattgatgaactggtgcacagtgtgagagtctgtgatatcactctgccccggctacagaaacgctaggtattagaggaaactgagcaactggagccttgagttagtgctctggaagaggacatagatgatgtggagtccagtgaagaggaagaagaggaggatgagaagttggaaaga

SEQ ID NO: 536347 - DNA, 609 bp, Homo sapiens
ccgtacattgaaggatgcgcacagcgtccgcggcaccaaccctcaatatctggtggggaagatcattcgaatgcgaatctgtgagtccaagcactggaaagaggagtgctttggacttatggctgaacttgtagtcgataacgccatggagttaatgtttgtgggtggcgaatatggtggcaacataaaaccaacaccctttctgtgtttaatcttgaagatgcttcagattcaatccgagaaakgtatcactgcagagtttatagaaaatgaagatttcaagtatgtccacatgttgggggcactttacatgaggctgatgggcactgcaattgattgctacaagtacttggagcctttgtacaatgactatcgaaaaatcaagagccagaacagaaatgggggtttgaactgatgcatgtagatgagtttattgatgaactggtgcacagtgtgagagtctgtgatatcactctgccccggctacagaaacgctaggtattagaggaaactgagcaactggagccttgagttagtgctctggaagaggacatagatgatgtggagtccagtgaagaggaagaagaggaggatgagaagttggaaaga

SEQ ID NO: 536348 - DNA, 609 bp, Homo sapiens
ccgtacattgaaggatgcgcacagcgtccgcggcaccaaccctcaatatctggtggggaagatcattcgaatgcgaatctgtgagtccaagcactggaaagaggagtgctttggacttatggctgaacttgtagtcgataacgccatggagttaatgtttgtgggtggcgaatatggtggcaacataaaaccaacaccctttctgtgtttaatcttgaagatgcttcagattcaatccgagaaaggtatcactgcagagtttatagaaaatgaagatttcaagtatgtccacatgttgggggcactttacatgaggctgatgggcactgcaattgattgctacaagtacttggagcctttgtacaatgactatmgaaaaatcaagagccagaacagaaatgggggtttgaactgatgcatgtagatgagtttattgatgaactggtgcacagtgtgagagtctgtgatatcactctgccccggctacagaaacgctaggtattagaggaaactgagcaactggagccttgagttagtgctctggaagaggacatagatgatgtggagtccagtgaagaggaagaagaggaggatgagaagttggaaaga

SEQ ID NO: 536349 - DNA, 609 bp, Homo sapiens
ccgtacattgaaggatgcgcacagcgtccgcggcaccaaccctcaatatctggtggggaagatcattcgaatgcgaatctgtgagtccaagcactggaaagaggagtgctttggacttatggctgaacttgtagtcgataacgccatggagttaatgtttgtgggtggcgaatatggtggcaacataaaaccaacaccctttctgtgtttaatcttgaagatgcttcagattcaatccgagaaaggtatcactgcagagtttatagaaaatgaagatttcaagtatgtccacatgttgggggcactttacatgaggctgatgggcactgcaattgattgctacaagtacttggagcctttgtacaatgactatcgaaaaatcaagagccagaacagaaatgggggtttgaactgatgcatgtagatgagtttattgatgaactggtgcacagtgwgagagtctgtgatatcactctgccccggctacagaaacgctaggtattagaggaaactgagcaactggagccttgagttagtgctctggaagaggacatagatgatgtggagtccagtgaagaggaagaagaggaggatgagaagttggaaaga

SEQ ID NO: 536350 - DNA, 556 bp, Homo sapiens
ttctacctttgcataggtcaaaaatcatggagttatccttgacttttttctttctcccgcatccacatttaaactgtcagcagatcctgttggcttagccttcagagcttatctataactttattgcttctcactcctcctccctgtttctaaccacatcacctttctcatgatagtgcatatcacgttttttttttttgagagagaatatttcaggacacatggaaattatgtaaaatttatttatttagtttatttatggagatagggtctcrctctgttgcccaggctggagtgcagtggcatgatcttggctcgctgcaacctctgcctcccaggcacaaattattctcctgagtagctgggactacaggtgtgtgccaccacgcctgggtgatttttgtatttttttgtagagatggggtttcatcatgtcgcccaggctggtctcaaacacctgggctcaagtgatctgccagcctcagactcccaaagcgttgggattacaggcatgagccactgagcccagctgatatttcaaagatctttattctta

SEQ ID NO: 536351 - DNA, 517 bp, Homo sapiens
ctgctgatcttatttcatcacactttatccayaaccaccatagagtaaagttagcattttgaatattttttgagttctgtttattcccgggtaagaatttttggctggcattgtggtataatagactgaagttagaggacttgtgtttgagtcctggctctgctgtagccttgtggccagtgtcacgttttttaacgtttgagctaacctttgacaaacttgttcaaggtcacatgactaatgacagaatcctgaaccaaacacacacatctggttccacatccagtatggtaaggagtgtgaaagtccctcaaagagcatctcaggccctagtaacatgtgtagtacactccatagctcattgaatttctgctgagttcttaaaagtataagtggaagaaaagaaaaagtgaaattaagtgtaattttgtactgagttaatgatggtgtaatcactcagcatacacttattttactatttctctgtggcctgttggcggaggagggattagatatt

SEQ ID NO: 536352 - DNA, 454 bp, Homo sapiens
agctgctctaggccaatataacacttaatgagagtgttgctttagcatgctccttttgtaatctgtaccttggaaaaattacgttttgaacatctgcgaagacaaaatgtatgagaactttgggaggaaaaattaagacttccccattctaaacaaagtatatgaaagaccctttgtcttataggcaagtcttgtcaaggttacattaaaaataaagaatatgaaggattctataaggaaaagaatcataatctcataaaaacattcacacacaaactgactgggcaccactaatgtgccacgtaagtgctggagatgctaaggcgaaaaaaacactgtccttcccttgacaagttcacaatctaatataagaggtagacatggaaacaactgtatgtcttcaattattattttatyttatcttatcttatcttatcttatcttatcttatttt

SEQ ID NO: 536353 - DNA, 497 bp, Homo sapiens
gttcgagtttcctgttctggttgtaaaaaaatcctccagaaggggcaaactgcttatcagaggaaagggtctactcagctattctgctccacactgtgcctcactggatatacagttccacctgcccgcccaccgcctcctctcaccaagaaaacttgttcaagttgctcaaagtatagcagaattctaaattatcttttttgtttctttcctttctcttaacatactttgttcttaggtcatgtattacatttgatattctacatttattccttttttttttttttttttttttgagaaataccacattattttctgtctgctttcagttgttgcttttcagtcttccaggtgctaggtgctcagcttgttttttagctttcaataatgttacttttatgtattgkttttgaaaccagctctcccatccttgttagttgaagtgcctgatataacaaaaagtgcacatttagggatattgtattacagcagtattt

SEQ ID NO: 536354 - DNA, 343 bp, Homo sapiens
agcacttaggttagaagaagctcattagctattcagaataaatttyatttttcttaatttttggtaatcatatctcagcctgttgaatttaacttaaactctgaaagaattttggttgccatttaatttttaggtttccttaatgatagggacctaataatttgttttaaaaaatttgtcttggctgggagcagtggctcatgcctgtaatcccagcactttaggaagccaacattggaggattgcatgagcccaggatttcgagaccagcctgggcaacacagtgaaacctcatctctacaaaaagttaaaaaattaaccaactgtggtgccacatgcctgt

SEQ ID NO: 536355 - DNA, 494 bp, Homo sapiens
gacagtgttggtggatcgagctgcttggtgcaragtccagactgctgtgagcctgttctcttctgctactgtgtgtcttttctccctcactagactgagagcacagcctgtgtctgatgactccctatacccccatagcctctccctaacacaaagctttaagcatgaaaagtgtttaataaatgctttatataaaaatagttctacttgcagagtgtttaggaatcgctttatagagtctagctctcataaaccaatgatacctgtcccatggcatccatgatgagtgaaaccctcgccaggtgacccagcccagcggaggaaggaaggcctactacctgccctgatctcccagtgccatcactcaaagtcatcttactgtttgtgcaaggaaatgccctcctatctgccctaagacactgacagaagctgaggacttgccaaatgataaagataggaagacaggagaacaaggctggctgaaaggtggtcag

SEQ ID NO: 536356 - DNA, 561 bp, Homo sapiens
tccttcagggcctcgaagctatattatttatcacctgaatccctcaacaagctttgcagtgcctgrgcctcaagtaggttggcacacttatcaccatcagcaaccaccacagagtttataatctaatgaagttccaggataaacaaacatatacaagtcaaagatgaacagaaccacataaagcaaatacagaataaaactagcttcaagggtacagagacgttgacaaatgttattaggctaagggcttcttgaaggcaggaatcatgattcatcgattcctgtatttgcagtgcccaagcacagtgcttggcacatagtatatgctcaaggaatatatatgttacgttcgaggaatcaaatcgccttacctttaaatacaccttttatgagtggcgctactgctgtattgaagacttcttcctgttcagtagagggatcaaatacaaaatcgtaggtgaaggatttatctgtaccaaccaccacctagagaaggcacgggacaaggcgtaaggttaaaaatgaaaggcaagaccacacccctcgttaccatttggcccc

SEQ ID NO: 536357 - DNA, 558 bp, Homo sapiens
ctgttcagacacaggctctggactctgctacgcacctgaggctctccgggcacgaaggaaaggcacatctggcagccctcgctaatctctttggggaccagagggcgacaacgcagcgccactcttacrggaattcccttcacctcttccttcatgatcctatctcagcaccgtctctgcgagggggaaaaagaaggctcgctgatgaatgttagtaggtcagcaggggtgggagggcgtcctccccggttccgaccctcctcagcgggaacactgacttgggagattcacgctccatgacttggccagggctggaccgcccgtcagccctgcactctaaagagagtgcacgggcttctgaaaggcaaagaaaaaactccaacggggacggcgacaaagaaccaaagccctagggtactgggtaaaaacaggttctgagctaaggtgtgcccccgtaactcaccaaactaaatgtcccttccccgttctccctgggcctcccgccgccctgtcccagccggagctttaaccgccaagtttcaaatccgtcccggagac

SEQ ID NO: 536358 - DNA, 648 bp, Homo sapiens
ctattaattcctgttgcatcattttccttttttgtcctccttttcctccatttctcatctcctagtcttctactccatctttattttttctagagagtagcttctgtagagatcacagtattcagagccagatgacatgtgatataatcctgtctacatctaccacttatcagctatgccactttaagtgagttccttcttctctctgagcctcagggtccttaagtgtaaaagggaataagaacacctgtccaggctactttagtgggattctcacaaagatagcatagtacatatgtcggacctttgtgaactgtgaaatcttatacaacataaggattgttttcctctccatgttttcctttttttctgccrctgacctaagcctgccgttggtcccacaggcattattgagcttgctgcaggcctttaggcctggaggagtctctgaacactgccctagagacactttaaaaaacaggtaggctttactgaacatgaaacctcagagctgtaaatgtagcatgtggaatggttgaggggtaggaaatggaggctgagagttatatttgagcttacattgtgctagaggccaggttggtatcttcatgcttaagtttgccatccagtgccaggccccgtttctgg

SEQ ID NO: 536359 - DNA, 634 bp, Homo sapiens
ttggccacttcatgaaatgggtctccatctgtccaccctctaacagttgccttactacccactgcctgccatttaagcaaaaccacgtatttttattttttcctcttgctaagacagaaataatacagactggtcacaagagaatagaaaatttcaggcagcaatttcacatgactaaacaaaaggaagctgttgaaatagctgcagaggctatgggcaaataagaccctccaaaacagggtgtgaaccaagctggctaagattgactagacccaacatagtgctgaatttgacctgggtttcacctaggacctaattatatactcattagcatactaaatcacacacccaccagcactatgactgctccaaaaacaccatatttcgtgtagaagtgaataacaccacagttctgagaaatctctactttctcgaggaattttcatgaatatttcacaccttggttaaagaaacccataaaggtagcagcctcaaaccaccttgggtgcaactctcttttgagtatgtctgcaatactctttsttaggtatatacttttcactttgcaataaatatctatactttattttatgactatccttaaattacttcttgagatggtgtcaagaccctg

SEQ ID NO: 536360 - DNA, 577 bp, Homo sapiens
aatgcttttatctaataaataatataaaaggaaagcaaaagatatcatgtgaactatggcttcatataaatttagagaaaatgattaagaaactgacaagatttaattatgattccaaaaaaagagccaagamgataactgcatatgggatgcaaaatcaagactctagtatataaaatgtcatcctggggaaagcattattgattttgtgctgaaatttgttttttgcaaagaagaattctcaggaaattttaatatttaaatgttggttacatgatttaatattagataaatgtttagataaatgtttggcatattagtttccactaatacgttaactaaaacttcttaatataatttgcttaattttggagtttggaataattttggatttacggaaaaatcagaaagatagtaaaaaaagcatttatacccccccactgaacttcctctaatatcaacattttgtatagtcatggtatgtttgttaaagctaagaaattaatattgatacaatactcttaacttcaggctttgctagaatttcagttattcgactaatattctatttttgtta

SEQ ID NO: 536361 - DNA, 579 bp, Homo sapiens
agtcactaggtaaagaactgcacattgacctggaactgttatcagattgttatgtgagtttataaatttccgttatatagagacactgaaatttgattttgttttgttttcattagagctggtgttactctaagtaacacaggtcaaagctctgagaagtcattggtttgcccattaaaatgagtcaggcaatctgacagcactatgagttttagacttaatggtctcttggtgataagctctggctggctgcaattcttctctcayccactagaaaaatagaagacctggtgtctggaaggttaaaatggctaggacaacccttctttaattttgccagcttcaagaatatcaggagagtaaacacatttcctgttttctgttctgctaaaattttcaatactgacttagaaagtttgggatgatagcttctcaaaatataggttattaaatgtttgaatgtcactttgtcccatatgaatcattttcttaccatatcatgacatacaagagcattaaaacagcataggcaaatatgaaatatttcatcaataacttgaataataagtatatattaat

SEQ ID NO: 536362 - DNA, 507 bp, Homo sapiens
tctcttggtgataagctctggctggctgcaattcttctctcacccactagaaaaatagaagacctggtgtctggaaggttaaaatggctaggacaacccttctttaattttgccagcttcaagaatatcaggagagtaaacacatttcctgttttctgttctgctaaaattttcaatactgacttagaaagtttgggatgatagcttctcaaaatataggttattaaatgtttgaatgtcactttgtcccatatgaatcattttcttaccatatcatgacatacaagagcattaaaacagcataggcaaatatgaaatatttcatcaataacttgaataataagtatatattaatcagggctctccagagaacagaacctacaggctatatagggatatataagagagggtttattatgggaattgcctgatrtattatggaggctgaaacatcccacaaaaatgtctgcaaattggaaaagcaggaaagctggtggtgcaattcat

SEQ ID NO: 536363 - DNA, 507 bp, Homo sapiens
ttagtaataagatacttttaaaggtttgctgagcagacaaaatgaaatactctatgtaaattgcattgttttcgataaagtgcctggtacatagtaggcaaatccataagttccctttcatttatatttcacctttcagacaagaattgtcgtgttcctaaatttaaaaggtgaaacaaatagcatgtgttaaattattggtccagaagcacacagcrggctttcctccacttaccttatatatttactgttgattttaatgtccttttcattgaaaatggctctaacactgctctctaacctttataaatatagctgctggtagatggccttcaggtacaccccagatattgaggactaaagagaatgggttaaaaatgcagtgaccctttattttactcctagcaattaagcagccaatcattccctgcacaatgttctctttcatttccaaagttgctgtctgtgggcaaatacttaaagttggaagctacagcagctccctcc

SEQ ID NO: 536364 - DNA, 607 bp, Homo sapiens
gattccagaattctttttcactcagcagcaggaatatcccaatatggaggatgagtgcaagggcacttttagacttcatagatcctacaccttcatcatttcaaacatatccacattctcattaaatatgtactctgaaggtaaacatttttaaaaagaaatttatttataattttgctttcaaaaatatgtggccacaggtcactcatttaatttgtcattgattataatgtctcagaaatcatcctacattctctggaggayttgaaaattatttccaaccataacaaaatataataatgagtaaggttgtcataatgtttcattttgtaaacacgtaaatgtacatgtaagaattttgattttgcaattttgtttttgtatttggagacattttctttttaggatttgatcatcttagtaagaccttgagaaggttctagccccaggcattctatctgctggatgcaacagacagaatagccctggatgggtgccctcctttctcttcggttgatgactatagccattatgattttctactaaacgatcttgcttctatttaatgttttccaaacaaccccctggttgtaacttgaccattcaa

SEQ ID NO: 536365 - DNA, 506 bp, Homo sapiens
cattgctgatgttggtctggggctccattggacagaaaatgtttgacactgatcacctctatttgaccctgcttctgagctattgtttctgccatttccccactaattccaggtaacctagccttctcatttactgatctaagtttcactctgtaatctcatctcttattgttaacaagagccacctggctatcctscttaactgggagcgagaggagagcctcgtctgctgctgggcagagaaacttgtatgggggctgaggctgggaaaggcaagtaaggtcattttctgagtgcttactatttgctgggcactgtgctgggtgctttacacatgttaactctactcatttgctgtcagcgaaaggaagggtagaaaaggctcaaccctaaaggatgagaggctgaatttgtgttgttgttgttgtttgtttgtttgtttacaatagatggaatggtattgtgtaagggagggcttactccacaaagattaaggagcctatggt

SEQ ID NO: 536366 - DNA, 462 bp, Homo sapiens
acccaggctggagtgcagtggtgtgatctcggttcactgcaatctccacctcccgggttcaagcaatcctcccacctcagcctcccaggtagctaggaytacaggcttgtgctaccacgcctggctaatttgttttgtattttcagtagagatggcgtttcaccatgttggccaggctggtcttgaactcctggtctcaagtgatccgcccacctcagcctctgaaagtgctgggattacaggtgttagccactgcccccggacaaaatcagctcttttaggagtctaacgcaactcacacataaacaaacacacacgcattcttctaaataaaaaatctctcattcctcatcatgttccctttaattctaacatctacaaaagtcctgaaaatgaacttaaaaatagttaagaagtcaattttacctctttgccaagaggtaaaatcagacggctcaaaca

SEQ ID NO: 536367 - DNA, 595 bp, Homo sapiens
ctgatatggtttggatttgtgtccctgcccaagtctcatgttaaagtgtaatccccagtgttggaggaggggcctgatgggaggtgattggatcatggaggcagagttccttcttgctgttctcatgatagtgagtgagttctcaagagatctagttgtttaaatgtgtgtagcacttcccccttagctctctttcttctgctccagccatgtaagatgtgctgcttcccttctgccattactgaaagtttcccaaggcctccccagtcatgcttcctgtacagcctgcagaatcgtgagccaatttgacctcttttctttataaattacccagtttcaggtatttctttacagtagtatgagaacagactaatacaatatctgatgcacaggctcctgtcatagcctttgtgaccccaccatgggttaccactagggtcagccttgcccccagcctctgaggctggttctgtctcccaaggggggatttcatgatgttaactcaggaccgctttcagcttcctactctgagcacagagcgactgtgctctgctgggtctttgtgactcartctctgcaggaatccttgtcatgt

SEQ ID NO: 536368 - DNA, 484 bp, Homo sapiens
ctgggttgaagggcatattacatattaggatgctgcatagctcatttttgtagcagagacttaaagtttcagagatgagcaaattttggccagaacaattagtgaaggtggaagtggtgatggtgacaatgagatgaaccccaagcccaccaatctattcgggagaatcccaagcctctcctacgccatcatctttgtgaagatttttaacaagggattggtttattctgccttgatggagtaggattcacagaggagctgacatttaggctacatcttgaaggaacagaagaaaggcatcccarccaggggaagcagaataaatgaaagtgtggagctatgataatatgtggtatatttgaagactgggcaagagtctaatgtatgaatgactagactcatgactatgactaggcaagagtctacagtatatggtgtgcagtggaagtaaataactcccaatgcttacacacctggcatcact

SEQ ID NO: 536369 - DNA, 615 bp, Homo sapiens
ggctcccagtgatttccaaactgcttcactgacagtgctgggggctccacaagggaactgcggagcagcggcatgggaggagccccaccaggggtggcctcatcagttctatgtatttcaggtactgcaagattttattgatagtgtttcactgttggtgtttgaaaaacagttctctacaacataacctccagaatattcaacatattctctttcgtgttagctgtttaagtacttggggtgtttcccatcccctttgtacatcttttatggatcctttatgtactttaaatccctttatctaaataatgtcttagcaacctagaggggttcgtcaccacgtaacttcaccaatctcatgtttagtgagtagttacrgatctcattttacaattacaggctgttttaaattactgttaaaccccgttttaaattagataaatcagggcaatattttttgtagacagtaattttctggaagagagaagattgactgtgaagaaagaatttgcccctaaacctttctaccaaggtgcccaccaaggttgttcactcccctccccaaacacatttctaagttgatgtcttagcagaggaaaaaagcttttgattttc

SEQ ID NO: 536370 - DNA, 526 bp, Homo sapiens
ctatagccatagaaagcagatggagatctgaaaacaaacaattaaattccagggaaacatttctgcattctgagagctcctttgctccttccacttccgcttccaggtaggagtcactgtaaggactccaggtgaatccatcaacaatgccatccaggggctgtgctgtttctgggcataggtatttacatcatcctctgagcacaaggttcagaccccacagtcagccacagcctgagaactgtgaaggattttagataagaaacctcttctggtccccaagggtcaatatttcccatgacttctctctgacacagaaacaagaggctcagaagggctccccctgggcagggtttaaagggactctgctaccagaggcagtggggttyagcctggataccacttcctagtcccagaggattgaaggtggctggagaagagcattttggggacttgtcttaagagtcccgaactcgtgcctatggctctggaataagcttatatttgtatgaccttttatttgaac

SEQ ID NO: 536371 - DNA, 624 bp, Homo sapiens
ggcagcccatccccttcgcacacagtggcagctatgccagccacagagccctggggaggacggcgaacgattactgtgcatgacctgaaagggatcagagacgtaaggcaggcaccatcctggccagggtggggacaggcaggtggggaatcaactgctgggtctcacagtgcctacactgcggttgccctgggatccagtcaaatctcaacaaaacaaggagacaatatatacagaagggtattagtattatagtatagtatatggtgtagtatactgtaatartagagtatatagtatagtataatagtatagtataccacactataatatatatagtatatatattagtatatagtattataaatataattcaaaagatgtgcatccattcattccagcagtaattccaaggtttgctgagatcttcctgagatcaattgtgcagcctttccaaagaggtgaatattaagtctccagtccatacagcaactgcaagattagaacagcccaccagtgtacatcaaagatttatctaccttaagcttctacaaaagaaaacctgtttttttcttacagcagtacatgctgcccatgcataaacaatcaaagttaaaccgagaa

SEQ ID NO: 536372 - DNA, 422 bp, Homo sapiens
attcacatctgtagactgtgagggctctctgcaggtttgtccccggtgaccccatctctactcctgggctctgctgcaagggctgagggagttcatgagtcacatgtttaatttacccaaagagccctcggtatgagtgaacactttgaccttttgatctttccaaggcagtaacgaaaggctgtccagccataccatacccttgactttctccccagaacatgctttcctgacagtgagtctcctaattttggcaggttttacaatctggacaggctgaaaattttccaaatcatcaagttccaattcctttttgcttaacagttattccctgagtttattgttttcctstcacatcttactagaatcattaagaagaagccagtccacacctttaacactatgcttggaagtctctcagc

SEQ ID NO: 536373 - DNA, 449 bp, Homo sapiens
ggttgacagctctggttcaggcagcaagtccagccctgggcagcctcacccaagcccctgtggacacaggactcactgggtctgttcagccattctgcctggccagaaacaaccaaataacccaaagccccatccgtcaggtgtatgtggaaagagtaattctgctgygagacgccgctttctactgggtttgtcgccctttgcctgtagctgcaaagcttccaattttttggaaaccctgcactccacattttcatttatcctgaaactaaatcagtttggggctaaacatatttcaaaatgtcagcgtccttatttggtccatgggatgagaaatgcaagattctcagaaaatgccatgtttagtttggatgttgtcctggaatgtggaatggaacaaatgctagatcctcctagagcgttatgaagagtaaaagagagagggcaaa

SEQ ID NO: 536374 - DNA, 510 bp, Homo sapiens
gagtaagagggaaacaggttttgcacaagacgacgtgcaagtggaggatctgacgtggtttgaaaagccgtggggctttgactaacacactgaggcatggaggaaatgccaccaaattcctaccaaagcacactctgaacatcgacattatactaaagcgaataataaataaggggcaagaacttgcaggcactgcccatttgcattaaagtctgacaaattcctgctcccaaagaattcctcaggaaatgcattgagatgatgattctcagatcaattccctagcattcargggaaaagttttttaaaatcacaaaattaaaaaacaatgtctttcaatactccaggcactgatttgagatgttacactttttgaagccagactcggtactttttggtatattgggctcagagtctcactggtactaagcttatttgatgctttggtgtgttgggcacagagctttccctggtatgtagcttatttgtaagtttctataaattgttgca

SEQ ID NO: 536375 - DNA, 636 bp, Homo sapiens
gctgtaggaaaagcaggcatcttgagaagtcctggtaattattccagagcactaggcttacattaaaaaataaaaaaaaaacttagcccagagtgttgtgaaaaagaccaatggagattatcatttagctacctaagaagagtgtaaagaaaacaaattattatcctaaaatactagtgatgatttacctaattaatctttgacagcttgaaatgtgtcctcagcaaacggtaatgtggtagtgtgtgctcaaggaacactagattaatgaagcacagatataaaaattgcatctgttagattatgtaattctctctgagtaattttaattactgggtatttcaggaccttccaaatcttcttagaacaaaaatgtcttattttatttttaagaaaacttactttgagttttccatcacgctaaatattttactcatcgagaccttttttaaattataagactttttttttctttctttgattttggcagcatgggagaaggaaggtaartgaacatagagaagttatctaacaatttgttttcatttaacattcaacaagggagagatttgtttcctctccagattttaagagatttaaataaggtcgtttatgttcagctcagttaagctactg

SEQ ID NO: 536376 - DNA, 622 bp, Homo sapiens
tcaagaagagaattatgggcacctagaccagagagagaggttcaggaatcaccagcattgagagactattgaaggcaacagggctggacaaaatcacttggaaaaaagccaagctgggaaagagaggtggtcccaagaccaaactctgggtctggttggaggagaagcctgcaagagagactggcaaggtgagatcccactgctgggaaacagaagggggcattgagggcttgagagggaggcagtgagagaggggccactggtgctgatgctggctgcagccagagaacaggatgcagatggagaatggcccacaggctcaggtgagggtctcagtgatggtgagcatgcaggccagatggggctggaaagggatttgaagctggcagggagagacagcaagtttagcccattcattccaaaatgattgygtgatgggtggggagagaaggtggaatggacaggagggatctttaaggtaggtcattttgtttgcaagatcttacagaccatgaaggcaacaggataggaagacagggctgctgggcggtgggaattgcccatctgggatctgtgggtatgactttacataaaagcctgagatgacttaatcctcccatga

SEQ ID NO: 536377 - DNA, 544 bp, Homo sapiens
ggggcaagggatgacggagggggtcgcgtaggaaaggaggggggagggcgatacaaacgttacagaagcacctcaatccacaccctgaaatccctcgggagctctccccatctctcccctcccctccctttaccttcaagaataactccacagcgcctttggcaatgtccaaataagaggtgcccaggtcagtgcgctggttcatagaggcggacgtgtctatgaggaacagcaggatgggcatcttcccccgcactcctgcctccgctccccactctcccggccctcttgccctcactgccgcgtacggccacctgaaccctcaactctcgcagagccggggrgcaaggagcaagaggaagagggggagacgggacgggacgggacggatgggaccgctcctggcctcctctttctgcagccccacctcctctccctccaagggaacttgaaagtgtgagcgtgtgtagccctcggggccctcccccttcctctcttctgctgccaccactactgccgctgccaggactactgcctaagcatc

SEQ ID NO: 536378 - DNA, 421 bp, Homo sapiens
aaatgaaggagtgttatttagtggctcccctaaacttyagtatccctcagtatcctaatactgaacttcatcccattttagccaggccatttctccgattcattaattttcattgatttttattttttttaaatagagaagccttttcctccattgaaatcttgccaggaactaagaacaagtaaaagagataaaagcagatcaactgtcctcgaaggggatgtgggagtggtgttagaggcctttctgaaaaactcctgttctatctctaaaggtcacttgtaatccttttccaaaatgttagcgaccttactaatatttggaaaatggtataatgttataacacagtataatgtacaagtttaataaacatgctgttaatttccccagccaaggtaaccgataaagatatttagggcag

SEQ ID NO: 536379 - DNA, 547 bp, Homo sapiens
cctggctgttggtggggagaggcacaacagtgggggcacagactccaccctgtggtcgaggcctggggtgggaactgcttaccctggggcttggtgaccgtctctgctgcacagattgggtaggggacacagcgggcacrggagttggtggctgatgtggcacagatcatgccaggtcgacattcgcaggtgcgggaggagttccatgcacatggcgtcttctccacaaggtcatctaagggacacagatgaggatcacggagaaagatcagtatggcaagggcagggggtccagagagcccccaggaagacagagaagcagttgtccaagggtcatccaacaagaaaataaatgctcgtctgactatgccgttgagcagctctcccagcatgctcaaaataattctgcagggtgaaagaaggcaggcaaaaagcgagggtattctgtatgtcgcatttacatgcaagctattgcatggtgaccataagcaggggatgggaaatggtgacaagcaacccgaggtaacttttagagggggatggctgg

SEQ ID NO: 536380 - DNA, 592 bp, Homo sapiens
gcggatggtgatggcgctgcggggtcacacacaggctcgaatcccagctctgccatttatcagttgcatgagcttggctatgttccatgatctcttycagactcagttttcttgtctgtgaaatgggggtgtcagtctctacctgacggggttgtggggcttccctgacatgccactcggtgtgtggcttgtgctgagtggcaggttctgtccttattccagcctggtggccgcttgtcaagagcgagcccttcctatgtctgcagaattcagcccatcaaggttaatcagagctttcaggccagcctgggaacctagccacccttggggccaacttgctgtgggaagccccgcagtgggcaggcctcttcttgttctgtgggctaccccaagaacccttcagatcacagtcataggactggctcattattcgacgtctgtaactctgggcatgtcggcgaagtgctgcgggtccctccggagggacatctcactcgtggttctagcacattccagattgcaccacattactgttcgagggctttcctcaattaaagggtctagctgctgaggactagtggggcacagactt

SEQ ID NO: 536381 - DNA, 637 bp, Homo sapiens
atggtaaataagggagtgaaagctaggaaatacaaaataaaatccggaatactaatttaaattcagctttcactgatacatctttttcctctagcccaaataaagaccttatgtaggaaaacaattacaagacacagaacccacatgtcacttcctttgacatctgtcacactttctaaggatttgccaatgaatagaactgtaagtgcaaatgtacccaaaataaactcttttctatattaggctagagagatcctgaacgctgtgcatttattattttaattgatgattattacaaacatcacatataagtttacgattccatttgtctaatgaagagatagcaaattcaaattatttcaggtgcctgacagaaaacgcaaatgtagaatccagaaaagtgggccctgttttgaagaggagaggacatgccctctgtaaaagtattcaaattaaaaaatatattaaacactccaaagggtaaatctcctttagtcgctaatttctgacccctggtctacattatctagctttattccctaacatgaaattacagaatgagcatggatttaagamcaattataagtgacaaagagcataaaaagtcagctatagctgttgggattttctactgatc

SEQ ID NO: 536382 - DNA, 462 bp, Homo sapiens
tgtgccttgcttgtctgaacagaatgyttgcataaataatgagattgttgcttgggcgttgagtagcagaaaatttctatccaaccaccaaagactcagaaaccattgagaaccctaataataatttaaaaagccatacccaatgttatgtgtgtgtatacttacatattcacattcaaatattttcagtagtattttccatctgttatcaggggggccacaaccagaagcttgttggccagcattggagttttaggcttccaggctacctctagcacactggtgaagtgttaagaggcgtggcagatttgaatcctagttgctgcattgttatgcaaaatgagacacactttttctttgaggaatctaattgctcttttattctcttggactttctttctttttttcctcaaatgcttctttacaatgcaaatgtttgctattgtaaagaggggatttaga

SEQ ID NO: 536383 - DNA, 623 bp, Homo sapiens
gcttctgatggcagcttgggcctttgttgtcactgaaaacagaactgatgtcatgacttgtcctccatgaatgccagccaaggtgttgttctgaggttgctgttgccagcagagactcatccattgctgagcaattaaatcctgaaccctgtttaaccagatccaaatagctttcaagaagcctcagttttggtggctatcaatcccagggctgatcactggcctctcacaggggcatcttctgtggacctgtggttctgtggcaaaggtggtggtctatgtgcctgtsttatatggacactgaaatcttgtgtaaagtaagggagctcccagtgtgtctgcaatgggaggaatactgacccaggaagttctgcatgtgcagagtatatcttccacaaactcccaggtgaagctgtacctagactctccttcagcacagatacagatgagatgggaaagtcccaatttcttcttgaaagatagtgaccctgggtttcagaaggaaatgaaccggccagctcccaaatccattgctgcttgacttgggattgcagattggtctaaagcccacatatctcatgcaacctgtttagcagtctcttattgaagcctgagggctcaag

SEQ ID NO: 536384 - DNA, 560 bp, Homo sapiens
ggctttgtagttcccctccccgccccgcccmgcccaacttgaggagcctatctctttctcaatagttccatcaaattgtcctgagattaaacctgtttggctgcatttggttcacatgtcctttgctgaaccaaccactgttgccaaagagatgaaacgcttggattggccaggcctggaccacgtgcccacctcagggacttgggagtggaatcagccctaaataaaccacacatggaaagaatgttcctacaaaataagagagctgcttttattagaagagggaaatagatgctaaccagacagaaatataaaatgtccattacacaacctaacacagggtgaccagcattgaatatttggtctgtacatagaaacaaatgggaaaaggcattcctcttcgatatcattacttccacatattcagcttgcattaattatgttttcaatgggtgtgaagcactggacaggttgtaactgagggtacacactgaatagacaaatgggtggtatagggaggtcacaggatttgggggctggcgaaaaggtggtggtagcac

SEQ ID NO: 536385 - DNA, 547 bp, Homo sapiens
gaaatgggtttagtagtcagctcacctagtctctggcacagggagcaaagtccctgagtatcaggaatgataaagtagagcttgaaggaagattcaggagttgggtcaatttacagcagaagaggaagctgtgaagaggtaataaaaatgttcactattgtcatgaactaatgtatggcaattcccattgttccatgccctagcctgcatcataattgttagaaatttccaatttaatttattgtaaagattttttaatggaattgatacactgtggcagtgaaaacaggattttctgtatagccagcattgcgaaaacacatcctgttggtgaacacatacatcaattaaaatgtcacccatggctcacacctgtaatctgagcactttgggaggcygaggtgggcagatcacgaggtcaggagatcaaggccatcctgaccaacatggtgaaaccccgtgtctacaaaaaatgcaaaataaattagctgggtgtggtgatgcatgcctgtaatcctagctacttgggaggctaaggcaggagaat

SEQ ID NO: 536386 - DNA, 622 bp, Homo sapiens
gaaacctcaggtttcctcagggaaagggctcccacacttactccgtctccacatctgcacatgggtcttatcaaaacattcaggcctggcccttttctggttctgcccagttcttaagctcttcctgtctttacttcccagcctggagctamctcagtgatgccactgtcaagcctctcaatgtccttacctctcagcccttattccaatcctgggtcaggccaactatcggttttctccactctgagaaaccgggccactgacctgaagaaaacccaagtccctcaccccagtgccagtgccagacaagggcggttctttgacacatggcttgtcagcactctctgccataccctcaagttgccatgtgaaatcgacacccctcctctcaagcccttggttctgcttcagagaacagagttccctagttataaactcctttaacttccctctacctccaaaatccataacaatctcatatgtacacccctcactcccctgcccacttgcatccccttcgcgtcctggaggaaggtggccgtttcccttcttgcccgggttctttctccctgagctctgattctccccttctgcctttgcaaggaacttcagctctctcttc

SEQ ID NO: 536387 - DNA, 523 bp, Homo sapiens
ctttttttcctcataagataaatgctccttgttagctattcatcaccaccacttggttgttagaaaggactcacaaatgtataatgaggcaggtgatcctgcttccagccctcctttctccagccactatcattaaggatgaataaactaatacagttgcaggttgctgtgttggatatcaggcaaagaacattatataaactgaaagagacactatgctatctaagaagttaactatagctataaatataaaactaaagagagcaatattttaaagaatagctcttgtatgaccaaataagatatgtccttcaaagtggtcacattggttatgagggaataattggcaagaggaaagaatttttaaaactctaaaaaacaaagtagccaccttgagaaatttaactcattccagtagtgctcctagtaaaagcattcttagaactcttttcagaagtacaaaaaaccaccagcccayccacaaaattgtgaaataaaatcaattgttgttttaagtcactaa

SEQ ID NO: 536388 - DNA, 524 bp, Homo sapiens
gaatttctcacccaaaatttatagtgctgagggtgagaaatcctagcataggggaaaaaataaaagtaaaaacctctctcccccaattccaattcctactcccagtcatagttcccagaggtaactactttcaacacttcctggctttaagtgttttggtgactttttatttgttaatagtgatacttagacctcttagagcaagagaattctaggaaactctagtgaggttctccattccacaccccctctgacaactccagctataggtgacaaactttaagtgggctcctctgggctccaagcagagagaattccttatagacaagttctggaaaacagcctcagagccaaaagcaaggactttcaggaagaaagcaagtctcagagacagcctgcttcccaaggacaatcatgactcttctgggtcttaactmccagcaaaactaatggtggatttaatttctcagcccttgaggctgggagaatgcagaaaaaccagagggcagaggaacctgctggca

SEQ ID NO: 536389 - DNA, 582 bp, Homo sapiens
gctcacacctgtaatcccagcacttcgggaagccaaggtgggtggatcacctgaggtcaggagtttgagaccagcctggccaacacggtgaaaccctgtctctattaaaaatacaaaaattagccgggcgtggtggcaggtgcctgtaatcccagttacttgagaggctgaggcaggagaatcgcttgaacctgggagccagaggttgcagtgagccgagattgcgccgctgcactccagcctgggtgacagagcgagactccatctcgaaaaaaacaaaaactttggttgttagacagttcatgcacaaagccaaaatttgtcctttatgtatcttctttccatagtgcttactggagccttccaaaataatgtctcctcaasgtgacagcccctcaggaatttgaaggcaatggtcacaccctcacccactttcctgagttttttctggtttattaacgtcagtctttacagtcagtgctcattgacggtggttttctctggttgtttcctgaacacgtagtgctcttaaagcaatgccctgaggagaatacaattctccaggggcattctgattggcag

SEQ ID NO: 536390 - DNA, 675 bp, Homo sapiens
tttaccacaaagagataaaggaaaaggccaattttgatgacaaatgacaaagtgtaacatccaaagagaaatggagaaaaaagaggtcatctgtcctcctgtgaacatttgaatagttctcagatacacttagtttgagcagaattatgtgattactgagttcttccctctctgcttggcaaaaatgatggaagtcttgtctccaattttaaccctatttgcctttttgcaacaatatggcaggttgtttacatgctggctggggaaagggaaactaagagtaaaaaccaaccagttgttactttgcaaaatggaaatgtaactctgaggattaagcaatcttgactgctaacaaaattaattcctgaacaccatgaaaaaggaaaaaatrcatagaaattgatattttaaacgttaaatattcagcagtttctcttatttggcaaaatctttttgaagcaaagctgatctcattttggtttagatcacatcaaagaatttccaccaaaaatgactgaattattgctatttactaaaatggttttcattctgtgacatttttctgtttcaaccaaaattggtgtactaaaagccatttctggcactgaccatctacagttagtgcagactccataagttaagggcttaatccttcacaaatcttctcttcagatt

SEQ ID NO: 536391 - DNA, 547 bp, Homo sapiens
ggtgtgtgtggacacagtgggtgcgggggaaagaggatgtaagatgagatgagaaacaggagaagaaagaaatcaaggctgggctctgtggcttacgcctataatcccaccacgttgggaggctgaggtgggagaatggtttgagcccaggagttcaagacaaggcggggcaacatagtgtgaccccatctctaccaaaaaaaccccaacaaaaccaaaaatagccgggcatggtggtatgygcctagtcccagctactcaaggaggctgaggtgggaagatcgcttgattccaggagtttgagactgcagtgagctatgatcccaccactgcctaccatctttaggatacatttatttatttataaaagaaatcaagaggctggatggggaatacaggagctggagggtggagccctgaggtgctggttgtgagctggcctgggacccttgtttcctgtcatgccatgaacccacccacactgtccactgacctccctagctccacaccctctctgacaccctgtggggacctggtgactctcggc

SEQ ID NO: 536392 - DNA, 637 bp, Homo sapiens
gcgtcctgggagaaccactgctctcttcaaagctcagatagaaatgccgaaatcacctgttttctgcgtcgctcatgctgggagctgtagaccggagctgttcctattcaagaagtcaaaattttaacgcaggtcaactgactctagagtacaggttcttcactgctacaagaggcaaccaagacttagagaaagggtttaagagagaagtggaataataagagaagcacattcatcasagatattttttatttataatactacataaccaaaccctataatcagttattaaaagagcttacaagtaaagcttacttttgtgtgctcttttcttacagtattccatgtttatgtacacatactgagctgaggtgagaagagaaaatgcccatgctcttactccaaaccatcaagtctgagtgccacattaaagtcttgatacataaggccttcttgaaagcacattgggatgtcaataaagatataaagaccacgctataggcctagggcagtcactgaggagaccctgaataagtcatctggcctcttagagcctcccttgctaaatctgtaagagaggaatttgcactagaatgttagttttatgatagcaaaagtcttaatgaacgcaagttat

SEQ ID NO: 536393 - DNA, 374 bp, Homo sapiens
tttgagactgaagtatatagaagctagaagatttcctccagttcactgtacattttatgagagatgagtgcagaccagaggccacttcagtcagttttaggtacagtttgtactgggcttccttttattcctcacacagtgcttcagtttttcacaaagctccaccctgttcttcctctagccacaagactctgttgacccattcatttctttattcccacgaagtcccaaattactcttcctccatgagcactgctgtagkttccagtatcctcaacctcacctttcccacaggcaattatagacattcagaaatagacattatttgtcagtgtaaaatattaaaaaatatggcaaataaaaaagaaagttgg

SEQ ID NO: 536394 - DNA, 586 bp, Homo sapiens
ggaaattataatattatctaacaggacagttttaagtattgaataaaataatgtatgttattactacagtgcatggattgcttatccacagttgggtttaataagtttttcaacttttttttattttcattgttctgtaagaccgttgtcattttgaattttaaaattatagaatttagtccacattggataagtcactcactatatcattttgaagaagttccacaatttctttgtaccctaattttctcagttatataataggtacaacaatatgtcattgatggcacaaattttaaaaaattatgtgtatatacagagaattactataaaaataaaaggcaatattaatgttttcttttatctagtcagcaaatattaatgaaaattacattgactggaaaaatgtatctgtatcaatkaatgaataaggaaaataagaaatgttagttaaaccgggttagtaaattacataacaagtctaaaaaatagaggaatggactttagggaataatataatattggcagaagaatgaattaaataatttaatatgtattttccatgtctgattcacatggttatgta

SEQ ID NO: 536395 - DNA, 589 bp, Homo sapiens
caaggaatctttattgattatgccaaaatttagaaggaaaggaaaaaagataagcagatacttactgctccccataactgtacgagttaagcaaatcataactctaccatgttctctccacattatttttttttttgcaaaggctatattaaaatactggggcaaaaattttagaatgtacaatcacaaatgtattaagttggattcatctctaatttactttaggttagaaaaaaatggttcctgccacagcctagttttcacatcttttttgtcgttgtatgagggaatctttttgaggtggaaaaagtactcccttaggagtacttttacaaatatttcacaatacttcctgacaggactagattctggctaactctatgtcatcaatccacaaacaaaytgctatcaacaaattaatgtctcaggcaattagtaccaggtgctaaaacaccaacaaaacaaggagaattttaaaaagagccattgaattttattttcaatatgaaccacagagcttgctatgtaaatttcaacttccagaatttttgtaaaaggaagttactctactttttattttcaaacatgt

SEQ ID NO: 536396 - DNA, 540 bp, Homo sapiens
tgggaggacgttctgcgctccgcttctgcccggctcccagtactgctctccggscttgcgggtccggaggagaggaatgggactccctggccgcagtccgagcccgtggtcactgcgccagcggaatccaagcctctaactctaagccggggttcaggacccaaacgctgcaccccagcacggaggatgcacagacctgagggcttcccgcagtgggacgtggccctggagagggcaaaatcctcggggttgtcgtggggtaaagtgatcttacccaaagagagaccaagcaaagaaacctcagttcacaaagtccaactcaaaccattgcacagacagggacaccgaggcccagagaggaaaggggcagtccacaggacacacagcagtccttatccccctttggtgtcctggaggaactgaggtcgctttcggggcttgggagctgccgcagcgcttggctcctggcagcgctccccgacgtcgtctccctcgctcctagcactttgtcctctccacctaggtcttcccagaagccaa

SEQ ID NO: 536397 - DNA, 540 bp, Homo sapiens
tgggaggacgttctgcgctccgcttctgcccggctcccagtactgctctccgggcttgcgggtccggaggagaggaatgggactccctggccgcagtccgagcccgtggtcactgcgccagcggaatccaagcctctaactctaagccggggttcaggacccaaacgctgcaccccagcacggaggatgcacagacctgagggcttcccgcagtgggacgtggccctggagagggcaaaatcctcggggttgtcgtggggtaaagtgatcttacccaaagagagaccaagcaaagaaacctcagttcacaaagtccaactcaaaccattgcacagacagggacaccgaggcccagagaggaaaggggcagtccacaggacacacagcagtccttatccccctttggtgtcctggaggaactgaggtcgctttcggggcttgggagctgccgcagcgcttggctcctggcagcgctccccgacrtcgtctccctcgctcctagcactttgtcctctccacctaggtcttcccagaagccaa

SEQ ID NO: 536398 - DNA, 524 bp, Homo sapiens
cagggttttacagccccattgttaaactgtaatcaagaagtttaataggtttgtttgtttagaattttgtaatcatcagttctcagttgtggcatgactaatcaaaacacatttatatttggcttttggaatgtgttttatgctttcatttaaatatagttacataaacctgagtgacttcatattccattcagaaaakagatggcattatatcttggattcaagcaaagtacccaacttaagcagggtgcctgttatgagacttgaaaatgtgcatttcacatattttttagctcttagttgctctaggttgtttgttatgtgaagaaatggccttgtgagatttaccttgaggaaattaattgagcattctgattcaagaagcctcttttggggctgtaggttgcattagaacacagaactcaacaagaggacaaggaatattatctatgaaatttctcaagatccattgttgaagtgtatcaatgagaccctgaaagcattttggcccaggaagaagacat

SEQ ID NO: 536399 - DNA, 536 bp, Homo sapiens
tcacttcactgccagggaagagccagcattagctggaagcaaagaaaggaaaagaaagaagagtagatggtttccttagagaacagaagggggcaaagattcctgtagccgttacaacatagttttagaactagacataccacatgtgtatgtgcgtgctcatatatatgtgcaygcgtacacacacacacacacacacacagccactctagatccttccggttatttttccaaccctaacacagatatagctagaccttagtacatggaatgagccattcatacaggtttctgcaggcaagtatactcatatgtccccataataacatgtaaagacacaaaactgaatttcactcaggtatacatgcatatattattctcagatctactcaaatagttatccatatggagtcacccaccaggtagttgaccaaagaggtgatgaaattgatgacttagtaaataagagatacttgcctagttaggagaatgagggactaggggaagatgcagttgatacaagaagaaaagtagca

SEQ ID NO: 536400 - DNA, 612 bp, Homo sapiens
gctgattgcatgtatgtgtttatttgtgtaactatattgagttgaaatattgttataattgctttcctctgtgtatattatacttcagagttagtaataggaggcataatatttaaaaaatkgctaaaacaggcagggcacagtgggtcacacctgtaatcccagcgctttgggaggccgaggtgggtggatcacctgaggtcaggagttcaagaccagcctgaccaacatggtgaaaccctttctctactaaaaatacaaaaattagctgggcatgatggctaacagaaagttaaaaatggtcaatatattgaaatcataggaaaatagaaacaaatccacaggtgaatcagaaattgaagttataagactagaattttaaaataattatgacaaatatatttaagtatgtctattgtcaccatatctatttaattatactggaatatctagtcagtacaataaaaaagaaacaaaaggtataaagattggaaataagtacttctgtcattagttgtaaatgatatgattgtgaatgtagaaaatattagcctataaacaaaacagtagaaatagtaagtgaatttatcaaagctattggatacatggtaa

SEQ ID NO: 536401 - DNA, 612 bp, Homo sapiens
gctgattgcatgtatgtgtttatttgtgtaactatattgagttgaaatattgttataattgctttcctctgtgtatattatacttcagagttagtaataggaggcataatatttaaaaaatggctaaaacaggcagggcacagtgggtcacacctgtaatcccagcgctttgggaggccgaggtgggtggatcacctgaggtcaggagttcaagaccagcctgaccaacatggtgaaaccctttctctactaaaaatacaaaaattagctgggcatgatggctaacagaaagttaaaaatggtcaatatattgaaatcataggaaaatagaaacaaatccacaggtgaatcagaaattgaagttataagactagaattttaaaataattatgacaaatatatttaagtatgtctattgtcaccatatctatttaattatactggaatatctagtcagtacaataaaaaagaaacaaaaggtataaagattggaaataagtacttctgtcattagttgtaaatgatatgattgtgaatgtagaaaatattagcctataaacaaaacagtagaaatagtaagtgwatttatcaaagctattggatacatggtaa

SEQ ID NO: 536402 - DNA, 538 bp, Homo sapiens
ctctcccttccatccaatgtcagttatccgagcctgttgatactgggggggcggaatctggggtcacccggttctgcctgccacacccttaggctcccttcctaccgggccctccttgtggagcccagagcactgaccatcagcctggccacacggatggcacttttcattcgtccaaagcgctctcccaaccatctggattctggtcaatgaacactgggagagatgggttcctctgtgtcatttgaaattctaaaacagtggaactgaaatttcaygacacacatattctaaatgatgagagagggagaaataaagggaacggtaaagaagtggtttttcaaaaaataaaattaaattaggaaaataaaatcaaacgtatttgataaaacaatgttaataatataaacttagtaattaagataaaaacctaccagatgtaatgggtttaaccagtatttctcctatgaccgattctgcatcagaaatatgttgggtccttgggacacaggggacaatggccatctgtcccaatgac

SEQ ID NO: 536403 - DNA, 548 bp, Homo sapiens
tcaataaaaaaatgggaaaacaaattaatttcctgttttatttatgccatgctcattccaaaaaccacttaaaatagcttgattactattcaacagatgcagcttgatggaatggatcaaatttggggcccatcaggtagataaacaggtgaccctgggtgacaggctggccaggtgctcacggagacaggagctgacgccgtttgctccctctgggtcccaaatgccctggacaatgcctagcccatcacacgggctcagtatctggtagacgaacaaatgaaccaatgaattaatgaatgaacaaatgaatgaatgtctaggaagcactcttaggtgccctctgactgctgacacctctcaaagggccctgctttctcctcaagcagcagagagtccacgatgccttccaagacgtccggggcccccaaggacagccactgctgcttagctggcaacctcgcttccagaagcatctcttccgaaaacaagcaagcaggtgraaggtagggtctggcctcgaccccttattcctgcacacatcaatg

SEQ ID NO: 536404 - DNA, 493 bp, Homo sapiens
cagtttgtttgttttaatctgcacaatggccacagtgctgttaccgccaaggattctgtgaggcccaagagaataactgtttttctacaggcgctggcacacagaggggcttgcccatgggtcggtggctctttgaatgctggttggagggttcgatcagtctggtctgtcccagggccatctgccctctgccaactttgctcctctgaccggctttcatccacctcactcacgactgtagtggtgcagaaaatgaagtacccggagcaacagcttcctccgcctcctttgcccgcctgcctgcgggaggctccacaaggcaggagctgggctcacccccggcttcccctctagagaggcacagatgctttgcccacagacggacgccgtgtggcttgtgcattgcagcgtgtcctccaggraaggtgctgagggccttcctcgaatgcacacgggccctccctctctcaagtagaccttgaatggtcctccc

SEQ ID NO: 536405 - DNA, 534 bp, Homo sapiens
ggaggctgaggtgggagaatcgcttgaacccgggacacrgagtatgcggtgagccgagatggtgcaccattgcactccagcctgggcaacaactgtgaaactctgtctgaaaaaaaaaagagtactttgactactgttttgaatcctgggtgagctctaattgaatatcagagtaaaatgtcttgtgcttgggcttcctggagcaaaaccaggtaagcagtaactctcctcttagagtatgttgcttctaccttgcttttctctgagttaggaagcaaggaaaaggattcctcacatctgtccccttatccagacacttttctggtttcccttttgtgactatttccctgtttcacactgcccttggcatttattagagaatctcaatgtatcccaaagagagtgggatccacagggttactggggcatcctgttctgagctgcagcatccagttctctcatggtattcttaccaagatccattctcccaagcccatctattttcattcaggatttgcagttctctatctccac

SEQ ID NO: 536406 - DNA, 534 bp, Homo sapiens
ggaggctgaggtgggagaatcgcttgaacccgggacacggagtatgcggtgagccgagatggtgcaccattgcactccagcctgggcaacaactgtgaaactctgtctgaaaaaaaaaagagtactttgactactgttttgaatcstgggtgagctctaattgaatatcagagtaaaatgtcttgtgcttgggcttcctggagcaaaaccaggtaagcagtaactctcctcttagagtatgttgcttctaccttgcttttctctgagttaggaagcaaggaaaaggattcctcacatctgtccccttatccagacacttttctggtttcccttttgtgactatttccctgtttcacactgcccttggcatttattagagaatctcaatgtatcccaaagagagtgggatccacagggttactggggcatcctgttctgagctgcagcatccagttctctcatggtattcttaccaagatccattctcccaagcccatctattttcattcaggatttgcagttctctatctccac

SEQ ID NO: 536407 - DNA, 534 bp, Homo sapiens
ggaggctgaggtgggagaatcgcttgaacccgggacacggagtatgcggtgagccgagatggtgcaccattgcactccagcctgggcaacaactgtgaaactctgtctgaaaaaaaaaagagtactttgactactgttttgaatcctgggtgagctctaattgaatatcagagtaaaatgtcttgtgcttgggcttcctggagcaaaaccaggtaagcagtaactctcctcttagagtatgttgcttctaccttgcttttctctgagttaggaagcaaggaaaaggattcctcacatctgtccccttatccagacacttttctggtttcccttttgtgactatttccctgtttcacactgcccttggcatttattagagaatctcaatgkatcccaaagagagtgggatccacagggttactggggcatcctgttctgagctgcagcatccagttctctcatggtattcttaccaagatccattctcccaagcccatctattttcattcaggatttgcagttctctatctccac

SEQ ID NO: 536408 - DNA, 636 bp, Homo sapiens
aaacactttcaaaatttccctttgtgaattttccccagagccactttataaagtacaaaaatgttttatcaatttataatcactccctcctttttttaacaaaaaaagtggtaattcttcattctgtaattcatcttatttaccaaaccaaactctgaactgcttttgaccattttctcaaactaatcctagtgtctcagtatgaagacttgtcacctttcaagaaatccaaaggactgtggaggaagcccccagaatacttaaataattaacttcccagtgtggattataccctgattgggcctgcatgtctttgaggtgatagattctgctctgcyctttacaaaagcagcattactctgtagtctcacatatacagattgaagatctcattttgccattctaatatcttgaaattataagatatgaaatatatctaattgcctctgtgaaaacagaggcaaatttctaggcagtgtgaggtgttcttctgagctcttcatcccattaactttcatttatgatattaaaaaaacatgttaattaagatataacttgcaaaatgctctgcagtttgtgtgtgtgtgtgagaaagagagggactttcaggaattgaagattttctctgcatgatac

SEQ ID NO: 536409 - DNA, 591 bp, Homo sapiens
attgagtacttgctaaatgccatatgtaaattgtgatgtcaccaattctcaaatcaactttctaggtttggagaggaaaagaagaaagccattctagaagccagataggtttgcttgtttgtctttctgtatgtagatttgtttgatacttacccagagctctagtgaagtaacgttgtgtttggacaaacaataggcaaaatatgtcaagattatgtaactagatgcagttatggttccactggtctaaaatcacaaaagctgaatttcctttttctcagccatttggtggtgttgcttgatttatttttaaactataagatcaagaagagaatcccaaagattgttaggttcactatcaaaccccaaatgcctgatgaaaactagaatacctagagtcaacaatatctggaaataggaatccaaaccaagagttaatgtagctctcacaagtagtacttgggkagtatattaagattttgtgcatgctcaagtccttgtgtttgtgggctagcgattagaaatattcttatttatttgttcaaagtatcagcaagatggtccttagagtttattgctaataccaaggca

SEQ ID NO: 536410 - DNA, 560 bp, Homo sapiens
catataatcaggaaataaccataaaatagacaaccggcagtcctgagggcctgtggagtagccattccttattccttcactttattaataaataaacttgctttcactttactctatggactcacctcaaattctttcttgtgtgggatccaagaaccctctcttgaggtcctgattgagacccctttccggtaacattttgagccagggaaatgttcgaacatgatatcctcatctttcctacctatgtttagtttataaacctagattccaggaagttttggctcactgggacttgaaaatctctttttctctcaaaaaagtctagctctagctttttgcaactattgtctctgaaaagggcttcaagagtgctttgaatgccaaaagggggccatttaattcccttgctcttgtttagattttatcttcttttraagcaaggagcataactcagccttaatgtctggacagcctcaggacagcaaaaatgctaggaatagcaaatgccctaaggttgtacttcagaatagcagctctcagactggaccttccccacc

SEQ ID NO: 536411 - DNA, 560 bp, Homo sapiens
catataatcaggaaataaccataaaatagacaaccggcagtcctgagggcctgtggagtagccattccttattccttcactttattaataaataaacttgctttcactttactctatggactcacctcaaattctttcttgtgtgggatccaagaaccctctcttgaggtcctgattgagacccctttccggtaacattttgagccagggaaatgttcgaacatgatatcctcatctttcctacctatgtttagtttataaacctagattccaggaagttttggctcactgggacttgaaaatctctttttctctcaaaaaagtctagctctagctttttgcaactattgtctctgaaaagggcttcaagagtgctttgaatgccaaaagggggccatttaattcccttgctcttgtttagattttatcttcttttgaagcaaggagcataactcagccttaatgtctggacagcctcaggrcagcaaaaatgctaggaatagcaaatgccctaaggttgtacttcagaatagcagctctcagactggaccttccccacc

SEQ ID NO: 536412 - DNA, 552 bp, Homo sapiens
aatagggaaaaatagtgcattggtccctatctttcaccacaattacaaatttaacgcagatggatagtagttctaaatgtcaccagcaaagctataaatcttgcagataaaagcacaggagatcacatcagcaacctgggaggtggcaaacatttttgaaaaacaacacaaaaagcattacccacagaagaaaaaagtatctgggttatgttaaaatcaaacatttttttatgaagaaatactgtccagagagcaatagggcggcacacaaaatagtaggagatatttaccatgtatatatacaatttaggactcatatccagaatatatagtaagaatatatataaaatataaaaaagaataaataacagaatatrcatgaactattataattcgaaaggataagtaaatattcaacaaaatttaccccaaaggcttaaaaatatattttacaaaattatatatatgcatatatatgtgcgtatatattatatatatatatatttggccaataacacacaaaaagtggctcaacttattagttattaggaa

SEQ ID NO: 536413 - DNA, 552 bp, Homo sapiens
aatagggaaaaatagtgcattggtccctatctttcaccacaattacaaatttaacgcagatggatagtagttctaaatgtcaccagcaaagctataaatcttgcagataaaagcacaggagatcacatcagcaacctgggaggtggcaaacatttttgaaaaacaacacaaaaagcattacccacagaagaaaaaagtatctgggttatgttaaaatcaaacatttttttatgaagaaatactgtccagagagcaatagggcggcacacaaaatagtaggagatatttaccatgtatatatacaatttaggactcatatccagaatatatagtaagaatatatataaaatataaaaaagaataaataacagaatatacatgaactattataattcgaaaggataagtaaatattcaacaaaatttaccccaaaggcttaaaaatatattttacaaaattatatatatgcatatatatgtgygtatatattatatatatatatatttggccaataacacacaaaaagtggctcaacttattagttattaggaa

SEQ ID NO: 536414 - DNA, 552 bp, Homo sapiens
aatagggaaaaatagtgcattggtccctatctttcaccacaattacaaatttaacgcagatggatagtagttctaaatgtcaccagcaaagctataaatcttgcagataaaagcacaggagatcacatcagcaacctgggaggtggcaaacatttttgaaaaacaacacaaaaagcattacccacagaagaaaaaagtatctgggttatgttaaaatcaaacatttttttatgaagaaatactgtccagagagcaatagggcggcacacaaaatagtaggagatatttaccatgtatatatacaatttaggactcatatccagaatatatagtaagaatatatataaaatataaaaaagaataaataacagaatatacatgaactattataattcgaaaggataagtaaatattcaacaaaatttaccccaaaggcttaaaaatatattttacaaaattatatatatgcatatatatgtgcgtatatattatatatatatatatttgrccaataacacacaaaaagtggctcaacttattagttattaggaa

SEQ ID NO: 536415 - DNA, 204 bp, Homo sapiens
gtaaaaaggactagagaaatgattttttaaaataracatttaagaagatacatgatataatgcatatttgttaagttttctttctgcccagcttctctttttaatgactggaggatttatatctttataaataatgcatcttctacgcaggagccttcatcgtcactgctgtgggtcctttgaagtcagaataaaggcttctga

SEQ ID NO: 536416 - DNA, 559 bp, Homo sapiens
cttgttgaacctgccagaattttttccatttatatattagatactcactactgttaatgttagttatttagtttcctctgtaatctacatgcaaataatatcaatcaaaaccagaaaaaatatatagtccttttcttcactaaactaaagacagcagagagacacagaactaaagacagcagagagacaaggatgaattaatgtgataaatgctatgatagagttatgagcaaagggtccggggacgggagggattcctaacctgactgatgtggtagagtgtggaggcaagaagtgcttctagaagtgatcacatatgatgagctttgaatccatatagtcatgtaagtctccttccgttgcccatgcaaaatgttgtgccaagattaaatcttgaaataaccctgatgaagtttyagagatttctaaattcaagttttctagcacttaagtgattgagccctgtcagtgactactttgagctattatatgtattacataaagattcagcatcattaatagttatatttgacttgatttaatgaaaaattatgtgcag

SEQ ID NO: 536417 - DNA, 559 bp, Homo sapiens
cttgttgaacctgccagaattttttccatttatatattagatactcactactgttaatgttagttatttagtttcctctgtaatctacatgcaaataatatcaatcaaaaccagaaaaaatatatagtccttttcttcactaaactaaagacagcagagagacacagaactaaagacagcagagagacaaggatgaattaatgtgataaatgctatgatagagttatgagcaaagggtccggggacgggagggattcctaacctgactgatgtggtagagtgtggaggcaagaagtgcttctagaagtgatcacatatgatgagctttgaatccatatagtcatgtaagtctccttccgttgcccatgcaaaatgttgtgccaagattaaatcttgaaataaccctgatgaagttttagagatttctaaattcaagttttctagcacttaagtgattgagccctgtcagtgactaytttgagctattatatgtattacataaagattcagcatcattaatagttatatttgacttgatttaatgaaaaattatgtgcag

SEQ ID NO: 536418 - DNA, 559 bp, Homo sapiens
cttgttgaacctgccagaattttttccatttatatattagatactcactactgttaatgttagttatttagtttcctctgtaatctacatgcaaataatatcaatcaaaaccagaaaaaatatatagtccttttcttcactaaactaaagacagcagagagacacagaactaaagacagcagagagacaaggatgaattaatgtgataaatgctatgatagagttatgagcaaagggtccggggacgggagggattcctaacctgactgatgtggtagagtgtggaggcaagaagtgcttctagaagtgatcacatatgatgagctttgaatccatatagtcatgtaagtctccttccgttgcccatgcaaaatgttgtgccaagattaaatcttgaaataaccctgatgaagttttagagatttctaaattcaagttttctagcacttaagtgattgagccctgtcagtgactactttgagctattatatgtattacataaagattcagcatcattaatagttatatttgactygatttaatgaaaaattatgtgcag

SEQ ID NO: 536419 - DNA, 552 bp, Homo sapiens
aaatacatctgagaaccatttgtctgctattttaaatgtgtgatcaagtagtctagattacctaaggatagacartctacatttcagagactggtatcagtagcctctaaaacattgttaactagttctcttcaggcctcgacatgatctttggccttagaaggaatactaaaaagattaaccttttttttctagttagttgcaactaggtaaatataaaatcaaaattctttcataaacaacatgtcattatctcataaataaaatgtcttttcaaaaaaagtaataaaagagaaataaggatatattttagttgatatatatagagtaccttcccttccagtcatttattttccttgaatacagaactaaatcagttagcattcatgaaacttttactatgctcatagaattttccttgccttggtgttatgttgtataatgaatacattggtttgagatttcagtttttacatttatacattatttttcactagaatttaggtaaaaactatgaaaaaggcacatactaaatttaaattcctgagaaat

SEQ ID NO: 536420 - DNA, 552 bp, Homo sapiens
aaatacatctgagaaccatttgtctgctattttaaatgtgtgatcaagtagtctagattacctaaggatagacagtctacatttcagagactggtatcagtagcctctaaaacattgttaactagttctcttcaggcctcgacatgatctttggccttagaaggaatactaaaaagattaaccttttttttctagttagttgcaactaggtaaatataaaatcaaaattctttcataaacaacatgtcattatctcataaataaaatgtcttttcaaaaaaagtaataaaagagaaataaggatatattttagttgatatatatagagtaccttcccttccagtcatttattttccttgaatacagaactaaatcagttagcattcatgaaayttttactatgctcatagaattttccttgccttggtgttatgttgtataatgaatacattggtttgagatttcagtttttacatttatacattatttttcactagaatttaggtaaaaactatgaaaaaggcacatactaaatttaaattcctgagaaat

SEQ ID NO: 536421 - DNA, 539 bp, Homo sapiens
ctttaccctgccataagtcacagttttgtcctggttgtgataatgttctttttctgactgtccatcaaaggaaaaagaaaaagagtggcaattacttactttcatctcttgatttttatgctatgctataaccaccaaaaataaaaaaggaaaggagaaagaactaaagaaaggagtaataaagacatcagttattacatgaaaaaggaatcaaagaaaaatatttatatayggatattttatgtgattagtctctttgcataatttggtgaagttagatacataatcaaaactatccattacagaaattatcttcctttttttactgagactataaacttgttttatatgatattgtaacagagtttctttattgttttatatgatgatataacagagttacttggttgtatataagcaaagactttgttaaaaaaaaaaaaagtgccaattccaggcacagtggttcacactcatgcctgtaattccagaatcttgggagaccaaggcaggaagataacttgagccaggagttcgag

SEQ ID NO: 536422 - DNA, 415 bp, Homo sapiens
gctggaggagcctgttgatctggtggagcagtggccatcccagggttccctggcatctgcggagagggtgagtgacmaccttaggtgccagcactagggcacacagaggtaagggacaaggaagcctgctgcccttggaagcagcactgtggttggaagagaggcacggctctaacagagagaactgggttgtagtccagacaccttaattcttccatgtgcctgacatgactgggagtcacccaaaattagcacgtgggcaccactctgggtgccagtctctgcagcatcctcttgacctggcagggtgggggggtcagagagcctccaaaaaaggcagaaacaggaaccctgggtgccctgcttggttccagacaataggatagacctccaacattttgaggagaggtcacca

SEQ ID NO: 536423 - DNA, 389 bp, Homo sapiens
ctgttgatctggtggagcagtggccatcccagggttccctggcatctgcggagagggtgagtgaccaccttaggtgccagcactagggcacacagaggtaagggacaaggaagcctgctgcccttggaagcagcactgtggttggaagagaggcacggctctaacagagagaactgggttgtagtccagacaccttaattcttccatgtgcctgacatgactgggagtcacccaaaattagcacgtgggcaccactctgggtgccagtctctgcagcatcctcttgacctggmagggtgggggggtcagagagcctccaaaaaaggcagaaacaggaaccctgggtgccctgcttggttccagacaataggatagacctccaacatttt

SEQ ID NO: 536424 - DNA, 487 bp, Homo sapiens
ctgttgatctggtggagcagtggccatcccagggttccctggcatctgcggagagggtgagtgaccaccttaggtgccagcactagggcacacagaggtaagggacaaggaagcctgctgcccttggaagcagcactgtggttggaagagaggcacggctctaacagagagaactgggttgtagtccagacaccttaattcttccatgtgcctgacatgactgggagtcacccaaaattagcacgtgggcaccactctgggtgccagtctctgcagcatcctcttgacctggcagggtgggggggtcagagagcctccaaaaaaggcagaaacaggaaccctgggtgccctgcttggttccagacaatrggatagacctccaacattttgaggagaggtcaccaaaatgggtggaggaatgggggttatggatgttgagtcagagcagggtcctcctgcttggatctaaggacagtatgcatgaaat

SEQ ID NO: 536425 - DNA, 298 bp, Homo sapiens
tgatctgggtaacccctcaagcaaacaagcttggcatgaaggtcaagccaagcagggacacagacacgcaaacacacacacatgcatcaaagtaatcaatgcaggtaaaatgagaacattattgaactatatcatactttaccgttcagaattaacaacaamaaaaaaaacacataaactggtttctgcttctgctgataaggagtttggaagtttccagtctgttctaacaatgagaacaaagctaaaaagactgaaaaatcaactctttttggattcaaaagagaagtaagagcac

SEQ ID NO: 536426 - DNA, 621 bp, Homo sapiens
ttttttttgagacggagtctcgctctgtcacccaggctagagtgcagtggtgcaatctcagctcactgctagattagtatttttaaaaataaaaggtatttaaatatatatatatatttagatttaatttacattaatatttacatttttaaatgtattyatttaaaacaacaaaaatctaaattctaaaaatatgaatgacataaccacatgtacaatatgacatggtacatcattattttaaagagcctggcacagtaccttgtaatcaagcacattaatatttctgtatagtaaaacatacaaatattcccaccaaatgggatggatagacaaataaataatgctttattttaatacaaattaggttttactgctaaaggggttaaaaaaatacttttcagagtctttgtgatatcaaaataattgatgagggatgatgacttgtctatatgtatttgtttattcgttcatagtctgtgaccacactagcctataactttcatcagggcagggaccagcctatttgttcatcacgtacctggctctgttcctggttatgacaggcattcaaaagacatttattagatgaatgattaattttttccccaaatgagtctt

SEQ ID NO: 536427 - DNA, 621 bp, Homo sapiens
ttttttttgagacggagtctcgctctgtcacccaggctagagtgcagtggtgcaatctcagctcactgctagattagtatttttaaaaataaaaggtatttaaatatatatatatatttagatttaatttacattaatatttacatttttaaatgtattcatttaaaacaacaaaaatctaaattcyaaaaatatgaatgacataaccacatgtacaatatgacatggtacatcattattttaaagagcctggcacagtaccttgtaatcaagcacattaatatttctgtatagtaaaacatacaaatattcccaccaaatgggatggatagacaaataaataatgctttattttaatacaaattaggttttactgctaaaggggttaaaaaaatacttttcagagtctttgtgatatcaaaataattgatgagggatgatgacttgtctatatgtatttgtttattcgttcatagtctgtgaccacactagcctataactttcatcagggcagggaccagcctatttgttcatcacgtacctggctctgttcctggttatgacaggcattcaaaagacatttattagatgaatgattaattttttccccaaatgagtctt

SEQ ID NO: 536428 - DNA, 541 bp, Homo sapiens
ctcagaagtagtgttactgctgtgatgtgggaaaaatctggcaatgattttgtgggctggtgatgtttccagcatggttgattccccataggactgccatgttgaaaaactttaatgtgttgtattactaatctttcaaatgcagaagagagttaagacactgaccacaaacttccttatagtcaccttaagttttgcacatatcaaatttactatttgctttttctccttttggcacactttcctgtatggtgtccatctttggaaactagtgaaattctagtccaatgtgtaytctcaaaggataattcatgaaccaagtgtgtgagataggcatgaaaaaaaatcgtgttaaataattttggaagtgctgcagttcatagtgtggtgttacacagtatggtagtatattcagagtatactaaggactcatgcatactgaagcatttttaaaaattaattgatcttttgttgaatttcaaatttctcaaaagtatttgccatgaaacccttatttgcataagacccattgatatcctgt

SEQ ID NO: 536429 - DNA, 572 bp, Homo sapiens
tgatgatgggagtaaaattgatacatttctgaaaagtaatttggtaattcagataaaaacctacaataaacactgagattctaactattttgaaagccctaccccgaatacttatttcgtagctatagcatcaaatccaaaatctagaatcatctaaagatattagtcatgtaatatcaaattactcaaagtcgtagtctaaaatgctttgataacaatatctctcaacyttcaagaaacgtgaacatagcttttacttgaattagaatatgtaggttatagtacattgcctaaagaaaaaaatttagtctaaatttagtctaaatgagactaaaaaaaaatttaatctcattatcttatagtcactctagatgtaaacctcaaaactctttccttctgattgtgccaccataaccagcctccaaaggtggaaatgatttcatcatcaccagcttagcacactatcctggacaggccatttctaagcccattagaaacatacacttgccaaaggcagatataattttccacactttcatagtggatacaggtaggaccagatttgaagttgg

SEQ ID NO: 536430 - DNA, 253 bp, Homo sapiens
gctatctaatagctgacagatcactggatccagaggcagatctgctggagaccagcctgggaacctccgggcctcccttgtcagccmtctgacgggcacttctgtcatcttaacatggggttgacagttccttgcaggtccacacgagagcaccaaaggacccagggcagcaggcaacatctgctagttagtgctgacccagtggctcctgcaggccaggcaccaagggagctgggtctggaggagctgctgc

SEQ ID NO: 536431 - DNA, 609 bp, Homo sapiens
cgttgggtaaaacagtgctgtcaccaactgctatgtgaataaaccaatgcttctcaaaatgtggtcctcacaccccracaccagcagcctcagcatcacctggccacttactaaaaatacagatttgggccaggtgcagtggctcacacctgtaatcccagcactttgggaggctgaggtgggaggatcatgaggcctggccaatgtggtgaaaccccttctctattaaaaatacaaaaaattagccaggcgtggtggcaggcacctgtaatcccagctactcaggagtctgaggcaggagaattgcttaaacccaggaaaaggaggttgcagtgagccgagactgcaccactgcactccagcctgggcaacagagcgagactccatcaaaaaaaaaaaaaaaaacaattgggggaccatcagacactcttggaagtgcagcccagcaatctgtttttaacagaagcctccaggagattctgatactggctgaagtgtgagaaccactgacctgtcaaaggaccagcagcatgtccaccttccaccagcatagtgcctgtggatagcaaaggttcaataaatacttgttaaataaacgaacaggcaaac

SEQ ID NO: 536432 - DNA, 609 bp, Homo sapiens
cgttgggtaaaacagtgctgtcaccaactgctatgtgaataaaccaatgcttctcaaaatgtggtcctcacaccccaacaccagcagcctcagcatcacctggccacttactaaaaatacagatttgggccaggtgcagtggctcacacctgtaatcccagcactttgggaggctgaggtgggaggatcatgaggcctggccaatgtggtgaaaccccttctctattaaaaatacaaaaaattagccrggcgtggtggcaggcacctgtaatcccagctactcaggagtctgaggcaggagaattgcttaaacccaggaaaaggaggttgcagtgagccgagactgcaccactgcactccagcctgggcaacagagcgagactccatcaaaaaaaaaaaaaaaaacaattgggggaccatcagacactcttggaagtgcagcccagcaatctgtttttaacagaagcctccaggagattctgatactggctgaagtgtgagaaccactgacctgtcaaaggaccagcagcatgtccaccttccaccagcatagtgcctgtggatagcaaaggttcaataaatacttgttaaataaacgaacaggcaaac

SEQ ID NO: 536433 - DNA, 609 bp, Homo sapiens
cgttgggtaaaacagtgctgtcaccaactgctatgtgaataaaccaatgcttctcaaaatgtggtcctcacaccccaacaccagcagcctcagcatcacctggccacttactaaaaatacagatttgggccaggtgcagtggctcacacctgtaatcccagcactttgggaggctgaggtgggaggatcatgaggcctggccaatgtggtgaaaccccttctctattaaaaatacaaaaaattagccaggcgtggtggcaggcacctgtaatcccagctactcaggagtctgaggcaggagaattgcttaaacccaggaaaaggaggttgcagtgagccgagactgcaccactgcactccagcctgggcaacagagcgagactccatcaaaaaaaaaaaaaaaaacaattgggggaccatcagacactcttggaagtgcagcccagcaatctgtttttaacagaagcctccaggagattctgatactggctgaagtgtgagaaccactgacctgtcaaaggaccagcagcatgtccaccttccaccagcatagtgcctrtggatagcaaaggttcaataaatacttgttaaataaacgaacaggcaaac

SEQ ID NO: 536434 - DNA, 609 bp, Homo sapiens
tttttacgaccttgggtatgactgcacgtctgtgtcgtctctaaaattgaggtaatacctagtttacagaattaaaggagtgaaacacttacacatacgttaatttttcttaaatacgtattttaccctgttttaaactctcaatattcagtaggtatgataatattccatttgatctttaaaccaaggtaagaaaaacacaccaggcccaggttcagtggctcatgcctgtaatctcaacactttaggaggccaaggtgggaggatcatctgagcctacgcgttcgagactagcctgggcaacatagtgagaccccawctccacaaaaaataaaaagcaacaacaaaaaaagaaaagttcactaactgataaactaaagcacaatgtaagaattctgtttcttttctcttttagagacagggtcttgctctgtcgccctaggctggagtgcagtggtgagattacagctcacgcatcctcagcctcctgggctcaagtgatcctcccacctcagcctcctgagtgactgggaccacaggcacgtgccaccatgcacggctaatttgtttatttttttgtagagacagggtctccctaggttgctccag

SEQ ID NO: 536435 - DNA, 609 bp, Homo sapiens
tttttacgaccttgggtatgactgcacgtctgtgtcgtctctaaaattgaggtaatacctagtttacagaattaaaggagtgaaacacttacacatacgttaatttttcttaaatacgtattttaccctgttttaaactctcaatattcagtaggtatgataatattccatttgatctttaaaccaaggtaagaaaaacacaccaggcccaggttcagtggctcatgcctgtaatctcaacactttaggaggccaaggtgggaggatcatctgagcctacgcgttcgagactagcctgggcaacatagtgagaccccatctccacaaaaaataaaaagcaacaacaaaaaaagaaaagttcactaactgataaactaaagcacaatgtaagaattctgtttcttttctcttttagagacagggtcttgctctgtcgccctaggctggagtgcagtggtgagattacagctcaygcatcctcagcctcctgggctcaagtgatcctcccacctcagcctcctgagtgactgggaccacaggcacgtgccaccatgcacggctaatttgtttatttttttgtagagacagggtctccctaggttgctccag

SEQ ID NO: 536436 - DNA, 587 bp, Homo sapiens
tgttatttgcatgcacaaaaaacagtttgggagtcatgatacaagccataattaaacttgattatcaattagaacctctgttgttaaatgtgttacatttctttgccttaaawagaaaaatgggcctttatttctgtcaactgttatcatttccctacttatttttcttcattctgctttaattgtgcatatcttgccataactgaggcataattctcttgtagtctccccacctagtttgtggttttctcttgctacgcaaaatgtgttctaggtatcagcagtatggacatgttgttggaggcttgttgctccacccctgatgtactgtatcaaatctttattctaactgcatctctaggtgatccttgtatttggaagcactggtttagtgttttgtatttacctactgaaactgctctagggagcatgactcttctgaaaaaggtggttggctacaacaagggatcttgttggtgatccagtcttgccatttattcttaagtttggtattaggaatctggtgaagcaaagagttattctaaaatacatcatctgagtgtacagaatacagtttatcagaaagc

SEQ ID NO: 536437 - DNA, 209 bp, Homo sapiens
gcattttaccatgtggaaaaaacatgttataagtgatgattaggtccccagctggcatataagaatctatttaactcttgtgtaactacaaaacgatacatttgtaataartttaaaagagaatgatagttgtgattctgattatgaagaaaaataatttttttttttttttttttttttttttactgaggataagcagatttaattag

SEQ ID NO: 536438 - DNA, 589 bp, Homo sapiens
aatatcatctttgcttctaactgtgttgactgaaatatagtactttagtcaccaacaatttcatgctgataaccagaattttaggcaaaaccacaaatttgtttcatatatcaagtgtacggttttcttaatcctatgcatgtatatacataagcttcacaacctgtccattttattrctttttaaagtggctttgaaaaggcttgttgactaagtaggtgttaatttgatctccttttgtaaacaaaactagcattggttgaagttgtttcacacttgcatgtcatccccaaacagtagtttttaattcagaataaagtaacctaaagggcatcctgtaacatgacgccatttaggggaaatttcaccctgtattcaaactgattcctagtttaagtggataattatttagcttttgtaactttccctgtccctcaagatcaccttagtgcagtcctttccagttgtgaacgattgtgaaccaatttaaactgtagtccttctgcttgtctctatctctgcagatcagatctcatccccagtttggtgatctctgccagaggaccactgctgcctcctgctgccccag

SEQ ID NO: 536439 - DNA, 543 bp, Homo sapiens
cattctctcttctggttacctaacaacaaggtcctattggacatattggacatttgcagtatcttaagagcttatttttgtagttaaattaaattaatgctataattgaacaaatcatgttcacacatttcaaatacaagaaatgactacttacatctctaatatttcaatcaatttcactattattttctaagcccaccacaccttccctctgggacattttttcctactgagtgcaccatttagtatttcttttagaaaggttatgtgaatggtaaatactcttatactcttattccacatatgttaaaatgtcttaattttgccctcatcccttttcgtttgtttgttttttggagacagggtcttactccgacccccaggctggagtgccatagtgcaatcatggcttactgtagcctcgacttctccagctcgggtgattcttccacctcagcctcttgagtagctgggactacaggtacacaccaccatatctgctattttmtgtatttttttatagagacagggttttgccatgtt

SEQ ID NO: 536440 - DNA, 567 bp, Homo sapiens
cacagcctagaggacatgaatataagtatgtaagccattgattagccatagtgattaggattgaggaattgtggatagtataatttttaattaagtgaatattaacattaaagctcttttgatttcagcttttgctgttggtgttgaaaatccctcttaaatgtattttttcctgtcttattagaacactagatgacctgattggatctttgatgtttctggagtttaccaagtctcagggtctttattttgatcacttactctgtatagtaatagatagtaggagatgaggcagaaccttatactgatcccaggaagcaatacatgtttccttttctgtctcttctcttaaaaaacattagraaattgaactctggttacttgcatgttctggctggtttatttctctcaatcaaagtattagtatatattattgcttaaccaacatctgttagttatgatcttaaccaggaaaaacattacatttcaatagtcaacagtaaatgctgtctcataagtagattctgccttgactaaagccattaccagctctatgtaaatgaaatg

SEQ ID NO: 536441 - DNA, 638 bp, Homo sapiens
ttactttataatctcaccttggatgagtacagttcattaatttctattccttcttgtcctcattcttctacctttggttgatcttcagaccttccctttcctgaagactctgaagtgattgaattcactcagttaattaatagctgatatttagtgagtatttaccatgtgccaggaagtgttctaaatactttaatacattatttcatttaatcccaatgacagtgttgtgaattaaatactaaatagcccatttttcagttgaggaaagttcacatctktggtcaggggcacttccaggattggaacccagccaagttgaactccagcgtctgcctttacccaccctgctttatgcttctagtgaggaagatacctcccccgttttgtttcctgtatatgccatttcccacacaaatgaagcttaaaaagtcactgtggtctggaataagtatccttttttttcttaaagagctagcaatttattccatgagtacatgttagactctgagactcaaaagccagtaagcaatagtacgccatggtggctttcataaataaaagtagtatagtctctcatctctcctctctctctgtctctctctctctctctatatatatatatatatttgtaaact

SEQ ID NO: 536442 - DNA, 638 bp, Homo sapiens
ttactttataatctcaccttggatgagtacagttcattaatttctattccttcttgtcctcattcttctacctttggttgatcttcagaccttccctttcctgaagactctgaagtgattgaattcactcagttaattaatagctgatatttagtgagtatttaccatgtgccaggaagtgttctaaatactttaatacattatttcatttaatcccaatgacagtgttgtgaattaaatactaaatagcccatttttcagttgaggaaagttcacatctttggtcaggggcacttccaggattggaacccagccaagttgaactccagcgtctgcctttacccaccctgctttatgcttctagtgaggaagatacctcccccgttttgtttcctgtatatgccatttcccacacaaatgaagcttaaaaagtcactgtggtctggaataagtatccttttttttcttaaagagctagcaatttattccatgagtacatgttagactctgagactcaaaagccagtaagcaatagtacgccatggtggctttcataaataaaagtagtatagtctctcatctctcctctctctctgtctctctctctctctmtatatatatatatatatttgtaaact

SEQ ID NO: 536443 - DNA, 602 bp, Homo sapiens
  misc_feature (1)...(602): n = A,T,C or G
tccttttttttcttaaagagctagcaatttattccatgagtacatgttagactctgagactcaaaagccagtaagcaatagtacgccatggtggctttcataaataaaagtagtatagtctctcatctctcctctctctctgtctctctctctctctctmtatatatatatatatttgtaaactacctcaacatgatttatatagatagatagatgataaaaatcatcatgttgaggtagtttacagaaaagcatatgcaaaggatgagataaataagttgaatgaaatacatgaagggaaaacaatgggaggaaaataataaagctaaggatgagatttatactaatgcacaccccacaatcttgtacatttgctgatgggagctgcaaacttatctgtaacctcccagcagccagagcaaaaaggattcacaatcagtaacaaaagtcatataaatagggtaacaagtttgttttttagaagcccagcttttcctcctgctaagacgggaggagacagttcccccatatcttcataaaagaagtgtgacactgtgtacaaaatttttaacagcggcttagaagannnnnnnnnnnnnnnn

SEQ ID NO: 536444 - DNA, 436 bp, Homo sapiens
ttatagtcatttatcactgtgagaataggcactgcaaatactattatgaatatgagaccattatccttcccttcctcctcccatccccagagatatggtgagagatcttrtaaaacttagtttttggcaatgtcaaaaggtgtaaataagttaagatcataggccaggtgtggtggctcacacctataatcccagcaatctgagaggccaaggcaggaggatctcttgagcccaagaagttcgagaccagcctgggcaacacagcatgacctcatctctactaaaaattaaaattaaaataattagccggggacggtagcctgcccctgtagtaccaggtattcaggaagctgaggcaggaggattggttgagcccaggagtttgaggctgcagtgagccatgattgtaccactgcagtccagcttggttgtcaga

SEQ ID NO: 536445 - DNA, 472 bp, Homo sapiens
cttcctcctcccatccccagagatatggtgagagatcttgtaaaacttagtttttggcaatgtcaaaaggtgtaaataagttaagatcataggccaggtgtggtggctcacacctataatcccagcaatctgagaggccaaggcaggaggatctcttgagcccaagaagttcgagaccagcctgggcaacacagcatgacctcatctctactaaaaattaaaattaaaataattagccggggacggtagcctgcccctgtagtaccaggtattcaggaagctgaggcargaggattggttgagcccaggagtttgaggctgcagtgagccatgattgtaccactgcagtccagcttggttgtcagagcaagactctgtcattcattcattcattaaaaaggaaggaaggaaagggaaaaaaagatcataataacaatgactgagcatttttcatatgctcctggctttctaa

SEQ ID NO: 536446 - DNA, 536 bp, Homo sapiens
atttaatgcattttttacatggtataattttatttygctcatacaatgtgaggtgagtaataatgatattcgaatattaagtgcaaaatatacatattgatgaataatagccatgtttttcagacctccttgccaagtcatattaaaatgacaaataattgcaattgcttaacagagaaatggtgcagaatctgtagtcaaaagcacattagggaccaagagtatccatttgttatcctttgtcaggaaaacatggctcctaatgaaagtgaatgtagaaatactgattgaggaccgcgacactaaacctttttcttgacaagagtcatgatgtgggtattaataagaggattgaaaggtgaagtcaaagctttgattcttaaaatgtgtataacctggatttgttttttgtttgatttctttaaaattaagacctgttaattttgagggatgggggggatcatggctgtgggggaagaaagtacagaataaaacgtggtagagacatcccagtgatattccacaatcggtgtgtt

SEQ ID NO: 536447 - DNA, 529 bp, Homo sapiens
agatggagtctcactctgtcactcaggctggtgtacaatgttgagatctcagctcattgcaacctccacctcccatgttcaagcaattctcctgcctcagcctcstgagtagctgggattacaggtgcctgccaccacagctggctaatttttgtagttttagaagagacggggtttcatcatgttggtcagactggtctcaaactcctgacctcaggtgatccacccacctcggcctcccaaagtgctgggattacaggcatgagccaccgcgcctggccaaaaatgtggatattaataccagtctctgataggttaactaagacaactataggacaatacctgtcatatggtttatatgcaatacatattcactcagttcttcaactttaacagttatgttgaagctctgtcagcttcttctcaataatttttagtcaaaatataagatggtgcattaaaagcatttctacatcattcttctctgtgaatccaacgtgcaaacaataataagaacagcaaataaaat

SEQ ID NO: 536448 - DNA, 529 bp, Homo sapiens
agatggagtctcactctgtcactcaggctggtgtacaatgttgagatctcagctcattgcaacctccacctcccatgttcaagcaattctcctgcctcagcctcgtgagtagctgggattacaggtgcctgccaccacasctggctaatttttgtagttttagaagagacggggtttcatcatgttggtcagactggtctcaaactcctgacctcaggtgatccacccacctcggcctcccaaagtgctgggattacaggcatgagccaccgcgcctggccaaaaatgtggatattaataccagtctctgataggttaactaagacaactataggacaatacctgtcatatggtttatatgcaatacatattcactcagttcttcaactttaacagttatgttgaagctctgtcagcttcttctcaataatttttagtcaaaatataagatggtgcattaaaagcatttctacatcattcttctctgtgaatccaacgtgcaaacaataataagaacagcaaataaaat

SEQ ID NO: 536449 - DNA, 662 bp, Homo sapiens
cataggatacggagccataattaatctcagtccctgagttctagaagacttagagcaattataatttactgtcggaaaaccaatttggggaagcggtggtgttcgccccctgatcaggacgccaccaaatgccacttcccgtccacatgctgcctgccgggggagcaagacctttagtctctgcacctctgggaggtgtcagagtggagaagacaggaggaaagaagagggagtgggtgtcggcacaggctggcctgaccactgccaggcactgcctctttgctggctttgtcaccctgctgtggacacctcttctctttcaatttagttcaatttcacagtcaccctccacatcctttccatgtcccaggcagcgtttggcttcagcagatgccaaggccggtgttccctcttctgcccttactcctttcccrggccactgtcaaacttccagctccacagacagacgttgccttttttcactttatttcttttctgctcaaggtcagattgtcatatcatcgaaatgacttcgagaggactgggtccgatggactcaccaggcatggttccaattatcattcaagggacaagagtgaaatgccatggttcaaatgaaaacactcacatccacacagggtcaggtgcacacactgctggac

SEQ ID NO: 536450 - DNA, 592 bp, Homo sapiens
aaacaagtcatggtatacccataccataaaatataactctgcaataaaaaggaatgaatgattgatatatacaaagacatgggtgaatctccaaaaattatgctaagcaaaaagaaggcacacaaaaaagcacatgctgtgtgattccattgatatgaaactgtagaaaatgtgaactgatctacagtgatataaagcacatcattggtttcctggggaccgggtcaaggggcaggagggaggaatgaaaacagggaatgaagaatctttggggtgatgaatgtgtttgttawcttgatggcagcaatggtttcatggcttaaacttacatcaaagtttatcatattttacatttaaaatatgacatatagtttattggagccaattaaacttcaataaagcagttaaagaagaagagttcatggataagacaaatgtagctgctgctcgtccaatatttcttccccgtttctttagctcaagggaacccaaattttgtttcgggtggcagtgcaaatggatcataactggtctaagccacttatgatcatcccattatccacactgcctgtctcctttgcagctgggactg

SEQ ID NO: 536451 - DNA, 218 bp, Homo sapiens
gttgctggtaaccaagaagcctgtccgacaccctgcatccctccctccagatgcaaactctcagaaaagaggttggggcacgtgcctgctccctggggaggaccaggagacrtggggagctggatttggccttttggcttttgtaatgggaggcaggagcctagaatcctcctctaccaagaacacacacaatgggaaagaggcaaattctgaaagga

SEQ ID NO: 536452 - DNA, 614 bp, Homo sapiens
gattgatagaacggtggaacggtcttttgaaatcacaatgacaatgccaagaaggtgacaatacttgcagggctgggacaamgttctccagaagcccatgtatgttctgaatcagcatccaatatatggtactgtttctcccatagccaggattcatggatccaaaaatcaagtgttggcatgagccacataaggagaccccacggaagcaaagtatacgtttgataagaaatgcaccactatggaattttccacctgttgtacatgaattatttctctatcagaacaactccaataagggagattatttctcagtacaagggatcctccctgatatggcttggctgtgtccccacccaaatttcatcttgaattcccatgtgttgtgacaggaacccagtgggaggtaactgaataatggggacaggtctttcccatggtgttcaggtgatagtgaataagtaccatgagatccgatggttttaaaggagaagtttccctgcacaagctctctctttgcctgctgccctgaatgtaagacatgacatgctcctccttgccttctgctatgattgtgaggcttccccagccacatgaaactgcaagtccattaa

SEQ ID NO: 536453 - DNA, 614 bp, Homo sapiens
gattgatagaacggtggaacggtcttttgaaatcacaatgacaatgccaagaaggtgacaatacttgcagggctgggacaacgttctccagaagcccatgtatgttctgaatcagcatccaatatatggtactgtttctcccatagccaggattcatggatccaaaaatcaagtgttggcatgagccacataaggagaccccacggaagcaaagtatacgtttgataagaaatgcaccactatggaattttccacctgttgtacatgaattatttctctatcagaacaactccaataagggagattatttctcagtacaagggatcctccctgatatggcttggctgtgtccccacccaaatttcatcttgaattcccatgtgttgtgacaggaacccagtgggaggtaactgaataatggggacaggtctttcccatggtgttcaggtgatagtgaataagtaccatgagatccgatggttttaaagkagaagtttccctgcacaagctctctctttgcctgctgccctgaatgtaagacatgacatgctcctccttgccttctgctatgattgtgaggcttccccagccacatgaaactgcaagtccattaa

SEQ ID NO: 536454 - DNA, 585 bp, Homo sapiens
tagaaatagaacagagttcacgtcccagctccaccattctctgatatgacactgaaaatcaatgcccttctctgagcctcagtgttgtcatttgtaaaaattagggattgatgtgatattacggtggggaaatgaatgtgtaaataaagctctgagatctttatttctatttaaagaggaggaagaaaaaaattatatatatataaacttttagtctgtctctacttttcccctsccttgtttgtgaaactgtctctttaacgacattcaacacaatggtaagtaacttatgttacttaagaaatgctggttgctataacaaacaaactctgaaacctcaagaagcttaaccaaatatgaattcatttcttactgaagcaaaatgcaacgtgcatgctccaggtcaatggatggccttccatgtagcatcaccctgccctgcagcctcagaaccttctgccaggtcctttgcatcttgccagtggacagcagaagacaagatggaggattgtgggggaggttttaatgcagtaagcttggaggtcaacaagaggacacatggcttctgaccatgttctgtagtca

SEQ ID NO: 536455 - DNA, 762 bp, Homo sapiens
tggccgggggtctggaagggaaaaaattggaagatcaaaagcaaggaatttgtgattcagtcacatggatgaacatatgggattgaacacgaaatctgaagattttttaaaatgtgtttgttgataccaaccagacaaaattatttatccacttaatgccagctagtttctgtcaytgaccatctcagtgctggcataatgggacatgaacttagtgaccacagtggcagaaatgggggcccaacagcatgcactccacttatcaagtttgatttagcaattgttgcaatcaaatatccaatgcaccagcaacagagaccatcactgagctcccaatacggtgccattcctcaaggacataaactggccacttggtggcaagctgcatacgttggatcctttcatcctgagagggccaatggttctttcccattggaatagacaatttactcatatataggttttactttcttgcccataaggtctaatccacatgactatctgagtaaggaatgcttgctccaatggcatgggattccacaaatttcaaatcagaccagtagattcacacgacagcaaaagaggtataggagtggtcccaggacccactgctgggatcctcctggacttataccacggtacccaggagctaccagcctgatagagtgctggaatggcctgccaaaggcataactgccagccccatacataataatttataatgatgggttgccatccttcagggtgtagcatacagaaatg

SEQ ID NO: 536456 - DNA, 762 bp, Homo sapiens
tggccgggggtctggaagggaaaaaattggaagatcaaaagcaaggaatttgtgattcagtcacatggatgaacatatgggattgaacacgaaatctgaagattttttaaaatgtgtttgttgataccaaccagacaaaattatttatccacttaatgccagctagtttctgtcactgaccatctcagtgctggcataatgggacatgaacttagtgaccacagtggcagaaatsggggcccaacagcatgcactccacttatcaagtttgatttagcaattgttgcaatcaaatatccaatgcaccagcaacagagaccatcactgagctcccaatacggtgccattcctcaaggacataaactggccacttggtggcaagctgcatacgttggatcctttcatcctgagagggccaatggttctttcccattggaatagacaatttactcatatataggttttactttcttgcccataaggtctaatccacatgactatctgagtaaggaatgcttgctccaatggcatgggattccacaaatttcaaatcagaccagtagattcacacgacagcaaaagaggtataggagtggtcccaggacccactgctgggatcctcctggacttataccacggtacccaggagctaccagcctgatagagtgctggaatggcctgccaaaggcataactgccagccccatacataataatttataatgatgggttgccatccttcagggtgtagcatacagaaatg

SEQ ID NO: 536457 - DNA, 631 bp, Homo sapiens
aaaaaagtcacacaaggattcatagagaataatacccattatggccaggcatagtggctcaggcctgtaatcccagcactttgggaggccaaggcaggtggattgcttgagcctaggagttcgagacaagcctgggcagcatggcaacacccatctctacmaaaatagaaaaactagccaggcatggtgacgcaatcctgtagttccagaaactcaggaagctgaggtgggaagatcacctgagccttgggaggttgaggttgcagtgagccatggttgcaccactgcactccagcctgagcaacagagtgaaaccctgccttaaaaaaaaaaaaaaagacagagagataataataccagttatgtgaaattttgaaaggcacaatatagcactatacatgtatattttaagaataaacgtgtggaagtaaaaaacgtatgcactagaatgacatatgtcaacttcaggacagtatttacccctggggaggagggaattcggaggagtgttctagggcttcagttacatttgtaatgcaatattttcttataagaaaaatgatttgaagctcatatgtagacaaaaaatattaaatttgggtggtaggtacactggtgtctgtatactgtt

SEQ ID NO: 536458 - DNA, 503 bp, Homo sapiens
gtgtcacagccaggacgttaactcagtaattctgacttggtgcttttttctatataccaaacatattagagctaagaaaaacataatgttcctcaccacatgcaaattaggatagggtaaagtacttgctaatcatcaaggtacagacccatgagaggcaagattgatatccaaagagaaaacacatttgttcacacaggaagagtttccactgctaggagttttccaaatcctgcaatgtcragtagctccctggttgtcagcagagtggacatcgatggtcagtgccaccctggctttacaggcaggagtaggagaaatgggctctagccctacaaagttcaatgtggcttctccagttcaagtttcaatagccatcaattaagggttgcagacaaacctactgtttcctttactagttgacctattaaagaaatgtgtgaagacaactgtttttgtttttccttgcagacagaatagccccagtgatcctaaactgtgta

SEQ ID NO: 536459 - DNA, 636 bp, Homo sapiens
ctggtaagtgtcacagccaggacgttaactcagtaattctgacttggtgcttttttctatataccaaacatattagagctaagaaaaacataatgttcctcaccacatgcaaattaggatagggtaaagtacttgctaatcatcaaggtacagacccatgagaggcaagattgatatccaaagagaaaacacatttgttcacacaggaagagtttccactgctaggagttttccaaatcctgcaatgtcgagtagctccctggttgtcagcagagtggacatcgatggtcagtgccaccctggctttacaggcaggagtaggagaaatgggctctagccctacaaagttcaatgtggcttctccagttcaagtttcaatagccatcaattaagggttgcagacaaacctactgtttcctttactagttgacctattaaagaaatgtgtgaagacaamtgtttttgtttttccttgcagacagaatagccccagtgatcctaaactgtgtacccacaggtcttttagttatgtgcatggtgtttttaaaggtgaagttactgagttttgcgtttagtttggaaacagtgccacccatttaatccctactgcctcacatctggtgctgtcactcctgt

SEQ ID NO: 536460 - DNA, 636 bp, Homo sapiens
ctggtaagtgtcacagccaggacgttaactcagtaattctgacttggtgcttttttctatataccaaacatattagagctaagaaaaacataatgttcctcaccacatgcaaattaggatagggtaaagtacttgctaatcatcaaggtacagacccatgagaggcaagattgatatccaaagagaaaacacatttgttcacacaggaagagtttccactgctaggagttttccaaatcctgcaatgtcgagtagctccctggttgtcagcagagtggacatcgatggtcagtgccaccctggctttacaggcaggagtaggagaaatgggctctagccctacaaagttcaatgtggcttctccagttcaagtttcaatagccatcaattaagggttgcagacaaacctactgtttcctttactagttgacctattaaagaaatgtgtgaagacaactgtttttgtttttccttgcagacagaatagccccagtgatcctaaactgtgtacccacaggtcttttagttatgtgcatggtgtttttaaaggtgaagttactgagttttgcgtttagtttggaaacagtgccacscatttaatccctactgcctcacatctggtgctgtcactcctgt

SEQ ID NO: 536461 - DNA, 662 bp, Homo sapiens
caacctgtgggccaaattctgcttgctgtctgttttttaaaaataaattttaggctgggcatggtggctcacacctgtaatcccagcactttgggaggccaaagtgggcggatcatgaggtcaggagatcaagaccattctggctgacacggtgaaaccctgtctctactaaaaataacaaaaaattagccaggtgtggtggtgggcacctctagtcccaggaggctgaggcaggagaatggtgtgaacccgggaggtggagcttgcagtgagctgagctggtgtcactgcattccagcctgggtgacagagcgagactccatctcaaacaaaaaaaataaataaaataaattttaatttgaacacaaccatgtccatttacttagatattatctgggactgcttttatrctgtaacagcagagttagtttgttgatctctggtctaaggataggggattttctagctagggtgagttaattggtggtagaagcagagcctcttgattgacagctctgttatatgtgaggaaaggagagctgtccccaaaaagacttaacatttctcaaaaggaaagaatgccaaacaaatatgtacctcctgaagaaagaagacttttctattatgcccatttttttcctgtcatatagatgagattaaac

SEQ ID NO: 536462 - DNA, 133 bp, Homo sapiens
tcaagtgcatttaactctcagttgtctctgctaatgtagggagcactgttgtaggtaattcagaacttaacaaagacatttcytggttattttcaactgtgttttttttaggattataccttatccctttatt

SEQ ID NO: 536463 - DNA, 608 bp, Homo sapiens
gtggaacccatatgttgcatttccaattttagttgttgtatttttaatttctagaagtctgattttgatcttgtaaaaatctgcttggtaatttaaaaaactattacgaaaagtgtagtaattttattagtaaaagttcagtgagcacccttatgtgtagcacctgtattcagtaattgttaacattttgtcatatttgctttatttatgctttatttaatctttaaaagttgacattcactcctagcgacattctcctactcaaccataatatatcacaccttggataatcttttatagtctcttgcacttactccacatttttgcttacacatttattttatattttgcttctgatcatactgttaactccagtctttctgggcytatttcatgatgccttctatgttttgtgatttggagatagaacaaattatttcttgcaaatttttctgttggaattatttgagtcatttaggtttttcccaataggatctgcgtttgcttctacctagaacctgggggcactaccacctcaggaccactttaaattcttggcttaaaatctttctggtccatcaaataatacgaatttgggatagaaattt

SEQ ID NO: 536464 - DNA, 533 bp, Homo sapiens
gatattaggacctcactgggtgcaatggctcacgcctgtaatcccagtactttgggagactgaggcaggcagatcacctgaggttagaagtttgagaccagcctggtcaacatggcaaaaccccatctctactaaaaatacaaaaattagccgggtgtggtggcatgcgcctgtaatcccagctactggggaggctgaggcaggagaattgcttgaacccgggaggcggaggttgcagtgagcygagatcatgccactacactccagcctgggtgacagagcgagactcaatctcaagggaaaaaaaaaaaggatattaggaccgtgctcacccagtaggatctgtctgcttgatttctattttagccttaacatgtcaaatatttttacagaattatgatgaattatgataaattgaaatcacgtctgggtgagattcatgatagcaaaatgcgtctagagcaggatttgaagaatcaagctttggacaaccgagaaatagataaaaaaatgaatagcatcaaacctgacct

SEQ ID NO: 536465 - DNA, 431 bp, Homo sapiens
cctcttgtcagacagcagaccttctgggctatgatcaggggtaagactgtggactctgaacctgggctacctcagtttgaacccagacttgccaggtaytagctgtgtgggctggggcaaatcacctaacctctctgtgcccctgtgttctaatgggtaaaacagggattcaactaaaccctgtaagtgaaatgcttcacaagtacctccataggaagtccagtgcaagtgttagcaatcttttttggaaggttcgctgtagccaaaccaggcagagtgcttgtctttgtcccatgatggtgctgccagagcgggtgcgagctcgccttggatcccatccacaggaccatgttgctggaggtaccaggaccatccttgtggagaatgtctgtgactggtggcctaacacatggagattcagaggcctccag

SEQ ID NO: 536466 - DNA, 431 bp, Homo sapiens
cctcttgtcagacagcagaccttctgggctatgatcaggggtaagactgtggactctgaacctgggctacctcagtttgaacccagacttgccaggtactagctgtgtggsctggggcaaatcacctaacctctctgtgcccctgtgttctaatgggtaaaacagggattcaactaaaccctgtaagtgaaatgcttcacaagtacctccataggaagtccagtgcaagtgttagcaatcttttttggaaggttcgctgtagccaaaccaggcagagtgcttgtctttgtcccatgatggtgctgccagagcgggtgcgagctcgccttggatcccatccacaggaccatgttgctggaggtaccaggaccatccttgtggagaatgtctgtgactggtggcctaacacatggagattcagaggcctccag

SEQ ID NO: 536467 - DNA, 591 bp, Homo sapiens
aaacaagcaaatgttatgtgcataaccttcgctgtctcgctaaaggtcagcgcgcccctgctcatttcccgggctgccttttgggggcactctgatgccggggatttcctcgggtgttggggaaacaagacgtgctcgcctaacaaagactcaatctacaaaggctgcaaaacaaaaacattgattacatctgaattggagtgcggaagtttgcttcgggggtataaaatatcagccccttaagcgctaaatagcgagagggctgggctggggccagagtgcccaggcgcattccatagacatttcctggagaggaagattccctgtggccggctcctacagtagtcacccaagacaggatggcagcgaaaattcaggagataagaggctaggttaaaataaagtttccctggaattgcgttttcttccatagtggcatgtcacgttaacatctttgaaagtacttaggcagagataatttcatgtatgyacacaagtttgaacacaagaaagaaccaggcaagacacagaaacacacacacacacacacacacacacacacacttatatgtgggaatagggagctcatag

SEQ ID NO: 536468 - DNA, 587 bp, Homo sapiens
ctttcctctatgcgtgtgcatccctgatgactctctctgcrtgtccagatttcctcttcttataaggaaccagtcaggttgaattaggatccatcctaacagcctcatactaacttcgttatttctttaaagaccctgtctccaaacatagccccattctgaggtactgggggttagggcttcaacatatgaattctgggggacacagttcagcccatgacataagccgcaccatcattctcatgtgaaaatgacaggaaggccccataagacttgcatttcccagaactcccgatcaacattggttctgttctgagatcacaggaaggctgagataagcctgaaatacagatatcttaaataaaaatataattgtggggaaacacttttgctgacctgtgaaactaaaaaatctaagagataagtaaaatatatgaatgggagatggacagttatggatagagcaagagacaagaagaatgttaagagagtggggggattatggctatgtctaacccatgggtaatcattggaattcaatcacctcaacttctttctttctccacctcacatccaatgcatcagca

SEQ ID NO: 536469 - DNA, 587 bp, Homo sapiens
ctttcctctatgcgtgtgcatccctgatgactctctctgcatgtccagatttcctcttcttataaggaaccagtcaggttgaattaggatccatcctaacagcctcatactaacttcgttatttctttaaagaccctgtctccaaacatagccccattctgaggtactgggggttagggcttcaacatatgaattctgggggacacagttcagcccatgacataagccgcaccatcattctcatgtgaaaatgacaggaaggccycataagacttgcatttcccagaactcccgatcaacattggttctgttctgagatcacaggaaggctgagataagcctgaaatacagatatcttaaataaaaatataattgtggggaaacacttttgctgacctgtgaaactaaaaaatctaagagataagtaaaatatatgaatgggagatggacagttatggatagagcaagagacaagaagaatgttaagagagtggggggattatggctatgtctaacccatgggtaatcattggaattcaatcacctcaacttctttctttctccacctcacatccaatgcatcagca

SEQ ID NO: 536470 - DNA, 626 bp, Homo sapiens
tcctctatgcgtgtgcatccctgatgactctctctgcatgtccagatttcctcttcttataaggaaccagtcaggttgaattaggatccatcctaacagcctcatactaacttcgttatttctttaaagaccctgtctccaaacatagccccattctgaggtactgggggttagggcttcaacatatgaattctgggggacacagttcagcccatgacataagccgcaccatcattctcatgtgaaaatgacaggaaggccccataagacttgcatttcccagaactcccgatcaacattggttctgttctgagatcacaggaaggctgagataagcctgaaatacagatatcttaaataaaaatataattgtggggaaacacttttgctgacctgtgaaactaaaaaatctaagagataagtaaaayatatgaatgggagatggacagttatggatagagcaagagacaagaagaatgttaagagagtggggggattatggctatgtctaacccatgggtaatcattggaattcaatcacctcaacttctttctttctccacctcacatccaatgcatcagcaaaattgtcagtactgctttgaaaggtctccagctccaactgt

SEQ ID NO: 536471 - DNA, 424 bp, Homo sapiens
gcggatggagctcagcaggctctcaggtgggacaggcgccgtctgaggccttacctgtggaaaatggggagcagggccacaaggagtttctgctcaagagaacagacgggctcgaggtgcgtgctgctggcctgtgcttgcatctggcctgggctattttaaagaattttgtgatcattactaatatcaaatgtcaagaacgttcacctattaaatctggatttctggctcattttggacaatggacagtccgtcctgcagagcccacattcccctgtttaaagcacgattattggcctcctctatggaaggaacacgcccttsttggcaggcttcatgccccaccatcccttgctgggcccctgcaggcaattgggttggtggcaagtggctgagaatgctgcttccacatgcacacaggcag

SEQ ID NO: 536472 - DNA, 464 bp, Homo sapiens
cgtagagtctgtagtcagaaagtgtggattcaaatccatgctccaccctttaccttgggcgagttacttaatttctccttgcctcagtttcctccatctgtaaagcagaggcagtagcagtaacaagacccacctctctaaggttgttgtgagaatttaatcagacagtgcatgtagagaaatcaaggtaatgcctggcacatagtacatgctcaattttagctattatcaatatcattattaatagactcattttacagaaaggacactgaagtcagaagtaaagtaagttgrttgaggtcatacaagtaaaaagtggcagaggacagattctaactcaggctggtgtgactagaaagcttatatcctttccactgaagaaccttgcctctccactatacacctattgtgccttccaaaacctactagtgactgatcactggccttcacaccaaaagaaatcc

SEQ ID NO: 536473 - DNA, 385 bp, Homo sapiens
aatttctgatcctttccctgttggtgggtttctctgatagggaagtgatgggaactctggatggtagaggccacgtggctatacctgattgccaaagacatggtgagcacggttacagggatgggtatggytataaggataggccgtagagtggaacagtaatctttaaccagactggcggtgatttagtaatgggttagttgattaggctgtctctagaattgatatacatggcttgctttctaaagtcttacttgtttgtgtaagctaaaaagctctaagtttggtcaagagaagtcggattagaatcatcaaaatggagacatatggtcccttagtcaatttccacacttgcaccagttcttagacccagggccccttgagg

SEQ ID NO: 536474 - DNA, 449 bp, Homo sapiens
ctccctctcttcacgtttactttatcatatgtaaaatatagatttactgagcactaatcagagcctcaggagaacataaccatttgcctcactgcccacccttcctcctttatttccctcctgcttgtccttttccctttaaatactgagttcccaaaactctcttaggaaagcacaggttgcaggtttttttcctgggtgcatcctcaaactttggctaaataaacctctatcgactcctcttaggcaagttagtccaaatgggaaagactaggcaattaayttccttttgcctctgtcacatgcgtatctattaatgaataactagtgttcaatttaggagatgttaattaacttagtcctaaagggttagggttagggttaagttagggttagggttagggttaggggttaggggttagggttagggttagggttaggcacaggga

SEQ ID NO: 536475 - DNA, 477 bp, Homo sapiens
aacttcctagggctcaagcgatcctcccacctcagcctcccaagtaggtggggctaaaggcacatgcatgccaccatgccaggctaatttttgcatttttcttgtagagatgaggttttgccatgtcacccaggctggtccccaactcctgggatcaagtgatccacccaccctggcctcccaagttgctgggattaaaagtgtgacaaagtgactttcttaaagtcaaactgcaaaaccaaagcaaaaacctaggctttctgacttttaattcagtccctttccccatatatcacagcaatattttgcttgtaatttcatcatgattcaggaaagcacggcagagggcccttgaatggcttaattaaagaagacawcttcaattctgtctgtttgtccctttcctgggattactctttgctctgccccaaccatgccctggtcagggctaccatgttcctgactgactttgcctct

SEQ ID NO: 536476 - DNA, 590 bp, Homo sapiens
ctgagtttgaaagtcattgtctcagagagcagaactggggatggggacaggakggataggggctgctttattttgttatagatgtttttacgaaacatttgattaaaaaaaactatagatatgcattactttaacaacaatcaaaattaagttcttattttaaaaaggtcaaaccaaaaccaaaacattttctctaggaatcatatctagaaaactcagcactcaacatctaggcaagaaagtctccccaaataagaaacagtcctctcagtttctctccttgctgtgcacctgactattccccgatggaggaacacatagcatgactgcttacctgtctagaatgacccactccctgttctcagaccctgatgtctcaaatcttgaggactgccaacgtttaactactgatatggtttggctgtgtccccacccaaatctcatcttgaattgtagctcccataattcccacatgttgtgggagggacccactgggagataattgaatcataggggtggttccccccatgctgttcttacggtaatgaataagtttcatgagatctgatggttttataaggggtttcccc

SEQ ID NO: 536477 - DNA, 590 bp, Homo sapiens
ctgagtttgaaagtcattgtctcagagagcagaactggggatggggacaggatggataggggctgctttattttgttatagatgtttttaygaaacatttgattaaaaaaaactatagatatgcattactttaacaacaatcaaaattaagttcttattttaaaaaggtcaaaccaaaaccaaaacattttctctaggaatcatatctagaaaactcagcactcaacatctaggcaagaaagtctccccaaataagaaacagtcctctcagtttctctccttgctgtgcacctgactattccccgatggaggaacacatagcatgactgcttacctgtctagaatgacccactccctgttctcagaccctgatgtctcaaatcttgaggactgccaacgtttaactactgatatggtttggctgtgtccccacccaaatctcatcttgaattgtagctcccataattcccacatgttgtgggagggacccactgggagataattgaatcataggggtggttccccccatgctgttcttacggtaatgaataagtttcatgagatctgatggttttataaggggtttcccc

SEQ ID NO: 536478 - DNA, 590 bp, Homo sapiens
ctgagtttgaaagtcattgtctcagagagcagaactggggatggggacaggatggataggggctgctttattttgttatagatgtttttacgaaacatttgattaaaaaaaactatagatatgcattactttaacaacaatcaaaattaagttcttattttaaaaaggtcaaaccaaaacyaaaacattttctctaggaatcatatctagaaaactcagcactcaacatctaggcaagaaagtctccccaaataagaaacagtcctctcagtttctctccttgctgtgcacctgactattccccgatggaggaacacatagcatgactgcttacctgtctagaatgacccactccctgttctcagaccctgatgtctcaaatcttgaggactgccaacgtttaactactgatatggtttggctgtgtccccacccaaatctcatcttgaattgtagctcccataattcccacatgttgtgggagggacccactgggagataattgaatcataggggtggttccccccatgctgttcttacggtaatgaataagtttcatgagatctgatggttttataaggggtttcccc

SEQ ID NO: 536479 - DNA, 590 bp, Homo sapiens
ctgagtttgaaagtcattgtctcagagagcagaactggggatggggacaggatggataggggctgctttattttgttatagatgtttttacgaaacatttgattaaaaaaaactatagatatgcattactttaacaacaatcaaaattaagttcttattttaaaaaggtcaaaccaaaaccaaaacattttctctaggaatcatatctagaaaactcagcactcaacatctaggcaagaaagtctccccaaataagaamcagtcctctcagtttctctccttgctgtgcacctgactattccccgatggaggaacacatagcatgactgcttacctgtctagaatgacccactccctgttctcagaccctgatgtctcaaatcttgaggactgccaacgtttaactactgatatggtttggctgtgtccccacccaaatctcatcttgaattgtagctcccataattcccacatgttgtgggagggacccactgggagataattgaatcataggggtggttccccccatgctgttcttacggtaatgaataagtttcatgagatctgatggttttataaggggtttcccc

SEQ ID NO: 536480 - DNA, 612 bp, Homo sapiens
tgatccgaggaagtcagagggaggaaggagcatgagatcctgaagaaggggaaaccagtactgtctaagggtgcatttttgaggttgctattctgggccttggagcttgagcccaagggacttcttgagaaacacgtggatattctcctctgtaggagaytattggctgacattctttgggcgcttattgtgttagatatgctccaaacattcatttaatcatcacaacaacaccaagagtggggtttaaataacccccatttcacagatgagaaagctgaggttcgaaaagcttacactgtccaaagctgcagagtgaggcagtgagggagccccatcctctaacttcaagataatttgctgctttacaatagcgcctactgcgcaaagggggcagagaacttcactgatttttcttagaagcttttagaaaatgcaaaaatatcctttgggcctcaaaccaaaatgcatctgaggaaagacttgcaaaggtgaaatagagaattgtctggcaaacttagacccagggtcccaagctggaagcctactgagaagaaacattccctggaactctccataagcatctccagcccatattatttgtgtgattac

SEQ ID NO: 536481 - DNA, 612 bp, Homo sapiens
tgatccgaggaagtcagagggaggaaggagcatgagatcctgaagaaggggaaaccagtactgtctaagggtgcatttttgaggttgctattctgggccttggagcttgagcccaagggacttcttgagaaacacgtggatattctcctctgtaggagattattggctgacattctttgggcgcttattgtgttagatatgctccaaacattcatttaatcatcacaacaacaccaagagtggggtttaaataacccccatttcacagatgagaaagctgaggttcgaaaagcttacactgtccaaagctgcagagtgaggcagtgagggagccccatcctctaacttcaagataatttgctgctttacaatagcgcctactgcgcaaagggggcagagaacttcactgatttttcttagaagcttttagaaaatgcaaaaatatcctttgggcctcaaaccaaaatgcatctgaggaaagactygcaaaggtgaaatagagaattgtctggcaaacttagacccagggtcccaagctggaagcctactgagaagaaacattccctggaactctccataagcatctccagcccatattatttgtgtgattac

SEQ ID NO: 536482 - DNA, 651 bp, Homo sapiens
tcaagaaaaaatagaaatcacacatatgcatacccatgacatagagataatcactgttaataatgatgggtgtgtttcttttcagtctttttctaagcattttcctgaaccctgtcccctaacaaaagcacatcaaatayatgactgagtacccatccatatgtatctgttttacatacataatatatatgtattaaaggggtatggtattataatattatttcacaatttgtcctgtttttaagaacagtcttctttaaaaaatcttcaaaattataattttagtaacagtaaaatatcccacattttatcaaaatttataaaaggttccttattattttgtttcccattatcatgttacaaataacaatatgataaacacatcattcataaatcttagctctgtaaaaataacctaactataatctacatctaccttcaagaacaaagtaaaagggttcagctccccactttccaatctgtacacttactgctactatcattgtttgacttcagacaacacattctttatttcactgtccttcttcttttttgataatttgcattaaaaagtttattaacccctaagtactttaattccttttgtcatgtcacagaaagaattgaaaattatatatttttaaatagaca

SEQ ID NO: 536483 - DNA, 651 bp, Homo sapiens
tcaagaaaaaatagaaatcacacatatgcatacccatgacatagagataatcactgttaataatgatgggtgtgtttcttttcagtctttttctaagcattttcctgaaccctgtcccctaacaaaagcacatcaaatacatgactgagtacccatccatatgtatctgttttacatacataatatatatgtattaaaggggtatggtattataatattatttcacaatttgtcctgtttttaagaacagtcttctttaaaaaatcttcaaaattataattttagtaacagtaaaatatcccacattttatcaaaatttataaaagsttccttattattttgtttcccattatcatgttacaaataacaatatgataaacacatcattcataaatcttagctctgtaaaaataacctaactataatctacatctaccttcaagaacaaagtaaaagggttcagctccccactttccaatctgtacacttactgctactatcattgtttgacttcagacaacacattctttatttcactgtccttcttcttttttgataatttgcattaaaaagtttattaacccctaagtactttaattccttttgtcatgtcacagaaagaattgaaaattatatatttttaaatagaca

SEQ ID NO: 536484 - DNA, 626 bp, Homo sapiens
ctaacctgctcataatgatgatctctaagggagggtattaaagggaactttctcattcaatacaaaatgttctggccaggcagtagctcatgcctgtaatcccagcactttgggaggcccaggtgggaggatagcttgaagccaggagttcgagaccaggctgttcaacatagtgagacccccataccccacaaaaaaagtttagctgggcacgacagtgggtacctgtagtcccaactacttgggaggctgaggcaggagaattgcctgagcccaggagtttgaagttgcagtgaggtatgattatgccgctgcactccawcctggataataaagtgagaccctgtctcaaaacaagctatgcattatttagtttttttttttttaatacagaacatctataactttttatgctaaaaaattatgataaattattaggggtctgtgtttaacttggactagtgtaactccttcatgcaataaactgaaaaaaaattattaacttaacattaaacatgagatgtttatcaatagaaagctaacatcaataaatatgcttctcaatgtaaacaggtctcttaggatctctcccaagacagcagaataccgtttgtttccttgtaaga

SEQ ID NO: 536485 - DNA, 459 bp, Homo sapiens
gcccccttcccatcttgtctttgcgtgcaaaacaaaatcctgaatatgtgggtataaaaagtactcttataagagaaaaattggaaacttttgcaaaaagagattggaaaggtgtcacatcttgtggcatgaggatttgtggrcatacacttgaactttgtgctgtgagatatccacagaacttcagtagcttaagagaacagtttagatgtcatcttattcatctaccatagaacttcttcttcttttctgagatttctagacagtaacttttacagctctaataatgcagttatctcccaattgtttggacttttctaatagatacaaagcagtatttcaccagcagatgctactgcagttcatatggtgatttcaaactaagaatccctttaaagttatgcaatactttttttttttggaaatagggtgaaagtactttaagattaaaatcctatg

SEQ ID NO: 536486 - DNA, 645 bp, Homo sapiens
taaaagctggccaccacagctagcagcgcaacccgctatctcatcttccaaactgtggaaagtttgatcttttgctctttacgataaatcttgctgctgctgagtttttgggtcggtactacctgtatgagctgtaacactgactgcaaggatctggggattcattcctgaagtcaatgagtcctgaagtcggcaagaccacaaacctgctgggaggaacaaacaactccagacgcgccaactttaagagctgtaacactcactgtgagggtctgtggcttcgctgctgaagtaggcgatgtcacgaacccaccagcaggaagaaactctggacacatgtgaacatacgaaggaacaaactctggacacaccatcttcaagagctgtaacacttcrcgtgggtccgagacttcattcttgaagtcagctagatcgagaactcaccagcaggaataaattccggacccagtaggagagaggtaacttttggctatattaagggcagagaccacagaagacgaaaaagatatgtatggggtactctgtttgacacaactgtgtgcagacgtcatacacatgtccctcagcataaatggggctttgacagtggttcctttctagttgagcagtggatacaactacaca

SEQ ID NO: 536487 - DNA, 592 bp, Homo sapiens
ccagaatgtgagcttctccctgtacatttccatgagcacctgactcatatatccattagtatcacttttaatccaggtaacccatataattatccaactctgtgtttgcatctccattattaagttgatttctgaaggaaagggacctcccttatttacctttttatcctcagtatctaaatcagtcattaagaagttcaatgcatgtttgtaaactgatccttaattaatatccaccttgcaattgttgtaaggattatgtgagattgtgtacatgacagagtattgaaagtgcttattaatagaaagtgcttattaatagaaagtgcttccctgaggttggttattgttattatgggctaaattggttttggtggaaggaccaagctagtaacatgacttctatttatatcaawgattctgtgacaaagtaatgatagtagtaatcattgatgggcgttagatacttaaatagcacaatagccggcacaaagtgcttttggctatgttttcctgacgtgtacaattgccctttcttatgccacatctctgggcctcaaaatgtgtatttctttgctctaatcttcatgtt

SEQ ID NO: 536488 - DNA, 592 bp, Homo sapiens
ccagaatgtgagcttctccctgtacatttccatgagcacctgactcatatatccattagtatcacttttaatccaggtaacccatataattatccaactctgtgtttgcatctccattattaagttgatttctgaaggaaagggacctcccttatttacctttttatcctcagtatctaaatcagtcattaagaagttcaatgcatgtttgtaaactgatccttaattaatatccaccttgcaattgttgtaaggattatgtgagattgtgtacatgacagagtattgaaagtgcttattaatagaaagtgcttattaatagaaagtgcttccctgaggttggttattgttattatgggctaaattggttttggtggaaggaccaagctagtaacatgacttctatttatatcaatgattctgtgacaaagtaatgatagtagtaatcattgatgggcrttagatacttaaatagcacaatagccggcacaaagtgcttttggctatgttttcctgacgtgtacaattgccctttcttatgccacatctctgggcctcaaaatgtgtatttctttgctctaatcttcatgtt

SEQ ID NO: 536489 - DNA, 403 bp, Homo sapiens
gaggtgggacaatggcatgaacccgggaggtggagcttgcagtgagctgagatcgcgccactgcactccagcatgggcaacagagtgaaactccgtctcaaaaaaaaaaaaaaaaaaacctgggggacagctacatgctgagtccttagaccagatagttaaagcttcagagtctttctcaaccatatgatagcgataataatgcctggctctgcagtttgttggaatgattcagtaatataaagaaaatgatagagaacttgacccatagcagatacttastacaattattctgtaatcataaatgatctaaatgtagctgtgcctctttttcagaggggcttcaatccacctttggaaataggtggtagttaagttggcacagacacgaatcattaaagag

SEQ ID NO: 536490 - DNA, 646 bp, Homo sapiens
ggtttgtgtgtgtgtgtgtgtgtgtgtgtgtgtgtgtgtgtgtgtgtgtgtgcttttactgcttgtattagtttatctgtaaacttcctacttgggttttttatctgcttttataattgagtaatttatctttttcatcttcatttataagatctgcatattaaaaatagcccttgtatatatgggatgcatatatttttcctcagtttgtcatctgtctttgactttgttttggatgttgttgtcacataaacgttaaatttttacatggtcaattttagcaacctttcatttatggcttctggattttgtgtcatgtttaagtaaggccttctctactgtaaaattgttttttaattccacagtgttttcttctagaacgtttatacttcattttttgtagcacatcaaatatgcgtggaatgagagatcttcaaaaataatagattttcatatcatttgcaggtttggtcataaccttaaaactagggtaggtcatcgctatgtccatatctttaaagacagatataataaacgttaataaacaccactgatgcactttcctttgctaacatggagaacatatgtgcccmctaaacttgcctgattgcaaattatgactgagggaagggtttttgtatataca

SEQ ID NO: 536491 - DNA, 642 bp, Homo sapiens
taatatatgttaaattattatctaaaatgagaattaataatcccaatgaatgtaggtttttttaaataagattaaaatcatggtatgctcctgtaatatcagctgctcaggaggctaatgcaggaggatctcttaatcccaggagtttaaaacctggtggctcacacttgtaatcctagcactttgggaggccgaggcaggtggatcacgaggtcargagatcgagaccatcctggccagcatggtgtgaaacccagtctttactaaaaatacaaaaattagctgggcgtggtggtacacacctgtagtcccagctactcaggaggctgaagcaggagaatcgcttgaacctgggaggcagaggttgcagtgagccaagatcatgccactgcactccagcctggcaacagagtgaaagtctgtatccaaaaaaaaaaaaaaaaacagcctgggcaacatagtgagagcctatctcaaaaaataaaataaaatagggttgggctgtgaccagcttcagagaaggcagtactcttttccccaaatctaccagtatctactatatttgttgtaattacatggcgaaggttctggaagctggtctttgtagcctacacacctggtgtaggattccctcgcagccca

SEQ ID NO: 536492 - DNA, 490 bp, Homo sapiens
ccgattaagcctttttccttggcaataattattgcctcagtgattagctttcagtgcggcgagcagcaggacctaaaccgaaaccctagtgtttcaggaacagtgttttagtttgtaaggcactttcaaatctgttttatttgatattcacaacatttaagtttgttagatattattggcttgattaggtaaagtaaatgaacctgagttatatgtaaaaaaaaaaaaaaggccatagaaataatacaattaagatgccacaataacccaggtcttgtcactccaaaattcatgctgcttccattgggtcattttttaaaacattatttaatcactaaagataagaccatacaaaatattctctatgtaaaacataatatgacatactgtgcttttcaggaaatataaaacttagctccttaaccacataattttttaaaaggcgctttgcatgtgtattatacaatgmaattttcaggaagtttaaacc

SEQ ID NO: 536493 - DNA, 588 bp, Homo sapiens
acttcaattctgtgagattccaagtttagtcatttatgagattcactctgtagtcatcttagtaatgcttaacctcttatggcttggttaaattttaaaactatgaggttgtttctaagagttaaaggtgtctttaaagttaacttgataccatatattgtagatgtttgcaaaagaatttcattgtccttccaggtttggcaataagtgtcaggaggaatcataygttagaaaataaaagcaaaacaaatgttttaactcaaatattttaattattagcatttaatataattaatattttaaaatttcaatagtatttttactattaccacagtaaaaattatgtaaaatattttatgtaaaaaatggtgttactaaaaatagtgaaattttcaaaaaatattttaacttttaataatattgtattacttaaatctaacgagagtattcaaaattaaatatgcactataagcttagtaaaaatttaccttgcatattttgcatactttcatttgacacgtggctaatgtgtctcaaaagcaaatataagaatctgtaaaagtcacttttgaaatcaatattttgtag

SEQ ID NO: 536494 - DNA, 619 bp, Homo sapiens
tgctgtgtatactgctctgctctggagtctgtaacatgtcttgaaattgttcttgggtgaggctactgtgagtttgatygacactctgaagctaaaatacaccccagtgatctaattacttccttgctgctttaaagaaaatcctaaagacattagagaaataccacccttttaagaaaggtgatgaagtcactgaagatgataacctgtggaaagcatcagaattagctttaagtcataaattattcaagtttttaaaatttttaagaaacaaccatactggtgacatttatagctgtactaatttatagctcccacaaaaagtgtatgagtttcattcttgctagtatttgtcttcattcttgctagtgtttgttatttttttgtatttttcataataggtattctaaccaggataaagttatatctcagtgtgtttcagtttgcatttccctgatgattagtgatgttgaccactttttcatatacctgttggctgttgatatgtcttctaagaaatgtctattcaggtcattagcccattttaaaaataaagtacttttatttttgctattgagttgtttgagttccttatatatcctatatattaatactttgt

SEQ ID NO: 536495 - DNA, 619 bp, Homo sapiens
tgctgtgtatactgctctgctctggagtctgtaacatgtcttgaaattgttcttgggtgaggctactgtgagtttgattgacactctgaagctaaaatacaccccagtgatctaattacttccttgctgctttaaagaaaatcctaaagacattagagaaataccacccttttaagaaaggtgatgaagtcactgaagatgataacctgtggaaagcatcagaattagctttaagtcataaattattcawgtttttaaaatttttaagaaacaaccatactggtgacatttatagctgtactaatttatagctcccacaaaaagtgtatgagtttcattcttgctagtatttgtcttcattcttgctagtgtttgttatttttttgtatttttcataataggtattctaaccaggataaagttatatctcagtgtgtttcagtttgcatttccctgatgattagtgatgttgaccactttttcatatacctgttggctgttgatatgtcttctaagaaatgtctattcaggtcattagcccattttaaaaataaagtacttttatttttgctattgagttgtttgagttccttatatatcctatatattaatactttgt

SEQ ID NO: 536496 - DNA, 598 bp, Homo sapiens
ctgggggagagtgccttaccagctccaaggagtgggagggaggtgaaccccactcccctgcagatctaactgctggcacaaagcacccctgagagagaagagcacagcccatcaaagccccccttgggttaagggaaacatgagcaaggcaccagaagctgaagggaggcatcaccaaaatctgagaaagagcttggagtaggagatcatatgtcacctcctgctcccttccctgggaacgcctgcaaacaccatagcagctcttccctttggggcctggggaaagcattctgaaagaagctgcttctcagacatctccagtggccccatccccacagaaggggagggtttttccatgattctttgcgccccacccccgctgaaggaaagtatgagcccagagattatctgcgaactcttactcttatctgccatctcctcaaatggagcctgaattacaacaccaaacaaaaataacatcagtataacaagcgacatctgagaaagccactatccgaacctatctgcaaccaaggaaaccataaaaaaccttggccctctgraagcactcagaaatgaagccagtcagtcatataca

SEQ ID NO: 536497 - DNA, 499 bp, Homo sapiens
tggtgatgtctataaatactcttgtgttgtgtttttctagtataggtggtcagaacaggcactactgctagccctctgtaaacactgggcactattctagataattccatctcataagtrtttcttctcaagctcaacattctttggttgactatcaccatctgaaacacaagtgtttcatatattttactactttttgtttatttcaagcagtagagtaattctcatgcgtgctagttcatttttgccagaagtagaaagaagtctctgcagtatttgtttggttcttggtttcacctatctcttgatacacatattaataaaaagaagcagaactatgaaaaaacaattttaataacaatgttttgcagtaattggaccacattacactaatattattaaataattagttaataatttttaaatactgttttcactgtgtgtatgtgtgtgtatacatagatattttaatacatcaaatttcatgaatcatacttca

SEQ ID NO: 536498 - DNA, 587 bp, Homo sapiens
ttaatattataaatgatgttactgacatgcagatatgtttagtatatttcttatattttaatttaaacttctggaatgtacatattgtcactaagtctttcctaatagtattaagttctaaaatgagagttacattccactacatatggattataatcatggaagacacatactcaaatgccatatctttaaatctgtagaactctttacaacaaatataatggcaattaagttttgctgaatgccacaataagctgctccttaagtttgcattctgatcaatcctataaacwtttctattttgatgttcatttccagagatgccatctcgcttcccattcttatcaccacacaaattgcataattctgagaagtcttgaatattattgtaaataggaaatataattttgaaatgataaattagcatattctaattatttgctcacccactccaaattatggtttattcctatctttcacacttattactgcatggccaacataattgcagatataaaatgtgatggcttttgaagatgtaagtttggaaaacagaaatcatagagtttgccctctatctggaggca

SEQ ID NO: 536499 - DNA, 564 bp, Homo sapiens
aaagtctgaacactctggtcctttacttactgggctcagtgttatgcccaccatcaccaccacctgaccgatgactgttttgagaccacctgaagcaaaaacactcttaatctgatctttactagtatgctggctgctgatctggtgtagaatttttgtgaaagtgcttaaaaagattctgcagcacaattatgctaatgatgtcaatacaagccactgattattattgttttgattactgatataggctggtttaaaatagcaaaactcagattgtagaactgtgtacaaagttcttagtgtagaaaggtgacctgtagatagaggtcaccagagcagacatgttctatctctgtttgcaaactgaccagttgtaggattttgcaaatatagggtaaagatagggtaaaagccaacatgcatctacattctacatatttctatcactttcctttacgataagatatgtgcgtcwgctttccatggtagtgctgattatagtttttatcaaatattttttctgtaatgcaataaggttattattatttcagcttgcaatattta

SEQ ID NO: 536500 - DNA, 513 bp, Homo sapiens
tgtgccattgtctctctgctctcctcatcytctggccatcctctgatctgctctggctgagcctagggcttttatggaccttttatcagggaggaagtccatgccaattggtccacgggcagccatgggtgggctggaagaggcaccatgagtccccactccagtccatgggactggcagcctggcccgcagccttcaggccttccctgacctgaaagtggggtcttactggggacctgcccccttctgcccaggactctgtctgcctcccgctgccattcaaggccccagggcttggccccaaccccgctctgagatgggagcaggtgccaggagcagatagaggccaggcagcgggagcagacacccctgagcctgcaggccaccactgggcccttcgtcccaccagcagagggagagctgaccttcttctcttacattctcagcacctgtgaggtggaaggggatgcttttatgatcacttcctgaaagagaggctcacagaactgaact

SEQ ID NO: 536501 - DNA, 513 bp, Homo sapiens
tgtgccattgtctctctgctctcctcatcctctggccatcctctgatctgctctggctgagcctagggcttttatgsaccttttatcagggaggaagtccatgccaattggtccacgggcagccatgggtgggctggaagaggcaccatgagtccccactccagtccatgggactggcagcctggcccgcagccttcaggccttccctgacctgaaagtggggtcttactggggacctgcccccttctgcccaggactctgtctgcctcccgctgccattcaaggccccagggcttggccccaaccccgctctgagatgggagcaggtgccaggagcagatagaggccaggcagcgggagcagacacccctgagcctgcaggccaccactgggcccttcgtcccaccagcagagggagagctgaccttcttctcttacattctcagcacctgtgaggtggaaggggatgcttttatgatcacttcctgaaagagaggctcacagaactgaact

SEQ ID NO: 536502 - DNA, 513 bp, Homo sapiens
tgtgccattgtctctctgctctcctcatcctctggccatcctctgatctgctctggctgagcctagggcttttatggaccttttatcagggaggaagtccatgccaattggtccacgggcagccatgggtgggctggaagaggcaccatgagtccccactccagtccatgggactggcagcctggcccgcagccttcaggccttccctgacctgaaagtggggtcttactggggacctgcccccttctgcccaggactctgtctgcctcccgctgccattcaaggccccagggcttggccccaaccccgctctgagatgggagcaggtgccaggagcagatagaggccaggcagcgggagcagacacccctgagcctgcaggccaccactgggcccttygtcccaccagcagagggagagctgaccttcttctcttacattctcagcacctgtgaggtggaaggggatgcttttatgatcacttcctgaaagagaggctcacagaactgaact

SEQ ID NO: 536503 - DNA, 468 bp, Homo sapiens
acctgggggcttctcaaggccaaggtgagttctgaggcacaccctgcacctggcccattgsctatggtcagatgctgtgtgtgctctctgaggacagccagaccatgaggcaggggcggcctctgagggtcaggccaggatcagggcctgccagaggcagggccctggacacggactgatgttcagcaaggatttgcattatctgcattaaccctctcaacaaccctgcaagggggatactcatatcatcctcacttcatgggggggaaactgaggctctgaccacactgctagtatgtggcagagcctggatttgttccaaaagccagagctctcaccactagagaaggcacctatagttcatccaaacccttttctagaacaacgcaggggccactaactgaatgaaatgaggacatgtaggtgcccatggaggggaagaccagacaaccgcctatgttcagcttg

SEQ ID NO: 536504 - DNA, 601 bp, Homo sapiens
cccttccttctacaactcggtgtctgagaggctttgtctgcagcttgtgctgctacaaagccacacagtacaaggcagtctagattatcttccccatttgcttctgacagtgtgaaggttgacactgagtttgccactctccagggcaaatatctttagttcgtttcacaaatgggttgaccgaggtccagagattgkgggttgtgcccaagatcacaagctcaaattcatgtgcgatggacagagagcaagggttgccttggaatctgattaacaccctgtggctactcccaactggggtgagggaatctccccacactcagtacccagtcctgattagggttagagtagcattagtggtcctatgggcaggagtccttcctttctcccttattccccacaggaaaaatttttaattgataactatcattgccatgcatgcatttgtatttctaccacctatgtatgtatccatagacaatataaagtattattttgtgtgttcttaaaaatttaaaataaatagtatcataccatatcattttgcaacctgcttcttttttcagtatttagtgtgttttaagtttatccttattggttc

SEQ ID NO: 536505 - DNA, 621 bp, Homo sapiens
tgaaactaccagctagcaaatgattctaattattctagagaaaagagtagatgtttgtgtatgtgctcatagcagaacaggaaataagcccctgatcaaaaaagaatttctaacaactcagaaaagtgtataggatccctatgatgaaaagaaatataaaggaagatgtagttttctcaaatcgttgtcaatatcagagagcagttgcttggcaaatgctaagacctgggaaaagaaactattcagcttttaatctctatcttcttattttctcagaatctatcaaaataatatattgttttatattgtagaaaggtagcttcttgaagccttaagaagaattttaaaacttcggtatcaaacatctcattaaagacaaacttttacttacttccagacaatagaataacttgtaaaattggaatctggtatttttataaagaaactgcggtcttacacttaaatccaaaataataaatctgtcctatayaataaaaataaattttatatttttgaaaagtatttttacactgtaattatatgcataattgtgaattttagaaagttgagtcaaattgtaggctgacatttaaaaatatgcattatatacaaattgcaagt

SEQ ID NO: 536506 - DNA, 551 bp, Homo sapiens
cttggtaaattgtcatttgtctacacagcgcctttcagcacacacgaatgattcttcttcattttcttttaagaagcaagtattaaaagtgctgcaaacttgtaactgctggacttgatcatctttattcattcaaaaaatttaagcatttactactaaaattattttgtgtagatgtaggcactgttctacaacaagtaattttgtagaccactaatgaaagttcagagaaggatatatatttgcacgtgtgcttaattcctaattatatagactttggggtagttctgcctattgtgtgaccttttatgtttacatcacatttttctatttttgactgagcctacrtgaccaaagttgtgtcagttcagcataagtggtgctctgctttctaaccttcctagtcctgtgtattttctgcatcatgatttattaacaagtacttaggtcatttaactgaattgtggagcaagagagttagagctaagatttcctgattgccaaggttttggttctttgcttcctctatattaaagattctgttaactact

SEQ ID NO: 536507 - DNA, 442 bp, Homo sapiens
gtaacaaaactatattaatgatgagcccagtgagggaagatcctcagattcagtgcccagatcctggtccttccagaatctagccttgcttctctatctcagccttragaaggtccagcccaatgacagtccctgccctgaggttaatccaagatcactttacagtaaactctccatttacttgtggtaatttgagttggttttgttcctcacactcaaatttatcttcactaaaacatgacaaagaattctttcccttgtggtttcttccactgcttttatatttaaaaatacttccccatcccattattagttaggtagtcatttttttctcctggattttttaaaaacatgatttaaaaaaaatacacacatagttctctaaataattcgcctggagtttattttggtgtagtttgctgaataatctacctcttctcca

SEQ ID NO: 536508 - DNA, 619 bp, Homo sapiens
gctgcccacagtttggcagcaacttcatgagagaccctgaaccacaaatgcccagctaaagtgctcccaattcctgaactcagaaactgtatgagataataaatatttgttgttttaagctgttaaattttgtggtaatgtgtaatgtagtactgggtaactaatacatcacgtatggtgaagtcgtagcagtagactacgtagatcaatggtatatgcattaaacattttgaaagatattgataaattatctaccaatgaggagccactaacacagcaagggctctgatttccccaaatcctcaccagcatcagaaattattaaactcaacaatgtttgctaaactaaatgggtgaaaaatggcatctgattgctttgacctgtgtttttttaatttcaaaagttctttggggcacataccaggcttcatcagcaatgcacaggaaaaggtgcatggtagggttcaagtgattcattacacaataagagactctgagccaccctgcctcaayttctaaaccactgcctttcatttaaaattcccattaagcaattaattttataaaagaaataaccactgaagttgagtctaggagtgagagtgtctgattttgatta

SEQ ID NO: 536509 - DNA, 553 bp, Homo sapiens
tgacacatgaagactaacttaaaaaataaataaaagaatgacagactctaaaacatgcatcctaagggaaactgctgtattctggagtatttattccctatggttttaagactgaggtcaagaacaattatgccttcctaaagtttttctttattaatactgtgaaacagagtgaatttgtttattatctgtgctacaacgatatcactgagtaatcagctaatgtgagattacactgccttttctgatactgtgcctcttagctatgtaatgtggtggcattctcaagttaatggggacggagccccactctacaaattaccagtttacatttgacattagaattctttttactgaaacaccactgtaatgctaaaaatgtaaaaaactgaggctgaaaagttctttgagactttgggaagctccaagaaaaaagagcacttccagaaagatatgttaaaaattgcatttgaatttkaaagtctatatatttttaaattaaagacaaacttggaagaatcaatcatataccccctaaaatcaacttacttaa

SEQ ID NO: 536510 - DNA, 298 bp, Homo sapiens
gcctaaaagctgcagtgactgcttacaaggtttagcaatccttcacttttgattcagagtagtaataatcactgtgtgtttatcaccaactttgttctagacattgtgttaaatactttacaaacaacacttctaattctgcaagttagaaagttatcttcatttaggaatgaagtaatcaaagttaagtaaatctatttacaaatccagtaagtggctaatctgctgtacttgatkcctgcgcccacaatttcaattactccaaatttcctctctggaatatgatttactatattcc

SEQ ID NO: 536511 - DNA, 565 bp, Homo sapiens
gctttatgcttcatctgccaccatcccctccctcttcatttaggctggtttctggtttttttgagaatatatgcacctcagtgtacaagctcrcagagctgtctttttccttctttttatttcattcctttccctttggctatcattaactcaggcatgacaggaagatccagacaaggacaaggtagtaaagacaccaatatttctaaaatctagggctttagagaatgttggggcagatgtaaccatagtaatcactggtatgagagcactgatgtccttactaaacagcaggtcacaccatcccaaggagaccttgcaaatgaagatgcagattagatgtctggaagcaagatttttattagcttagtcctgaaccttagctatgcaacaaaagccagctctgcagagatttaggctctcaaagagacaccatcaaggagttcgagactgttaggagcatagggcttagcatgagcatcaaataaggtataaaagaggtgctttgaaaagttgaaagaattatgcaaatgtaaggcaggtattaatattaaagatgtttatc

SEQ ID NO: 536512 - DNA, 565 bp, Homo sapiens
gctttatgcttcatctgccaccatcccctccctcttcatttaggctggtttctggtttttttgagaatatatgcacctcagtgtacaagctcgcagagctgtctttttccttctttttatttcattcctttccctttggctatcattaactcaggcatgacaggaagatccagacaaggacaaggtagtaaagacaccaatatttctaaaatctagggctttagagaatgttggggcagatgtaaccatagtaatcactggtatgagagcactgatgtccttactaaacagcaggtcacaccatcccaaggagaccttgcaaatgaagatgcagattagatgtctggaagcaagatttttattagcttagtcctgaaccttagctatgcaacaaaagccagctctgcagagatttaggctctcaaagagacaccatcaaggagttcgagactgttaggagcatagggcttagcatgagcatcaaataagrtataaaagaggtgctttgaaaagttgaaagaattatgcaaatgtaaggcaggtattaatattaaagatgtttatc

SEQ ID NO: 536513 - DNA, 636 bp, Homo sapiens
tcattcctaaatattgcagcatatatttattaagaattaggaggacattcacctacataaacacaatacaatgatcaccctcagtattggtacaataatattacctaatataaagtgttttttaaaaattttccaattaccacaataatgtcctttatagctattttttccttctaattcaagatctaatcaaggagcacactttgcatttagttgtcaaatatctttaatctcctttaatctggagtagttgctcaacctttttgtgtgtttcaggatgttgatgtttttgaagagtctaggccaactattttgcagaatatctttcaatttggatttaaccacttgtttcctgattaataaattcagactaaacatttttttggcaggaatactacatagatgatgctgtgtccttctcaatgcattgtgtcaagaagcccatgatatcaattttatttatggrcgatgtccagaagatctctttatgtaaaggaacattttctcctttgcaattaataagtaatacgtgaaacgttagtttgagatcagattaatatctagcttcccaataacattttttaactaatgtttttaaacctaaaggaattaaagataccactcctttctgactag

SEQ ID NO: 536514 - DNA, 635 bp, Homo sapiens
gctgctaaatagcaaagccaagacttgagttgtaatcttcacattaggctgcatcctagtgttttggtgtgacccaaagactcctccaggtatccccagagagcctccagagccagagcatggtcagcctcagtcrtttccttgttctaaacatcatataagcaaacaataccatgcagactttttttttttttttttttgacagagtctctctctgtcacccagtctggagtgcagtaatgcaatctcgactcactgcagcctctgcctcccggtttcaagtgattctcctgcctcggcctcctgagtagctgggataacaggcgcctgccaccacacctggctaatttttgtattttcagtagagacggggttttgtcatgttggccaggctggtctcgaactcctgacctcaggtgatccgctcacctcagcctctcaaagtgctggattacaagtgtgagccaccgcgcctggccccatgcaaatacttcacacaatatgtgcttcacatagacaagaattcaagaactgtctataagtttatatacatcaaaaataagtcacatgaaaaatatttttggaaacagacagaagtcagtttgaagccaaaatatattgtcttggacgagtct

SEQ ID NO: 536515 - DNA, 635 bp, Homo sapiens
gctgctaaatagcaaagccaagacttgagttgtaatcttcacattaggctgcatcctagtgttttggtgtgacccaaagactcctccaggtatccccagagagcctccagagccagagcatggtcagcctcagtcgtttccttgttctaaacatcatataagcaaacaataccatgcagactttttttttttttttttttgacagagtctctctctgtcacccagtctggagtgcagtaatgcaatctcgactcactgcagcctctgcctcccggtttcaagtgattctcctgcctcggcctcctgagtagctgggataacaggcgcctgccaccacacctggctaatttttgtattttcagtagagacggggttttgtcatgttggccaggctggtctcgaactcctgacctcaggtgatccgctcacctcagcctctcaaagtgctggattacaagtgtgagccaccgcrcctggccccatgcaaatacttcacacaatatgtgcttcacatagacaagaattcaagaactgtctataagtttatatacatcaaaaataagtcacatgaaaaatatttttggaaacagacagaagtcagtttgaagccaaaatatattgtcttggacgagtct

SEQ ID NO: 536516 - DNA, 541 bp, Homo sapiens
  misc_feature (1)...(541): n = A,T,C or G
nnnnaaatgcaaaatcagggcagtaaatagactgtgaaagggtacttgtttatgtgagctgaaacaagaaggcagaacattaccttgtttgattgcagctaggaaagcgtgcctccggtgactcattttgtgtgtgtgtgtgtctgttctgtatgtgtctgcaaatgactgataaaatgctgtcaatatttattgttgtttttagtatttgtgttggggctgcaaataaattttagcaagtaggtgaatttgcaaatatgaaatccataaatagtgaggctcaactctgtatacattaagacatcycccccacccctcccccacacaaacatgcacatttgattacaaccttctatctcacatcttaaaaaagatttgaggcctggtgcagtggctcactcctgtaatcctagcactttgggaggctgaggtgggagaatgacttgaggccaagagtttgaggcaagcctgggcagcaaagcaaaaccctgtctctataaaaaatttttaaaaaccagccaggcatgatgactcaggccta

SEQ ID NO: 536517 - DNA, 541 bp, Homo sapiens
  misc_feature (1)...(541): n = A,T,C or G
nnnnaaatgcaaaatcagggcagtaaatagactgtgaaagggtacttgtttatgtgagctgaaacaagaaggcagaacattaccttgtttgattgcagctaggaaagcgtgcctccggtgactcattttgtgtgtgtgtgtgtctgttctgtatgtgtctgcaaatgactgataaaatgctgtcaatatttattgttgtttttagtatttgtgttggggctgcaaataaattttagcaagtaggtgaatttgcaaatatgaaatccataaatagtgaggctcaactctgtatacattaagacatcccccccacccctcccccacacaaacatgcacatttgattacaaccttctatctcacatcttaaaaaaratttgaggcctggtgcagtggctcactcctgtaatcctagcactttgggaggctgaggtgggagaatgacttgaggccaagagtttgaggcaagcctgggcagcaaagcaaaaccctgtctctataaaaaatttttaaaaaccagccaggcatgatgactcaggccta

SEQ ID NO: 536518 - DNA, 591 bp, Homo sapiens
ggaagaaaaacactgggcttttttagggggaggtgagaagggaagaaagcttgtccgtgatttttccctgtcccttgaggaggtttttctggtgtctccttgatttctctgggaggcgtggttccagtagtgcagaaactcggattcctggtgggaaattcacacgcatattgtaccagaatgatacacaaaatgttcagctattcttgttcattttataaggytgtatcatggccactgtaatacattttctgagttcacaagtttaaagcctatctcagtttaggaactctaattcatctagtttacccgtagtggttccctgggccatgattactggggtaatctgatggatgagtatgtgagtattgtggatctttgacccggaagagccactagagacaatttagtttatgccggtaaaacgattcgggtttaggttgctaatactgacatttttagacgaggtgactaaggccaaccctggttaagaatgacgtgcctgaagtcacgttacaatatgttaagaattgtgaaaccaaaagttcttcctttgagtactgtattttttcaccatgtattgtgtttgct

SEQ ID NO: 536519 - DNA, 616 bp, Homo sapiens
gctgatgtaggtattctggtggtgctattatgctgcttaatttcccagagcactttttttgttaactgaattaatggtatgttatgttttttactgttaagtactgacatgtgaatacatgcaagaaaatgattgcttatcagtagcatataaattcatagtcgggaatgatggtgatgcaagataaccacagatagtccacatgtgtgactawgatggtgacacctttgctttctgatggttccttgtatacaaactgtttcattcaaaaaactatgtaaaatattgtataaaattactttcaggctacatgtataaggtatatataaaacataagtaaattttgtgtttaggcttggatcccatccccaagataacctcattatgtatatgcagacatttcaaaagttgaaaaaatctgaaatccaaaacattttggatttcagattttcttttcatttttatgaaaagtcccaagcatttattttcattttttatgacaagtatttcagataaggattactcaacccatactagaaagcatatttcactcctttctcccaataaatccagtgataaagtacttagattatgccattttgttcaaaaattcctt

SEQ ID NO: 536520 - DNA, 520 bp, Homo sapiens
ttttctgcttgcaccagagtaaagtggagtcaaaataacagcaataataatatctaatatttattgagcaattattatgtgcaagatatttttcaggcattatttcacttgattttcttatactaaccactctgagatggttagtatcattatatatctcatattataggtgagagacagctcagaggcattaagtaatttatcagcagatccaacaagtgatggatctagcatttcaacccaggtccatctactttataatgatagaacacaataaacctaaagtgagcaatatgaatttccttagtaagtcaatccttagtttcatcagagaaattaaagtcacaataaattgaatgtctttttttcttgttgccatacaaagactaaagtccccaaatatgtataaaaccatttatttttcccaattttctttcttggttaactcatattctctgtcagtgatggcttatwtggaatctgcgcttcttctacagcagctatctttccctggaactgc

SEQ ID NO: 536521 - DNA, 556 bp, Homo sapiens
gttttgttgtcttcaaagtgtttttcagagttttctggtggtgactcacagtaagacacatatttgacagcatagtcactgtgtgtatgtaacggaaacaaaagcttcatggaaagcagtgcgtatctttactgtatgtgatgcagtctagtattttctattctatttcaattcttagattcttcttctgtgtttatggtagatacttcttctcaggttaaggaaattaaaattaccctctgtgtgaggcaacattttgtcaagaaacaaatggtatgctctgttggtttcataaagggactatttacaaaggtaaggttagagcttatggcaacctgcaagagatgttataatgttataccatccctgggcctgaagtggagagaatggttcctggagcctagggaaggtaatttttatgagaagacatgacctgttaaggagggagctagaaaagtaaataactgatctcaactcttctcataccctccagtctcttgttkgtgtcttgtaagggcaagagggcaagggatctcattgatgcagttgattcaag

SEQ ID NO: 536522 - DNA, 616 bp, Homo sapiens
aaacacattattcaaggacaaacaactatggaatggtttaatgtgtacatgctttccgcttttcaacatttattttctttgacctgacttcaatgttgatgcttttttcatttgtctatgctttataaaaaattttactttttaaaaatcaacaaataatacttgtacatatttatggggtatatagtgatgttttgatacatataatgtatagtaawcagatcagggtaattagcctattcaccacctcaaacattgatatttcttctgaaatgcagcctgaactcctctctgtggatccaattgctgtcacagccacactgcatagccaggtggctcaaaggcaacttggggaatagtagactgagccacgtgtactcatggcacacgtgtactcatggcacacgtgtactcagagccacatggcactaggaaacattgataaaatactgtaacttggtgttaataaaacagataattatgtagaggagagtgatatatttcttatcaccttagcctcagatttaatcacaccgataagatttaatctcactaatctactttgcagtagctttccttcctggtgctgttcagaaacaacagtggtcctggctgc

SEQ ID NO: 536523 - DNA, 522 bp, Homo sapiens
tgtcaatagctcagagcgcatattagacagacaaatacattaagcacggaaatttgcattgaaataaacataccatcacgacttcttaaattaggattcacagtaactaccatttagtgagttcttatcatgtagcacacacagtgctaaaaattcaatatgtataaatacacacatacatatatacatacatatataatcttgtttattctttatagtaacagtatgaggtaggtacatttaacgttcccatgttacagataagggtactgacacttattaaatgaagatatttggtaagaggcaaagccagaaataaaattcaggttctgcmtgtctaactctaaaatctatagacaataacctgcataattgcaaagtgggcagactgataaccttataaaatcaggatcacccaaattcaaaatgacacccaacactctctgacccttattacataatttctctagtgagcaaacactgtcatactttgcaaagacaatttcatacttcctcaatgtc

SEQ ID NO: 536524 - DNA, 623 bp, Homo sapiens
aacacttttgaggttttcttcagtcttaaaagggggctcaggctcttaaaaagaaatgttcccttttctgccttctgacattttcatttgcaagtgatgcctggagtggtaacaaccatcttcagaccttgagataagccagtttaagatggcacaccaatatataaagagagcagaacagaaaaaacaaagaacctgggtccttgatatcgggttacctgaaactgccctgcttatacacttcctattatgtcataaatgtatccttattgtttaagccatttttaggtttayggttttatgtcatctgtaactaccctcactctactccttccattagctctaaaactcctagaactagctgtctggaaacaacatccctctttatccttctaatggaggaaccacaattgtcacttcttcatcagtccaccactattgttactacagtatcactgtttattgaggtccttcaatctgtcatgttatttcggtgcactgggcttctgtccatggctaacaaaacagcacaaccaacaaaaacttaaaccagcatttactgaatacatactatgtgtaagacatgaagacaatttctctcccattaaagagactaaaaaaaa

SEQ ID NO: 536525 - DNA, 607 bp, Homo sapiens
tacagcgaggaaagactggagctggtttcaaaccctggtcttcttagtcaaactctagtgatcagcctattctatctgttactcatctatttctaattagattataaaatctttctacctgaaatacccacattattgctttacatctcaacttccattttacaagtaataggaaatctgcaatcactggtagagtaatcaactctggcacaatctttccatgaaagaagatagagagactattaaaataatgtatattgtgagctcaaggacagtctcttatatgcctagacttatcacaatacttgataagtgttgataaactttttcttagaggcaggatcttgctatgttgcccaggctgtagtgcagtggtataattatagttcactgaagcctcaaattcctgggctcaagagatcctcccacctcagcttcctgagtagttgggaatacaggcatgtgccaccatgcctggctatttttgtaattttttatagaaacggggtctcactatgttgcccaggctgttctcaaactcccgccctmaagtgatcctcctaccttagccccctgaggggcttggagaccagagccactgcaccca

SEQ ID NO: 536526 - DNA, 512 bp, Homo sapiens
agcaggtactttcagatttatgatgggaaggcagagttctcctaagtgcctcgcttgggacatactgactgtgatgatgtggaatgagaatttctttaatacagcaatgcattaaaaatggagatatcactgtctatctagattgattaaaacattaaaaccactagatttggccaggcgcggtggctcacgcctgtaatcccagcactttgggaggctgaggtgggcggatcacaaggtcaggagatcaagaccatcctggctaacacgrtgaaaccccgtctctactaaaaaaaatacaaaaaattagcccggcgtggtggcgggtgcctgtagtcccagctacacaggaggctgtggtgggagaatggtgtgaacccatgaggcggagcttgcagtgagcagagatgggctactgcactccagcctgggtggtagagcgagactccatctcaaaaaaaaaaaaaaaccaaaaaaacccaaaacactagattagtaaggttgggagaaaa

SEQ ID NO: 536527 - DNA, 438 bp, Homo sapiens
ttatagcagtgtgaaaatggactagtaccgtccttttgcaagaacttggttcaggagccaggaaatagctttgggacaaagggccagactaattcagcaggagagatgggatgggaaattaggggaaagtttcyatcactgacatttactttggtttttgttttgttttatagttctttgctaattaattaatgactgtatatgtatttatttacatttgggaactcagaacaccatttgtggaaaactgataaatcatgaaatttgaggtagataccaaactcgtgttaataaattagctgctgggtgaagagtgtggaagagaaatccatcttcttttagggtatatggttataaaaattctatagacagttatataaggaagaagtaggccaatttacagaagtcaaaggcaagtcagccctaagaatttaaaag

SEQ ID NO: 536528 - DNA, 585 bp, Homo sapiens
gtgtcactgcagcagcatttaataagtaaaggtaaagtcatttggtaaagtactgtattagatgtcagatcaaatctaagatagccactaccataatgagagagagagaaaggtaatttttttttttttttgctcaaactagagctttcttaaatctaaggttgctttctcaatgtaaccatttagaaagccatctagaatgtttacggtttaaaaaaacagacaattgacagttttttattccttccaatgcattgtctacagaactcactctcactataagtcatgacagacgagattgagcatgtttggggtggtgtggccatagactagaagttctgacagtgtcccacataacaaatgtctccacaactgaagaatcacgattaactgaattacttgaacatctattcttagttacaagattcccaggtacaatcttctattttgctttgggaaaataagtgttttccatgagtatgttcaattggcaagtgaaagaaagtgatcagtaataacatacatatagaaaastagatacttttctttgacatggcagaatttcataaggagctgaggttttag

SEQ ID NO: 536529 - DNA, 584 bp, Homo sapiens
aagaaaggacacacatttccacccattaccggagaaaacaggagcaagaacaagactgacaaatccagtcaatgtataaaaaggagtgagagaggagaaggaggggaggaagtcaatacacgtaagaagccaaccctttcttaactgtgcctgccttcctgggttcaccttgctctgttttagagtccacacaatagcctgtgctttgtcttcaaggaaatcsatgaggcatcatttctacctgtacactgcagaaatcaattctgtataacttcctccttttgctaaatccctgagatgctgcctataaattcaaagaatttcaagcatcaacaataacccctacccccaccctagaacttagttatgaacatctgttgtttacaagggttcgggctgagagctgccagacttgttctgcaacctctactttaccacagaggctgccagggagggatgtctgaatttcatgcaaggatgccctgtcccgactgcttaagcaggaatcagcaaacacagctcagcatcctactgttgaagataatcctagtttgttccgattcattttctaatcctggctcttt

SEQ ID NO: 536530 - DNA, 451 bp, Homo sapiens
acacaatatttctggtcctttgagtctgtaagctttctcagacatattcttcctttcaactgaggtgtttcaattaattcatttatttatttttgggtagtggtagagcaagtaaggtagagagaaagtgggaggaggggatcacaaatatacagacaattttcccagccaacacgaacaaagatgaaacmcacttcaggctggaaaataagcacggcaacgagacgtgatttcatagggagcatattaaggctctgctagagtggtttcctgctccagaagctttgcagcctcattttatttgggaccgctgaagccaagggaacttcgtttggttaggagattgaaatttgtctttatatcttttccatctatcatttgtttgcacagtctctttactttccccacccccagagccttaggttgtataatacttgggcctttaaaggaa

SEQ ID NO: 536531 - DNA, 346 bp, Homo sapiens
ataacaacactgaaaaggagggaaaaaaaataaaattcttgattatgtgaaactatagatctaaatggaatgaagtctacacagtcatcagattggctgcatgtgtcattatcagttctcatgtgttatttggatatttatcttgcctttattagaaggaagtctctttttgtgtgggggtgcaggaggaamaacccccaggcccagtaaggaattctcttgaggacagggtatatttagaatgtttaatgaacacctatcaccaagaataggtgggtccttaatcagtattgactaacaacagatgccagagccaaagcaatcctgtaaatgttgaggacagaaa

SEQ ID NO: 536532 - DNA, 578 bp, Homo sapiens
ttgtgtacagcttaagttcaaaaacagatgggcccaaagtatcctagatgctgtgccaatttccactgcatgaaaacaaattactgaaaagcatcaggaaattttagaatagttttggggtttgattctctatcttctcaatggtccttcctccccaactcttccatttctcttcaccgtccctgtccccccattataccttgccactttccatctcttcttcatattcctcacttagcaaaggctggtttttaaaacctttattctcatttttactctttctatgtactgayaggtttaaccatcaggatgggactgtgttgataatcaagctagggctgttggttgtttttctagatgtttatacccttttaaaatcttccatctaggactagggaccttatgtccttatgtccttttcatatagagaaggtaaggctgggacctctgtgtctgtgggtacatttgtaggtcaaataattcaccagcttgcaaataaagtagatattcttctattgactttatcactggggggtgcacaattgtgccagtgccattgtctgcccttgtcgggagtg

SEQ ID NO: 536533 - DNA, 578 bp, Homo sapiens
ttgtgtacagcttaagttcaaaaacagatgggcccaaagtatcctagatgctgtgccaatttccactgcatgaaaacaaattactgaaaagcatcaggaaattttagaatagttttggggtttgattctctatcttctcaatggtccttcctccccaactcttccatttctcttcaccgtccctgtccccccattataccttgccactttccatctcttcttcatattcctcacttagcaaaggctggtttttaaaacctttattctcatttttactctttctatgtactgacaggtttaaccatcaggatgggactgtgttgataatcaagctakggctgttggttgtttttctagatgtttatacccttttaaaatcttccatctaggactagggaccttatgtccttatgtccttttcatatagagaaggtaaggctgggacctctgtgtctgtgggtacatttgtaggtcaaataattcaccagcttgcaaataaagtagatattcttctattgactttatcactggggggtgcacaattgtgccagtgccattgtctgcccttgtcgggagtg

SEQ ID NO: 536534 - DNA, 578 bp, Homo sapiens
ttgtgtacagcttaagttcaaaaacagatgggcccaaagtatcctagatgctgtgccaatttccactgcatgaaaacaaattactgaaaagcatcaggaaattttagaatagttttggggtttgattctctatcttctcaatggtccttcctccccaactcttccatttctcttcaccgtccctgtccccccattataccttgccactttccatctcttcttcatattcctcacttagcaaaggctggtttttaaaacctttattctcatttttactctttctatgtactgacaggtttaaccatcaggatgggactgtgttgataatcaagctagggctgttggttgtttttctagaygtttatacccttttaaaatcttccatctaggactagggaccttatgtccttatgtccttttcatatagagaaggtaaggctgggacctctgtgtctgtgggtacatttgtaggtcaaataattcaccagcttgcaaataaagtagatattcttctattgactttatcactggggggtgcacaattgtgccagtgccattgtctgcccttgtcgggagtg

SEQ ID NO: 536535 - DNA, 578 bp, Homo sapiens
ttgtgtacagcttaagttcaaaaacagatgggcccaaagtatcctagatgctgtgccaatttccactgcatgaaaacaaattactgaaaagcatcaggaaattttagaatagttttggggtttgattctctatcttctcaatggtccttcctccccaactcttccatttctcttcaccgtccctgtccccccattataccttgccactttccatctcttcttcatattcctcacttagcaaaggctggtttttaaaacctttattctcatttttactctttctatgtactgacaggtttaaccatcaggatgggactgtgttgataatcaagctagggctgttggttgtttttctagatgtttatacccttttaaaatcttccatctaggactagggaccttatgtccttatgtccttttcatatagagaaggtaaggctgggrcctctgtgtctgtgggtacatttgtaggtcaaataattcaccagcttgcaaataaagtagatattcttctattgactttatcactggggggtgcacaattgtgccagtgccattgtctgcccttgtcgggagtg

SEQ ID NO: 536536 - DNA, 484 bp, Homo sapiens
gaatggggtgggattcaaaactgcttttcctattcacttgcctttcatgtgtaaccacatgcagtgtgtcaacatgctttcaggcgccattaggcagcagcagttttgctccctctgggttcatggacccttggtattcytgttatgtgttgtcttagaatagctctgcgctctggggctctgagcattgtccattaactctttcagcaccagccctttgagatgctaagggcttttgaatgaaatgtaataaccaccacaatgaaataagaaaacagttactagtcaggagacctggattcttgccctgctccaccactgtctgtgtgacctcaggctccctgagcctcagtttcctcactcagaaaatgacaggcttggtctagactctagaccatcttgaaagtcccttctagctctgaaattccatgattctatttttgtacactctggccttttctctttgcacatgattctttcgttt

SEQ ID NO: 536537 - DNA, 484 bp, Homo sapiens
gaatggggtgggattcaaaactgcttttcctattcacttgcctttcatgtgtaaccacatgcagtgtgtcaacatgctttcaggcgccattaggcagcagcagttttgctccctctgggttcatggacccttggtattcctgttatgtgttgtcttagaatagctctgcgctctggggctctgagcattgtccattaactctttcagcaccagccctttgagatgctaagggcttttgaatgaaatgtaataaccaccacaatgaaataagaaaacrgttactagtcaggagacctggattcttgccctgctccaccactgtctgtgtgacctcaggctccctgagcctcagtttcctcactcagaaaatgacaggcttggtctagactctagaccatcttgaaagtcccttctagctctgaaattccatgattctatttttgtacactctggccttttctctttgcacatgattctttcgttt

SEQ ID NO: 536538 - DNA, 726 bp, Homo sapiens
ggccaagagggaaggtatcctcccccaasaatattgatttttcttttttcaactgtatgtaggccatgactaatgggaatggctacccatgtgtttactgtggacaaagacaagaggcttcaaaccaccattgtagctgaagaaagctgatacaggctcaaatcttcatcccagtccctaggcaatgcattctaatttctgtcagtaaagggctctactcattctcccaaagttggctttgtgctcctcttaggtccaaccctggcacctgaggtgtcaagaaaatgctgtcttcataactcactggagcctcttcctctcgattctaaaggctactcccagtgttctaaaactacacagatctctcgatgaattggctttgctgctgggttcctctttcttaaaagtatttaatcagcgattttcccagtgccccaggcatttcctgtacgagtgctgctgactgttttacttcctaccaggctgccctcctcctcttggcattcacacttccaactttcagatgagctctattaactcctgttcttccagcctccgcctggctcagccatctgggagccacacaggcattctttccatcccccagctcatagatttccttattgtagaagggcatatgttttcaagtaccttatcattctggctctttcccccgattctctcccagttccaagccattgattgtttttcctccttagttcattt

SEQ ID NO: 536539 - DNA, 461 bp, Homo sapiens
gccagggcctgttggcactgaacccagagcccaacccaactgatgttctcactgagcttcttgtcagatgccaggaaagaggaggcacatcatatgccttttcttccccaatagtagctgcttccartgtgatcatgatgagaggaaaaggctgtggggagagttaatttgatgcttgcttgtgcaatgaaatggcaatcaggcagatggccttactctatgcatagattcttctttgaggtttcttctcaggacccggacctcagagctgcttaagcaatagagaggatgatggatggccaaggaattgggatctctgggtcttttgggagggatggggaatattatcacagagttacagaatgccattgctgaagagggccttagggattacatttagtccaaggattttcagacttttctctaacagaagaattctttcttcaaaccaaaccttacat

SEQ ID NO: 536540 - DNA, 461 bp, Homo sapiens
gccagggcctgttggcactgaacccagagcccaacccaactgatgttctcactgagcttcttgtcagatgccaggaaagaggaggcacatcatatgccttttcttccccaatagtagctgcttccaatgtgatcatgatgagaggaaaaggctgtggggagagttaatttgatgcttgcttgtgcaatgaaatggcaatcaggcagatggccttactctatgcatagattcttctttgaggtttcttctyaggacccggacctcagagctgcttaagcaatagagaggatgatggatggccaaggaattgggatctctgggtcttttgggagggatggggaatattatcacagagttacagaatgccattgctgaagagggccttagggattacatttagtccaaggattttcagacttttctctaacagaagaattctttcttcaaaccaaaccttacat

SEQ ID NO: 536541 - DNA, 590 bp, Homo sapiens
ttcatagttctgaatcttttggttccacttgtgtggttgtgtgtacaagtcagagtgaacctcattcctgtggataagagccaccatttctcctactggtgaaattagaaggaggttgtatagggcttatgcgatagaaaagatcaagatggacctttgggtatagttggctttaggaggaggaattttaccaagacactgttttgctgtctctgtactacttcctgtgtgttaactccattctcagacaggccattctcccatggaggcaaggtgactgcatttccagccttccctggtaggttgaaatctagtggaaagagtctctgcctccctcctcaaagcccccataaagtttgtgtgtctcattggttttgattgggtaaagtgcttatgcctgggtccatgcaaagcacgtggcctgagttgtggagtgggaggttcccctcrccgagggcagttagaccaaagctaccaaaaaaaggaggagtggacgccggggaccaaaaaacagcaacatgtgtgctcctcaggaatgatgcttcccttaagattagcatccagactctagaaatccccactccagaatg

SEQ ID NO: 536542 - DNA, 600 bp, Homo sapiens
gagcttaaaagccaatggaggaaaaggtcaagtcccagccccctccatttgaagaaaggttttttcttttcaagcaagggaatggtccgtgggcatgtgaatgtgcccactctttgctgaggaggaaggaggccatttctatccagatgtctctctgcagacaagaggctaaaggacgaacggtaacaaggtgacaggagctgtctccacatgggtcctgcctcccaactctctcagccttctgctctcatctgtcatccaggggactgtggatgacctcatcccataaccacatctccaatgggagacagtggaacagccattccttcacacaggggaaagctaattggcaataatccttgcgggaaggtcagactcctctcttacagatctagggaaggcctggggtaaaatgatggctctttggaaaatgccaagctccttcagattccataccctctcgggccctctagcataggcaacgaacttgttcctggcttcacgctttctcattgaatcaaagctctcawgcatggcctggatttgtaaacacatgctggctgccagcagtggcaagttagcctcctgacccacttctct

SEQ ID NO: 536543 - DNA, 576 bp, Homo sapiens
gatcaaaagcaaatattgtgctgacatatccaatcaaatggacattgtcaaacatcctcagcctacatcctttaaaatacacccttcgytatttagacagattgcaattactgtagcaaaatcatgaagaccagttaggatggaaacttggaattaaaaggaataattttgaaaaaagaatcttttatggcctaaaagaactcatttaaagttttctatcctgggctaaatatctctggatgttcttaaatttgatttatactgttttattctgaaattgagctggtttctcatcttccccatgctttctgtggagctgatccaagcacagagtctacttgagtactgaaatagcctctgcacttggatcttctccatgagggttcaaagtaagatgaaacactggttcttgggaatggaatgactgtggatctcaaagccctgacatctgaaaacaaaaattgatttgcatggaaactgagttcagtgaaaactacgcattttcagtataataggtttaccttgtgtttttttttgttttgtttttatttttttgagatggagtcttgctctgtc

SEQ ID NO: 536544 - DNA, 576 bp, Homo sapiens
gatcaaaagcaaatattgtgctgacatatccaatcaaatggacattgtcaaacatcctcagcctacatcctttaaaatacacccttcgttatttagacagattgcaattactgtagcaaaatcatgaagaccagttaggatggaaacttgkaattaaaaggaataattttgaaaaaagaatcttttatggcctaaaagaactcatttaaagttttctatcctgggctaaatatctctggatgttcttaaatttgatttatactgttttattctgaaattgagctggtttctcatcttccccatgctttctgtggagctgatccaagcacagagtctacttgagtactgaaatagcctctgcacttggatcttctccatgagggttcaaagtaagatgaaacactggttcttgggaatggaatgactgtggatctcaaagccctgacatctgaaaacaaaaattgatttgcatggaaactgagttcagtgaaaactacgcattttcagtataataggtttaccttgtgtttttttttgttttgtttttatttttttgagatggagtcttgctctgtc

SEQ ID NO: 536545 - DNA, 518 bp, Homo sapiens
acagagggtgagtcctggtgaagagatccaagatggctaccaccgagctgcctggagagcaaccacccagacagggtgactacctcagcaagatgaaaataagagaacagctaatgtgattacaatatcaccagcagattatgcaggtaaagaaaagtttgaggctgaaaaaaaggtaagtagaaagaaaatgaaaattcctaatctagagaaaacmaaacaaatgagaaagaaaaattgctactgtgcaacatggttttattgtgaatcatgcatacatatataataatgtatgcagttaaattttatctaattcaaatgttggtttgggcagaatcagcaaatcaggagtgtttggacaagcacagggctggtttagggaccaggaagtgaaaggagctcaattctcatcttccacgtggggagtgagtagatagcatgctaacgattggaaaattaagacttcataacataagtgtgttatggaaagagatagaggaagataaccgaagaatcag

SEQ ID NO: 536546 - DNA, 512 bp, Homo sapiens
gccatcagcctcaactgcccgacatgtgagtgagcaaggctttgagttgactccagcctcagtcactgtaatctgactacagccacttgagaggccctgagtgagaamtgtcaaattgaactaatgtctgcctcccaaacccaggatagacaacaacaacaacgataatgataaacggtcacttttggtgctttatgccagcagtgggtggcttgttatgcagcaatgggtaagtggaacaccttcggtttaaggaattgacattgcataaatcacctttacgtgctaatacttatactttcaacatttagagaaattgtaggtaatatggtttacgttatacattctcacatataagtcattctccatatgatatccttttaacagcttaattatggcatttctggaatgttttaagcacatagattgtcctttaaaccataacgtctattttgaagcaaattactctcatcagttactatatacaaataaagatgttcattttagctaag

SEQ ID NO: 536547 - DNA, 482 bp, Homo sapiens
gcattacggctaccacttatcaaagccyactgtgtgctaagggctccacatgtactcacgggttccatcttcacagcaatgctcagatgtaggtactattgtctccatcttatttatttgtttattttattattattattatttttatttttagagaaagggtcttactctgtcacctaggctggagtgcagtaatgtgatcatagctcaccgcagcctcgaactcctggactcaagagatcctcccatctcagcctcctgagtagctgggaccacaggcatgcaccaccatgcctggctaaattttttactttttaatagggatgtggtctctatatgttgcccaggctggccgtgaactcctgagctcaagtgatctccccacctcagcctcccaaagctctgggattacaggcatgaaccacggtgcccagccatcctttattttattgatggagaaaatgagccatagggcagttacg

SEQ ID NO: 536548 - DNA, 482 bp, Homo sapiens
gcattacggctaccacttatcaaagcctactgtgtgctaagggctccacatgtactcacgggytccatcttcacagcaatgctcagatgtaggtactattgtctccatcttatttatttgtttattttattattattattatttttatttttagagaaagggtcttactctgtcacctaggctggagtgcagtaatgtgatcatagctcaccgcagcctcgaactcctggactcaagagatcctcccatctcagcctcctgagtagctgggaccacaggcatgcaccaccatgcctggctaaattttttactttttaatagggatgtggtctctatatgttgcccaggctggccgtgaactcctgagctcaagtgatctccccacctcagcctcccaaagctctgggattacaggcatgaaccacggtgcccagccatcctttattttattgatggagaaaatgagccatagggcagttacg

SEQ ID NO: 536549 - DNA, 468 bp, Homo sapiens
taacgtgctatctgggttaacaatcactggcctaggtactaggtaaatttatcctaatttcttgcacttctcccttcatttcttgctcactaactttaggtcactgcctgcaattagttttatcaaccctgctcagaggacagaagtaggtgtttcatctgtgctcttctcttctgctttgtaggcctctaatccctaggtagcaatcttctgtagtccagattcaactcccctcctcatggcacctgcttgggtagtatcagtcctgcttcccaaacccagcataataaatttgcttgtctgtgttcattttatatctgaagtgatgaattagcctatgtttatgtggtagtaattctaccagtgagttaatgtattacctatctyaggcaacacatttctaaaaaacgaggacatcctctggacacaggtgcattacaagggcttggctttaacgctgaggatttc

SEQ ID NO: 536550 - DNA, 468 bp, Homo sapiens
taacgtgctatctgggttaacaatcactggcctaggtactaggtaaatttatcctaatttcttgcacttctcccttcatttcttgctcactaactttaggtcactgcctgcaattagttttatcaaccctgctcagaggacagaagtaggtgtttcatctgtgctcttctcttctgctttgtaggcctctaatccctaggtagcaatcttctgtagtccagattcaactcccctcctcatggcacctgcttgggtagtatcagtcctgcttcccaaacccagcataataaatttgcttgtctgtgttcattttatatctgaagtgatgaattagcctatgtttatgtggtagtaattctaccagtgagttaatgtattacctatcttaggcaacacatttctaaaaaacgaggacatcctctggacacmggtgcattacaagggcttggctttaacgctgaggatttc

SEQ ID NO: 536551 - DNA, 621 bp, Homo sapiens
ctatataaagtatgatgcaaatgtagcattattttaaccagaaagcacccctaatcctctcctatacagaatctggacctgcttgtgcacccatggccattcaaaagtgcaagatayctcgcacccattacaatggctgctgtggaaggaaaataaaatctcgacacccccgaactctccatgccaaagagaagaattaagtttgggaactgaatggtgcaaaactgcctcttgttttgtttccaaatagatagctgcaaagatgcaatgccacttacctccccaggggacctccctcacaatttgcttacaatgaaattccttgtgggctccaagatttttactctaagacagaaattctgttgaatttcaccctgacaatgtaaatcaacagcttatattcataggtaagggacaaggataagattggaagtcatccttctgcttgcctgagacaaatgcatacttgactgcttcttctattctatgtttactttatcttatgtagaaatgcagattcactgaggagaaggccacacaaatgtgtagttgactgtttctccagcccctcttttcacatgtaaaatgtgaattcagtgaacagtgatcaaagcctcaaaa

SEQ ID NO: 536552 - DNA, 621 bp, Homo sapiens
ctatataaagtatgatgcaaatgtagcattattttaaccagaaagcacccctaatcctctcctatacagaatctggacctgcttgtgcacccatggccattcaaaagtgcaagatatctcgcacccattacaatggctgctgtggaaggaaaataaaatctcgasacccccgaactctccatgccaaagagaagaattaagtttgggaactgaatggtgcaaaactgcctcttgttttgtttccaaatagatagctgcaaagatgcaatgccacttacctccccaggggacctccctcacaatttgcttacaatgaaattccttgtgggctccaagatttttactctaagacagaaattctgttgaatttcaccctgacaatgtaaatcaacagcttatattcataggtaagggacaaggataagattggaagtcatccttctgcttgcctgagacaaatgcatacttgactgcttcttctattctatgtttactttatcttatgtagaaatgcagattcactgaggagaaggccacacaaatgtgtagttgactgtttctccagcccctcttttcacatgtaaaatgtgaattcagtgaacagtgatcaaagcctcaaaa

SEQ ID NO: 536553 - DNA, 425 bp, Homo sapiens
tgtccattatagatcagccaggttagtccttccagaatttgagtacccaatgtgcagttattaatgtccgagaacttaagactcaaacacaaccaaggtaaaggaaagactgaaaaggaactggtcactattgaaacaatcttaagacttgacatatacataaacaaaaatgttttctcccctttacactcatgaatagagggttaacagctatttaggttactgttgaaaatttaaatcttggagaatagaaaatttaattgagggcaagatgattttctaattgtttacaaggtctttgtattgccttttgttcattaaaatgaaaaaattgtattaacaatatyagaaagttaatatgttgctgatgaggttctcctctactggaataatttctaaaaatcaaagaaataggaaaaaattaa

SEQ ID NO: 536554 - DNA, 613 bp, Homo sapiens
tgccagcaacttgatattggacttcctgcctttagaaacgtgagaaataaattttttttctttataagttacccagcctctggcattctgttatagcagcacagaacagactaagacagccactgaaaccagatctatgtcccggaccaccctcatttgcctcaatttctctctmtatataataagaacaaataatgcaaatgctatctatacttccccgtgactacagggagactaagggatgaaatatataatcacactttgaaaatatataaatgttatccaaccatacatccattgtttcacatcaggctgggccacatagcttcctctgtaccctttagtttcctgcccttatctctatcacaggccatatatcaaatgcctagtaattatcagtgcatctatatattccctattctccccaacaatacataaaaggttattgcattgcattgaattataagacttgattactggaaagtctagacatcactcagggtcattgtggggcagcatggggattatgcagtgtcattatccactaagcacactggaggtcacaccagtgaagtagcacgtcagatgtaagcaagacagagctgggttgtga

SEQ ID NO: 536555 - DNA, 603 bp, Homo sapiens
tgctgtagcttaaatttcagtccaggctctctggactcggggaatttctttttgctcatgctcctgagaaccagagttctccaggaacatctgtagtctctgtcttcaatcaaagcatttgagagatgctttatttttcccctttcctctgtacctgtcacagaagggggcctgtctgaataagatggcacataatctgctgagtgcagcaacccctctgtgcagccttgaggaagaagacaaggcagtcaaagtaccttccatcatttcctggaaaatgtgtcggtagcttggagaggcagagtgggagatggaagtaacactgcatgaggagttaggtggtctatgttcaggggccagggttgtcacttactagataggggacctttagccagtcacttaactccaatggccttctgcttcatatcatctcttatgtagggtggtgggactggattaaggacagcagatagattagctgtcagtcttactgattggaagttgctgtccagagtacagtatgggggatggctgggaagcccatctcagctaagtgagaaagagcagtcaactattggtrtttgccaagtgtgtgacagtggc

SEQ ID NO: 536556 - DNA, 596 bp, Homo sapiens
tccctgcaggacagaagagagatgctgggaaccaagaacccagagggaactgtcataataaaggaaggcctgtggaaaggcgcctgtctgctgtggtttggtgwgaatgtcactgacacactgaggccaggcaggagccctggctgggagctgggccttagcacaggcctgagccttatttctcaggctgcgagaacagctgaggcttctcagaccagcatgtgtgcagggctgggctggacacgaggcagtgcaggcctgtttgtgactcacagagtgcagagggaggtgactgcagtgggtccagagccgccttggggcccagaggctccagagatgcagccacaggccttggttcctctgcctgggggtggtgtgagggaggtgagatgctgcctgggacaggcctggcctccctctcccttggtgtggctcctcaaggtctgaagctgtcctagtgtgggagactcacttcactgagaggggacttgaatttggaaagaccattggtttgggaggccagggacctggtccctggcctggctctgccagttactcactttctacaccttgggtttaccagttcatctctttgg

SEQ ID NO: 536557 - DNA, 596 bp, Homo sapiens
tccctgcaggacagaagagagatgctgggaaccaagaacccagagggaactgtcataataaaggaaggcctgtggaaaggcgcctgtctgctgtggtttggtgtgaatgtcactgacacactgaggccaggcaggagccctggctgggagctgggccttagcacaggcctgagccttatttctcaggctgcgagaacagctgaggcttctcagaccagcatgtgtgcagggctgggctggacacgaggcagtgcaggcctgtttgtgactcacagagtgcagagggaggtgactgcagtgggtccagagccgccttggggcccagaggctccagagatgcagccacaggccttggttcctctgcctgggggtggtgtgagggaggtgagatgctgcctgggacaggcctggcctccctctcccttggtgtggctcctcaaggtctgaagctgtcctagtgtgggagactcacttcactgagaggggacttgaatttggaaagaccattggtttgggaggccagggacctggtccytggcctggctctgccagttactcactttctacaccttgggtttaccagttcatctctttgg

SEQ ID NO: 536558 - DNA, 564 bp, Homo sapiens
tgctgggagcctccaattactgtgccactgaggccagcttcaggcctttcccaattgaaggtccccctgaacacttaacgaccagayggcagcagcaggcctacctgctgggcagcccacagggtgggatggtctgttcagatagaagccagtgctctttataaagaactgaggcttgtcccaaaggcaagaatggctgcactgagatgctaataggcaaaggggaggccatgggtcccatctaacccagaaacaaaataaactgtggcaagcaagtgcttctgggatcccagtccatggaagtcatgatgggagacataccacagcacagcaaagaggtggaaagagccctgtttggctgctttgttttgtttggccttaaaaaaggacaagacctctcacaccagctcccttagaagcccccaagctgcagccaagctcctgcagtaccaggcctgcccacacactttgaagattcctggggtttcagttccaactgtggctctcacctttttattttctggagggcaattcttccagaatatgttttagggaatttgaaga

SEQ ID NO: 536559 - DNA, 557 bp, Homo sapiens
ctgccggcgttcccctgtacaagcttccagcttgcttatctatgtttgcagctcgatttttcaggctgctttttattagaaaaaaaatgatttcttgggccrctttttgttgaaagggaagctctgccaaggactcttttacactatctgcctaaataatttctttctacctcctgtatcacattcactttatcagtggttcaggagagatgatgtttcagccagtcagtcctgggctgccacacctgggctgggatgggctgaggctgtgcttatgagctcaatcagaaatttaaccaattttaaatgacagtcttcccagagagcatcaggcataatgatggtggtgagagagaaagataatgcttggctcaaggagtatagtgtacatttcaaaagggcctttagtcttggcagtttctggtatatctgtcacagagtaaagaggaatcaaatctgtgttgaatgtagaactggaaatgtatgaacataacaataatcacatggttaatgccagtcacaagaggaccccacagtagtgtaagttaaacaaatgg

SEQ ID NO: 536560 - DNA, 621 bp, Homo sapiens
ctgtttctgaacctcacttccattttctgtgcctcactttcctttttctgtccataaattctctcttacaatgtagcatcatagtctctatgttttctggttggtagggctgcccaatttgcaaatcattctttgctcaattaaactttgttmaatttaatttgtctaaagtttttcttttaacaccagttatctcctgatgtatcctttcattgtatccttaagaaaggagaaaaggagtccaggtgaggtggctcatgcctgtaatcccagcactttgggaggccaaggtgggtggatcacctgagctccagagtttgagaccagtctagccaacatggtgaaactccgtctctactaaaaataaaaaataaaaaataagttagccaggtgtgttggcgagtgcctgtaattccagctactcaggaggctgaggcaggagaattgcttgaacccgggaggcagaggttgcagtgagccgacatcgcgccactacactccagcctggatgacaagagtgaaacttcatctcaaaaaaaaaaaaaaaaaggagaaaaggacttctttgggatttctgctaatatgaagatatatgaaataacttgattaccccttcaagga

SEQ ID NO: 536561 - DNA, 606 bp, Homo sapiens
aaaatagcttctctggtgttaacttacctaaactcctttgaatgatttgccaagtgacattttgaaaatgaactgacataagaagtaggtgggggatgatggatatttttattgatgatatgtaagtaattttactaaccaaggtggatttaaaggatattttaattgacgatccttaaagkttgtttttctcaagatcttccaagaaaatgtaagcctctgactaacgtaactcttaagttttgctcagcaattgcattgagagtgacttggacaattaattacccatttcaaccccttatgccaggggttagcacctcagtgtctctgaggaagttttctgattatcttttgtgaagcagatttcctccactgtgtggaagttggctctctttcagtccttgtaaactgtccaaatacatgtccgttaaagacagacaagaacaactccccatttcagaataaagatgaaaccttttctccatttctatatttgtttccatcttcctataaagaactttattgatctatgataatgtaattcttaatggatgtactgtcacctcaaaattaggaaagcattgaaaagattcataatttttactg

SEQ ID NO: 536562 - DNA, 606 bp, Homo sapiens
aaaatagcttctctggtgttaacttacctaaactcctttgaatgatttgccaagtgacattttgaaaatgaactgacataagaagtaggtgggggatgatggatatttttattgatgatatgtaagtaattttactaaccaaggtggatttaaaggatattttaattgacgatccttaaagtttgtttttctcaagatcttccaagaaaatgtaagcctctgactaaygtaactcttaagttttgctcagcaattgcattgagagtgacttggacaattaattacccatttcaaccccttatgccaggggttagcacctcagtgtctctgaggaagttttctgattatcttttgtgaagcagatttcctccactgtgtggaagttggctctctttcagtccttgtaaactgtccaaatacatgtccgttaaagacagacaagaacaactccccatttcagaataaagatgaaaccttttctccatttctatatttgtttccatcttcctataaagaactttattgatctatgataatgtaattcttaatggatgtactgtcacctcaaaattaggaaagcattgaaaagattcataatttttactg

SEQ ID NO: 536563 - DNA, 657 bp, Homo sapiens
gctgggtctcagatctggatctcacttcttaccatccccctccaccccgaccccacatacatacttacaatctcacagttactgtatgtctggaaatcatcaagttaatctcactatttcatttggtcccattcaagtcagccacaagaaactctagcctcccagttcatgccttagcrcaagccactgtcatttcacctggatgacagtggtggcattctgtctccctgctttcaccttatactcagcagctagagtgagccttttaaagctgttacctatgcctctactcaaaaacttctatggttttcctctacttcaatgtaagattcataagagtttttttttattatgttcagtactagctctacaatgtctagaacaacacctagcacataacgcatgctcagaaaatatttgtcagagaaataaggaaggaacagccccctccactcaatgttcccttcagtttccttagtctttttatttatctaactttatcttttttatcttaactaagtctttttttatcccacattgcttattctaaaaataaatataatggtaaatatagaaaaaatcatgtaagattaacaaaagtcttgaaccatgctttattctaaacacgtcccgtagtaatagtttctttcattatat

SEQ ID NO: 536564 - DNA, 657 bp, Homo sapiens
gctgggtctcagatctggatctcacttcttaccatccccctccaccccgaccccacatacatacttacaatctcacagttactgtatgtctggaaatcatcaagttaatctcactatttcatttggtcccattcaagtcagccacaagaaactctagcctcccagttcatgccttagcacaagccactgtcatttcacctggatgacagtggtggcattctgtctccctgctttcaccttatactcagcagctagagtgakccttttaaagctgttacctatgcctctactcaaaaacttctatggttttcctctacttcaatgtaagattcataagagtttttttttattatgttcagtactagctctacaatgtctagaacaacacctagcacataacgcatgctcagaaaatatttgtcagagaaataaggaaggaacagccccctccactcaatgttcccttcagtttccttagtctttttatttatctaactttatcttttttatcttaactaagtctttttttatcccacattgcttattctaaaaataaatataatggtaaatatagaaaaaatcatgtaagattaacaaaagtcttgaaccatgctttattctaaacacgtcccgtagtaatagtttctttcattatat

SEQ ID NO: 536565 - DNA, 585 bp, Homo sapiens
gttgccttcataaatgcttgtcaatgtgttccacccctgttctagtgctaagatagctacgaaagttgtatgtatacctatatgagtcaagagtacattgattttgttggaaacatgaacacatgaaaaagcatacacatataaatatggaagaaaaactgagctaaagrgaaaactgaacaaaagaaaaaaagggaattaggattgatttagtctgtcttagtggaatatttgatgcatgcagatgttccttaacttacaatgggattatacccccaataaatcctttgtaacttgaaaatatcctaagttaaaaatgcatttaatatacacaacctaccaaacactatagcttaacacggcctaccttaaacatgctcagaaatttacattagcctatagttgggaaaaatcatccaacataaagcctatttttttatgaagtgttgaatatctcatgtaatttattgaacattatatggaaacaaaaaaaaaaaacagatgatactatgggtactcaaagtagtttctactaaatagatatcactttggaccattgtaaaattgaaagactgtatatcaaga

SEQ ID NO: 536566 - DNA, 480 bp, Homo sapiens
tcaaggtggattttattctgaggcttcttcttttrgcttgtagatggccaccgtcttgctgtgtgttcacatgatctcttctttgtgcactttggagaagaaagttagctctgataaaaaagttgcctcttcttataaagacactcattacatcacaagggttccactttcatgagcccatctaaacataattgcttcccaaagccccttcccccaaatagcatcacattgggatttggggctccaacatatatattttgtggaaatagtagaaacattcaatccacagcactatccctgcaagacaggattgtacctggtaagacagttctgaaaatgtatgtggctcagggcagctactggcctgaggtttcacaggacagagttcagtgataaaagctggcagacaaaagttagtggagaaatccaggaaaaaggggtaacacagaaggaatgtatataaaatctgctcaaattgga

SEQ ID NO: 536567 - DNA, 480 bp, Homo sapiens
tcaaggtggattttattctgaggcttcttcttttggcttgtagatggccaccgtcttgctgtgtgttcacatgatctcttctttgtgcactttggagaagaaagttagctctgataaaaaagttgcctcttcttataaagacactcattacatcacaagggttccactttcatgagcccatctaaacataattgcttcccaaagccccttcccccaaatagcatcacattgggatttggggctccaacatatatattttgyggaaatagtagaaacattcaatccacagcactatccctgcaagacaggattgtacctggtaagacagttctgaaaatgtatgtggctcagggcagctactggcctgaggtttcacaggacagagttcagtgataaaagctggcagacaaaagttagtggagaaatccaggaaaaaggggtaacacagaaggaatgtatataaaatctgctcaaattgga

SEQ ID NO: 536568 - DNA, 592 bp, Homo sapiens
atataaaaaaattgctgaatgttcaactgcaatctttgccttaagagctagtcaagcataaacaaatcataaaaatatatgcaaatcaaagttcattcaagaaaattttcattttctgaagttaaaatgtgaataaaaatgcaacctagtttctggtaaattagcaagagtcattaaaatttctgttgaccacttaaatctgaactaacaaaattaacaactaggtagaaatatggttaataaattatcagatttggttccatacattgacccaatgttttccctcccatgaaaataatttaacagaaacaaacgtatatattaactatagtgtttattgtgatggaacatacaaaagaaatactttagaattagcttaaatttcagtatattgaggttcrtcaacattaaaattgttatatggaagattcttttgccataacatgaggacatgctatggcattgctacaatgaaaatacatttacacacaagaatgaaagtaaaatgctgttttaaaatgattgttttaagggttatttaaaactttctaaattttgttatatatttactttagtatattttcaagaaaca

SEQ ID NO: 536569 - DNA, 508 bp, Homo sapiens
tgcctcagctctgtagttgcacaagtatcttataactagctcttaaagagcaaatgctcctttctctttttaatttccttggccatcaaatttcaatgttctttcttgtgcatgaataatccatgaatgaacttcacatgaggcctgactcctgaccccatagtgctccatgttcattctggaagaaatgcttggtgaacgttctccaccattaattttgtggccttacctttttgcttggaaaatattatgtccaactcttaacatttcaagtaaaagaagcagctctgattttatccttggttaaagtctggggagagtgattygataatacacatgttaaaaatcttagctttatttttctttactcagatagaaactatttctgtttggtttaagagaaggttgaaccttgccctccaaaggaaaaataaacatattattttgttctccattttaattgattttcaaaacctaggctaaataaaatcacagagaaaatgagata

SEQ ID NO: 536570 - DNA, 638 bp, Homo sapiens
tattgatagtttaatttataaacctcattattattttacatttaaatgttatgtttaaaatgtttgtcataaaaaattcaagtagtacattgtgaaattaaaaatagcactctctattcatacaagcaatctttattaaagtgtttatataattgtttttatattaatgatatcatatgatacatattattttgcatcttgcttttcttctctcaatagtaaatgatgaatttctttacatgtcagtaaataaagatggaattttcttgcttttttaaatagctgactaatgttccttcctatgatagcaactacttctctattaatataatgactatttttctctggctggtgcagatgagtgacaaataataactatttttcaagttctttattaatagactttttcttttacctttcgatacttctagattcagttccctgttttatttgctagctcgtataaccattatttcaagaccagattatcacctcacatgtatacggactgcattttttcttgctaatctactcacccataacatcctacctttcatcttaccygcacatggctaccaggaccatgatgttagagcaccagggtaaccaataaccttttattcactactaaatgaaat

SEQ ID NO: 536571 - DNA, 517 bp, Homo sapiens
tggctggtgtttgaagccaggagcttgcctaaaccaagagtatagagtgaaaataaagggaggggatatgtttaatttctgaggagctacctatttaaaagactatacagagaaggatgccagggaagttgggaagtggacagataaaaccaatgttgtgtgatrccgtcagtaccaagagttgaaggaaggtagagagagtcacttcaaaggttaagtcgagtagaatggagattagcaggggcagggcctggtggtgaggcaaatgggtagatgttggtcaaagggtacaaagtttcagttatgtagaatgaaaaatttctagagatcgaatgtataccacggagactatagctaataatactgtattgtgtacttgaggtttgctaagagaatagatcttaagtgttttcacctcacatagttataaaactatgtgaggtgatggatatgttcattagtttgattagagtaatcagctcactatgtatatgtatatgaagacattctgtttgtg

SEQ ID NO: 536572 - DNA, 586 bp, Homo sapiens
ctgccaccaagacaacccacctcctttcttcagtactttgatggataatcaaatggaatatctaccagaataatccaaacagctatggagagagtacataaaacttgcaatttagcccttccctcttttcccaaccaaaaattagtatctaacttcaagatagacttaaaaaattagaggaaatatactttaatgaagtagcagcaaacccccaaatttatgaataaattaaactccaaggtattcaacattcaggtagtcatcacagtgttgatttttacttttttttagggcaaaagggtgggggagaaaattrtgcttataggagatgagtgaatgaagccacttcagaaaagttttaaaatatgagctgagaaacaataaaatcagagttgtggcaaggagatatcctgtccatattcatttaccatctccttcaagtaagcagtcaacttgtctcaatgtggtgcaacatggttgtataataattatattaggaacagaatgctgatagatactggaagtgatgtcaaagcagcctcacgagtgctccactggcgccccctgctgtctcctctgtagtcat

SEQ ID NO: 536573 - DNA, 618 bp, Homo sapiens
gagggtctggtcgtggaaagtggggagcaaacattcactactgtgattatgtgcaacattctctaaattcttccagatgaaatcattctttcctccagacttcttgtaacagatccgtgtatagatatatgtccccattggaatattgggggagtattagtctggtctcatgctgctaataaagacatacctggggctgggtaatttataaaggaaagaggtttaatggacttgcagttccacgtggctggggaggcctcacaatcatggtggaaggtgaatgagaagcaaagtcacatcttacatgatggcaggcaagagagcgtgtgcaggggaactcccctttataaaaccatcatatctcatgagacttattcactatcatgacaacagcacatggagacgtgcccccattattcaattacctcccaccaggtccctcccatgacacatgggaattatgggagctacaattcaagatgagattttgrtggggacacagccaaaccatatcagggtgtatgagattcacactgacaggatcttgcacacagaatgaagcttattaggcaggcaatcagtgccgaatagatgagtgcactaatgggcatgcacatg

SEQ ID NO: 536574 - DNA, 573 bp, Homo sapiens
tcagaaacttaaactctttaacttaaatgcaagaaaaccaagagtaagagaaaggaaatgtgctggaaaaacaaaagggaaaagctcaacaacaamtgggatttcagaaaggacaggaatcagggcaattccagggatttagtagcatttatttaatctttcattcaatacatatgtttttattatctactatgtgctaggcaaatgtcttcttcattaacaagccaaaacaggtacctaccctctcccataggagtgagagagggagaaaacaagtaaaccaataacagcacatagaaatttcacatgacaaaaacagcaataaaaaacaataaagaagactgggcatggtgcctcattcctgtaatcccagcactttgggaggccaaggtgggtggatcacctgaggtcaggagtacaagaccagcttggccaaagtggggaaatcccatctctactaaaaatacaaaaattagccaggcttggtggcaggcatctgtaatcccagctactcaggaagctgaggcaggaaaatggcttgaacctggaaggtggaggttgcagtaagccaag

SEQ ID NO: 536575 - DNA, 563 bp, Homo sapiens
tgcatacattatcatttcagagattaaaagtcatcatgagaattttgctgaactctctgaaacagtggcaaattgcatctctgtatggatgggaagctaacaagtgaaactaaggactactgctgccgtcttgctagatcatggagactgaatttgaaattaccatggaagaaagagttctgaatgcctcatttaagccatgaattcaattgtatttgaacctaccctaacccaagtgtactcagcacatgaaacaatcaatcttctatttcttcagccagtcctgattatattggctctcttttacatgaagaatcttwaaaaaagtgctcagcttaggctttgacaagaaaaatataaacatagaaatgaataaaagtataaatatttttcagattgagagtgataaggaaaagtgcccctccatcttttgtagaagtcccttatttgcggttactctagcatatattatccttgaatgttccacatccccccacactgcttaagcattttatgcgttttatgtggggctacaaatagcaataggctctggcaagaacaga

SEQ ID NO: 536576 - DNA, 578 bp, Homo sapiens
tgacaggggaggagaggggctgggaatagggctctagaactggggcctgggtctgtgtctactcaggggcagggcatgggtgtgcatgtatgtacttgtgtgyacacgtgtgtgtgcttgtgcacacatccacacctggtctttgtgagttcgcatctctcagcactcattactcgtgctgcatcacaaagcataagccaccctcgggcattggccgagcctccacagcattctaggaactctgctgggcgctgaggattcagggaggaaggacgcaggcactgttcgtcagcagtttagtcagagagacgaatgtgtcggtgaacaactatgacaggataaacgcaatgagaaagtggaggagtggggaccctagaagaggtgacatttaggctggccttgaaggagaaggagcacttcacagattagagaaggtggaaaggcatagcaggcaaagggaacaggggtcacaaactcccagaggcgaaccctgcaggtgttggatgtggctgtggcagaaggacagacggcaggcaacacctgctgggtggacgtgaatggccaccaaggcttcctca

SEQ ID NO: 536577 - DNA, 435 bp, Homo sapiens
acaacaaattcacccacattaaggagtagagcgagtagcatactggttgcctgagatctggtttcaagtttttgctctgccatttacttgctgtgtgtctccagcaagttacccaacctttgtgtactcaggcttcccwtctacaaaatgggtacattaataaccccttctttgacttcctcaagaggtggtcctgaggttcaaactcaatgttagtccattataaagtggggtaatagtagcacccacctcatggtgtctcagtgaggaataaatgagacagtcatataatcgttcagcacagcgcctagcaggcagtagatgccccagaaaggcagctggtcttgttcataaagcacaggtagaatatgtggcactagcaccgacaaaggtcaccaaccttggaagtgtctagttcagcttctcatgggtggt

SEQ ID NO: 536578 - DNA, 435 bp, Homo sapiens
acaacaaattcacccacattaaggagtagagcgagtagcatactggttgcctgagatctggtttcaagtttttgctctgccatttacttgctgtgtgtctccagcaagttacccaacctttgtgtactcaggcttcccttctacaaaatgggtacattaataaccccttctttgactycctcaagaggtggtcctgaggttcaaactcaatgttagtccattataaagtggggtaatagtagcacccacctcatggtgtctcagtgaggaataaatgagacagtcatataatcgttcagcacagcgcctagcaggcagtagatgccccagaaaggcagctggtcttgttcataaagcacaggtagaatatgtggcactagcaccgacaaaggtcaccaaccttggaagtgtctagttcagcttctcatgggtggt

SEQ ID NO: 536579 - DNA, 435 bp, Homo sapiens
acaacaaattcacccacattaaggagtagagcgagtagcatactggttgcctgagatctggtttcaagtttttgctctgccatttacttgctgtgtgtctccagcaagttacccaacctttgtgtactcaggcttcccttctacaaaatgggtacattaataaccccttctttgacttcctcaagaggtggtcctgaggttcaaactcaatgttagtccattataaagtggggtaatagtagcacccacctcatggtgtctcagtgaggaataaatgagacagtcatataatcrttcagcacagcgcctagcaggcagtagatgccccagaaaggcagctggtcttgttcataaagcacaggtagaatatgtggcactagcaccgacaaaggtcaccaaccttggaagtgtctagttcagcttctcatgggtggt

SEQ ID NO: 536580 - DNA, 631 bp, Homo sapiens
tctccctaggctcctactccctgtcagccgccacccagggctttctgcctttagtaggaaagggggtcttcaacaaaatctacactttggattgaaactgccacccaaacgcaaatcccctctgttcctcgtggggccgtgtctcacacatggctgggaaacayacactgtacccacccacttccggagcactgccttgggctcctagaactcatccagcccatcccagctcccggctctggtacacgctttctccccagacggcacccactcctccctcagcaaagactgccctggctgccctcggctgggccttcccctgttactcagcctctgacacacccaaatctcccctgctgcacccttatcacactgtttgattacaatagtgtatgtaatggtgtgctgtctgcttctcctgctaaaatgttaactgccagtttgtcttatctgctgatgtgtccccatctctggcagagcctctgcacatagtaagggcccagtaagtatctactgggtgaataaatgcatgagtgaatgcactaattagccccctaactgcattctcctgcctcggccatccagcaacttctcctggggagggtctctttctctcctccctgccatcctc

SEQ ID NO: 536581 - DNA, 380 bp, Homo sapiens
ctgctgctatgggcaccttcatattgggcatttcccccaccatagtggggctctagacctctgcggaacagcctcaggctgactaatggagtggggctccctactccaaagaaatgggaaactgagtcaggctcccaggcctggtccctcctgctgggactgcgcgaggaaytcctgcctccaagaagctgggatgctgggaagatgggagctgggaagaattttgtctaaacagtccctgactgtttagatcttgttaggtaaactgttaacttagctcttgttaggtaaaagcaaggaggaaagggagggaaagggaacagggacgtgtggaagctacaacatcaagatccgcattcttctctccactttggtgagga

SEQ ID NO: 536582 - DNA, 380 bp, Homo sapiens
ctgctgctatgggcaccttcatattgggcatttcccccaccatagtggggctctagacctctgcggaacagcctcaggctgactaatggagtggggctccctactccaaagaaatgggaaactgagtcaggctcccaggcctggtccctcctgctgggactgcgcgaggaattcctgcctccaagaagctgggatgctgggaagatgggagctgggaagaattttgtctaaacagtccctgactgtttagatcttgttaggtaaactgttaacttagstcttgttaggtaaaagcaaggaggaaagggagggaaagggaacagggacgtgtggaagctacaacatcaagatccgcattcttctctccactttggtgagga

SEQ ID NO: 536583 - DNA, 565 bp, Homo sapiens
agttctccacccacccctctcgcccaagtgagtagggctgaccagatgccccatggagctccaggcctcaaacctatggagtcctctgaggccttatgccaggctctggttccaggatggtggcctggtgagcagattgtcctcactggtcagtttacagagtcacacaaacttgggtgccagaatgacgataacattttgatttagggtgatgcaaacgtgtatctgtacaatgcccttacaaaacctacttgcccaagacctcaagtacctgaggggcggccttaacacagaagcccacatgcctacatacaagcctctggcaggcatatgccatcacaatcctttacaccaaaacctctcccctgtgcccctcacatcagccctmtgaggtaaatattagcacccccactttgccatgtgaggaactggtttagagagatccaagggcacacagccaggaagcaatagagaagggatttgaatctaggtctctttgatgccaaaatgtgtctcttcatgcttcctaaccagagtggtctccactggggcaagcaagctgcag

SEQ ID NO: 536584 - DNA, 514 bp, Homo sapiens
agggcctgtagtcctaggacatggctcaagagcttacatgcatgcagggccggtagtcctaggacgtggctcaggagctttcacgtgtcgggccagtagtcctaggacgtggctcaggagcttacacgtgtagggcctgtagtcctcggatgtggctcaagagcttacatgcatgcagggccggtagtcctaggacgtggcttaggagcttamactcaggtagggcctagtcccaggacgtgggtcaggagcttacactcaggtaggtcctacagtcctaggacgtggctcaggagcttacacacgtgtagggcctgtagtcccagcgacagacacaaaaggaaacagaagccggtggacacccctggaaagtcaggcctttttagccaggagaggttagtttataaggaaccatggattgtccaaaagatctgattcaaaacccttcccctgcccatggggaccttgtgtcactcagccctcgaagtgcatggccagggcctctcccagacca

SEQ ID NO: 536585 - DNA, 675 bp, Homo sapiens
ggtagctcatacctttcctacctaaccaagcragaaactgaggcacagaacgtggcaggaaaatatgcagcttctaagtagcagattaggattcaaaccagtgctcttcgtcacattgctgacctacctctcaggctgagataacgtccaaaattaaccaggtagaacagtgttccataaatcagccagaaatggtccttgtggatgggcctgtggttattccctgaagaacgagaccattggcccaaaaatccacctgtgtcacattcaaatgtttacatatccaattacttaaaaaataccccaatcaagcatgtttacagccatttacagccatatagattatctgctttggtgacaatcaacccaagacctctgttggcaacgggcatcatgccaggtccagagagggtgggacagagacacaaacaggaaacgctctgtccctgggagcctcgctctgatgggcctgcggggacatggcacagaccatgcggcacaggcggaaggcggggacacggcacagaccgtggggcacaggcggacggagggccaggagaaggggctgtgctgccagcaggcagtgctttgagctctaatggatgaacattgctaaccagcgaaggtggagagagggcacccgtctgagaagatgaagaggcagcaaagcacagc

SEQ ID NO: 536586 - DNA, 521 bp, Homo sapiens
tttcaaatgggtcgtctctttttttagaactgattttttttaakcagtgatttatggggtgagttgtagcgctctcctgaactgcagagggagcgcactgaggaacctgggttttgatgctgtgcacattggctgagtcaccagcccagggccccgtcagtcccattattaagctcatttcttgctcttctcatcgttactcagacgcctttaaaaaagcaaactcctgcttgccgtcactggctgtttggcaaatgggtgtttaccctggaaagacgggcattttgtcctctggaacgtctatggcgccctttggtgacgtggtcggtttctgaccactctatcttgtgggtgtccttcctgcttgcaccttcccttcccgaacgcctccacctccagggctttaatcttccttttttgtgtgtgccatgcagggttaatgactattgtgccaaaaacttgctacatctcaaaagaagtaattgcatccatttgttggtgatgatcataaacagtgccct

SEQ ID NO: 536587 - DNA, 417 bp, Homo sapiens
gttgaatggggctaataaaccgactgtcaggattaatgtggatcagatgcgctcatctcacagccctgcttggtaaatagccgcttccactctgtcctccaatgtggtcctccatttattttctttacctccatttatccaggcgattccaggtgacagtgactatcaagaagggcgtacagaggaaatctgtggaagggagctcgaggagcagayatgggcgcagggaacgcagtgcggggagcacgggtgcggggatcatgggcatggggagcacagatgggcgtggggaggacggatgcagggagcatgggcatggggagcacagatatgtgtggggagcatgggtatggggaggacgagtgcggggagcacgggtgtggggagcatgggcatagggagcacagatgggtgcag

SEQ ID NO: 536588 - DNA, 417 bp, Homo sapiens
gttgaatggggctaataaaccgactgtcaggattaatgtggatcagatgcgctcatctcacagccctgcttggtaaatagccgcttccactctgtcctccaatgtggtcctccatttattttctttacctccatttatccaggcgattccaggtgacagtgactatcaagaagggcgtacagaggaaatctgtggaagggagctcgaggagcagatrtgggcgcagggaacgcagtgcggggagcacgggtgcggggatcatgggcatggggagcacagatgggcgtggggaggacggatgcagggagcatgggcatggggagcacagatatgtgtggggagcatgggtatggggaggacgagtgcggggagcacgggtgtggggagcatgggcatagggagcacagatgggtgcag

SEQ ID NO: 536589 - DNA, 585 bp, Homo sapiens
tcttcaaatattgtctcgatgaaatcacataactgcttcttatcaaacttgtaagacactttacaaagagtaattttactcttaatggcacattaatgcaggtatttgccaaatctggaccaaatgcatctcttgtttgctgctattgaataaaagagagggaggaaaaaatactgatagtaaggccgccactcctactattctacttgcgaataaagaaagaataggccrggcatggtggctcacgcctgtaatcccagcactttgggaggctgaggcgggcggatcacgaggtcaggagattgagaacatcctggccaacatggtgaaaccccatctctactaaaaatacaaaaattagccgggcgtggtggcacacacctgtagtcccagctactcaggaggctgagacaggagaatcgcttgaacccgggaggcggagcttgcagtgagcaaagatcgcgccactgcactccagcctggcgacagagcaagactccgtctcaaaataaataaataaataaaaaagaatattttacccaggagttttatttgacttcggaaaaggagaacatgcaaacacag

SEQ ID NO: 536590 - DNA, 549 bp, Homo sapiens
cgaccgtgaggtcactgagctaacgacrctcagctcatgcaggtcacacacagcgtcagcattggagacagatcatcatccattttaccaacaaatggggaggtggaaggacttcccacacagaaccttgagctaggtcttgaatacagagtgagactttaaattaaaagaattaaaagagggcgtgcatggcaggggctgggcaggagcaggagtgtggagatagacccttgtggcatgctgtgggactagtgggtgaccagcctggttccagggcttggcatggggaaagggtggctgtttgtcctggagaggaggtgggaacagatgtcatgggagccaggcttcgaggcccagacctgcagatggttggaactggaagctggtgagcccaaaggtaaccccctgcccccatccccccactcccccgctactgccctgtagccaggacacactgcagaaaacccttgccttcctgggtcacagcttggagcccctggggatgggagcaccacagcctcctgctgggctcctaagctgtggagccag

SEQ ID NO: 536591 - DNA, 572 bp, Homo sapiens
aaagtcaaagagctgttttgtcccctatgttttcttgtgggagttctacagtctcagaccttatattttcagttgttattcattttgagttactgattgtatatggtgtacaacaaggatccaatttcattcttctgcgtgcggctatccagttttcccagcaacattttttgaagaggctttccatttccgtttctcattgtgtattgttgtcaaagcttatttgaccrtggaagcatgggtttatttttgggtgttctgttgcattggtgtgtgtttctgtttttataccagaaccatactttttttattattaccatagctttgtaagatgcttttaaatcaagaattgtgatacctccagctttgttctttctcaaaatgcttagctatttgtggtctttttatgttccctacaaattttgggagtttttttttttgtgttgaaaatttcattggaattttgataggtataagtcacggttatttaagttgaacagcctttttctaataacaactggtaatataggtgtttatatcctgactcaggttcctgtgccagatttttaaag

SEQ ID NO: 536592 - DNA, 533 bp, Homo sapiens
tatcccagctgggtatcttcttccccaaatcaaaaagatcatttcaaaaaggaagagaaaaagaaagcgtccttcagcagggggtatttaaggaggatcctggaggaggcaattgcagagtggcttaacccacagcagagaaagagcaacccaacagcccacaggcacaaggcaccaggacagcagcaccacaatcgttgctttcaagagatccaagcctagattttcccctcagtcctgcaaagtgccccataagccccagaagtcgtccatgacttaccatctgcgaggccacgacaccgagcagagcgcagcaacttcccctttgctcagagggtctgactcccttctcttctctcagggctgctgcctgtgacgcgccaaggccargctctgagccccttgggactactgtgcccataacagcccataatagcctataacagaccacagggcctgagctaccgcgggctcctgtgacccaaaaaccgaaagacaagacaccaggcatggagcaaagctcaaagctgggc

SEQ ID NO: 536593 - DNA, 200 bp, Homo sapiens
ggcagctcccagtgaaaggaggcttattaattagggagggagcttattggaatgtcagcagtggaatgcagaggggaagagactctaagtcagactagctgcttcagtcctggcaccataatcttggatggatgasagaactctctgtgccttagtttccacatctacaaaatggagagaataatagtgtgtatgtcata

SEQ ID NO: 536594 - DNA, 372 bp, Homo sapiens
ctctcttgttctgctaataatgaattattattyatgctcgaagccaaaattattaacctcttaaattatatgcatcaaaaggagatgactctatctaaaaccaggaacaaaattagatatgggtgatagtgtctctggctgtctaatgacaacccgctcccttcctaatttaattagcccactctccggaagcaggaatcaccaagctgaagagctgtgtgtgaaggcttctccgtaaatgtgagtcaaacaacgtattcggttggtgcaaaggtaattgtggtttctgccattgaaagtaaaggcaagaacctcaattacctttgcagcgacctaatacacgcccaccatgggtttcctcctggggacaca

SEQ ID NO: 536595 - DNA, 622 bp, Homo sapiens
tgaagttatctacacagtgcagtttttgtgtatagcaaagtgaggattcaaaatattaagtattttttgagtaacttcacttcactttgaggtctctgtgtagctgttctccagaaaggaatgtagtcaagaacagtgaattataagagcttagtgttttccaccttttgaaggcctagttgcatccacataaacttttggttagttcagggtagcawtggtatttataaccctagattttcctaaaattcagcccattctccatgtttggtgactttattcaaggtttcactctcacatagttgaattctactggttttaactttaaacacacgcagtcatttgcatccctagagtaaagatgtccagaccttcctcatttttgccttacaaaaatgcaaaacagtggcacatgggccccctaccaccaaaattataacagccacaatgcaacttacattttggtggaggtaataggataatgtaatgttttactggttcctactatcttaggggatttcattagctacaattcaggctgtgagatgcaaccatttgagcccagctcataaaaagaatacaagtatttctgaagcctttccattacattactctaacaatc

SEQ ID NO: 536596 - DNA, 622 bp, Homo sapiens
tgaagttatctacacagtgcagtttttgtgtatagcaaagtgaggattcaaaatattaagtattttttgagtaacttcacttcactttgaggtctctgtgtagctgttctccagaaaggaatgtagtcaagaacagtgaattataagagcttagtgttttccaccttttgaaggcctagttgcatccacataaacttttggttagttcagggtagcattggtatttataaccctagattttcctaaaattcagcccattctccatgtttggtgactttattcaaggtttcactctcacatagttgaattctactggttttaactttaaacacacgcagtcatttgcatccctagagtaaaratgtccagaccttcctcatttttgccttacaaaaatgcaaaacagtggcacatgggccccctaccaccaaaattataacagccacaatgcaacttacattttggtggaggtaataggataatgtaatgttttactggttcctactatcttaggggatttcattagctacaattcaggctgtgagatgcaaccatttgagcccagctcataaaaagaatacaagtatttctgaagcctttccattacattactctaacaatc

SEQ ID NO: 536597 - DNA, 622 bp, Homo sapiens
tgaagttatctacacagtgcagtttttgtgtatagcaaagtgaggattcaaaatattaagtattttttgagtaacttcacttcactttgaggtctctgtgtagctgttctccagaaaggaatgtagtcaagaacagtgaattataagagcttagtgttttccaccttttgaaggcctagttgcatccacataaacttttggttagttcagggtagcattggtatttataaccctagattttcctaaaattcagcccattctccatgtttggtgactttattcaaggtttcactctcacatagttgaattctactggttttaactttaaacacacgcagtcatttgcatccctagagtaaagatgtccagaccttcctcatttttgccttacaaaaatgcaaaacagtggcacatgggccccctaccaccaaaattataacagccacaatgcaacttacattttggtggaggtaataggrtaatgtaatgttttactggttcctactatcttaggggatttcattagctacaattcaggctgtgagatgcaaccatttgagcccagctcataaaaagaatacaagtatttctgaagcctttccattacattactctaacaatc

SEQ ID NO: 536598 - DNA, 600 bp, Homo sapiens
actctccccaggtggttctaatgtgcagccacggctgacgaccactagttcataatcagttcagaactctatggccaatcaattccttcagacacctggaatcctggaccagctacagggacaactgattattctatttgtgtagacctggctacccagggacccacctcaaatgccacatattatcaataacaccttaactctattgttcccaaacccaaccaaacaatatacaaaacagggagatcctgtatacaaagcagacatccgttggttcacctaccaaccttccgcatcactgtcccctatgttggtgcctggaaatctgaatttgtaaaggctccatagagtctgagttccctgaccaacattcatggggctacgttaatgtcttgtgttaaaattccagtacccaagttctcaagtaaacagcaaatattactaggaggcrcatgtcccaaaatagtttgggggaactatttgcactcaaagtcacaaggctgataaatgataattaatgtagtcatgtcataagggagagtgacattcgtgtgagaacagctagagagtgagattagctcctgttacttcttggctggc

SEQ ID NO: 536599 - DNA, 580 bp, Homo sapiens
aatgttattggaagcagaagcagaatcttacagggtttgtgaatatcacccccatatttgtatatttgagaggaaaaaaaagcagtccattttgatatggaaaagaacagatttggcatataaaggataccccagctctggttcaaatggtctttgtgacccctggcaagttgcttaccctttgtgggcctccatttccttgaacactaaatggrtgtattggtctgaagaggtatccaaattctccaaagtcttctaggagtgaacccttaatcctgggtagggctgaccatgactggggatggggcagtcagggcctcacccctgcttcattcagagcagctcccattttatgtttctatgttaaattctggaacaaaatgttctgtgtctaaaaacccaatggtgatacgtaaaatgtgggattgaggggatgtttgcttcagtcacgattctttgtggtgcaagccaaagaaagccccacccaagccggcctcaacaggaagaaaatgtccactcacaagatgtccccccaggctcaggttcatgtctccgtggctcctgcgcctgcttcttcccc

SEQ ID NO: 536600 - DNA, 510 bp, Homo sapiens
aaggccttaatgaaaggttgcacatgggcactgaagacctttgaggtaatgaaggtgaggaagagtactccagatggagggaacaggcatgctggagctcagaccccagagacgcattagaaatgctggaagccccatggaagggcagtgtctgcatgctattgacgtgagctgaggagtccaaggggttcttgtaaaatacactgccccgtatctggatctgaccatctgacttcgagtcccctgtcctttcaatgtctccacccggcccgcctcagacctcccacctacttccactcctggagggacaggctctccaccctatgttgtgtcctgtctgtgactgagccctaagtctcaggccacacctttgttctcgtcttcatttcctgatcctgtccttgcccacgtcctgcacccagatcagaccccaaacctcctctggtatttttgtcttcaccaatgtcctggtgygggacagctggtctacctggtaacagcaaagcctgc

SEQ ID NO: 536601 - DNA, 594 bp, Homo sapiens
tcactagaaggccatgcagtggggaggggccagctcaactctgggatcctcagtgcccaccacaccgtggcactgagctagcaccagctagtatttgttggataaacaaagcccaggtatttttgattccaaaccctgtgttcttcccaytacccagcccgccctgccaggatcttaccacacctgctattcatccccataagagaggagcctcacctttgtataggtctaatttccatatataatggcattgcactgataatatcagcgaccagaacagtagtaggtgctcagtacacatgtgtaatttgaataaatgaatgagtaaaggaatgaattaattaatgaatgaacaaatggagttttaaccagaggtggtaactctggctaggagggtcgggggcctttccaaaggaggcagatgtgagctttttctgaggacaactggaatcagcccagggaggcagggcagggcataggtgggcaagagtgtcccctcctccgtgttccctggccccttccatgccccggtctcctgcttcctctccactctgcgcttgaataggttcaggtgtcccctagcttgaaaaacac

SEQ ID NO: 536602 - DNA, 513 bp, Homo sapiens
cagttgtatgtattgatagtggacaaagtatttccatctatgcataacattgtgggatgagcaaaccaaggtgattgacatgggcattactttacatatatatctttgtgtgkgggtgtctagtgagaacacttacctactctcttagcaattttcaagtatccaatacattgttattcaccataatgactatgttgtgggataactccctgagcttctctgcgcccacccccctatctaaatgacattttgggtcctttcaaatcacccttatttctctcccccagctctagacctacaatctgctcacattggtgaagtgaaagcacctgcaggattgaatttacccagtaggttaggaccctgcatgctcacggaaccgccctacccatcctgcctccccacctggctctgcctcctaaatggatagatacatgctgttctaaagttggccaagctctatagtctccttgggaaaataacaaccttagaacatgggacagccctgtactc

SEQ ID NO: 536603 - DNA, 553 bp, Homo sapiens
ctgagacccagaagtcttgctcttattccttcagcactcactcacccttgctctgtgcaggacagtgtattgggttctgaatgtggcccctagagacagagtgaactctgccctggggctttcctgccacaggaatgggaggggtggtgctgtgtcctctggtcccttgcttgatcccggcacatagtaggcgttcaataaatgcacatgggctgggctccgtggctcacgcctataatcccagcagtttgggaggccaaggyaggcagatcacttgaggttaggagtttgagaccagcctggccaacatagcaaaaccctgtctctgctgaaaatacaaaaaaattagctggccctgatggcaaacacctgtagtcccagctactcaggaggctgaggtgggagaatcgcttgaacctgggaagcagaggttgcagtgagctgagatcacaccactgcactccagcctgggcaacagagcaagactccaactcaaaaaaaaaaaaagcatgttggataaataagaaaagaggatgggacaggagcagctcag

SEQ ID NO: 536604 - DNA, 502 bp, Homo sapiens
atctccactcctgccctccaggagagagagggagagtgacwcagcagcctctctggctgcatcctcagcacaaggccttgtgcctcgagccttgaggaggaatcagagcacggggcctgtggccccagcaggctggacagtggggaggccgcacagggaaacgtcgagaactcagtacccctacttccgcccggccacggccccagtgtagaagccgggactctgctgcgggggggttctgcctggcatgcaggaaagaggccacaggggacagtgggctgggagacccccgggaaggcacacacgcaggcaaactgctggagctgccctacaaacagctgcccctcgtggaagtcgaatccaggggtggtggggacactgatgattctccagatatcccagggagtggaactacctccacctccaagacagagacagcaaagccccagatcaggtctgccaccaagaaaacagatccggctgggcatggtggctcacgcct

SEQ ID NO: 536605 - DNA, 563 bp, Homo sapiens
ctggaaaatacccccaaatatccacctgacattttcagtgtctctgctgggccgggagtagatctggccatgccccactgaatccttcctccctcccactcctaaatatacaaggcagctctctggcttggaaagctagagggctccctgttctgcgagcagctatcctggtaccttcctgatgggaagatgggcacckggctgcccacttgtgagcatctagaccccgactgccaacccaccttctgcggacccagagggctgagatctacacaacaaggccgttcatcaccaaatggagagagaggcaggttagcgaaagggagagcaagaccccagatatttgcctctgctcttcatctggtaaatcacacaaagaattgcagaaagtggcagcctcatccctgagtttccctcagccaaactggggcataggtcttcttacatcgtcttgtttttctccgggaagaatcagccttgagtgtcagacttgaattaccttattcccagggcacacttcctgtggccatttctagtggcaagtggctgaggttgtaccccta

SEQ ID NO: 536606 - DNA, 404 bp, Homo sapiens
gagaaggataaggcagcagaagatttgagcctcgttcaagagagaagtttctttctgccatcaagaacctccttggcctctggaagggaccagagaggccaaggagrgcagcctggtttggggtcaggctcctaggatcaactaggccaggggcaaggcaggctcccgttgaagaaatggaactaaaggagcctgtgggggcgcctgggcgggaggctgttggagccttggctgccgggagagagtcacgctgggtcgcttgttactagggtgcccgagtaaaggagacaaagagaacccaaaggaacccggggtaggggaggctgcaggctcccagacacacggaaatccagggacctcagagggctggcctcccccttcagtatggggccagccagggccag

SEQ ID NO: 536607 - DNA, 371 bp, Homo sapiens
ggtgggggaccctgactcttaggtatttgaggggtcagggggtcctacagaraaacgtgcttccctcctgcttgtgaagcattcaggatgcacccgacgcagggtcagaggtgcggggtgaggagagagtcaccaagcagaggcccgtgggtggggtgttggcaaggagggacaaggcctggtggcaagagccaggggctgacagtattccatgcccaagttccaagcctggttcattctgacgacttcaccgagccttacgtttcctcacctgtaaaacggggctaatggcccctgcctcgtggttggtgcgtgaggcttgtatgagaggcatctataaagcacctggcatacggcgcgtgctcaacagg

SEQ ID NO: 536608 - DNA, 491 bp, Homo sapiens
atgtcccccttctttgatttgcaaatcagtaaaagcaaaggcagctttgtcacygtgagctacttctcacaggagtcaggatccacatctgcagactatacaaaagcacaatcatcattgaaattacagagcttccaagtgtttttatccattttaatgggttactagctgctaatttgtcttcagctcctttaggcactccagttcctggcattaaggtcaggtgttgctgggatgctttaaatatttgttcttttaattttgcagtatccaaagacaaatttgtagagtgtctttctatatgcttttttattctttcccaaattttgatcttattaggaactattaataatttccacaaatccttgtgtttagctcctacagcgggccatatcatttgtggtagaggtgccactatactaccatggctccaggtaataggaactcttgccatacttcttatcatttctaccatctgaccgttttgttca

SEQ ID NO: 536609 - DNA, 623 bp, Homo sapiens
ctgggggtgttatcccgtcaccagggttggtttcccaggtgtgcaacccctgcagtcccatagcatcctgtgtttggaagggtgccacgcctggtttaatgctgcgctgtggctatctgaaaagtcttactaatctttaatcaagagttccttcccacacttcattttgcactgggctgcccaaatttatttatttttattattttttaatagagatggggtctcgctatgttggccaggcagatctcaaactcctggcctcatgcagtgctcctgccytggcctcccaaagtgttaagattacaggcatgagccactgcacccaacccagtcacacacatagtgtagcgggtcccacctttactgggatgctacttcccctcctgctgttcagggttccgctgggaaattcccacctggaccagctacagccccacctgtttctccaataacacgcatctgggctgctgggtgtggatcccttcacaaaggcaccctgcacaggggacacaggtgggagctgagtttcccacaggagaaggcccctgcacagcccagcaagttctgcattcccccagaggagatgccttcccataatctgtcttcccagaagaagcaccttt

SEQ ID NO: 536610 - DNA, 653 bp, Homo sapiens
atattggcctggaatctcttggcctcacatcytccagtccttccctaagacaagccctgcctgtgactcagcctgaggatataagcagaggaggcaaactgctacagaaaacacaggctcctctccagatcgccgcgtggtctctgacaggttttctggtctgtgttctagttacatgggtttcaaattattccttcctttccaatgggtattatcccttacccatctgctggacaagcaatgtgtggcttagaaaagtccccaaggtagaagatgaaatgtaattttctattctctctctcttctttcttttgtagaggcagggtctctctatgttgcccaagctggtcttgaactcctgcgctcaaacaattctcctgcctcggcctcctaaactgctgggatttacaggtgtgagtcaccacacccagcctctatcatctctcaagggtctctattcaccagtaattatccaggcaaagtcacttgtcattaaatgtctctaaaacaatgttgttataaaaatgtgttaaaaaaaagtaaaagagagaattgtgtcctttaaaaaagaagatagcaataaagacggagatgaagacaataatagagagatatctctatgtattagggatgttaaccaaatacacccaata

SEQ ID NO: 536611 - DNA, 653 bp, Homo sapiens
atattggcctggaatctcttggcctcacatcttccagtccttccctaagacaagccctgcctgtgactcagcctgaggatataagcagaggaggcaaactgctacagaaaacacaggctcctctccagatcgccgcgtggtctctgacrggttttctggtctgtgttctagttacatgggtttcaaattattccttcctttccaatgggtattatcccttacccatctgctggacaagcaatgtgtggcttagaaaagtccccaaggtagaagatgaaatgtaattttctattctctctctcttctttcttttgtagaggcagggtctctctatgttgcccaagctggtcttgaactcctgcgctcaaacaattctcctgcctcggcctcctaaactgctgggatttacaggtgtgagtcaccacacccagcctctatcatctctcaagggtctctattcaccagtaattatccaggcaaagtcacttgtcattaaatgtctctaaaacaatgttgttataaaaatgtgttaaaaaaaagtaaaagagagaattgtgtcctttaaaaaagaagatagcaataaagacggagatgaagacaataatagagagatatctctatgtattagggatgttaaccaaatacacccaata

SEQ ID NO: 536612 - DNA, 653 bp, Homo sapiens
atattggcctggaatctcttggcctcacatcttccagtccttccctaagacaagccctgcctgtgactcagcctgaggatataagcagaggaggcaaactgctacagaaaacacaggctcctctccagatcgccgcgtggtctctgacaggttttctggtctgtgttctagttacatgggtttcaaattattccttcctttccaatgggtattatcccttacccatctgctggacaagcaatgtgtggcttagaaaagtccccaaggtagaagatgaaatgtaattttctattctctctctcttctttcttttgtagaggcagggtctctctatgttgcccaagctggtcttgaactcctgcgctcaaacaattctcctgcctcggcctcctaaactgctgggatttacaggtgtgagtcaccacacccagcctctatcatctctcaagggtctctattcaccagtaattatccaggcaaagtcacttgtcattaaatgtctctaaaacaatgttgttataaaaatgtgttaaaaaaaagtaaaagagagaattgtgtcctttaaaaaagaagatagcaataaagacggagatgaagacaataatagagagakatctctatgtattagggatgttaaccaaatacacccaata

SEQ ID NO: 536613 - DNA, 486 bp, Homo sapiens
actcactttccacttccccctagtccccacctctctctacctaccactgaagtcatgtgtccatcaccatttaccgctattatcatttttcttacaaagttaggaggaacatcaaaactttggactcatggctctgtcaaaaatgcacaaatgaaagagactaaaaggattgtatgtttttaaaaatgttttttacccatagcttactttactcatttatggtacattctggaccttggaggcattttaacttgtgccctgtgttagtttcctattgttgctgtaacaatttactagaaacttcaaggcttaaaaacaacatgaatttattatctcacagttgyggaagtcagaactccacaatggctttcgctgggctaaaaggaagggaccactagggccacactgctcctggaggcactaggagagaagccccaatccttgctgtttccagccctagaggctgccacattcccaggttcattc

SEQ ID NO: 536614 - DNA, 510 bp, Homo sapiens
ttctcaattggtgttcaaccacccttatctagaggagacacaggatttccataacaatacctaagaccctcttcctcctcagctccaacacccacctacaagattggcagatcctacataattacccacacagtgagcactttctatttctcctgattcttcattcttcttccctaccagcaagtttatatcctgtcagaaattattatttgtgcttctctttcctgcacctagtccaaagccaaaggtgaaaggtgatgggagtgagcaggaggtcatggagcttatccctgaggacctacatggagggcatcttggaagttcaccgagaagagccggtgggcaggatcaggcaaagtagggctgggccctctgctccctcagctcargagcccttttcctgcctctctagtgggtttcataactccatagaagatgattctgaatgccaaccaaataacttcacacaattagaatggccagccagacctaaaatacagaagtctaaaa

SEQ ID NO: 536615 - DNA, 628 bp, Homo sapiens
tgacccctttgcttttcctatttagcatttatttgaactgaaatttacatgtttggcttcagtccaagaactagcattttgtgagagagcctgaacccagcttattttaagtatataataatgacarctagagggactttttgtctggcatccttcaatttcccagaaagggagaaagggatgtaaacttacctgcttgccccacaaagctattactatcacatgtccagccatctctctcagtgatgtttttcagaaagcaaaggtttaaatgagtagagaggaaaaccttacctgaacaaatgacaattttacaaatgttgagttacatgagttctcaggtgtctgagaagctgggtaaatatgtaccaagcctgaacaatgatatagctgtggtttttccatttgagccagaagatgatggacatctctggatggcactgtatccagtggttgctcccatttcttttcacaaaggaatcacaatgaaaaggcaaaaatggcattttcagtgccttgtttgacagggttagggaggtgggatgggatggccatcctgaccacaggggcatgggaaggagagtggtaaggaggaagaaaacagaattgtacacctgaacacagagtc

SEQ ID NO: 536616 - DNA, 628 bp, Homo sapiens
tgacccctttgcttttcctatttagcatttatttgaactgaaatttacatgtttggcttcagtccaagaactagcattttgtgagagagcctgaacccagcttattttaagtatataataatgacaactagagggactttttgtctrgcatccttcaatttcccagaaagggagaaagggatgtaaacttacctgcttgccccacaaagctattactatcacatgtccagccatctctctcagtgatgtttttcagaaagcaaaggtttaaatgagtagagaggaaaaccttacctgaacaaatgacaattttacaaatgttgagttacatgagttctcaggtgtctgagaagctgggtaaatatgtaccaagcctgaacaatgatatagctgtggtttttccatttgagccagaagatgatggacatctctggatggcactgtatccagtggttgctcccatttcttttcacaaaggaatcacaatgaaaaggcaaaaatggcattttcagtgccttgtttgacagggttagggaggtgggatgggatggccatcctgaccacaggggcatgggaaggagagtggtaaggaggaagaaaacagaattgtacacctgaacacagagtc

SEQ ID NO: 536617 - DNA, 628 bp, Homo sapiens
tgacccctttgcttttcctatttagcatttatttgaactgaaatttacatgtttggcttcagtccaagaactagcattttgtgagagagcctgaacccagcttattttaagtatataataatgacaactagagggactttttgtctggcatccttcaatttcccagaaagggagaaagggatgtaaacttacctgcttgccccacaaagctrttactatcacatgtccagccatctctctcagtgatgtttttcagaaagcaaaggtttaaatgagtagagaggaaaaccttacctgaacaaatgacaattttacaaatgttgagttacatgagttctcaggtgtctgagaagctgggtaaatatgtaccaagcctgaacaatgatatagctgtggtttttccatttgagccagaagatgatggacatctctggatggcactgtatccagtggttgctcccatttcttttcacaaaggaatcacaatgaaaaggcaaaaatggcattttcagtgccttgtttgacagggttagggaggtgggatgggatggccatcctgaccacaggggcatgggaaggagagtggtaaggaggaagaaaacagaattgtacacctgaacacagagtc

SEQ ID NO: 536618 - DNA, 628 bp, Homo sapiens
tgacccctttgcttttcctatttagcatttatttgaactgaaatttacatgtttggcttcagtccaagaactagcattttgtgagagagcctgaacccagcttattttaagtatataataatgacaactagagggactttttgtctggcatccttcaatttcccagaaagggagaaagggatgtaaacttacctgcttgccccacaaagctattactatcacatgtccagccatctctctcagtgatgtttttcagaaagcaaaggtttaaatgagtagagaggaaaaccttacctgaacaaatgacaattttacaaatgttgagtyacatgagttctcaggtgtctgagaagctgggtaaatatgtaccaagcctgaacaatgatatagctgtggtttttccatttgagccagaagatgatggacatctctggatggcactgtatccagtggttgctcccatttcttttcacaaaggaatcacaatgaaaaggcaaaaatggcattttcagtgccttgtttgacagggttagggaggtgggatgggatggccatcctgaccacaggggcatgggaaggagagtggtaaggaggaagaaaacagaattgtacacctgaacacagagtc

SEQ ID NO: 536619 - DNA, 617 bp, Homo sapiens
atttttaccacctgaagtctattccatttaataatctggcactaacttaagcattcttcaaaggtgtcacattctgtctttatctttgacacttatctctcaacatgtttatatttaaaattaagagaatggaaataaatgttatagtttgtatttgtcttttctcagaactcaaaatagtgaattggtttctgtagggagaaatggaaaacctttggagcttctgttatgatctaacccaaacaacctactcttcgcatttgtagtgagatatgattgaaatgtgattcatatgatttcatcaaatgcctactatttgcaattatcaaagtcaaaaatcatagatccctttttaaaggagtctagtctattgttgaggtttcatgttatattttgtactgtagttatctgtctaaaagccatacaattattttgagaaattgtatgctattttaggacgtggaatgattactaacttgggaataaaaaatrtcttcacagaggaggtggcctttgtttgcaggctggaaatctccacttggggatttcatgagaaatataaagtttaaaacataaaatggtggtgaaaaacctgtagacttatagaaaggattcaa

SEQ ID NO: 536620 - DNA, 208 bp, Homo sapiens
cgaacaatgaaaatgtatccttggtaccaagcatcttgctatgttgggctgagaaataagctaagagattagttcaccaaactgttggctcaaggttaacagagatctgagaaaaaatttaacaatttagataccctgcaacaccatcagaaccagctatcagagattcctaatacarggtaaggacaatttatctgctggagtagcc

SEQ ID NO: 536621 - DNA, 641 bp, Homo sapiens
tgtccctgcaaaggacatgaattcattcttttttatggctacatagtattccgtgttgtatatgtggcacattttctttatccaatctactattgatgggcatttggtttggtttcatgtctttgctatcgtaaatagtgctgcaataaacatacgtgtgcatgtgtgtttttagtagaatgatttataatgctttgggtatatacccagtaatgggattgctgggtcaaatggtatttctgattcggaggcatcaccacactgtcttccacaatggttgaactaatttacactcccaccaacagtgtaaaagcgttcctatttctccacagccttgccagtatctgttgtttcctgacttttaataatcgccattctgactggcatgagaggagcaacccacctgccagtctttctcctggaggtttaactgagacgtaattctgagtgtttaatgcagttktcttaaagcaaaatatagcagtgatagcagaaactagatatgtttcatctttgtatctttaatctttaacacagtattggcatgtagtagggttctaatgtacatttttcaaattgaataaaaaaggtataattttggtcaatggaatttgcagtcttgtctcattaatgccactatc

SEQ ID NO: 536622 - DNA, 543 bp, Homo sapiens
ctgagaaatcatcccttttagttgcttatatactttaatactggaaagaagtaaaaagccatgaagggttataaaatacctctccatatggacagtagtgctttgggggaaccaaacagggtagtcatgaggactttttggtgctgggcttatatcaagttgttttcaggttatgctgcagactttacatgacccagagggcttaacccactttcaaagcagatggaagaagatcagatttagggagggagccctcagatagatgagtgagctaggtcattgatctctttaaggaagtagaatcagttgcttcaggggaagacaggttctttatgccttccaaagtgagcatagccaattgcaggttgttccaggcttctggtgaacctcgggtgtattctcaaaattatgtgttgtgaattcttaaggtcactaaagtcattacttcttaataaattaccagtgggtttccaagagatttttaacagggcttctggtctttcagacatayaaatgcagtttaaatactgatgcagttaaaaa

SEQ ID NO: 536623 - DNA, 591 bp, Homo sapiens
tagaagcagctggatagaaaaagttaactattaattaatcataattaagaataataactcatctgactagtactttaccacttcttttaatatgtagcatattattcaattaaaaagcataattttattgtatatatatatatatataacacctttccaatttggaggaattaccaataaaatacaaataaacaaccttaaatttcaacatccagagataactttcttcaagattctttaaaaaatagatatctgggtgcatattttgtttgttttctccctgtatatgtacgtgtgtgtatgtgtgatgctgttcatgtttctttaataatatagcaaataatatcagtaacttttcttcrtgttcacaatatttcgtggtatcccattttgtggttgtgccataaatcatttctttggcgtttatattgactcattcactttgatccctgaggtttttgttttcttgtagcattgcacccatttttttcccctagggggcagtagctgaaccattagttgttctacatctgattactcctcagctcatttgcatgagcctttttctcattataatattattaacacagt

SEQ ID NO: 536624 - DNA, 591 bp, Homo sapiens
tagaagcagctggatagaaaaagttaactattaattaatcataattaagaataataactcatctgactagtactttaccacttcttttaatatgtagcatattattcaattaaaaagcataattttattgtatatatatatatatataacacctttccaatttggaggaattaccaataaaatacaaataaacaaccttaaatttcaacatccagagataactttcttcaagattctttaaaaaatagatatctgggtgcatattttgtttgttttctccctgtatatgtacgtgtgtgtatgtgtgatgctgttcatgtttctttaataatatagcaaataatatcagtaacttttcttcatgttcacaatatttcrtggtatcccattttgtggttgtgccataaatcatttctttggcgtttatattgactcattcactttgatccctgaggtttttgttttcttgtagcattgcacccatttttttcccctagggggcagtagctgaaccattagttgttctacatctgattactcctcagctcatttgcatgagcctttttctcattataatattattaacacagt

SEQ ID NO: 536625 - DNA, 662 bp, Homo sapiens
gttgaattataacatctatgtaatgtttctccaatcctgtgttcttctataggagttaagtgacatctgtttgatgtctctttcaatctgttttggttgaggtaactatcttccctgattaaggaaatgaaagatgagaytgaaacaagctataaactgccaaagtacttaatgctgtgtctacactaattatatacatgtaatatcagacactttgcatgaaaggatgcctgcagtcccagtgtgatctacctcatatggaaatgaagatgtgttcaaagccagggtgctccacggaatggttcttttgttcatctgaattgtcaaactttccatttaaaacattaagtctatttgatgcttctctcttattaaaactagctcctgttttcagtaaataacttgttactgatgatgttagtctttgaatgctcagaatccaggcaaaaatcctccagagaatccaaggtcaatattgatgtgtccaaatagcatgttctgctgttccaaagcaaataagatctgagacccttgggactatcacagtgttgtatttaaactgtaaagtatgtaggtacaacctatgaacagcatcagcaaaactaaacataaaatcccaatttgacaatgaatagatgtgctgagttttatattacactgaa

SEQ ID NO: 536626 - DNA, 612 bp, Homo sapiens
ggggactcaaggggtaagggagagaggggagggataaatgactacatattgggtacagtgtacactgctcggtgatgggtgcaccaaaatctcagaaatcaccactaaatgacttatccatgtaaccaaaaaccacctgtaccctgaacactattgaaagtttttttaaaatcccttttatatgtctatctcattcactctgcctctctggagaagcctgagagacgtaacccccctgcccccccatctgcctgtctatgcttgtgtataaccacccctcacactctgcatcccattcgcactgagatactgctgggtcctcaaacacaccatgctctttcctattcyaagcctttgcatgccgagattctctcaacttcagatactctgtgaaattctcacacattcttcaagattgaaaaaggtcagctcctctttaaagagtgccttgaactctccaaggtaaactgtgaaaactctactaccccattgtaggatgggacccatcttcaaaaccatctataataacagcattgatttgtctagatatctctattctcctacacctcataaagcgtttgggagaaaggacgcttttgtattaacagaacc

SEQ ID NO: 536627 - DNA, 570 bp, Homo sapiens
aaattctcacacattcttcaagattgaaaaaggtcagctcctctttaaagagtgccttgaactctccaaggtaaactgtgaaaactctactaccccattgtaggatgggacccatcttcaaaaccatctataataacagcattgatttgtctagatatctctattctcctacacctcataaagcgtttgggagaaaggacgcttttgtattaacagaacctagcctgtagcctggcacttctgaaagtgattaaatttaattgtatctattcttaagaaagtcaggaataatgctcacaacccacagattcccttgactctactcaacttctcataaatgactcaactttgtagcactatgagcctacttctgagcccaggatggatattcattcaactttctcattgccttaaaaacaagagatgctgtctcccctcacagtttctagagttagacacmttctgttttttatgattgttgcaaagactgaaattctcttcttcctcttccttagtatgatccaaccacacctcctttgatatctcagtatgtgctgcaccttgtaagga

SEQ ID NO: 536628 - DNA, 510 bp, Homo sapiens
ctcaatttcttttttcctttttttttttgagacggagtctcactatgtaggccaggctggagtgcagtggcacaatctcggctcactgcaagctccgcctgccgggttcacgccattctcctgtctcagcctcccgagtagctgggactacaggcgcccgctaccacgcccggctaattttttgtatgtttagtggagacagatatttagtggagacggggtttcaccgtgttagccaggatggtctcgatctcccgacctcgttatccgcctgcctcggcctctcaaagtgctgggattacaggcatgaaccaccgtgcccggcccagattcaatttccttawtcctcaaagtatcaccaactcaaaaattcattcatagacaactttattgatgactccagggaaactgaaatgattatcttgtctctcagtagatgactttaaaataggacattagccagtcctgtctaaaattattccagccccgtaggaattggcaacttctcag

SEQ ID NO: 536629 - DNA, 470 bp, Homo sapiens
ttagttattaatctttatgattataaaggaaaagtattcttaagtgatagcactcagactgccagataatttcaaactagtgctttaaagtcagaaaaaatctgatttagagctaaaacgtaaaggggaaaaaagaaaaaggaaaatcttcctcagacattmtccaaccttctctccccaagcttctactttaattgcaaacactgctgtgagaactatcaatttcagtctttctttctcaaccaaaaacacttttaagccaaagtaaagttaactcaagcgagaggggaaagtttaaaaacattccttctaatattaaaagccatgttgagaacatacttgcaaaacaactcctacctaaactcacttgtctcaaccaacagaaaaaaaaaaagtttgattttgaagtgctacaagcaaaatgcacttcctctcatgtttcttgtttgtatgtgtgcacacataccctg

SEQ ID NO: 536630 - DNA, 609 bp, Homo sapiens
ctcaaagatgaccattggtgtctctgaaattcctgtaggccctggaatccaattcacatgggcctggattcttgaggccacttgaaatgactaggccctccctcactaacttcttgcctatccggcactgaaatttcctctttacatggtttgttcaaaaccctctttaggttaagcaccagattttcttttgactagcacagaggtagaacagtcactggggatttctgctttctctcttccctttcccaagcaatactctttgcttttctccttgtttcaattataccttaaaaaagctgacgctggcgacgcctgtaatcccagyactttgagaggccgaggtgggcggatcacgaggtcaggagattgagaccatcctggctaacatggcgaaaccccgtctccactaaaaatacaaaaaaatagccgggcgtggtggcgggtgcctgtagtcccagctgctcgggaggctgaggcaggagaatggtgtgaacccgggaggcggagcttgcagtgagccaagatcatgccaaggcactccagcctgggcgacagagcaagactccatttcaaaaaaaaaaaaaaaaaaaaagctgacgcatacag

SEQ ID NO: 536631 - DNA, 609 bp, Homo sapiens
ctcaaagatgaccattggtgtctctgaaattcctgtaggccctggaatccaattcacatgggcctggattcttgaggccacttgaaatgactaggccctccctcactaacttcttgcctatccggcactgaaatttcctctttacatggtttgttcaaaaccctctttaggttaagcaccagattttcttttgactagcacagaggtagaacagtcactggggatttctgctttctctcttccctttcccaagcaatactctttgcttttctccttgtttcaattataccttaaaaaagctgacgctggcgacgcctgtaatcccagcactttgagaggccgaggtgggcggatcacgaggtcaggagattgagaccatcctggctaacatggcgaaaccccgtctccactaaaaatacaaaaaaatagccgggcgtggtggcgggtgcctgtagtcccagctrctcgggaggctgaggcaggagaatggtgtgaacccgggaggcggagcttgcagtgagccaagatcatgccaaggcactccagcctgggcgacagagcaagactccatttcaaaaaaaaaaaaaaaaaaaaagctgacgcatacag

SEQ ID NO: 536632 - DNA, 618 bp, Homo sapiens
gctgcctgttaattttcgagagtgggttgtgatggttatgtttatgtgcccacttcgctaggccatgatattcagtcaagctttctagatgcttgtgtgagctatatttacgtgaggtaaacatttaaatcagcagactctgactaaagcagattgctctccaaaatgtggtgaccctcacccaatcaattgaaggccttaaaagaaaaaaggctgagctgttttgaggcagagggagttataccagcaggctgccttccaacttgagatgcaacatcttgtccctgggtcttcagcttgcaggcctaccctgcagattttggacttgttaacctccataatcatgtgagccagccaattcttcaaaatcaatctgtctctctctctctacacacacacccacccaccctttcagttctgtttttctggagaaccctgactaattgatgggtagcctttaatatgcttcattgtcaaacccatgagcggcttcrtaaaaacaatctgggatggcaaggaagacttttttggcttggttcccaaatttggctttgacctttgcctagactttggcccctgaattcccccatgaaaaccctgtgactgaccctcaggacc

SEQ ID NO: 536633 - DNA, 614 bp, Homo sapiens
attccgggtcatgattctttaccaccagggccattgcatccacttcagctcgggcagcatttgcccccagccctttcctccttttgtctccccaggctccatcctctgccctcactggcaccaagcaatgctgcccatgctgttgrgcaatggacgggactttggctgggctggatgctgccacccaatctcattccctgccctggtcttggctccctccctgattatcctcgtccttgagcccctgaagggctctttattctccaccacctcggttcacaagctggacctgtgaccccctgaggattcccaggactgaccctgcacgccccaggattctatttgtatgtccatatatcctgtgtcttgtgtgtccatacatcttccatccctctccttggaaaaccctgccaaatgaccacctccatgcaggtgatcctctcttctgagcttgtcagcaactgcttgatatcttcttctgggcgcccactggctcctcatctgtaatatgtctcaaactcaccttctcttttccagttctcatattctgttctatcacttccccctgttcaggtctcagggtcttttccacacagcctcttcttcctaaaatg

SEQ ID NO: 536634 - DNA, 614 bp, Homo sapiens
attccgggtcatgattctttaccaccagggccattgcatccacttcagctcgggcagcatttgcccccagccctttcctccttttgtctccccaggctccatcctctgccctcactggcaccaagcaatgctgcccatgctgttgggcaatggacgggactttggctgggctggatgctgccacccaatctcattccctgccctggtcttggctccctccctgattatcctcgtccttgagcccctgaagggctctttrttctccaccacctcggttcacaagctggacctgtgaccccctgaggattcccaggactgaccctgcacgccccaggattctatttgtatgtccatatatcctgtgtcttgtgtgtccatacatcttccatccctctccttggaaaaccctgccaaatgaccacctccatgcaggtgatcctctcttctgagcttgtcagcaactgcttgatatcttcttctgggcgcccactggctcctcatctgtaatatgtctcaaactcaccttctcttttccagttctcatattctgttctatcacttccccctgttcaggtctcagggtcttttccacacagcctcttcttcctaaaatg

SEQ ID NO: 536635 - DNA, 614 bp, Homo sapiens
attccgggtcatgattctttaccaccagggccattgcatccacttcagctcgggcagcatttgcccccagccctttcctccttttgtctccccaggctccatcctctgccctcactggcaccaagcaatgctgcccatgctgttgggcaatggacgggactttggctgggctggatgctgccacccaatctcattccctgccctggtcttggctccctccctgattatcctcgtccttgagcccctgaagggctctttattctccaccacctcggttcacaagctggacctgtgaccccctgaggattcccaggactgaccctgcacgccccaggattctatttgtatgtccatatatcctgtgtcttgtgtgtccatacatcttccatccctctccttggmaaaccctgccaaatgaccacctccatgcaggtgatcctctcttctgagcttgtcagcaactgcttgatatcttcttctgggcgcccactggctcctcatctgtaatatgtctcaaactcaccttctcttttccagttctcatattctgttctatcacttccccctgttcaggtctcagggtcttttccacacagcctcttcttcctaaaatg

SEQ ID NO: 536636 - DNA, 549 bp, Homo sapiens
tcagaaccatatgtcagatccagcaaaatcaaaatgcaggggctacttctacccttaaaattgttcttgcaagtcattcaaaagaaccactaagaaaggaaaaaaataattctctgtcatttcctgtataatttaaatatctcataatcatttttaagcaataatattagcctcaaaggcagcttggggacatggttggaataatgccactccaaaatttttagaaaatgagatctgtaaactagtattcatgttctctaacatatgtaaccacaggacacaggcaattcacttgagaagcccaggccatagatggaaagtaaaataaatgggaaacaatacccagagagcatgaaccctctagagaacagttacggrgtgttaaatacatagccagagggtttctctgctgatagagcccctttcatactagcaggcctcccagtcatctcattttaaggcagaacttgaaaagaatgttagtactatgcagatatttcccactaacttgctgtaaaacattattccctcaaaacattgtggggcaca

SEQ ID NO: 536637 - DNA, 630 bp, Homo sapiens
tgtctgaggttatcctgaaagcagctgcacaagctgagggaggaagacactgttttttaatggtaaatactgcccctcacatacgcaattcaagcctttgttggcaaaatctaagtacaaaagaatttaactcccccaaaagccaaatcacagccattatttttgcaaaacagaagatatcccagtgcaatgtgtaagaaagagaatgcaattaatattttacaccactcactcccctaaaacaaggggactgccgggctccgatgaccagaccacagcttcacagccccagatggatttcgactcagccctggttttcctccgagagaactatacaaacagcttcttgtatttagcatgttggcctgtttagtcatcaaatctaagcactgatgatgaggtttttttaaatcaaatgtgtcataaatgtggtyattctcaaagacccttccaaaagaatctaatcatttcccctagtcctgaagcgatgtctctatcatcccttagaaatcggaccttaaaaccacaagcgacggtcgtttttctcaattaaaaacgagcaacatggaaaacgtttcatttaccttagctcccgaggcttggtccgaggagcgtggttttcccctctcc

SEQ ID NO: 536638 - DNA, 513 bp, Homo sapiens
cagctacaatgaaaaattactctcactaccatatcttggggaaggagcgctctagttgcaaggaatttgtaaataaaggccgagagactctaacaaacaagatggagaacaaaaacaaagattccattaaaaaatttgttaagtgaaaaaccaagaccatctcagtggacaaaagagccagaactcttcctcgtagagccggccgtggggaccgcactgccgcccaaagagtggcgatttgaggtccttctccctggagagtgaatagctggagttctgagaatggtcaccttctctggagctgtgggtttatttcttstgatacttgaacaaaggagggccatggttttcttgttaagagcacaaaaaaatgttcttttaatctagaatgtccatgattcagggaaagagggaatttgctcatactcatggcaaaagcatttcccagctcatggtgaatccttaactctcctgcttggtgacagctgtgctgccctgggtcctggataaacc

SEQ ID NO: 536639 - DNA, 622 bp, Homo sapiens
tttacagtgagaaaatgatttcatctttttgggcctcagttgctcagccttaaagtggggataacaactattggattgtacatgcatgcctaatgtttgtgacagcacattgttaattatggagtgctatacaaggagtgggaatgaacagaaaacaatgaccaccactgtttattgagcaactactaaacactgtgacctaaaacattacatgcataatctccattcctcataacaaagaacatgaagaaagaatcatgaaataagaatggcaaagggaaaaatctctggatacaaccaactgtgactctattaagcaagaacttcatgagcaatcctaagcgggggaaattttttgagggagggttggtraatccttttttggaatttctaactttcatgaagaacctattaaagagatggtgactattctaaattgcggtttaaaattcattaacaaggatttactgcgtgcttaatgtgtgtgacccagaagtgcatgcacatgttacaataagtttctaaagaaaccagccactgaacgaatgtgagagcctgtgcgttacctcactaattctggaagacacttttcgttgttcgttaaggcttcctgtggccacag

SEQ ID NO: 536640 - DNA, 553 bp, Homo sapiens
agggagtcatccatagcaaaaaacactgagagactctagtgctctggtctccagaaaagtttcaggaaactagatttttgctaagtaaacttaatttcttgtcttcttcttctccttttccttttatctaaaaagctacattttctgttttacaagatccacaagcaatttctttcccatgatagcatcctagtttctcacagaaaaagtagtttctctctcttttataagaaagcataatctccattatttcagacatccccaaatcacaatagtctgaattgtcagagttttmgctgtcagaagattacacaaacacgcatatacacacagaaagtggaagaaatgtaaaagtcttattagttcattctttattaaacatttaataaccacttataatataacagagtccaggtggtatcatttatgaagaaaatgctaaagaaaatagtgcaaaggaacaaaatgatagtttcagagatttgggtgtattaagaaatgaagagaaaatgatgctgtttattgcaaatctgtatgggtttaattaaaacag

SEQ ID NO: 536641 - DNA, 614 bp, Homo sapiens
cttcctttcccccaggcatgggagctcacccagaagaccttcgcctacaccaaccacacagtgctcccggaagccctggagcgctggcccgtggacctggtggagaagctgctccctcgacatttggaaatcatttatgagataaatcagaagcatttagatgtaagtcattttgagagattttctctgttcatgagcataagatcttaaggtgttacagatggctacagtgttccctcttaccaaacatctttcaatcattgatacagcaaaagtactcaagtccgaacggggctccarcaaaggcagctttttgaaagtgctgaaatggagggatggcacctccatagagctaactcaacccctccctgtggtagtgaagtttatattgagtacaccaaagattttgcttaagacatgaacagcgttatcccaatgttgcattaaacctgagtgaccagcaagggctttctcttcctttggctagagaattgtggccttgtttcctaaagatgtggaccgtctgagaaggatgtctctgatagaagaggaaggaagcaaaaggatcaacatggcccatctctgcattgtcggttcccatgctgtgaatggcg

SEQ ID NO: 536642 - DNA, 614 bp, Homo sapiens
cttcctttcccccaggcatgggagctcacccagaagaccttcgcctacaccaaccacacagtgctcccggaagccctggagcgctggcccgtggacctggtggagaagctgctccctcgacatttggaaatcatttatgagataaatcagaagcatttagatgtaagtcattttgagagattttctctgttcatgagcataagatcttaaggtgttacagatggctacagtgttccctcttaccaaacatctttcaatcattgatacagcaaaagtactcaagtccgaacggggctccaacaaaggcagctttttgaaagtgctgaaatggagggatggcacctccrtagagctaactcaacccctccctgtggtagtgaagtttatattgagtacaccaaagattttgcttaagacatgaacagcgttatcccaatgttgcattaaacctgagtgaccagcaagggctttctcttcctttggctagagaattgtggccttgtttcctaaagatgtggaccgtctgagaaggatgtctctgatagaagaggaaggaagcaaaaggatcaacatggcccatctctgcattgtcggttcccatgctgtgaatggcg

SEQ ID NO: 536643 - DNA, 435 bp, Homo sapiens
ctctcgcctgttcccggcccctactggctccgttgagcagacagccccaggctcaccttgccccctgcagccagagtctttgcagcagtggctccagatgggccgctggtgccatcatttccactaccatgttacttttttcttcctcctctgttggtcccatctctgttctggttttctgctcttctgtttactacctaatggaacgcattgcttatgttttactcttctcgtggtactgaagttaatggaacttstaattcctcatatttccttataggagtgaataagtgatttgcaagaaatcattttattttctagaaatgaggtccctttattcctccctctgctgtaggcattaatcttttgcctatctattcaactcactgagaagaaaggagggcttgctattgaatccagatttctgattatgaa

SEQ ID NO: 536644 - DNA, 435 bp, Homo sapiens
ctctcgcctgttcccggcccctactggctccgttgagcagacagccccaggctcaccttgccccctgcagccagagtctttgcagcagtggctccagatgggccgctggtgccatcatttccactaccatgttacttttttcttcctcctctgttggtcccatctctgttctggttttctgctcttctgtttactacctaatggaacgcattgcttatgttttactcttctcgtggtactgaagttaatggaacttgtaattcytcatatttccttataggagtgaataagtgatttgcaagaaatcattttattttctagaaatgaggtccctttattcctccctctgctgtaggcattaatcttttgcctatctattcaactcactgagaagaaaggagggcttgctattgaatccagatttctgattatgaa

SEQ ID NO: 536645 - DNA, 442 bp, Homo sapiens
ctgttaaagctgagtgactaatttcacacttatgtacgaatgacccataactggcttaatgctgtgaccatcttgggggtattcaaagctgataaacacttttttaagttatataataatcaaagaagcttatctttctgctttatttcaaatttcaccccacaggccttacttatttttaagatcaatgattttgatgggcccccccttcccacycttaattcagggtatttctggccccatccggatccaaactctaatgctcatctcttccatactgtcctttgcaggtcatcggtattgcaagagttgcataaggcccaattcagtctctgccccaaaagctcaagtccaaacttcagaatctgggaggacaaggattcaggaaattttgtcagaactatgagctttgaactttcacttttatggtgagggtcacatt

SEQ ID NO: 536646 - DNA, 683 bp, Homo sapiens
tcacgtggttattttgctttccagaagtggtaaaaccggcagcctgaggctgaataaggatagcagacatactttgttggccaagacatttttcaggaatttaatttttagcgcctgtggtcaggacttgcacactccatttcttagcccagtactcttctttgttttatgtgacctcaattacacatttattttctctgcctagctcctgaaggcatttgagtatatgatcccrtctcattctgtgcattgtggtctgctcaagcttcctaaagcaacgcatcttgcccctgctcaattatcattggctcctcttgcctgccatagaacttaagcaagtattcgaaagcacttctcagtccaggtgggcctgttcttcccttgttatcttccattaccctctgtacccaccttgctctcccaacaaaccaatccccactctgggcccccgattcacttgcagtgtccttcctaccacatttctatgctcaactcttgcctgtcctgcaagtctcaggtttattgacaggtgttccagaggtcttcccggaagtacccaggccctctgactaatgctggggataaaaataaaacatacaatttaaaaatatttgttatatcttctttattttattttacaagccttttgaaaatatccactttttacataaaatactagtaat

SEQ ID NO: 536647 - DNA, 683 bp, Homo sapiens
tcacgtggttattttgctttccagaagtggtaaaaccggcagcctgaggctgaataaggatagcagacatactttgttggccaagacatttttcaggaatttaatttttagcgcctgtggtcaggacttgcacactccatttcttagcccagtactcttctttgttttatgtgacctcaattacacatttattttctctgcctagctcctgaaggcatttgagtatatgatcccgtctcattctgtgcattgtggtctgctcaagcttcctaaagcaacgcatcttgcccctgctcaattatcattggctcctcttgcctgccatagaacttaagcaagtattcgaaagcacttctcagtccaggtgggcctgttcttcccttgttatcttccattaccctctgtacccaccttgctctcccaacaaaccaatccccactctgggcccccgattcacttgcagtgtccttcctaccacatttctatgctcaactcttgcctgtcctgcaagtctcaggtttattgacaggtgttccagaggtcttcccrgaagtacccaggccctctgactaatgctggggataaaaataaaacatacaatttaaaaatatttgttatatcttctttattttattttacaagccttttgaaaatatccactttttacataaaatactagtaat

SEQ ID NO: 536648 - DNA, 627 bp, Homo sapiens
tgagaattttcttttgcaatcaaagtctttgacagcattcctcacagattacatttcagaaattagtgtctgaacaagccttttaaaagtacttgagtcttctgctatcagaatcacaatctttactttgggcttctatctcatttttaagaaatgatcaaactttgttattcatgtatcaaggcaatttgtgaaaatgatcagctttaaaaattctgttgtcatactttctctgttgcttaatgagatgtaaaatacacttcctccttaaaggagaascttgaagtcttaaccctaatgtgctaagttgttttcatgaatatatttaactttttctttcctgagcttcaggcaccttcatacccaaaacaggtagcccttaacctttttgatgtggttgaaaggagaaatgtgtatttgcaaagacacattctaaatgagagactgttcaaacttttcatttcctttgccatgggattgtcccctcatgtgtccttcgctcaagaacaaatacgtctacaaccaggtcatagctaactcacatacatgtgggttaggtggagtatttcctgtgaaagaacccctgcaggtcctctccatgtcccttccctctccttcccctaatat

SEQ ID NO: 536649 - DNA, 581 bp, Homo sapiens
aaataaattcaagagatctattgtacaacatcatgactatagttaataatcaatatattgcattcttgaaaattgctaagagtatattttaagtgtgctcattataaaaaataataaatgcatgatgtaatgcacatgttatttagcctgatttagccattccacaatgtgtacatatttcaaaacatgttcacagtaaatatatacaaattttattagtcaattaaaaacataaacacaaagaggaaaaagaaaaagaaatgataacaaacatttctacttagaacatgttgagctttgtagggaagaaaataatatttatgtcaactattaagaaagaaaaccaacactgcagggcagcaaacaaaagagacacattttaattggggtmttaggaattgcaattgaggagacacaggtatagcaagcagctaaatcattttccatcagtataggttgggcaggagcttagaaaggtttaccgtaagtttttatatctgaaaggttttagcagtccatgatcaatgatggctgtttaataccttaagttttctttagctaatgatacatctagttcatca

SEQ ID NO: 536650 - DNA, 581 bp, Homo sapiens
aaataaattcaagagatctattgtacaacatcatgactatagttaataatcaatatattgcattcttgaaaattgctaagagtatattttaagtgtgctcattataaaaaataataaatgcatgatgtaatgcacatgttatttagcctgatttagccattccacaatgtgtacatatttcaaaacatgttcacagtaaatatatacaaattttattagtcaattaaaaacataaacacaaagaggaaaaagaaaaagaaatgataacaaacatttctacttagaacatgttgagctttgtagggaagaaaataatatttatgtcaactattaagaaagaaaaccaacactgcagggcagcaaacaaaagagacacattttaattggggtcttaggwattgcaattgaggagacacaggtatagcaagcagctaaatcattttccatcagtataggttgggcaggagcttagaaaggtttaccgtaagtttttatatctgaaaggttttagcagtccatgatcaatgatggctgtttaataccttaagttttctttagctaatgatacatctagttcatca

SEQ ID NO: 536651 - DNA, 581 bp, Homo sapiens
aaataaattcaagagatctattgtacaacatcatgactatagttaataatcaatatattgcattcttgaaaattgctaagagtatattttaagtgtgctcattataaaaaataataaatgcatgatgtaatgcacatgttatttagcctgatttagccattccacaatgtgtacatatttcaaaacatgttcacagtaaatatatacaaattttattagtcaattaaaaacataaacacaaagaggaaaaagaaaaagaaatgataacaaacatttctacttagaacatgttgagctttgtagggaagaaaataatatttatgtcaactattaagaaagaaaaccaacactgcagggcagcaaacaaaagagacacattttaattggggtcttaggaattgcaattgaggagacacaggtatagcaagcagctaaatcattttccatcagtataggttgggcaggagcttagaaaggtttacygtaagtttttatatctgaaaggttttagcagtccatgatcaatgatggctgtttaataccttaagttttctttagctaatgatacatctagttcatca

SEQ ID NO: 536652 - DNA, 284 bp, Homo sapiens
gaattccattatggatctggagaaaataaacaaattcatcattctaaataaagaggacataaccatctctttcactgggctactaaggtatctgcattgtacatggataaaaaaattctttcaaccacatacaattgttagtctcaaaatagttttgaaaaaacttagctataatttccagcatgttcaagaaaccagcttaaccctacaaaatyctatttcaattccatttctgtgtctctgccaatggattatgtgattatgtatgaggctgcacaatgaag

SEQ ID NO: 536653 - DNA, 615 bp, Homo sapiens
attatgtgtatggatgaatgatcaacatctctgacactgcttgcaaatcacgttatttttaaggtacaaaatatttaatgttctcatgaacatgacagtataaacattttgaaaacatagtaataagataatatacttttttttagaatagtatacaaggaaatagacttttctatctgatgttctcgtaggcctatttattgcagtaatcacagcrgcacttttgctgacaaataattctgtaaacatattatttcactttgtaaataaattcaccagaatggtcactacaatgtcttattggtttctgaacttctcaaagaatgcattttttattattaaatttggattatttacaatacaacaatagaggatggggcaaagaatttttattaattatgtattaacatcttgaatataaacacattgagaaaaaatgacaagtaataatctcttctaactggtctatagttttagtgttactgatcattattcaatagcaaccagtcacatcacatttttctcctgaaaatatggttggtcttgtccttctctagtgtttagtctcttttccttcacactaatgtagtgaatcttgcacttgtctctgaccaa

SEQ ID NO: 536654 - DNA, 561 bp, Homo sapiens
aaggttgccacatccaaaagatagaaaaaaaaggctcatgtgacagatgaatatggggctggagattgcggaaagacaaagatcatgtagatttggatgtataatccatggatatcagtaccagcattgaggagagcttgttgtattccccactccagaactacaaaattagaatccgtaggggtggttctggaaatccgtgctttaccaaactttccagattttcatgcatcctaaagtgtgaatcagcatgggtatatgtacaattttgggagtgattacttagatgatggttgattttggaatttagtgtaatttaagagacatatctttgaaaagaggttacaacaaggaatttatgggtctttaaaaatactctggtttctgtaggaaggcactattgaaacaagagataccaggttgaaggcaattacaatattgtaacygacaaatgattttggcatgaactagattggattcattgatgataaaaaattgtattttttttttaaagattgaagggtgaattggatgctgggtaagagaaaatactagaaacca

SEQ ID NO: 536655 - DNA, 620 bp, Homo sapiens
ctgctttaaaattagcaaatgtcttgaggggagaatatatgattttcttctatgggtttttttctttctggattttggcctttagatccttgctaccttgcatctctccaacacccctgactctcctgcccatacattaataatgacataacatcttaagaaagtagtaagtagtgtctgccccaaataaatgtggaagaacctttaatttttactaatttttacacagtagcttcttgcatgattatctgaaccccaaatatattattctttcctgcrtctgcattttttcatgttccctcgtccaagattgcctttttccctctcttctacccaaatcactaagattaagcaaatatgttagtacttagtcactttgcttatattgttcctctttcctcaagtttctgttagcacttagtacatttctaatcacatatctccttatttatttatttatttatttttcaagtaggcaatggttttcttagaagggacatgagtatcaacaataaagggaaataataaatgcgactttatcaaaatttaaaactcttattcattaaaatacactactaagattaacaaacaaggcaaagtccaggagaaagtatttacaa

SEQ ID NO: 536656 - DNA, 604 bp, Homo sapiens
tttgctggaagtgattcaaagccagagaccttactttactatttttattgttgctcatatgacttcctcaagctgatagacattaggcatactgattttattggaaatttttaaaaatgtttgggcaaaatgtacgattctataacaagtgggaatcattgaaggtcatttaattactctgtttcctttggtgttttcaattkacatttcttctttaaatcaaataactaaacctatcctgtttttcagggatttctttcctatgaacctgacaagtggctgtaggtgttctcctctgaaatcaatctcactctctctctttccagaacatgaagtttaaagttaatcacaaaccagagtaccataatttttcatggtcacagcacaaaacaacatcacaaataaatgtaaaactcttaactctggcctagaaatgaattaactaaaattcactttatgccgaaaggataaaggtaataatagttgcattttctaggccagggaataacaaaatgcctggagtacatgaatattctcaagacaaaaactacatttgcttcagactcacaaaaaagttcagagattttaagcctttgaagcaagg

SEQ ID NO: 536657 - DNA, 547 bp, Homo sapiens
gctttgaaaccaattgatatccgctgccttcttgctagtctctacygagccaatctagtctagttcctagatccattgcattgatttcttatcaggtgtggctgatgaatgtatccttggttttccaggaaactttcagagcttaatggctttctttgatggttaaaccaacaaatttttggaacttttagatgtgacatagcctgcagactcatgtggtgcctcaaacagcctatacctgacaccagctaatctgttacctttcagctacttgcactggggtttagcacttctgtctggagtgtctccaaaaggcaaggtgatattttgaattatctctgggatatggggtaaattatggatccctttaagacatttaaccaccattctcagcaaactatcacaagaacagaaaaccaaacaccgcatgttctcactcacaagtgggagttgaacaatgagaacacatggacgtagggaggggaatatcacacactggggcctgttgggagtggtgggctaggggagggatagcattaggagaaat

SEQ ID NO: 536658 - DNA, 547 bp, Homo sapiens
gctttgaaaccaattgatatccgctgccttcttgctagtctctactgagccaatctagtctagttcctagatccattgcattgatttcttatcaggtgtggctgatgaatgtatccttggttttccaggaaactttcagagcttaatggctttctttgatggttaaaccaacaaatttttggaacttttagatgtgacatagcctgcagactcatgtggtgcctcaaacagcctatacctgacaccagctaatctgttacctttcagctrcttgcactggggtttagcacttctgtctggagtgtctccaaaaggcaaggtgatattttgaattatctctgggatatggggtaaattatggatccctttaagacatttaaccaccattctcagcaaactatcacaagaacagaaaaccaaacaccgcatgttctcactcacaagtgggagttgaacaatgagaacacatggacgtagggaggggaatatcacacactggggcctgttgggagtggtgggctaggggagggatagcattaggagaaat

SEQ ID NO: 536659 - DNA, 547 bp, Homo sapiens
gctttgaaaccaattgatatccgctgccttcttgctagtctctactgagccaatctagtctagttcctagatccattgcattgatttcttatcaggtgtggctgatgaatgtatccttggttttccaggaaactttcagagcttaatggctttctttgatggttaaaccaacaaatttttggaacttttagatgtgacatagcctgcagactcatgtggtgcctcaaacagcctatacctgacaccagctaatctgttacctttcagctacttgmactggggtttagcacttctgtctggagtgtctccaaaaggcaaggtgatattttgaattatctctgggatatggggtaaattatggatccctttaagacatttaaccaccattctcagcaaactatcacaagaacagaaaaccaaacaccgcatgttctcactcacaagtgggagttgaacaatgagaacacatggacgtagggaggggaatatcacacactggggcctgttgggagtggtgggctaggggagggatagcattaggagaaat

SEQ ID NO: 536660 - DNA, 595 bp, Homo sapiens
atctattaatctactcttggaggataagtgaatggaagcaattaagagtaatcctaaaatctctgggtttttgctatattttcctttttttaatttcacaaatcacccagtagcaacatgaaaaattagaaattaaattgtaaaatcgaaaattgacaaaactcgaaaatgactgctatccccacccaatcaaatccagtaaatatcaarcaagtgtgtggaacaaatagaaacaggagacctagactttcagacatgctaggattgctcaggaaatcaacaccagtgttgtcatatagaactatgcgacttactattttatttaaatatatttaatagacctgtttatatgactcattatgaattttcaaaacataactcaaagttaatggcacacactgaagtgcacaatcaatgatgacttcttttgctatatttggaaaggggtatgtagacttgtattaggaacttttctggtcccagtttgatttcaataagaagcaatagaagcaaagatgaataagagatgccacatgtacagtaaactgcctgctggtaatgtgaacatgagtattatgagcaatggtgtttattt

SEQ ID NO: 536661 - DNA, 595 bp, Homo sapiens
atctattaatctactcttggaggataagtgaatggaagcaattaagagtaatcctaaaatctctgggtttttgctatattttcctttttttaatttcacaaatcacccagtagcaacatgaaaaattagaaattaaattgtaaaatcgaaaattgacaaaactcgaaaatgactgctatccccacccaatcaaatccagtaaatatcaagcaagtgtgtggaacaaatagaaacaggagacctagactttcagacatgctaggattgctcaggaaatcaacaccagtgttgtcatatagaactatgcgacttactattttatttaaatatatttaatagacctgtttatatgactcattatgaattttcaaaacataactcaaagttaatggcacacactgaagtgcacaatcaatgatgacttcttttgctatatttggaaargggtatgtagacttgtattaggaacttttctggtcccagtttgatttcaataagaagcaatagaagcaaagatgaataagagatgccacatgtacagtaaactgcctgctggtaatgtgaacatgagtattatgagcaatggtgtttattt

SEQ ID NO: 536662 - DNA, 567 bp, Homo sapiens
aattacaaaaggataacaggaatgaagcaacacatgagcagaattcagaggagaaacaggagagagttgcttacttatattaacagaaatcaaatacacctaccatgtactctcaaaaattaaaattttaaaaawtaaaataagaaaatactgttaacaacaacacaaaatagaaatcaaattggaatcagcctcacagaataaaataaaatcatggaaaatagtagtgacaaggatatcaggattgagaaaaacaagcaaatgaaatggaaatgaaataaataaaatgagctaaaaacaaaattatgaacatttaagacaaaatagaatggatatatgtaattggtgggtgtttgtttgtttgagacaggatttcgctctgctgcccaggctggagtgcagtagtagaatctcagctcactgcaacttccacctcctgggctcaagcaatccttccaccttggcctcccaagtagctgggactacaggggcccgccatcgcgcctggctaatttttgtatttcttgtagagacgtagttttgccatgttgcccaggctggtctcga

SEQ ID NO: 536663 - DNA, 321 bp, Homo sapiens
taaaaaacaaaagatgttctaatataatttgaaatcgcttgcattgttgcatgataaagctctcctcatcactgtctcaggttgccagtatagttggctgaatgcagttgcccagtaaaaatagctttttatgaaaattgggctagaactcaaggattacatttgagattccacacagaagcatacaggcagcaagcaagggtggtgcaatccctaaattaaatgaattctaggaaaataagagtttagrgtcagatgtaagcatgaaaatataaactcttcacccaagaggtatttggaaaagcagcttatgtgcaatga

SEQ ID NO: 536664 - DNA, 569 bp, Homo sapiens
tttatgagttcatcactgtttattgattaataggatttcactatctgagactgaatgtttaaaacagagtctatttggccagacgcggtggctcatgcctgtaatcccagcactttgagaggctgaggctggcagataacgaggtcaggagatcgagaccatcctggctgacacagtgaaaccccaactctactaaaaatacaaaaaattagccaggcgtggtggcgggcrcctgtagtcccagctacttgggaggctgaggcaggagaatggtgtgaaccagggaggcggagcttgcagtgagcccagatcatgccactacactccagcctgggtgacagagcgagactccatctcaaaaacaaaacaaaagaaaaacaaaaacaaacaaacaaacaaaaacaaaaacagagtctaaattattttaattcaaaataagtgatgctaatgagaaattttagataatagtttatggaagatatcatggggaagatatgggttgacaggcaggctttcccctttcctctcccaaaacttaccacataagtggcttcctacttccccatgct

SEQ ID NO: 536665 - DNA, 569 bp, Homo sapiens
tttatgagttcatcactgtttattgattaataggatttcactatctgagactgaatgtttaaaacagagtctatttggccagacgcggtggctcatgcctgtaatcccagcactttgagaggctgaggctggcagataacgaggtcaggagatcgagaccatcctggctgacacagtgaaaccccaactctactaaaaatacaaaaaattagccaggcgtggtggcgggcacctgtagtcccagctacttgggaggctgaggcaggagaatggtgtgaaccagggaggcggagcttgcagtgagcccagatcatgccactrcactccagcctgggtgacagagcgagactccatctcaaaaacaaaacaaaagaaaaacaaaaacaaacaaacaaacaaaaacaaaaacagagtctaaattattttaattcaaaataagtgatgctaatgagaaattttagataatagtttatggaagatatcatggggaagatatgggttgacaggcaggctttcccctttcctctcccaaaacttaccacataagtggcttcctacttccccatgct

SEQ ID NO: 536666 - DNA, 569 bp, Homo sapiens
tttatgagttcatcactgtttattgattaataggatttcactatctgagactgaatgtttaaaacagagtctatttggccagacgcggtggctcatgcctgtaatcccagcactttgagaggctgaggctggcagataacgaggtcaggagatcgagaccatcctggctgacacagtgaaaccccaactctactaaaaatacaaaaaattagccaggcgtggtggcgggcacctgtagtcccagctacttgggaggctgaggcaggagaatggtgtgaaccagggaggcggagcttgcagtgagcccagatcatgccactacactccagcctgggtgacagagygagactccatctcaaaaacaaaacaaaagaaaaacaaaaacaaacaaacaaacaaaaacaaaaacagagtctaaattattttaattcaaaataagtgatgctaatgagaaattttagataatagtttatggaagatatcatggggaagatatgggttgacaggcaggctttcccctttcctctcccaaaacttaccacataagtggcttcctacttccccatgct

SEQ ID NO: 536667 - DNA, 569 bp, Homo sapiens
tttatgagttcatcactgtttattgattaataggatttcactatctgagactgaatgtttaaaacagagtctatttggccagacgcggtggctcatgcctgtaatcccagcactttgagaggctgaggctggcagataacgaggtcaggagatcgagaccatcctggctgacacagtgaaaccccaactctactaaaaatacaaaaaattagccaggcgtggtggcgggcacctgtagtcccagctacttgggaggctgaggcaggagaatggtgtgaaccagggaggcggagcttgcagtgagcccagatcatgccactacactccagcctgggtgacagagcgagactccatctcaaaaacaaaacaaaagaaaaacaaaaacaaacaaacaaacaaaaacaaaaacagagtctaaattattttaattcaaaataagtgatgctaatgagaaattttagataatagtttatggaagatatcatggggaagatatgggttgacaggcaggctttcccctttcctctcccaaaacttaccacrtaagtggcttcctacttccccatgct

SEQ ID NO: 536668 - DNA, 639 bp, Homo sapiens
cagtcaagtttcctcccttcatagaaatttgctgggaggaggcaggtgataaataaatatacaagataattttagctggtggtaagtattattaaaaataaataaataaaagggcacactggtttctcaggtggttgcttggccttcttccaagtgtgctttccttgctttctttcctttcctcacagttttaaagctttttaaataaactttcacccctgctctgaaacttgccttggaaaaataaataaatacataaatacataaaaggcttatataagttcaagtagctgagtaaaggtatgaggggctatttagggaaagatctctctcacgggaagacatttgagataagacctgagtgatgaaaaagagctttattttaacattctggaaaaggcaaaactatggagacattgaatagagaatcagttgttaaggggaaacgggagggaagaatgaataggcagagcagaggggtttcttttagagcagtgagaccatgttgtatgacactaccatggtggatatgtgtctaaacctrtagaaagtacaacagcaaaagtgaaccccactgtgaactatggactctggatgataatgatgtgtcagtgtaggttcatcaattgtaacaaatgt

SEQ ID NO: 536669 - DNA, 530 bp, Homo sapiens
cctttttccagtcttttcagttaatggcctctttcctaactataacaatttccttccccaaaaacactttttattacccaaaagatcacaataaatttatctataacattcatatttcatatcagaatgmctgtgtaatttaggcatatctgatgtttctgtttttaaaatgcaggatatgctactgccctcaggatattcaagtttgtatatgtggcctttggctacactattaaacaaatggacagcattaatcagagactccatgcaacacattttcagaggtatgatgacctggctaacctttgaaggcattggcactacatactgtagaatattcttatttcaaaaatgagaaggaagactcttccggttctgactactcacagcagcccagaaaacccacacaaatacccacggggaattataattaaccttaatgaattgccacattccaggctttcaaaggtcttatcctgaaacatcactgctcttcatagtgcacccctgtatctggaggcgtatacaat

SEQ ID NO: 536670 - DNA, 617 bp, Homo sapiens
aaactataagctccaaaagacagggggaatcagttttgttcactgttcattgggcaagtaagtacagcacaaagctaagagcataggttctgaaggtggactgcctgggttcaaattctactttgctaattcatagcctttctgaccttgacttctctgacttcaatgacatctatatgaaatatgaaaagaaaatgtacttacttcaaaggtttttaggaggattaaataaagatataaagtgctttgtataaacacacaataaataytagcaattattgttttagtgcctagcatatagtaagtactgaacaagcatttgttagaagaatgatttcctcaaagagtagcatttataaaaaatgtcaaaactagctggagattatctataagattaagaaatgacctttacctgcaagagatttataacctcaagtcaattgtcattgctgttttaatctattcactcattttgggttaacttcccaaatagctttttaaactcattttgggttaacttcccaaataactttttaaactcttcatcaccttaagccctcaaaggaacacccacagccttcactttatagtacatcaaaacaataaaaagtattttt

SEQ ID NO: 536671 - DNA, 617 bp, Homo sapiens
aaactataagctccaaaagacagggggaatcagttttgttcactgttcattgggcaagtaagtacagcacaaagctaagagcataggttctgaaggtggactgcctgggttcaaattctactttgctaattcatagcctttctgaccttgacttctctgacttcaatgacatctatatgaaatatgaaaagaaaatgtacttacttcaaaggtttttaggaggattaaataaagatataaagtgctttgtataaacacacaataaatactagcaattattgttttagtgcctagcatatagtaagtactgaacaagcatttgttaraagaatgatttcctcaaagagtagcatttataaaaaatgtcaaaactagctggagattatctataagattaagaaatgacctttacctgcaagagatttataacctcaagtcaattgtcattgctgttttaatctattcactcattttgggttaacttcccaaatagctttttaaactcattttgggttaacttcccaaataactttttaaactcttcatcaccttaagccctcaaaggaacacccacagccttcactttatagtacatcaaaacaataaaaagtattttt

SEQ ID NO: 536672 - DNA, 621 bp, Homo sapiens
tggcctgggttgtaagcaaatgccttttagttttactgtttctgcctttcccatcaggctatcaactatcactgctattttgaaggctacctccagatctgcctcttttctagtttctagtttcttgcctgttatgagctggataaccatataaccgagcttgttaaaattgagtattaaaggaaagtcaataagaagtcctggcccgagaagttaagtgcatgcctttgtaaccgctatgtcagcytaagaggctgtttttttttcttacttctaagtttgggctgagttttcaagggtagaggttgtcagaaattccacctctgaataagtggatcattactatcatttaaggcatagttggtatcattctccttcataaaattgacacaataaatgccttgaaattgataccatgagcatcatgtttgaacttaaaatgggagtcaaagccccattttccaatatatctaggttattttcagatatctacaaaaaagcaagcatgccattagaaagcaatgggtttttctttctctctgctttcattgacaaaagtatattttcatttctctttcccatgagaacactgacttcagttattcagagttcagatttttg

SEQ ID NO: 536673 - DNA, 631 bp, Homo sapiens
agctgccacctgacccatccactcttagtacgtcttcctatctatgtttattctcccttttcttctatcttattctacctctactctgaaaatacagatggacctcagcagatgmaacaagagacacttaaaatgtcaggtcacagggaaaggttactcagcagggacatatcctactccaacatgccctacctagcttgacagaagagttgaaaaggttgccaacgcctgttagacaatcttacaggaatgaaggcacttttatctcttttagccaaaggatcacaagaaactgaaggtcaggtttttaatagaagatgaaggtccacttcattatgagtttcaaacacagaagatcatagtaccacaacagcaacgtgagaatctcagaacaaagtaaactgccatatttcccatagggagtttcccaagcataattgttagtttcatagtccttgaggttttgagatgcttactaatattttcatgggggcacctttctttgaaattacaacccctagtcctttatcacttaaggacaggagtgcttaactattatgtagtcaaaacagtggcattcagaaatatcctgttagtcttacagataaaatcagttgaactttagacagta

SEQ ID NO: 536674 - DNA, 649 bp, Homo sapiens
agagtaagaaaaaatattttataagataaaattttaaaattaatgattcatatttctgcactcagccacaatgaaataattggtagcaaacttgtcctcctaacagctagtgcaattagagcagaactaccctctcaacaactaaaaaattggattggaaaacagacagtaaaggactatgtttcctgaaagaataaaaataaaaaagatgagcccaacaatcagcatgtttttttgytgtttttttttcccctagattcacttattgagctgcagtgtaagaagcaggagtctaagcacagtatagcagctttgctgaacagaggaaatagagataagagttcaggaatgctgtggtgactggaattggatctatttcagactttggtcaaatatacagctacatgagagtaaagttcaatgaggcttagcaaaagacagttaccagggaaataacatcattatggagacataagatgtaagttcctagaattcaaacaggattaatatgtatctgatttcaagaagccagagcagtgagatctcagtaaggattcaggtcatccagtagaaatcccagaagaatcacacattactagtagggcttaactaccactacagtacaggctactttggagtctttcattaa

SEQ ID NO: 536675 - DNA, 428 bp, Homo sapiens
aagcacagtatagcagctttgctgaacagaggaaatagagataagagttcaggaatgctgtggtgactggaattggatctatttcagactttggtcaaatatacagctacatgagagtaaagttcmatgaggcttagcaaaagacagttaccagggaaataacatcattatggagacataagatgtaagttcctagaattcaaacaggattaatatgtatctgatttcaagaagccagagcagtgagatctcagtaaggattcaggtcatccagtagaaatcccagaagaatcacacattactagtagggcttaactaccactacagtacaggctactttggagtctttcattaaaaaccttaaaaagaagtcttgaaaggataaaactgagctgcaaataatttaactgctagacaaaataaaatgc

SEQ ID NO: 536676 - DNA, 428 bp, Homo sapiens
aagcacagtatagcagctttgctgaacagaggaaatagagataagagttcaggaatgctgtggtgactggaattggatctatttcagactttggtcaaatatacagctacatgagagtaaagttcaatgaggcttagcaaaagacagttaccagggaaataacatcattatggagacataagatgtaagttcctagaattcaaacaggattaatatgtatctgatttcaagaagccagagcagtgagatctcagtaaggattcaggtcatccagtagaaatcccagaagaatcacacwttactagtagggcttaactaccactacagtacaggctactttggagtctttcattaaaaaccttaaaaagaagtcttgaaaggataaaactgagctgcaaataatttaactgctagacaaaataaaatgc

SEQ ID NO: 536677 - DNA, 554 bp, Homo sapiens
ggcaatccagggacatgaaaaagcagtataaggaaaaggtttagttttatgaacatacagaggtgtgtggttagaaaatgcccctggggctgggcactgtggctcacgcctgtaatcccagcactttgggaggccggggggcgggggttgatcatctgaggtcaggagtttgagaccagcctggccaacatggkgaaacctcatttgtactaaaaatacaaaaaatcaactgggcatggtggcgggtgcctgtaatcccagctactcagggtgctgaggcaggagaatagcttgaacccaggaggtgaaggttgcagtgagccgagatcatgacactgcactccagcctggcaacagagtgagactccattaaaaaaaaaatgtccctggatatttccttttttttcttcttcccttttcctttcctccctactgccttccttcctttcccctcctccttccttaatttctttctatggaacataggaacatttacagaacattctatataggaaaaaagagaatgagataaactatttcagatatgaagagtt

SEQ ID NO: 536678 - DNA, 523 bp, Homo sapiens
gttctgagagctcgtaagacaccttaacgtagatggaggggtgaggaagtcagrctgaagaggtgacaccgggctgagatgtaaagatatgcaggagtgggccgagtgggctggagagaagagtttgctgggcagaagaacaggacgagcataggctctgtggcaagaggggaaatgacactccaaaccttctgggaaaaggccagtggaggtagaaccaggggcctgggagattgtggtttgagataagaaagtgttaggcagggttaaattacccaccaccttggccacactgattgagccaggtatcaacacctggccaaaagacaggctcctttagactcctccgccaggtcatcataaggtgacctcgagtgacaccagatagttattgccagaaccaatcaatgcctctctcttggggagtttgaacgtgaaatagacagggagaaaaagactcaggaatagagaaaaacagactgacagataaatagaatacagtggcaatgcagaaacagacata

SEQ ID NO: 536679 - DNA, 511 bp, Homo sapiens
caagttgcaaaatatggagaccttctcgtttactccaggataaagatacttaggaggcttgaggaagcaaagaaaatggtttctggggctacatgtgaggcctcatggagaactggaacgtggttcaggatgaagcagcagtttctccagcagcctgccatttctgaagcatctcctccactgagtcctttctctacttgctkcttcttcttaatcttctgctagcagatgcctttctatgcctccattcatatcctcttctactgaagtcattacttgcttcatagtgtctgctcactgccttctttccacgtctctcagtttctgtgtcaacactggactgctgtctatcagttgtctgcttttctctaactctctgttcatctctgtccctagttcaaatcccccaagagtggctttgactggttcagaaagtccctatccagtgccaccttaggccacctcctaggggctaaaagcctaaagcagtgtgtcttttggtcagttgtta

SEQ ID NO: 536680 - DNA, 609 bp, Homo sapiens
cttccctgtctcctctgacccacgtcagcccctgtattttgacacaactctattacctgtcatcttggccacaatctgcacttattaccattgtttcatgctgggccagtcttattagccaataagattgtaaattttggggagcagtgacactgggttgaattttgtttcwggctatttcaggacagacaaactgggagagctaaacacctagaaccacagcctggtctccctagtcgcggtaggtccgtcacttcatccctagaaagtgccagtttggctttacgagtttctaaaccattcattgggaatagtttacatgttatgcttgccctcctttgtcaatctctttactgctactgcagttgggtccagatattgcaaatcctccccgaaagtaactaattctgactgcattgtcacaaacttgggtttagcacaagagggaaaggtagctgagtttccaattctgcttctctttgactgtagctcaccatgctgcaggcccttcctcccatgatggtgctaaccaacataagccctaagctctaatctcaaccctctcccaaatcccaacatgtcagactaaataataataaggccacaggg

SEQ ID NO: 536681 - DNA, 552 bp, Homo sapiens
tgctaaaagtttacaaacattacttcaattaattcttataacaccaccaggaaatcggtactattcttcttctccattatgaagatgacaaaagtgagaaayaaagaggctaaggaacttgcccaaggtcactctgcaagagaataacaatgtaggacaaaatttgagagattcaaatgtagtaacatgggggtgtggagggagaatcattttgagccaagtgtctggcatgaaactgtttctgcccttaagtactctttttcttgttgtaactctagttagaacactttcacctgtaatgactattttaattattggtttctttactgatatttggtgcagaagggagataagcaaaacttcccataaattatttagtacactacattaagagtcattttccaaactacaaattaggttttgctctttgctccattccaattatggccaaggatttccagggatcaacataaattcagtgatgcacaggtctgtggagaacagttgggaataagctgcccctcaattgctggagtgtgtgttccacccctc

SEQ ID NO: 536682 - DNA, 552 bp, Homo sapiens
tgctaaaagtttacaaacattacttcaattaattcttataacaccaccaggaaatcggtactattcttcttctccattatgaagatgacaaaagtgagaaataaagaggctaaggaacttgcccaaggtcactctgcaagagaataacaatgtaggacaaaatttgagagattcaaatgtagtaacatgggggtgyggagggagaatcattttgagccaagtgtctggcatgaaactgtttctgcccttaagtactctttttcttgttgtaactctagttagaacactttcacctgtaatgactattttaattattggtttctttactgatatttggtgcagaagggagataagcaaaacttcccataaattatttagtacactacattaagagtcattttccaaactacaaattaggttttgctctttgctccattccaattatggccaaggatttccagggatcaacataaattcagtgatgcacaggtctgtggagaacagttgggaataagctgcccctcaattgctggagtgtgtgttccacccctc

SEQ ID NO: 536683 - DNA, 621 bp, Homo sapiens
gactgagtactctggtgatttaaaggtgcaagtccttaccaatcacctttcctgattctctccttcttcttttcccaaggcctctgtttagaatgtacttcacctttgttgtctgcctgagaagttcccattttcccctcaaaacccagcttcaatgcctcctgcttaggaaaagcttcctgccccttccttgctgctcacacagcaccctgcacacatttctacttggctatgactattgtactgcattgcttcacttctccttgtcctcctttagactttctctaggtcaggaataaatctgattcycctgtttcccagtggccaacacaaaatatggaacagaagaggtaccaaagcatgtgtaatgcatggatgaataattgaacaaatgaatgttgatatcacttgaatttcaggtctatttatttcatctctgaattaaggaacctctgctaggccttagttttggcatctgtagaatgggaatatctgcttatcagaatcgttaccaggaatacataagagaaaaggatggtgggacaaaaggtgtgtgtgtgtgtgtgtatatgtgcacatgtcattaggatagtttccttctcccaagatgtgtcaataaga

SEQ ID NO: 536684 - DNA, 581 bp, Homo sapiens
gggattttcttggactgcagatcaatatttccccagacaatcctaaaatcacagaatcacagaacatcagtgcttggagaaacctgtgcaaacacttagtcaaagcccttcattttataaatggggaaacattttataaattttataaatggggttccgagtggggaaggggcttgcccaaagtcataaccaggacactggtttcccaggcctgcactttttccttttcaccactctgcctcctggatgcatataccatgaccacccttcccaactccccaggccccagcccacccacaatgcctaggcagtggcttgctcatgggggtgttcaatatgtatttgtggagaatcagggagaaatsaggccaggccaagtgatcccagaggactcacaaatgtcttcaacaacaaaaacataaaattcctcccctaaaggcaattcaccatgtaaacttttcatcgacaatgctttagatggaaaggatgttaaaaactctaatctactctaatctagagcagaaaacatgtcttattttctctgtttctcctctgcctactcactcagaactggcactcag
